United States Patent Application Publication US 2017/0114356 A1 - sequence listing, part 67

SEQ ID NO: 93931 - DNA, 1456 bp, Zea Mays
atatacatacagttgcaagggccaagcggctataaatacgtgtttaggtgtatcatggtgataacgcgccaatagaacaagaggaagttgttgccctagctagctagtgtagagtgtgtagacgaagccacacaccatggccgcagacgaaggccaggtcttcaactactgcaagctcgcgcaggccgcctacgccgcctacgacgaccacaatggcacctgccgctactccctggccgacatgctgcccgccgtcggcctcggcggcagcggctacgtggccacctcgttcatctacgccaccgtcaacatcttggccggcgacggcgtgaacgagggaaacgacgacgacggttgccagcacgagcagcactggatcggatacgtggccctcgcgaccgacgccgagcgcgaccgcgtcgggtaccgcgacatcgcggtcgtgtggcgcggcacgtcggcgctggacgagctgctcaaggacctgcaggcggtcctcgttccgatccacggcgagcagcaggccgggacagtgcgggtggagaggggcttcgagagcctgtacacgtccagctgcgaggcctgcgccatgcggaccagcgcgcgcacccaggtgctggccgagctgacccggctggtgacgtacgtgaggagcaggcaccccggcgagaagatccgcgtcacggccaccgggcacagcctcggcggcgcgctggccctgctggccgcgtgggacgccgccgcccccgcggcggcgctcggggtggtggccgccgtcagagccgtgacgttcgcggccccccgcgtcggcaaccaggcgttctgcgacgagctcgtggccgggcagcgccacgtgtccgtgcagcgcgtcatcgtcgaccgcgacgtcgtgcccacgctgccgccgactttcttcgggtacgcggacgccggcaccaacgttcgcctgcttagctcaggcgggtcagggcgcttccccctgccgttccttaccttgctcgagccattgcgcttccacagcatcaagcagtacctgcgcctcctagacccggcgccggcgccgccgcaggcgcgggcgccggtgccggccgaccatctcgtccctgtccctgaggccgagctggataatatgatctgacagacagatgttcgtggtgtggctttgttcggttcgtgtgttgagctactgttacgtacgtttacatccactactggatcgtatgcgttcttcggtgtggttgaattgttcgtgtctcgtgtgagttgaaaatctgttttgatcgagtcttttgaagtttgatgacaacaataatcggaacttttttttgtaagatctgtggcacgtttgtttatgactttatatctgcgatgaagaagtcgagtagctggtggaaactgacaaacgaagtaaacagatgatgctgagacagcaataatataatgcacacttgccaac

SEQ ID NO: 93932 - DNA, 1167 bp, Zea Mays
gtttgatttttttctcctacatttcttatcaagatttgcaatcctgaagtttccttttgaatgaagtagacataaaaaaatcaaaagaagttcacatgagtattgttttcggcgagaactgttcctttttccatttgacactagcagaagtctcttactctctagagccccagatgaagacatcatcgactatgggtgtatctcctactagccagcctttaaactttaatcattctctcctcaagaaccacacaatacagatgagccaatcagtcctcaactcttcttcaggaatcaaaacaagcttatcattggtttatgtgtgcacccaccattttaactctcaccaaacctctaatcttttcagtttaggccacctaccaccttaaaggtctatacgatgatgtcaaaatcagtgtaagctcaaacagcgccggtgagaagccaatgctctagatgtggcatctaaatagcacgtgtccgaagggtacaatcccaatcataagaaataagaaggatgacttgctccgagcagctccattaagcggtatggcaggaagtgacatactgctccgaacctagtgtttgtttgttttaacatgttttgtgaggatggtcaccaagtatgtccacatggtttgttttgctgaaattgaagagctcggtagctacattgatatgttgtgattactaaactattgccattgcttgatgcagcatgccatagcgtatgccgagggcgataaataatatggtgcaaaatccagcattaatgtttgggagcacaagattcagcaggctaacaaatttggcttgtcctagctctggatatttgggggttcatttaaggaggatgtcaacagtatagaggctggttgatagaaatagaataatgcgtaccaggccacagggtgctagatgttgtgctctggttttgttcacataaacaccaagatggctatcgcgactagcattctcaacatctcgaactacgcaggctcccaatgtgacatcagcatcttgatctagaaggttagcatttagcaattaaagcgctccttccgcctcagcatattatattagtttgtatatacaatgtacatatacaatctacaacatatatatgaatagtatatctgaaaatatagttgctacttatattacaaa

SEQ ID NO: 93933 - DNA, 111 bp, Zea Mays
atttattgttggggtgctcttttcgatggtttcaattcacaattattttttaaaatttacagcatatatatagtcatgaaatctagaaggaccctccatttgtatcttgct

SEQ ID NO: 93934 - DNA, 120 bp, Zea Mays
ccaccgttctcattcccatgtctgtcattctcattctttattctgtctttctcattccctcctcccgcagagctcattccaattctcattcccccgtacagcccacgtctagctaaaatt

SEQ ID NO: 93935 - DNA, 317 bp, Zea Mays
ccccctcctttcctctccctttcctcattgccaccgtgcgccattgcgaaagaaagtagccgccgtgcttgttcccagaccaccgcgccacccgtggccgaattggagtgcagggagtttcgcctgacaccactggtgccgctcatcacatcgctggacgagaagggcccctggacctccataattgctcgacggaggccgctactgccgccaaaccccgtcgtcggctctctgcaccgatcaaccaccgacgaacaagccactgtggattctggtgagcagcaggttgaagtagctgagcaggagctcattgaagg

SEQ ID NO: 93936 - DNA, 1896 bp, Zea Mays
atgggcggaggagggccgcacagtgcagaactatcagctcaatcacgtcgtcagggagcttcggaagtacagtcgcttgaaacacaccatggagatggtccaggaatccaggattactccaatgccaatgatatgcagcttgcacttgcacatagaagaaactgcacttacctcgatgggaaggattttgttgattttggaagcattgattggggaagactattgagaaatcatggcatttctgattctgaaaaggtgctcattttctttgatgaccaccaaagtgagttgaaaaggttaaagcaagcgctaaaggctggattcaggcatctcatatttgaggacaactatgatactggtacatgtgaccattatttcttgaggcatatctatgatccgtcatatatcagaggctgccggcgtgaagcattagccaccgagtgctgcacgccaacagccaacagggggtaccgtgcaggtgggcagaagcagccagcgacaacagtagggcacagggatttatatggaccttccaaatacactagacatttgcaagcaaccaaagatactctcagagaagaaggggacataactcctccaacagggattaggcaggctatggagatgcaggctgaagtagaaaggagaatatgtgcccaatttgatcatctgctttactgcagtcgagcagcggaggaacccggcgctcaggggacagccaactgtcgtggtgcagtacaatggctggaaaggcggcggcttgattgccgtcagctacgaggctcgtggatttggtccatgcacggagatgaggccaagagggtctgtcctggtattaatcttgttcaggtcccagtggcgcgtggcaaggctaaccttaatctttacagaagtgctggtgctgaggttgttgtaatccttgcaagcaaagggaagtgcgagcgggcatccatcgacgaagtttatcttgaccttactgatgcagcaaaggaaatgctcttacaagctcccccagattcaccagaggggatttttatggaggcgacaaagtcaaatatcttgggccttccggctgatgccagcgagaaggaaaagaatgtgagggcatggctttgtcaatcagaagctgattaccaggacaagttactggcatgtggagctataattgttgcacagttacgagtcagagttctggaggaaacccaattcacatgctctgctgggattgctcacaataagatgttagctaaacttgtcagtggaatgtacaagcctgctcagcaaacagttgtcccttcttcatcagttcaagacttactagcatcactacctgtgaaaaagatgaaacaacttggtggtaagcttggaagttccttgcaggataatcttggggttgagacaattggtgatctcctaagttttacagaggaaaaattacaagagcagtatggagtaaatactgggatttttgctgctgaaaccatttcagggtttggaaaaggttctggacggacacatggtcaaagtctgcaatgatcagtacagtttgactgacaaatatactgatggttggctgtcttcagattgtagaacaactctttttaaataaacacctcaaggagtaaagctgacacccatccacgatcatcacgctgcttgtgacgatcgtcgttctcttctgtcgctaaaacgtagtgagttctctgcttcgtcgagtcacgccctcatgggctgctcgtgttcattgttgtttgatctgtcagaaaaatcccacatgtatttgtttatagatagattacactaattattaaaacggatgaaattcattcacgctgcaaagttgtacatagtgcgttggaatttatttgaaagtaaagctgtacatagtttttgact

SEQ ID NO: 93937 - DNA, 1644 bp, Zea Mays
acttccaatctctaccttgggcttccaaaaaaaatttgccgttcatccaagcaggccggtccctggcccacatgccgcgcgcacgcgcgcgcacacacgccgacacgcggcacggccagtagggcaggcgcgggccgtgtgtgtgagaaggagaggacggcaccgcgcagcgccgcagcccatccatccaatacgcccaccagccaccacacatcctctctcccttccagtcccaggagcgtggcctcactctcctcgtcgcatcccccctcctcatcttcgcagcgcgggcggcggcaatggcgatggcctccacctacgcgccgggcggaggcgcgcgggcgctcgcgcagggtagatgcagggtccgcggtcccgcggggctgggcttcctcggcccctccaaggccgccggcctcccccgccccctcgccctcgccaggcggatgagcagccccgtcgcggtgggcgccaggctgcgatgcgcggcgtcgtcgtcccccgcggcggcgcggcccgccacggcgccgcgcttcatccagcacaagaaggaggccttctggttctaccgcttcctctccatcgtgtacgaccacgtcatcaatccgggccactggaccgaggacatgcgcgacgacgcgctggaacctgccgacctcttcagccgccacctcacggtcgtcgacgtcggcggcggcacggggttcaccacgctcggcatcgtcaagcacgtcaacccggagaacgtcacgctgctcgaccagtccccgcaccagctcgacaaggcccggcagaaggaggccctcaagggggtcaccatcatggagggcgacgccgaggacctcccgttccccaccgactccttcgaccgatacatctccgccggcagcatcgagtactggccagacccacagcgggggatcaaggaagcctacagggtcctgagatttggtgggctagcttgtgtgatcggcccggtctacccgaccttctggctgtcccgcttcttcgccgacatgtggatgctcttccccaaggaggaagagtacatcgagtggttcaagaaggctgggtttagggatgtcaagctgaagaggattggaccgaagtggtaccgcggtgtccgaaggcatggcctcatcatgggctgctccgtcacaggcgtcaagagagagcgcggtgactctcccttggagcttggtcccaaggcggaggatgtcagcaagccagtgaatccgatcaccttcctcttccgcttcctcgtaggaacgatatgtgctgcctactatgttctggtgcctatttacatgtggataaaggaccagatcgtgccaaaaggcatgccaatctgagtgaagggaatgagctgcatggaagagaggatagccaacgtctgaattttactcttctctatattagacgcttcctgcctgttttgtattaatacctcttgttttccttctgctatttacttcttgcactgctgttcctgtttgtggtaattaataatactaagacatcgatgttctcctgtttcttgagcatgactggttgcagtggaacctcgaaattaaattatatgatgtgtaatttagttggttaaattatataaatttgtatagtttatttggttcctggttcaac

SEQ ID NO: 93938 - DNA, 971 bp, Zea Mays
acttccaatctctaccttgggcttccaaaaaaaatttgccgttcatccaagcaggccggtccctggcccacatgccgcgcgcacgcgcgcgcacacacgccgacacgcggcacggccagtagggcaggcgcgggccgtgtgtgtgagaaggagaggacggcaccgcgcagcgccgcagcccatccatccaatacgcccaccagccaccacacatcctctctcccttccagtcccaggagcgtggcctcactctcctcgtcgcatcccccctcctcatcttcgcagcgcgggcggcggcaatggcgatggcctccacctacgcgccgggcggaggcgcgcgggcgctcgcgcagggtagatgcagggtccgcggtcccgcggggctgggcttcctcggcccctccaaggccgccggcctcccccgccccctcgccctcgccaggcggatgagcagccccgtcgcggtgggcgccaggctgcgatgcgcggcgtcgtcgtcccccgcggcggcgcggcccgccacggcgccgcgcttcatccagcacaagaaggaggccttctggttctaccgcttcctctccatcgtgtacgaccacgtcatcaatccgggccactggaccgaggacatgcgcgacgacgcgctggaacctgccgacctcttcagccgccacctcacggtcgtcgacgtcggcggcggcacggggttcaccacgctcggcatcgtcaagcacgtcaacccggagaacgtcacgctgctcgaccagtccccgcaccagctcgacaaggcccggcagaaggaggccctcaagggggtcaccatcatggagggcgacgccgaggacctcccgttccccaccgactccttcgaccgatacatctccgccggcaggtctcttctcgtcctcccctgccgctcgattcgctactgtccgtgtataccatcctgtgcgtattgtgaatatgttccaaat

SEQ ID NO: 93939 - DNA, 1529 bp, Zea Mays
agtgatcccgttcctattctgctgttactttgtctccgcaggccccacattctccgtctcgccacggtcgcggtcgtggtctcgctccggcaaacccaatggccgccgccgtccccaacggccacaccgccgccgccggagacgacgacgcaccacccgccgcttcgtcgtcgttggtgttcctgggcacggggtgctcgagcgcggtcccgaacgcgcggtgcctgatccagccccccgacccaccctgccccgtctgctcccagtccctttccgtcccgcccgagttaaaccctaactacaggtgcaacacttctcttttgattgactattgccaagatgaacgtgcacataagtatattataatagatgttgggaagacattcagagaacaagttctgagatggtttgttcgccacaaaatcccttgcgttgattctattcttctgactcatgagcatgcagatgcgatcttgggccttgatgatgttcgggtcgtacagccatttagtcccacaaatgatattgatccaaccccaatttatctctctcaattcgctatggacaggtgatccatggtgaagactacatttgtttgggtttccttttcggaaggaaatcaaaagttgcttacatatcagatgtttcacggtttcccccaagcacagaatatgcaatttcaaaatctggaggagggcaacttgatttgctcatcttggattgcctatacaggacgggttctcacaatgtgcacttgtgttgggaccagacactagatgctgttaggaggatttgccccaaaagagcactgcttattgggatgacccacgagatggatcatcacaaggacaaccaaacattggaagaatggtccaggagggaggggattgacgtgcagttagctcgtgatggcttgcgtgtctacattgatctgtagccgtgaaaggaaaatatgccatactcagcgaaccgcgccaggctttctggctgatgtaacatccattcccacttgtgaagaaagtgcaaactgactaaaaaggcgagcctatttggtgcatcattttacgtttcgctagtttatacgtgaatctctgaataaaaaagagaaaaagaaaagaaaagagagagagtagccacttgctagtagctggttcagtgccccggcaaattaatggccatctccctggtaaaggtagtcgaatgttcttgtaatcttgtcaattggaagctacactgcactggatgcatgcccaccagtcgaactgagcatgcgattttttttccctcggtcgcgcccgggtcatgtattgtagtataccgtaagaggaaagtcgattgagcatgttcgtggcgccagaccgagccacacgatctccaagactcttgcttgtgaagagcacgcagatgactcctactctaggttcaccaatgtttgtcgctcaaactttttaagtttgactagatttataaaatatattagtaatatttatatcttcaaataactttactataaaaataaattcaaaaat

SEQ ID NO: 93940 - DNA, 1696 bp, Zea Mays
attctgcgcacctcctcccagtgatcccgttcctattctgctgttactttgtctccgcaggccccacattctccgtctcgccacggtcgcggtcgtggtctcgctccggcaaacccaatggccgccgccgtccccaacggccacaccgccgccgccggagacgacgacgcaccacccgccgcttcgtcgtcgttggtgttcctgggcacggggtgctcgagcgcggtcccgaacgcgcggtgcctgatccagccccccgacccaccctgccccgtctgctcccagtccctttccgtcccgcccgagttaaaccctaactacaggtgcaacacttctcttttgattgactattgccaagatgaacgtgcacataagtatattataatagatgttgggaagacattcagagaacaagttctgagatggtttgttcgccacaaaatcccttgcgttgattctattcttctgactcatgagcatgcagatgcgatcttgggccttgatgatgttcgggtcgtacagccatttagtcccacaaatgatattgatccaaccccaatttatctctctcaattcgctatggacagcatctgccaaaagttcccctatttggtcaaaaagaaattaaaggaaggggaggaggttagacgagttgctcaacttgaatggaagataattgagagtgatattcagaaaccattcacaacttcagggctagagtttgttcccttgccggtgatccatggtgaagactacatttgtttgggtttccttttcggaaggaaatcaaaagttgcttacatatcagatgtttcacggtttcccccaagcacagaatatgcaatttcaaaatctggaggagggcaacttgatttgctcatcttggattgcctatacaggacgggttctcacaatgtgcacttgtgttgggaccagacactagatgctgttaggaggatttgccccaaaagagcactgcttattgggatgacccacgagatggatcatcacaaggacaaccaaacattggaagaatggtccaggagggaggggattgacgtgcagttagctcgtgatggcttgcgtgtctacattgatctgtagccgtgaaaggaaaatatgccatactcagcgaaccgcgccaggctttctggctgatgtaacatccattcccacttgtgaagaaagtgcaaactgactaaaaaggcgagcctatttggtgcatcattttacgtttcgctagtttatacgtgaatctctgaataaaaaagagaaaaagaaaagaaaagagagagagtagccacttgctagtagctggttcagtgccccggcaaattaatggccatctccctggtaaaggtagtcgaatgttcttgtaatcttgtcaattggaagctacactgcactggatgcatgcccaccagtcgaactgagcatgcgattttttttccctcggtcgcgcccgggtcatgtattgtagtataccgtaagaggaaagtcgattgagcatgttcgtggcgccagaccgagccacacgatctccaagactcttgcttgtgaagagcacgcagatgactcctactctaggttcaccaatgtttgtcgctcaaactttttaagtttgactagatttataaaatatattagtaatatttatatcttcaaataactttactataaaaataaattcaaaaat

SEQ ID NO: 93941 - DNA, 3095 bp, Zea Mays
cgaaccttgacgcgctccctctcgtactgggaagcggtccctaccaactggcggcggcggttcataccctcgcgaagaccactagggccgccgccggcgaatctcaagttctcaacacctggcagaagcaaatcggcgtggcactcgccgggcaccgctcccttctccctcctcccacttcccagttctcgatcgtctcaactctgcgggctgcggttccgcctccgcctcctgacgacctcgcccacacgaccgctgcccgcttcgctcgtcgcccacaccgccgttctctcccccgggtgcccataaacccccttctccgcgccatcgttggcccggcgtaaccatctccgctgcggggacgaggaggagcaagcaaacaggaagcagccgagtatcttgccagtatattatatgcgttgaggtggcattgctgatgaaagtgaagacatgaggcttgaatgaaccctaactgcccccgccaaccgccgccgccgcagcagtcaccgactcctccagtcaaatcagccatgtcgccgccgccctgtgacgccctgcccaccgctgccaacaacatccagccatttcttgtccttcacaaggctgctgcctcctcggtgccatcttcccggtctcagcgccagattcagacctcacagccatcctcacccaaccgcaaatcagcaaacagatgtcgtcaaccagcgggtgaggagtgtgaggacgaaggggattcggagctatatgagcagctgcgtgctgaggccttccaccgaacttggtccaagatccagtccaccatcgacgaggtcctcagggccatcaacctcaagctgttcgaccaggtgctgcagtgggcgaaggagtccttcgcttcggcccatgccatcacgaaaaagcaccacactgaagtccagcagccataccctctcctgactgatgtgatctgcagaaggatcccgacggtattcgtcctcaccaagaatgcagagtttgttgatgatatcacaacgtttcatgaccttgcagggcatatgaagtccaatggatgtcacatagtcaagctgtcagcggctgagttatcagcaaaacatggagttggtggttgcttcaggagcctgttgggacagctattatccgatgttccagatgttgctgatgtatctgcgctagcatcatggtattgtgaagctgagaactttgatcagcctatcattgtcataattgatgatttggagcaatgttctggcgatgtgcttggagagtttgtgatgatgctgagtgagtgggtgtttaaaattccagtcttctttgtaatggggatagcaactacccttgatgctccaaagaagcttctctcgtcagaggctcttcaacgattagagccctgcaaacttaccttggggtctccctcagatagattgaatgcacttgttgaggctgtccttgttaaaccatgcgctggattttgcatcagtcatgaagtcgcactgttcgtcagaaattacttttttaggcatgatgggacaataacttcttttattactgctctcaagcttgcatgcagtaagcacttctccatggaacctctaagctttttgtgcttaggaatggtggaggaagattctgaggaattttggcatgataagcttgaatcgctccctcaaacaatatggaaacatgctttcgatctaccctcaaacaaaaatgcaaggaattcttgcaacatggtagaaggattgtctaggctgctgaaatcgcaaaaggattggagttctgttctcttgtgcctgtatgaagctggaaggcatgacaaagtgcagcttttggatatcttctgtgaggcagccagcccagattggcaaactgaaaatgcaccagatagttacctatttgcttctaaagtggctttattaggagtaaagtcagggtctgctagaagatttatagcccaagtaatgaatacaataaggtacttgcctacggaaattttgttacacgtccttgaggtttggagcatccatttaaaaggaatgagtgagatcaacgacagagtgaaggagcttcggtcaaaaggttgtggtgcagatagtgttagggccaaaaggaaatcaaccgccaatactggaaatggagtggttctaataaacgaggaagcggctgcgctgttacaggatgttatcaggaaatatttggtacctgctgaatgcttacctttccatgaaatagtctgcttcaagaatgttgacatcctccgatctgcgctgattggaaacccaagaagaatgattcaactcgatcttctgaggtcacagagccatctgaaatgctcttgttgcagtaggagtggtgctgccgtgtcaggatcgttgcacgacacatcaatcctgtgcagtctagcccaagagtatggtgacatgattaacctccatgactggtacacggcctttgaagggattataaagagcacaaactcaaaagccaaagggaaatcttgcagctctccctcgaagaagaagaagaaatcaaaccccacgcctctggagggtgatggcatgatccaagcaaggttctgcagcgccgttactgagatgcaggtcactggccttgttcggatgccgagcaagagaaggcccgatcttgtgcagagaatcgcgttcggtccttaacagctcggtgattacatgcatgctatacagacgaaacgttttgtgcacgctgacgataatcccaccatgtggtaaattgggcagccgtggaaggaaggtttggttacttgtatcggtgcttcgaagagagctgtgagatggagcagcagccgccgcttcagatatgcagtgctgatgttgcgtctgatggctaagctatgtcgttatttttttcctcttaagagcagtattaaacatgttttagctattgattcggctctctgtagagctgacatgggctcatgtagcccaaggggtacatttgagaaatttttatccttgaaacaaagggcatttcgaattatttccccttttactgatctgttttcagttgcagcacagcatggaacaacgtatgaaaagcaaagcatagctgctgcctgcaaa

SEQ ID NO: 93942 - DNA, 1722 bp, Zea Mays
agtcgatctcactgggttcgtaccctttgtgtcaaagatgttttgtcacgtgttacgagttcgatcacaaattatatgctaattgatttctaatttcagtatacattgtgtaatcgtcaaaggagaaaacttgatgaatggagaatgtacaaagagcaaattatggctaattgaccttgctggaagtgaacgggtagcaaagacagatgcacaaggagaaagattgaaagaagcacagaacataaacaaatcactttctgcacttggtgatgttatatctgctcttgcaacgaagacctcgcacataccctttaggaattcgaagctaacgcacttgctccaagactcactaagtggagattccaaaaccttgatgttcgttcaaatcagtcctaatgagaacgacgtgggtgaaactctttgttcgttgaacttcgcgagcagagtgcgaggcatagagcttggacaagctaaaaagcaagtcgatattggagaattgtcaagatacaagctcatggttgggagggccaaacaggacagcaagaacaaagatgctcagattaaaagcatggaagaaaggatacagatacttgaagcgaagaataagaccaaagacttgctcacaatgaatctccaagagaagatcaaagagctggaatcacagctcctagttgaaagaaagatagcacggcagcatgtcgacaacaagattgcccaagaccatctgcagaagcagcacggcatgaaagaagagaactcgtactcgagaagcccgatggccgagaggaacctcaactccacagcagagaaagcagcagcgcctaaagacttggggggcatctcgaagcagatgttctccgacagcaacactgacacttacagcttcaagcagctgatgtcactaggggacgagaaggagaacgaccctgaagctgctgtgcagctgccgccgacaacgaaggccaggcgagtgtcactctgcaacggtggagctcaccagcggccgttgaacccagcttcacgcaggacgtccctcataccgctgccacggcgcaactcgctgctgccaatgcccgtagcaaagcctgcagcagcagcagcagcggtgttgccgcttgacaagatcactgagaacctgtcctcgcccccgctgtgctctcctccggctgtatccaacgacaagggcagccggagtaggaggatcaacagcatactgcggcgaagcctgcagaagaaggtagtcatccggccgtcgctggcagcgcaggcagggaagaaagccgccggtgctgctgctgcccggggtactgacagcgcacgcagggcggcgcggcgggtgcctgtgagcgacggcgctggcgggcaaaggtacagcagaacagggacaaggagcgggggtggagcaacttctgaccagaacatcgcggcacctctattgttaaagaagcctgtggagatttaggtgtttattttgtacaaaatttaggtgttattatttggttgggtttgtgagttctcgcgtattgtgagagaactcgaccgtttgctgctgaccccgatcaggtcaggtttttacaatgcttccagggactttgtgggaggctgggagtgttcatgtaacgatctcttatgctgattactgacacagtggacagtgctttcccgatgcgagaagaaaatttgcagggattttttttcgggtaaaaaaaaagtaagagaaca

SEQ ID NO: 93943 - DNA, 1805 bp, Zea Mays
agtcgatctcactgggttcgtaccctttgtgtcaaagatgttttgtcacgtgttacgagttcgatcacaaattatatgctaattgatttctaatttcagtatacattgtgtaatcgtcaaaggagaaaacttgatgaatggagaatgtacaaagagcaaattatggctaattgaccttgctggaagtgaacgggtagcaaagacagatgcacaaggagaaagattgaaagaagcacagaacataaacaaatcactttctgcacttggtgatgttatatctgctcttgcaacgaagacctcgcacataccctttaggaattcgaagctaacgcacttgctccaagactcactaagtggagattccaaaaccttgatgttcgttcaaatcagtcctaatgagaacgacgtgggtgaaactctttgttcgttgaacttcgcgagcagagtgcgaggcatagagcttggacaagctaaaaagcaagtcgatattggagaattgtcaagatacaagctcatggttgggagggccaaacaggacagcaagaacaaagatgctcagattaaaagcatggaagaaaggatacagatacttgaagcgaagaataagaccaaagacttgctcacaatgaatctccaagagaagatcaaagagctggaatcacagctcctagttgaaagaaagatagcacggcagcatgtcgacaacaagattgcccaagaccatctgcagaagcagcacggcatgaaagaagagaactcgtactcgagaagcccgatggccgagaggaacctcaactccacagcagagaaagcagcagcgcctaaagacttggggggcatctcgaagcagatgttctccgacagcaacactgacacttacagcttcaagcagctgatgtcactaggggacgagaaggagaacgaccctgaagctgctgtgcagctgccgccgacaacgaaggccaggcgagtgtcactctgcaacggtggagctcaccagcggccgttgaacccagcttcacgcaggacgtccctcataccgctgccacggcgcaactcgctgctgccaatgcccgtagcaaagcctgcagcagcagcagcagcggtgttgccgcttgacaagatcactgagaacctgtcctcgcccccgctgtgctctcctccggctgtatccaacgacaagggcagccggagtaggaggatcaacagcatactgcggcgaagcctgcagaagaaggtagtcatccggccgtcgctggcagcgcaggcagggaagaaagccgccggtgctgctgctgcccggggtactgacagcgcacgcagggcggcgcggcgggtgcctgtgagcgacggcgctggcgggcaaaggtacagcagaacagggacaaggagcgggggtggagcaacttctgaccagaacatcgcggcacctctattgttaaagaagcctgtggagatttaggtgtttattttgtacaaaatttaggtgttattatttggttgggtttgtgagttctcgcgtattgtgagagaactcgaccgtttgctgctgaccccgatcaggtcaggtttttacaatgcttccagggactttgtgggaggctgggagtgttcatgtaacgatctcttatgctgattactgacacagtggacagtgctttcccgatgcgagaagaaaatttgcagggattttttttcgggtagtaggtgtgcttcgatgtgaacaatagaaatgatcctctctgcaaaaacttgtagctccggtgacccttttcacagatttgcaatgaaatttaagttttaaa

SEQ ID NO: 93944 - DNA, 761 bp, Zea Mays
agtcgatctcactgggttcgtaccctttgtgtcaaagatgttttgtcacgtgttacgagttcgatcacaaattatatgctaattgatttctaatttcagtatacattgtgtaatcgtcaaaggagaaaacttgatgaatggagaatgtacaaagagcaaattatggctaattgaccttgctggaagtgaacgggtagcaaagacagatgcacaaggagaaagattgaaagaagcacagaacataaacaaatcactttctgcacttggtgatgttatatctgctcttgcaacgaagacctcgcacataccctttaggtacttaaatttgagtcgtttatttaaattttagtctcgtaacttaaattacaaccacttagagatacacaattgttgtttcaaagtacaggaattcgaagctaacgcacttgctccaagactcactaagtggagattccaaaaccttgatgttcgttcaaatcagtcctaatgagaacgacgtgggtgaaactctttgttcgttgaacttcgcgagcagagtgcgaggcatagagcttggacaagctaaaaagcaagtcgatattggagaattgtcaagatacaagctcatggttgggagggccaaacaggacagcaagaacaaagatgctcagattaaaagcatggaagaaaggatacagatacttgaagcgaagaataagaccaaagacttgctcacaatgaatctccaagagaaggtctatccgggttttaaagtcggctag

SEQ ID NO: 93945 - DNA, 873 bp, Zea Mays
atggaggacgaggggagcggcgaccggcgccgcgccgcggaggcactcgtctcgccgccgccgagggcgaagacggtgacgatccccgtggcccgcgacttcatcatcccccacgccgctgaccagtgccgctgctccggcttcgaagtcgccgaggagggttcgccgacgggttcgtcggcgctcggaccagccagcgctggcggtggcgtcccgtgcgagggcgcgctgcaggacacgccggactacatccggaggagcgccgcgcggcacagggtcgcgccgctcgagctcttctcctccgcctcgccaccgcccgcgggacttggcgccgctgatgcggtggcttctagtgcgaaatgccatgccacggagggcgaggccgtgggcggtcggcagccgcaagagactcgagtggataaatccgattgctggggtatctccgaacaacagtatggtgtccttctgcgggaggaggaggaatgcaggaagctgttagatgacctcatggcagagaatgagctcaagaccagggagtgccgtgaagcccaggagtcgctccgtgatctgcggatggagctgatgaggaagtccatgcacgttggctcactagcctctgctgttgaagggcaagtgaaggagaagagtcgtttgtgtcaattactgaaggcattgggcgaaaaattgaaggtattaaagtcagagcaccagaacctaagacaagaatcgctagagtacagaaagtgtgtgttagatgcttcacaaatgtctgcaacaattcagcgatatggtatgcttgagatatgcgagtttaaagatctcaaagagaagttcaatgaggaggcaaaggagcgtaaagacttatacaacaag

SEQ ID NO: 93946 - DNA, 589 bp, Zea Mays
gacgatggacctagtcgacgcgtcgccgctggaggtctcgccacggacggtgagttgtcggcggacgaagccgtggagacggagcatcagcatcgggcgtagcagtagcggcggcgggggcagcaacatcgagtacacaagcctccgcgatgtattggaggaggaggagtgcggcggcggaggcgccggcggcgactgcgtgggcggcgggggcgagcagcaccagcaacaacagccgtggcgttggggcagcagctggggcgagtactcgtgccatgacatccacgaattcgatgcgtccaacatcggcatccgcaaccagctgctaaagcacgcggcgtccgcgtacctacagtcggctgtggtcgtggcggccggccgcgaccagggctgctgcctcacccgcctctggcgccgggcacagctccgtgccggcgggcggcgcggtcggggcggccgtggccgcgtgctcatgcgcgcctgctcatggcagggctgcgtcgacgaccccgctgcgttcctcgctcgctccgctcgacgcctcgcctcgttcgtcgccgaccgcgtcagcgccatctgggcatggtag

SEQ ID NO: 93947 - DNA, 1193 bp, Zea Mays
agacggcaagcaagggaggcatataaatatatgcagcacatgttccctctgctcagcaccgtcagcagcatgcaaggacctcctcccggccccggccagcagcagagcagcaagcagctgatgaggacggtgtccatctcggtgctggtgatgtcgctgccggtgctctacgtctccttcctccacgtcccgcccgccgcgctcgcccgcgacaccaccttctggttcctcatgtccaactccatcatcatcgtcatcgccgccgactccggcatgctcttcttccgctcctcctcctcctcctcgccggacgacgacggtgacggcgacggcggcctccacgcgccgccgccgaccaaggaccagcaggcttctttggttggcgtggcggcggccatcgccgagagcagcggcgacgacgaccgcgcgtacgcattggtcgagagcagagacatcgtcgtcgtcgtaagcccgtcggcgaccaacgacggcggcagcgcagcgacgacggcgagccggagccggagcctggccgggagcgaggagcggcgggcggcgaggcggcggcaccaccggcgcgccgggcaccggccgtcgcactcgcagtcgtcgcaggccctcgtccccgtagtcgtgcaggacaagagcgtggtgctcagcgaggagaagccgaggcggcagctccggcgcgccgcgactacgacgacgacggacaggcggccgccgccggagactactgccgacgagaaggagaagctggagagcgagtactcgaggctgtcggacgaggagctgaaccggcgcgtggaggagttcatcgccaggttcaaccgggagatgaggctacagctggaggaggaggaggatgaggaggagcaggcgagacgaagcggaagcgaaagcgactgactgacgccatgcgcgcgcatgcacagcgaccagagttccatgccccttgtatagcagagcactccactccatgtttggccggccagctgctagggtcttctcttctccatgtgtagtagtgagtagtgactagtgaggatatagtttgggttttgtatgtgagaactgagaaggcagaagagcacgacgagcgtatgagcgcgaataaacagtagacaagaacacgcagctagagcgcgcggcgcgcgagaaaaaaaaaataaacaaccacattttcggagcaa

SEQ ID NO: 93948 - DNA, 214 bp, Zea Mays
catgactgcagcgtccagcctggctccatagcccgcgacgcctgcttggtccgtgatctttttgggttagcacgtataggtaatcatctcgaaagatgtagacctcatagtgataggcatttcaaatgcggcctaaagcacggtctctgggctactaaattctataaagaatttagcgcagccagtgcttaggtctccatcaccctatgctttt

SEQ ID NO: 93949 - DNA, 219 bp, Zea Mays
atggaccacaaaagcttggagattttcgggaagccacgactcaaaagcttggagatctccagcatcccaaccttgtccctcccaccaaacaagcttttgagtgtggcgtcacagttgatatctgttttcttggcttggttcttaagctggaagcaaaatgactttcactatcacactttgtttgagcccataaatttgtttttcctgatagcaaacctg

SEQ ID NO: 93950 - DNA, 866 bp, Zea Mays
gcgcgcacacacacacccagcttagctcagctcaggtagctatagctagagagctggacgaccctcgcgcgacctcagatagatttttaatggaggcgccagcagcgccacctccgtcgtacgacggcggcggcggcggcggctacgtcctcgtcgacctgtccctgacgctgggcccgaccgcgacgccacaccctgcctcctcctcctctcctgagcctgaccacacaccagccgccgccgccgccggttccagttccgccggcgtgcggctgttcccgtgcctcttctgcaacaagaagttcctcaagtcgcaggcgctcggcggccaccagaacgcgcacaagaaggagaggagcgtggggtggaacgcccacctctacctcccgccgccggccgcggacacggcgtcggcgtcggtcgccggcggcgccgccgctcgtgccgcgacgacgcccgtcggcagcagccacgcgctgccgatgatccaggccgtctcgcactcgtgccaccaccatgagcaccaccaccgggacggcggcgcggcggcgccgttgttggagacggcgtggtggtcgtcgtgcgcggaggagaaacagcagaggcaccccgttgacctcaatctcaggctctagctgctagcgctgtcatatcccctgcttgtgtgcgtaatatataaatcctgaaggagtacgtaacgtaccgtacgtgctgtcgaggtagggtgaggcgtctcggtgtgcctgtgcaaaagcgtgcgaggcccatgggccatggcccagcattctatgattatgtgtcgtcgcaacgagcacgcacactttatagttttatggtgccaattatatgcctctttatttcattct

SEQ ID NO: 93951 - DNA, 1032 bp, Zea Mays
tcggatgcacatgatgcacacattaaatcatcatcatccatcttagatctaacgtctttgattgctatgtatattttgcacataacaccttccactgttacctccatcacttgtaccctgcttggaggctggaggggcattttgcaaaatatacagagcaatcatagacgttagatcttagatagatggtgatgatttaatatgtgtactatgtgcaccaaactctcatgtgcacctccctttgaaaatatggatatagaaggactactgtgctcggtgatgtatggcttcatactgcacgaatgaggaacaagactatgatgtgtagagccgattcgtatctaattactttcattagtcggtgttcccccattataaaagcattagcagtctatttagcagacgagcacaggcagtttctcttttctctgttcccttgtaaaagtttccctatttcatatgtctttggatgccttttccctcataaggccataacctttctgactcattaattaggttagggtgtcttgtcacagagccagtgataaagtatatcctttatatttttgcaatatttcagttgaactctctgccattcggtccattgaattgatgacttggttttgctgtcgcagctcccacctactagtgtaccagtcattgtaagagagtaccggagggagcacgtttggatatagaagccaccgttttcctttctggttttgtttgagctccagcggaacagttttcgtcagcgatctacctcatgtcatctggtgatgattttatttccttgtagtttgtaatttgttggagttcatcaccggcacagctgatcggtttggactttggaccacttgaacattatggccggtttcaagatcctgccaacaagtattactgttttgactgttcataggacaggatatggagcacaagctcacaagtgcacatatgctaaatccaaggctttatagcaacaatggtatttttttttgcagcccaagtgaaaatagcattttgggtatccaa

SEQ ID NO: 93952 - DNA, 2200 bp, Zea Mays
cccagtccagacgtcgccgtcgtcgccgcccgaacccgatggacatccgccgcgggccgccgccgccgcgcaccgcgtcgggcggggtggagccgcggttccgccaggtgggattcgtcacggccgccgagcccgcgcggggggccgccacgccggcgcccgcgtcgcccgccgcgtccgacggcctctcccccgtcatgatcccgcccccgctcatccccgtccccgtccccgtccctgtcgcgcccgcttccgagtccctcgcgccttcttccccgcccccggactcctcgtctcgccccgacgccgtctccgaccttgacgacgacgacgacatcgacgtgtcctgggcgcgcccacccccgcccgccttcccagaaccaaacaagagacaccttactgaaagaaagaatgagcatgctcctccgactccagtttcgcagaaaccaaagctttctaaagcagagagacgtgccattcaggagtcccagcgtgctgccaaagccgctgccaaggaggcaggtttgaaatcaacagccatggcttctgatgctaacaccaagcaacccaaaacagcaaagatatctctgaagaaagatgtcaaccaagttaactctccagttgcttctgataagaagactggtgaacgaccgcctgacaaagatagaaaaaaagatgctcctcaaccccgcatgcaatttgacgatacacatcgggtggtgaaagcaaagaagcgttcagttgttagacaatcagaagctcaaaacagggtcgaactgttcagacatctgcctcaatatgcacatggcactcaactacctgaccttgagtcaaaattttttcaacctgatctgatgcatccttctgtgtacaaggttggacttcaatatttgtctggtgacatatctggtggcaatgctcgctgtatagcaatgcttcttgcattcagagaggcaataaatgattactccatgccttctgaaaaaattctgaatagagatcttactgctaaaatcagtagctatgtgtcatttctcatcgagtgcagaccactttcaatcagcatgggcaacgcaattagatttttgaagaacaggattaccaagctaccacttgcattttcagagtcagaagctaaagttagtcttcaatctgatattgatcgctttataaatgagaagataatagttgcggataaggtcattgttagtcatgctgtcacaaaaatcagagatggtgatgttctattgacatttgggtcagcctctgtcgttgaaatgatttttgataatgctcatgaacttggaaagaaatttcgtgttgtggtggtcgactctcgtccaaaccatgagggacaaggattgttgcgccgattagttgcaaagggtatcagttgcacatatacacacataaatgctgtatcttacatcatgcatgaggttacaagagtgtttttgggtgcctcttcagtactatcgaatggtactgtctactccagagttgggacagctttggttgcgatggttgcacatgcttttggagttcctgttctagtgtgttgtgaagcgtacaagtttcatgagagggttcaactcgattctatatgctttaatgaacttggtgacccagatgctatttcaagagttcctagggatgaaagtttgagcaatctcaaaaactgggctgagaatgaaaatcttcatcttctgaatcttaagtatgatatcaccccttccgattatgtttcaatgctcataacagattatggaatgctcccacctactagtgtaccagtcattgtaagagagtaccggagggagcacgtttggatatagaagccaccgttttcctttctggttttgtttgaggtatgataatctgaacagcttttgctgcctaagtgttagtggaatggtaagggggtggtgtgagcataccagcaaatgtttatatctcagttttgcaaccatcaaattggttgttttctcctgtagttcatttctatgttgatgcgttttgcatttacctataccgttgctaatgggggagtatatagcctataaatctgccctccataattgacttctgatatgctcttttatgttagtgaataggggtgttcctcttctgcacgagcatatttgactattttctctatcatttgccaaaatttctcgctgtcacacaaattatgtttttt

SEQ ID NO: 93953 - DNA, 423 bp, Zea Mays
atgccgacagctagttcccgacggacttcctcggaggcggtagccgctcgacaacgccgcgtcggccgcgctggaggccgccgccgccgccgcccctcgcgggcgggctcgtacgcggtgctgcagtgcggcgaggactcggagtacgtgcgccagaagtatggcggctacttcgccgtctttcgcgcgctactggaggaggacggcgagaggtggcgggtgtacagtgctgtccgcggggagctccccaccgacgtcgaggcagccgggttcgacgggttcgtcatctccgggagctgtgccgatgcgcacggcgacgagccctggatccttgcgctcgtcgacctcacccgccgcgtccacgccgctaggcatgcgaagtcaataaaagtgaaatcgaaattcttttctctggttatttga

SEQ ID NO: 93954 - DNA, 1368 bp, Zea Mays
caagcaatcaatcaagaaaatctcgtcatcaggcctgggcctccagctcccgctcgctgatgaaggtgccgtggaagccgtagggcacgcgggaggggagctgcaccgtggcctccagccgcatgtccaccgcgttcaccaccaggagctccgacgtccccttgcgctcgtcgcggaccagggataggatgtacccgtcgtcctcgccgcgcggcgccgcgccctcggcgggcacgaagcagggctccccgccgaatcgcccgtcgccgtagtcgaaccggacgacgtcgcccgtgcccaggtccactttcgcgaacccggacaccttgggccacggctccgccacggccagctggcgcccgtcgtcggcgtcgttgaagatggagtcggcgggggtcatgcaggacccgaccaccaccacctccccggtgccggcatcctcccacgcgttccacaggtggaagcagaagcagtccggcacgtccacccacgccatctccgacgcgtcgcgcgcgtacttgggcagcacgccgaaccgggacgtcttgcccgcgtccagcaccacgggggacccgccccgcagcatctcgcccagcttgaacaccacctggtggtcgggcaccaccacgaaccgctccgtgatggcgaagtcgtgcaccatggtgggctgctccagcgggatctccacgtcgcccgacttgccgccgtcgggccgcaggtagaagtacctcaggtagggccgcttgatcacgtcgtagctgagcgcgaacagctccccggacgccgggtcaagcttggggtgcgcgatcatgctgccgcacccggcgagctgcccgccgaagtcgtagcggccgacggtgcggaggtcgccgtcggccgtcacgcgcacctggtacggcaggtcgtcctcggacatggccaggagacggccgttgaagtagacgaggccggcgtttgcgacccccgtgccgcgggacgggtcgacgagcccgcacagcccgcgcgcgtagaacagcgccaggcgcgcgatcccggagtgcccgtgcagctcgccgatggccttggggaacacggcccgccccagcgcgcgctcctgccggagcctggccgtctcggtgaaccggcacgcgtacgactcggccgcgccgttgcggatgcgcaccgcgtgcaccatcccgtcgccgtcgaacaggtggtgccccgccgacggctcgaagcaggggttggccccgttgcgcgcgtacacgcccgagatgaacggcgggatgcggcccgacaccggcagcgaccgcaccggcgcctgctcgccgaccggcgcgaagttgccggcgatctgcacggccgggtccgccgaccgcggcagcgcgc

SEQ ID NO: 93955 - DNA, 369 bp, Zea Mays
atgtcccacccactctatccggctgtcttgagagccttcatagactgccagaaggtcagagcgccgccagagattgtcggtcggctttctgccctcgctgatgacgtcgaaatgaattcagatgacagacaagaacaacgacgagcagcagacctagagctcgaccagttcatggagatctactgtcacatgttggtgaggtacagacaggagctcacaaggccaatcgaggaagcctacgaattcttcgggagcatggaggcccagatcgatgcattctcgttattaggcagaactagcttaatagtaatcagaggagcacgaccatgtgtagcttctaatgatgtaactcagcaaattcatcagtaa

SEQ ID NO: 93956 - DNA, 4075 bp, Zea Mays
cacctcccccgcatttcacactcccacttccagcctcccccacaacccccatcctcaccaccaccactcgcccgcgcaattcccaaatctcccaggggcctcttcgcttacctcccgcccgactcctcgcgaccccatcgcctcgcctcgacccgtcccgagccttgctcgtcgcggagcgccacaaccacgcctcgccgccgccggcgagcggtcaagcctaggggctatctccgtgtgatggctaccgcgccggcctccgaaagctcgaccgcctcctagggcggcagttacccgaggctgagctcgtgcgcgcgcgtggggacccccgtgctcagctcgcgaaaccctaggagcagcaggaggcgaggcttggctggcggcgatggacgtggactcacgcatggcgacggagtccgactccgactccgacgcgcgcggcggcagcgggtccgggagcgagacccccacggcgtccccgtccccgtctgcatccccgtccccatccgcgcccgggacgcccacggccgcggtcgcgtctccggcgccggttgcggggcccaggccggcgccggggtatacggtggtggacgccgcgatggacaagaaggaggacggaccggggtcccggtgcggccacacgctcacggcagtgccggcagccggggaggagggctcgcccgggtacgtgggcccgcggctgatactctttggtggtgccaccgcgctcgagggcaactccgccacaccgccctcgtcggctgggagcgctgggatccgtcttgctggtgccactgcagatgtccactgttatgacgtgttatcaaataagtggaccaggcttactcctcttggcgaacctccttcaccaagagctgcacatgtagcaactgctgttggaaccatggtggtcattcagggtggaattggtcctactggcttatccgctgaggaccttcatgttcttgatcttacacaacaacgaccgcggtggcatagagtggtggttcaaggtcctggtcctggtccacggtatggacatgtgatggccttggttggtcaacgattcttattgacaattggtggcaatgatggaaaacgacccctggcagatgtatgggcccttgatactgcggccaagccatatgaatggagaaaacttgaaccggaaggtgaagggccaccaccatgcatgtatgcaactgctagtgcccgttctgatggcctccttttgctttgtggtggaagggatgccaatagtgtgccactatcaagtgcatatgggcttgctaagcatagagatggacgctgggagtgggcaattgcccctggtgtgtctccatcacccagatatcaacatgcagctgtttttgtcaatgcacggcttcatgtctcaggaggggctcttgggggtggtcgcatggtagaagactcctcaagcgttgcagtattggacactgctgctggagtttggtgtgataccaaatcagtagttacaactccaaggacaggaaggtatagtgcagatgcagcaggtggtgatgcttctgtagagcttacacggcggtgcaggcacgcagctgccgcggttggtgatttgatatttgtgtatggaggtttacgtggaggtgtgctgttagatgacctcctagttgctgaagatcttgctgctgctgaaacaaccagtgcagctaatcatgcagcagcagcagctgctgcatcctcaaatgtacaaagagaaccgggtagatatgcctacaacgatgaacaatcaggacaaacagttacagtttcaagtcctgatggagctgttgttcttgggactccagttgctcctccagtcaatggggacatgtatactgatattagtcctgagaatgccattatccagggacagagaagattgagcaaaggtgttgattacttggttgaagcatcagctgcagaggctgaggcaatcagtgctactttagctgctgtaaaggctaggcaagttaacggtgagatggagcattcacctgacagggaacaatctccagatgctgcaccaagtgccaagcaaaattcaagccttataaaaccagatcctgctcttatgaacaattcaacaccaccacctggggttcggttgcaccatagagcagttgtggtagcagcagaaactggaggtgccttaggtggcatggttagacagctctcgattgaccagtttgagaatgaaggtagaagggtcatttatggcacccctgagaatgcaactgcggcaaggaaattgctggatcgacaaatgtctattaatagcgtgcccaaaaaggtaattgcttctctgctgaaacctcgtggttggaagccccctgtgcgaaggcagttctttcttgactgcaatgagattgcagatctatgtgataatgctgaaagaatattttcaagtgaacctagtgtcttacagcttaaggctcccattaagatatttggtgatctgcacggtcaatttggtgacctcatgcgcttgtttgatgaatacggtgctccttcaactgctggagacattgcttacatcgattatcttttcttgggagattatgtcgatcgtggtcagcatagtctggagacaatcagtcttctccttgcactgaaggttgaatatcctcacaatgtacacttaatccgagggaatcatgaagcagcggatatcaatgctctatttgggttccgaatcgagtgcatagaaagaatgggtgagcgggatggaatctggacctggcaccgtgtgaacaggttatttaattggcttcctttggctgcactaatagaaaagaagataatctgtatgcacggtggtattggtcggtccatcaaccatatagagcaaatagaaaatcttcatagaccaattaccatggaagcaggctcagttgttctgatggatcttctatggtctgatccgactgagaacgatagtgtagagggtctcaggccaaatgcacggggccctggtcttgttaccttcgggcccgacagagttatggagttctgcaacaacaatgacctgcagttgattgtgcgagcacacgagtgcgtgatggatggcttcgagcgtttcgctcaaggtcacctgatcactcttttctcagcgacaaattactgcggaacggcaaacaacgcaggagcgatcttagttctcggaagggatctggtcgttgttccaaagctcatccatcctttgccgcctgccattacgtcacctgagacctcaccagagcaccacattgaggacacatggatgcaggagttgaatgccaatagaccgccaacaccaaccaggggccgccctcaagcgcccaataacgaccgaggctctgttgcttggatatagcggcctggccatattatgaaacagtcagatttctcgcctcccaccagtggcttgaggcttatattatccatccatcttgggcacatgcaggcggtctgtgctgaaagcacatgcttagcccaaaacaacatcgaaagggaactgttcagggagcgagactaagcggtgctctgaagacagaaggccagagaagactcaccagtcaccgtcgacagtgctctccaaatccttcccctccaaatgacatgagaagtagaagaacagaaccaagtgttggcaaaccacagggtcttgcctgaggtcacgcctgtacatactcagatgccagcagataggcggggttgtgtactgtgttctttttgtcgagcgtccaaagtggtagcagcagtccattgtgctaggtattcatttgctgtagggtttttgtttcttgtccctcatgttgcagagtatggaagtgataaaaatgggtcgttctgtcaggtcgtgtataatagcgttgtcgcttgtttatgggtagtagcagcgagtcagctgtcagcacgccttacacctccctcgtgttgtaattcccgtcacctgtgctgagagtgtgcacaatatatcgtcgtctgttgtccaaagttttgggtcatggacgggtttggtgatttgagttgatttattagagaagcaatgtgttgttcgattttgagcttt

SEQ ID NO: 93957 - DNA, 2298 bp, Zea Mays
gtctccttcctccacccactgcaaatgcaaaaaccctagccgcaactccctccgcctccacggttctcatccgcgacctatctctatctctccaaggcatcggccacgggctcgaaggtgatggcgggcggcggaaagaaggagaagggtgaggggctcgggcgcgcgctgatccggcagcggaacaaggcggccgcggccgctaaggaacggggcgaggcgctcgcctttggccaccgccgcgcgatgccgctcgagtctgtcattgacgtcagtgacatcgatgccgtgctccagcgggccgcggaggccgaccagctcgctgaggccgcgtccgtctcttccgactccgacctcgtcatcgacctggatgcgacgggggagacggaagacgacaggcggcggcttcgcaaggagcaggaggccctgcacgccagcagcctcagggtccccaggcgaccgccatggcatagtcagatgactgtggaggagcttgatgtgaacgagcgtcgggcctttctggtgtggcgcaggaatcttgcaagattggaagagaatgataagcttatcctgactccctttgagaagaatattgacatttggagacaactctggagagtgcttgaacgcagtgatttgttggttatggtggttgatgctcgggatcctttgttctaccgctgccctgaccttgaggcatatgcaaaggaaattgatgaacacaagagaacaatactccttgttaacaaggctgatctgttgccgttaaatatcaggaagagatgggctgattattttaaggcacatgacattctctatgtgttctggtcggctaaggctgccactgccacattagaaggcaaaaagttaagtggatactctgaaggagaatctgcttcacttgatttggataccaagatatatgaaagggatgaactcttgatgaagctgcaagctgaggcagaatctattgtagctcagaggaggatctcacctactgtagatgatcacgaagccagttcttcagattctgtttcttcagtgactaagcatgtagttgttggatttgttggctatccaaatgttgggaagagttcaactataaatgctttggttggcgagaagaggactggtgttactcacacacctggcaagacaaaacatttccagacactgataatctctgaagagctcactctttgtgattgccctggtctggtcttcccttccttttcaagctcaaggcatgagatggtggcatgtggtgtgttgccgattgataggatgacaaagcaccgggaagctattcaagtggtggcagatcgtgtcccaagggacatccttgagcagatttacaaaattgcattgccaaagccaaagccatatgaaccccagtcccggccgccaactgctgctgagctgttgcgggcctactgcgcgtctcgtgggcatgtcagccatgctgggctgcctgatgagaccagggctgctcgacagatactgaaggattacattgatggtaaaatcccacactttgagctccctcctggcgtgacaggccctgaggtggactttgaacaaatcgctggatcagaaagtccaactacttcagcagctaatgaatcagttactgatgatctcgatgaagaggatgatgatgcagttgatcctgctgaatcaaacatgagagatgtcctagatgaccttgaatcttttgacttgggtaatggagggtccaaaactacagcaaagaagaaagaggcgtcccacaagcaccacaagaagccccagcggaagaaggatcggtcctggagggttggcaatgatggtggcgacggaacagcagttgtaagagtgtaccagaaacccgcagttaatttgtccacggtctctttaagtggcagggtctgatgccccaacttttactgctcgcacaaccccggcacacatgggcaagggcatgggacctcttactgtagcaacggctgaactctgaagctacttcgatggaaggaagaaaggagtactgagcatacgagagtttgaaaaccttagaaacaacattggtagtcgttgccggaacttgtgctgcccttccggcctttctcgtatgtatatgctgtgagttgtagcacggttgattcatactaaacgtggtggtatgtgttgttttgttttttcatgtctcacatagctgcagatacagctttgggatgcagatttgacgtggaaaaaatatgtagacgatttatacttgctaagttgctacatttttattttttacgctccttccatttc

SEQ ID NO: 93958 - DNA, 418 bp, Zea Mays
attttatacgcgcctcccccgtcccgtctcgtcccctctctctctctccctctcgcgtctcgtcttggccactcaccccacccgccccctctctctttctctctctctgccacagtgcactgctcagtcggcagtcgcagcgctgcggctgtggttcttcttgtcctgttccgccgcccgcccgcccgctgctactgctgggatagtgaaacgtgagtgctattgcctgcatccccccctgttggtgctggagttggatccttcccgtttggtgccttgctacgcccgtccagattcttgcatctcctcttcttccttcctgctcctgctgtgcatgcgtttgcgcgcatgctctcgccttcttcatatcatatcctccctcctgctctgctctgctcgggctctttgccaccccggc

SEQ ID NO: 93959 - DNA, 1290 bp, Zea Mays
ccataaaccggctatgctcagccctataagtatattatactgtaataatgacggtagctcacagcaattcacttccccatttgcgccaaatttcctcctcgtcgttccttcatcacccctcctggcctgaccgcctgagctgagccagaggcctcggtcggccgcaaggccgacgatgccgccgccgtacatgcttctgctcttcgtcccggccgtcttcgtcttcttcctggagccgcgcctcgtcccgccccgcacgctcccggcgatcccggacgccgacgaggcggaggacctggcgctgttccgccgcgccgtgctcctctcctcctcctcctcctcctccgcccaccggcaaacgaagcagaaggtggcgttcctgttcctgaccaactcgggcctcgccttcgcgccgctctgggagaagtacttcgcggggaaccacggcctgctcaacatctacgtccacgcggacccatccaccccgctcagcctcccgccctccgcgcgctccttccacggccgcgtggtgcggggcagcaaggccacgcagcgggcctccgccacgctcatctccgccgcgcgccgcctcatcgccgccgcgctgctcgacgacccggccaaccgcttcttcgcgctgctatcccagtcctgcgtcccgctacgcccttttcccgccctccaccgcgcgctcgccgccgaccccaatcaccgcagcttcatcgaggtcctcggcgccgcgcccacgctgcgcgaccggtacagcgcgcgcggcgacggcgccatggtccccgaggttccgttcgagagcttccgcgtcgggtcccagttcttcgtgctcgccagacggcacgccgtggcggtggtcggggacaggcggctgtggggcaagttccggctgccctgcctcgtcgagaggcggcgctcgtgctacccggaggagcactacttcccgacgctgctggacatgctggaccccgccgggtgcgccgggttctcgctcaccagcgtcaactggaccggctccttcgacggccacccgcgcacgtaccggccggaggaggtgtccgccgacctcatcagggacctcaggaggccgaagtccaacggcacgtactcacacatgttcgcgcgcaagttcgcgcctgggtgcctcgcgccgctcatggagatcgccgactctgtcatcctccgtgactagctagctacctactaggctactaggccgcttgcttccgtttgcattgcacgactgcggcagaggtaaataataatgtttattttctcttc

SEQ ID NO: 93960 - DNA, 471 bp, Zea Mays
cgtggggaggatgtttggagactagagcgtccatgcgctggggtcatcaaagtcgctggacaatacgtctaaggagtgttgtcttcccgttaatcttgcagcacatgtatgcaagcagtcctacaatcattcagaattaggagcagcgatatcatgggacgatgctctacgatcgggcatgagacgcttccagcacaagtactacaacctgttcacctgcaactgccactcgtttgtggcgagctgcctgaatcggcttgcctacaatggctccctggagtggaatgtcttgaacatggctgcccttgtctggtttcatggctgatggatggacagaatgagtactattctagaaaccgagcagatcatcagaaatccagaattatcaataattatctaacatttgcatcccaaactagaatcaccacactggtctgtcatgaccatgagaacctacaacaaagcagtgct

SEQ ID NO: 93961 - DNA, 1783 bp, Zea Mays
aaaacagtggtggagctcaatcaatccaaagtgcgggcgaaaccgaaagcgagaggggggagactgggagagagagggacgagcggcgcggtctgctggtccgtcggcggcgaccgcgacgcctcgctgcagcggccgacgcatccgccgcgggcgtggagctcgccctctcctggctcgcaggagctcgcgagttgtttcgggtgcgagttgcttcttagtgctagctgtcgaaggcaacgaggaaaagactgccatggggatttcagctaagtggatcaaatcacttgttgggataaaaaagcacgaaaaagggcgaaatgctgaatgcagcgatgcgaggagctctgctgtccagttgctacgcaaacgggaacattctgttgatacagaaagtgttcctgcggctgaagaactcagagtacaggccgaaccattggcaggtgacacaaatacagaaacaatatcaaattctgcctcctcaccgagcacatctcttcaagcttctcagaccgaacttggtacaaaggagcatcaggctgctgtagttatccaatctgcctttcgagcattcttggctaggcgggccttgcgggcgttaaaaggactagttagactccaggcacttgttcggggtcatgctgtaagaaaacaagcagcagaaacacttcagtgcatgcaagcgctagtaagagctcaagctcgtgtcagagcgagacgagtccgtgtttctttggaaagccaagggactcaaaagaaacctcctgaagaaaatgttcatgaggatcatgttcgagatattgaggaagactggtgtggcagtataggctcggtagaagaaatgaaagctaagacattaaaaaggcaagaggctgctgctaagcgggaaagggcgatggcatatgctttaacccatcagtggcaggcaagttcaaggaaacagaaagcagcaagcctccaaggccaaggactcgccggggacgagaaccagtggggacgaaactggctcgagaggtggatggccgcgcgcccgtgggagaacaggttacttgacagcaacgccagggacagtgtcactgccggcgacgacgacgacaaaccagcggaggaaggcaaggcaaaagctccggacctgagcaaaccaaaaggaaaagctcccgttttggcctctcagtctaacgggtcgcggcaggagaaagctgcagaccacgagaagtcgcattctgatgtcagcggctgtggctcttcgtcggggcggtctgcggacgtgcagccaacggtttctctagagtcgtccaaggtggaagtgaaggtgaaggcaccgcaggaggtcgcagatgaagcgagctctggaccgtcgaatccggcttcccggtccgcaagcaatccgaaagaaaggccggcgcgaaccgatgcgccagcgaggaagcggttatcgcttcctaacaacgcaacagcagccagtcggggagtagggaagcgccctaccaacagtagtcggagtcggacgaacgtggcctcgagaccgaagaatggcagaggcgcctccagcccaggcctcgagtagtgtcgtagggtggttgtgttgtgctggtgtacattgtttacgttgctgtgtattctaccattgtgttatgtattttttgtgcgtgtgtgtgtctgtgttctgttcaaattgcgtcctttcgaactgctcagtctgtggacgtttggaaaagcatgtttctggattctgtgattcggtcttcagcaccagtgtttggttggttgggtggtggtgata

SEQ ID NO: 93962 - DNA, 1776 bp, Zea Mays
aaaacagtggtggagctcaatcaatccaaagtgcgggcgaaaccgaaagcgagaggggggagactgggagagagagggacgagcggcgcggtctgctggtccgtcggcggcgaccgcgacgcctcgctgcagcggccgacgcatccgccgcgggcgtggagctcgccctctcctggctcgcaggagctcgcgagttgtttcggttgcttcttagtgctagctgtcgaaggcaacgaggaaaagactgccatggggatttcagctaagtggatcaaatcacttgttgggataaaaaagcacgaaaaagggcgaaatgctgaatgcagcgatgcgaggagctctgctgtccagttgctacgcaaacgggaacattctgttgatacagaaagtgttcctgcggctgaagaactcagagtacaggccgaaccattggcaggtgacacaaatacagaaacaatatcaaattctgcctcctcaccgagcacatctcttcaagcttctcagaccgaacttggtacaaaggagcatcaggctgctgtagttatccaatctgcctttcgagcattcttggctaggcgggccttgcgggcgttaaaaggactagttagactccaggcacttgttcggggtcatgctgtaagaaaacaagcagcagaaacacttcagtgcatgcaagcgctagtaagagctcaagctcgtgtcagagcgagacgagtccgtgtttctttggaaagccaagggactcaaaagaaacctcctgaagaaaatgttcatgaggatcatgttcgagatattgaggaagactggtgtggcagtataggctcggtagaagaaatgaaagctaagacattaaaaaggcaagaggctgctgctaagcgggaaagggcgatggcatatgctttaacccatcagtggcaggcaagttcaaggaaacagaaagcagcaagcctccaaggccaaggactcgccggggacgagaaccagtggggacgaaactggctcgagaggtggatggccgcgcgcccgtgggagaacaggttacttgacagcaacgccagggacagtgtcactgccggcgacgacgacgacaaaccagcggaggaaggcaaggcaaaagctccggacctgagcaaaccaaaaggaaaagctcccgttttggcctctcagtctaacgggtcgcggcaggagaaagctgcagaccacgagaagtcgcattctgatgtcagcggctgtggctcttcgtcggggcggtctgcggacgtgcagccaacggtttctctagagtcgtccaaggtggaagtgaaggtgaaggcaccgcaggaggtcgcagatgaagcgagctctggaccgtcgaatccggcttcccggtccgcaagcaatccgaaagaaaggccggcgcgaaccgatgcgccagcgaggaagcggttatcgcttcctaacaacgcaacagcagccagtcggggagtagggaagcgccctaccaacagtagtcggagtcggacgaacgtggcctcgagaccgaagaatggcagaggcgcctccagcccaggcctcgagtagtgtcgtagggtggttgtgttgtgctggtgtacattgtttacgttgctgtgtattctaccattgtgttatgtattttttgtgcgtgtgtgtgtctgtgttctgttcaaattgcgtcctttcgaactgctcagtctgtggacgtttggaaaagcatgtttctggattctgtgattcggtcttcagcaccagtgtttggttggttgggtggtggtgata

SEQ ID NO: 93963 - DNA, 1772 bp, Zea Mays
aaaacagtggtggagctcaatcaatccaaagtgcgggcgaaaccgaaagcgagaggggggagactgggagagagagggacgagcggcgcggtctgctggtccgtcggcggcgaccgcgacgcctcgctgcagcggccgacgcatccgccgcgggcgtggagctcgccctctcctggctcgcaggagctcgcgagttgtttcgggtgcgagtgctagctgtcgaaggcaacgaggaaaagactgccatggggatttcagctaagtggatcaaatcacttgttgggataaaaaagcacgaaaaagggcgaaatgctgaatgcagcgatgcgaggagctctgctgtccagttgctacgcaaacgggaacattctgttgatacagaaagtgttcctgcggctgaagaactcagagtacaggccgaaccattggcaggtgacacaaatacagaaacaatatcaaattctgcctcctcaccgagcacatctcttcaagcttctcagaccgaacttggtacaaaggagcatcaggctgctgtagttatccaatctgcctttcgagcattcttggctaggcgggccttgcgggcgttaaaaggactagttagactccaggcacttgttcggggtcatgctgtaagaaaacaagcagcagaaacacttcagtgcatgcaagcgctagtaagagctcaagctcgtgtcagagcgagacgagtccgtgtttctttggaaagccaagggactcaaaagaaacctcctgaagaaaatgttcatgaggatcatgttcgagatattgaggaagactggtgtggcagtataggctcggtagaagaaatgaaagctaagacattaaaaaggcaagaggctgctgctaagcgggaaagggcgatggcatatgctttaacccatcagtggcaggcaagttcaaggaaacagaaagcagcaagcctccaaggccaaggactcgccggggacgagaaccagtggggacgaaactggctcgagaggtggatggccgcgcgcccgtgggagaacaggttacttgacagcaacgccagggacagtgtcactgccggcgacgacgacgacaaaccagcggaggaaggcaaggcaaaagctccggacctgagcaaaccaaaaggaaaagctcccgttttggcctctcagtctaacgggtcgcggcaggagaaagctgcagaccacgagaagtcgcattctgatgtcagcggctgtggctcttcgtcggggcggtctgcggacgtgcagccaacggtttctctagagtcgtccaaggtggaagtgaaggtgaaggcaccgcaggaggtcgcagatgaagcgagctctggaccgtcgaatccggcttcccggtccgcaagcaatccgaaagaaaggccggcgcgaaccgatgcgccagcgaggaagcggttatcgcttcctaacaacgcaacagcagccagtcggggagtagggaagcgccctaccaacagtagtcggagtcggacgaacgtggcctcgagaccgaagaatggcagaggcgcctccagcccaggcctcgagtagtgtcgtagggtggttgtgttgtgctggtgtacattgtttacgttgctgtgtattctaccattgtgttatgtattttttgtgcgtgtgtgtgtctgtgttctgttcaaattgcgtcctttcgaactgctcagtctgtggacgtttggaaaagcatgtttctggattctgtgattcggtcttcagcaccagtgtttggttggttgggtggtggtgata

SEQ ID NO: 93964 - DNA, 2453 bp, Zea Mays
gctatggagcagttttttagtgtttcgctgcacggaagtgactctgctagcccctaatcatatgagagtgattttgagtgtgccaaacgccccctattgaaattcccacgcgcccgtcgtttgccaccttccccaccagcaccaagcggcgagagcgggacggggcagagcaagagctagggataaccctcgcccaccatggcgacgcccggcgagcagcaggcaccggctgcggcggagtaggtcgtgtccgtcgagatgcctgcacccgacgggtggaccaagaagtttactccccagagagggggaagatccgagattgtttttgtttcgccaactggcgaggaaattaagaacaagaggcaactaagccaatacctaaaggcacaccctggaggccctgctgcttcagattttgattggggaactggtgataccccaaggcgttctgctcgcattagcgagaaagtcaaggtttttgatagcccagagggcgagaagatcccgaaacgcagcaggaactccagtggtaggaagggtaggcagggaaagaaggaagcccctgaaactgaagaagccaaagatgctgaaaccggccaggacgccccaagtgaagatggcacaaaggagactgacgtggagatgaagcctgctgaagaggcgaaggaagctcctactgaaactgatgacgctgagaaggctgcagacaaggcggacgatactcctgctccggcgccaatggaagaagatgagaaagaaactgagaaaccagctgaagctgttgtagctcctcttgcgcaatcggaggagaagaaagaagatgccaagccagatgagcctgaagctgtggctccagctccagtaagcaacccaactgagaactcagcccctgctcctgccgagcctgctgctgttcctgccccagtgcctgagaccgaatcagttgccgagcctgctgctgttctcgccccagcgcctgaaaccaaaccagatgccaagcctgctgctgttcctgccccagcgcctgaaaacaaaccagatgccgagcctgctgctgctgctgctccagtgcctgacaccaaatcagttgctgagcctgctgctgctccagcgcctgacaccaaatcagttgctgaacctgctgctgctgctccagtgcccgagaccaaactagttgctgaatctgctgctgatgctgttgctgctccggcgcctgaaaccaaatcagatgccgagcctgctgctgctccagtgcccgagaccaaaccagttgctgaatctgctgctgatgctgttgctgctccagcgcctgaaaccaaatcagatgccgagcctgctgctgccgctgatccagcacctgaaatcaaatcagatgctgccgccgctgatccagcacccgggaccaaggcagatgctgccgccactgatgccgcgcctggagccgagccagacgccgctccactagagaacaccgctgccgacaaaggcggaagcgaggagagcagccagcccgtgaacaacgtgaacaacgggcactcaacgtgaagtgcatctgaggccggaacggaacaccccttccagcaccgtgtatctcatgtaggaacaaacatttgcattcgcattgtaatctgatggatcggtaagcatgttgattagtcagtctgacgctgctgggtgacatgttggtaattaggctctgcatttgagctctttttttttgtatggctgctgtcgccgccgtacatgtatcctgtatccaccaccatcatcatccccttggactattggttgtgttgtacctaactgcgtaagcatattattatcaatgttaggccatgtatactccgctctaatgtttgtattttgtgaaatttggataaccagctgaatgttgtttatcatcatctccagtgtctatgagaaaatagtaagagtgcctggctgggtatgtataaaaaaaatgcgttttattttactgcatgtgaaaatgaaatcgaccagaggctagagctgggtaggcgtcgcggccgggctgggcaccggcggcgagcggcagacggggcacgtcgggcgcagcctcagccagcggtcgacgcacagctggtggaaggcgtgcgcgcactcgggcagcacgcggagcacgtccccgctggcgtactcgcccaggcacaccgcgcagcacgtcgtcgtcccggtggcggcggtcgtcgtcgcagtcttcctctccgctttctcctcgccgtacaccacctcgggcagcgccttgagcgcggcctcgtctagccccgcctcgacgtccgcgcccacgtccacggcggtgccctcctcctcccgccgcgcgcgcgctgccgccgtcgcgggcgcggcgctgcggacgcacgtccgcagcaggaaggccacggcgacgatggccatggcgctgacgacgccgaaggcgacctccacctccagct

SEQ ID NO: 93965 - DNA, 567 bp, Zea Mays
atggagctcctgcgcacggggaagaaaaagctccctgctgccgacgtcgtggataagggggcgctcccatgggggccctgctcccgcgatggcgtggtgctgcatcccagggagccgagggggaagaatggcgctgttgctgggtggccatggttggagcagagagacccgcgcccatggagcagggagggcgtcgctgttatcatttacttttggcataacagccacaatgagccacttcaggcttcggaatggaaaatgtgcatatatgcttctggttgcagtgagattggcctcgtccaagttatgggatctggttatagcaaagaacattgtcttagctggatacaaggagatgcagaagctctgagttttgaggatggatctatggatggttacactatcgcatttgggatcagaaatgtgacgcacattgagaaagctctatcagaagcttatagttatgatgcttactcgttttctatgattccggctattggagagctggttgatggtgatcggcagatagaagacgggcaacatgctaaccaggcctgtgaaccttga

SEQ ID NO: 93966 - DNA, 345 bp, Zea Mays
atggggagccacatccgcgacctccctcagtccctggccacgccagcagcgcctcccatattcttccccgttcatcccgcccccgcccgtgttcccctccccacgctaccctccgcgaccccatccatctcgcccccgtccacgaccttagtctgcgcccttccatcggactcccttcgatggcgcggaccttccatcaacgccgacccgtactgctatttaaaaaatccaaagcgaggatgccaccacacccccatcctcctcggatgtgcagaaatatcaaacatctcctcatcatgcttgaactctatatcaaacatcactaaggtcttggattcaacatag

SEQ ID NO: 93967 - DNA, 103 bp, Zea Mays
gtgctcggctcccagctcgcccaactttggtggtcgtcacgccccacctcgacccggagcaccgtgtcagcgacctagaaggtcaccagtctcttcgtcggag

SEQ ID NO: 93968 - DNA, 640 bp, Zea Mays
cttcttagatgagccaagttgtatctttaccgtcaggttcccagtacatgcacatggatggtgtttggttatgaaactcatggatcggagcctggaaagatcgagtttgtttgtttccgtttgtttgtctcatacggcatgcaagcacacgcgtcgattcgcactgaacaagcacacacagcccacggaaaccgcaacggcttacgtacggcagctgaacgtgcatgccgccacgtcacgcaagctacacagccatgcaccacaagtcaggctgacgcgcggcggcggcgtgctatcttgctcgggtgaccgccgccgccgtcgacgcccgccgccgccggtactcctctcggctggacgacggctccgccacgtcggccgcgaagcgcaccttcttgttcttcttcgtgcggcgccggccctggtccgcggctccgtcgccttcgccgagtatcatgaccctgaggtccgcctccaggcggcggtggaggcggtaggagacgaggatgacgctcgtcgacaccacggcgaccgccagcagccccaggcagctccccgcgccgctgctgctccgccgctccatcgcgatcagcgaggcgggccgccgccgaccttccgctaggcagctggcttccaccgg

SEQ ID NO: 93969 - DNA, 1687 bp, Zea Mays
cagttcggcagttccctccctccctcctcgtcacctaatccgccccgtcgcccccggaagcttcaagaaggtggacggtcggagggacgggctacatggggggctgcttctggtagcttcggtcgcccgccgcgccgccgccagagggatcaagaggcctggcctggagccgtcagcgtggtggcgcctcctccaccccacagcacccatgtcctccgcctcgtgcctcgtccatcccgctccaaggttccgggttcggctactgcctctcccctcctccgtcgccgcgaggccgttgcttggcttcaggcctcggtgtggggctccagcgaagggatgggcattgtggcacgtctcatgcttcagaaatggtcaggatgggccaacaacatctgacgaaggtgatgacttcaagtatgttgcccaatcacagagctctggtggtgcagaggtgaaaaaggaagaggtgagtagcttaaacggggatcaggagcagaatttgaaggatggcgattggttcctgcaactgcagaagataaaagaaaatttactaggcaggatagtaaaatttcagacagaacgctggatagtaccttggactggacaaaccattgctcaggtgatgattttatggatcgccacattttggtttgtgggttcctggatagtgccattgttggctcatgctgctgggtttagcaaggaaacattgacgcacagaggccaggcactatacagtctcttgacagacataacagagggccttgccgggatcgcaatccttcaccaatgccttggtagattccgaccccttcctccagggtggttcgagttcaatctgaagggcaaatggcacttggacgtagcatttgggtgcctgctattcccactagttaatctactctcacacataaacatcagcctagttccagcgtcaccaggtccagctgttggggtttccagcgtagaacagtccatcgtggcccgggatccagtggcaatggctttgtatgctgtggtagtcacggtatgcgcgcctatatgggaagaaatcgtgttccgaggattccttctcccgtctctaacacggtacatgccactcccatggtcgatcctagcgagcgccgctgcgttcgcgctcgctcacttcaacgcacagagggtgatgccgctagtgtttcttggagtggtgatgggaggagtctttgcaaggtcgcgcaacctgctggcgtcgatggtgctgcacagcttgtggaatggatttgtgttcttggatttgatgaagtgagcagctgagctggagttattgtttcggttccaaccttggacatatctgcttgagcctcgtctgaaaatgttttggacaagattggttctattcttttttcaggattaaaagcaaggcatctaatgcagcggcggaacagaaggagtcgtgtaagtctgaagcgaagagggaacagttagtgcaggaaaatagaccacagaacagaagaaatgtttatttttttcagaattttgtgtagaatgatcagtcactgcagtcttaggacctgtgcccagcttccataagcatctgccacatttttgtaaattgcataggcgggagaatatttgtctcgtcgtgtatagaatcccccccccccttggaaaggagatatatatggtttcctgccattcaatgcca

SEQ ID NO: 93970 - DNA, 1746 bp, Zea Mays
cagttcggcagttccctccctccctcctcgtcacctaatccgccccgtcgcccccggaagcttcaagaaggtggacggtcggagggacgggctacatggggggctgcttctggtagcttcggtcgcccgccgcgccgccgccagaccctcttttgatctgttcctggatctgccactgctccacggcattgtgcgaagccgcgtcgccagagggatcaagaggcctggcctggagccgtcagcgtggtggcgcctcctccaccccacagcacccatgtcctccgcctcgtgcctcgtccatcccgctccaaggttccgggttcggctactgcctctcccctcctccgtcgccgcgaggccgttgcttggcttcaggcctcggtgtggggctccagcgaagggatgggcattgtggcacgtctcatgcttcagaaatggtcaggatgggccaacaacatctgacgaaggtgatgacttcaagtatgttgcccaatcacagagctctggtggtgcagaggtgaaaaaggaagaggtgagtagcttaaacggggatcaggagcagaatttgaaggatggcgattggttcctgcaactgcagaagataaaagaaaatttactaggcaggatagtaaaatttcagacagaacgctggatagtaccttggactggacaaaccattgctcaggtgatgattttatggatcgccacattttggtttgtgggttcctggatagtgccattgttggctcatgctgctgggtttagcaaggaaacattgacgcacagaggccaggcactatacagtctcttgacagacataacagagggccttgccgggatcgcaatccttcaccaatgccttggtagattccgaccccttcctccagggtggttcgagttcaatctgaagggcaaatggcacttggacgtagcatttgggtgcctgctattcccactagttaatctactctcacacataaacatcagcctagttccagcgtcaccaggtccagctgttggggtttccagcgtagaacagtccatcgtggcccgggatccagtggcaatggctttgtatgctgtggtagtcacggtatgcgcgcctatatgggaagaaatcgtgttccgaggattccttctcccgtctctaacacggtacatgccactcccatggtcgatcctagcgagcgccgctgcgttcgcgctcgctcacttcaacgcacagagggtgatgccgctagtgtttcttggagtggtgatgggaggagtctttgcaaggtcgcgcaacctgctggcgtcgatggtgctgcacagcttgtggaatggatttgtgttcttggatttgatgaagtgagcagctgagctggagttattgtttcggttccaaccttggacatatctgcttgagcctcgtctgaaaatgttttggacaagattggttctattcttttttcaggattaaaagcaaggcatctaatgcagcggcggaacagaaggagtcgtgtaagtctgaagcgaagagggaacagttagtgcaggaaaatagaccacagaacagaagaaatgtttatttttttcagaattttgtgtagaatgatcagtcactgcagtcttaggacctgtgcccagcttccataagcatctgccacatttttgtaaattgcataggcgggagaatatttgtctcgtcgtgtatagaatcccccccccccttggaaaggagatatatatggtttcctgccattc

SEQ ID NO: 93971 - DNA, 1045 bp, Zea Mays
agttcggcagttccctccctccctcctcgtcacctaatccgccccgtcgcccccggaagcttcaagaaggtggacggtcggagggacgggctacatggggggctgcttctggtagcttcggtcgcccgccgcgccgccgccaggatggattcaggattgtaatttcaggagatggtgaccatgagagggaattggagctaattgacgatgacaagaatgaagaaatgcctttgtcagttcttcaggtaaatgctatgagaaagttggggtcggtggaagaggtgcctgtcccgctcttcccgtccaagggtcttcggttgaagcaaaagattaaggactggttggaagggttccagaggctcccttatgtatctccatatgagaatttcagccacatcaatccgggtagtgatgtttcagagaagcgggcagtcggggtgctccatgagctgcttagtctgtttgtgacatgctctgctgagaggcgacggttacgctgcctgcggcagcacctagggctgccacagaagtttcatcttgtgttcgagcggcaccctcatgtgttctacttattgttaaaggagaagacatgctttgttgtcctcaaagaggcctacatagctggagaagacactgcaattgaggcgcaccccatgttggaagtgttcaagaagtatgttgagttgatggagcagtcacgggaaatcataagatgtcgacggagcgggaagcctattgaactagagtccaaggcatgcggggatagctgagaagaaggatgggaatacatgtgcaaatatgacctctataacaagaatgtggatatgtactcttggtaggagctagtttatttctcattatttgcagagaaatacatcaagtgctgaaacagcttggtgactatatttaatctgcattcttaatttccagttgttcattacttgactgtgtactattgatgtcttaatcacacaatagtttcgtcagagatttctgatttccaggtcttcgacttaacttgtatcgatcaattcttagttcttct

SEQ ID NO: 93972 - DNA, 2176 bp, Zea Mays
cttcccagttcggcagttccctccctccctcctcgtcacctaatccgccccgtcgcccccggaagcttcaagaaggtggacggtcggagggacgggctacatggggggctgcttctggtagcttcggtcgcccgccgcgccgccgccaggtcagtcagcgccgtcccgtgcctcgtcggtcgcgtggcacccgcccttctcttactcctccaccccgtcgctgtcggcccccacccgcatcgccaccgccggccccgatccgccgccgccctccgcatccccgcccccaccctcagccccgtcgccctcctcttccttttactgtagcagcctccctccaaaccctagcttcactcccggttcgcaagccccgttgcggcggctgagccctcttctgcagcgccggcgccgggtcgtcgggccagggagtttgtcgactcgactggcattgctgaacgaggcaaatgcgccttcatctcctcaacgccgcacacatgtttggtttcgccactgatttggagtaagcgtgattgtgttatgtaaagtggattcagatccaatccaatgcgcgcaacattccatgccactgcccacaggaatccaattgtaagtttcgtcatactaattttacgaagcccgttaatcgcgataccagcaatccaaaaagctccccaaccccacccttcttcttcctccgccatcgttgcctccgttcaaaagatttcagaaacccacacccacctaaacccatgcagtcccttgcgaaatctcggtcgctcgagtctgtccttcccctcgccgtccacctccagtccatggcgtacgtgaatgtgacgatgcggtggaagaaggactcatcgtttgatgccatccctgagatctcccacgcccgcgacatccgcccgctcgtctccctcgcacacatcctgtccccatcgcccacccctgtatctgcggtctccaagctcggccccttgctcgagatcccagaccgccgggtcaccgctttcctccgccgcttccccgccgccttcgtcgagtccgtggggcagcacaacatcccctggttccgtctctccgatgccgccacccgactcctgcgggaggagcgggccgtcttcgccgcccgccgtgccgatgtctgtgctcgcctgcgccgcatcgtcttgatgaccccgcgacgccgcctcccgctccacatcgcgcagggcatgctctggcatcttggcattccagagaactacttaaaggacctggattatgacattgcacaggatggattcaggattgtaatttcaggagatggtgaccatgagagggaattggagctaattgacgatgacaagaatgaagaaatgcctttgtcagttcttcaggtaaatgctatgagaaagttggggtcggtggaagaggtgcctgtcccgctcttcccgtccaagggtcttcggttgaagcaaaagattaaggactggttggaagggttccagaggctcccttatgtatctccatatgagaatttcagccacatcaatccgggtagtgatgtttcagagaagcgggcagtcggggtgctccatgagctgcttagtctgtttgtgacatgctctgctgagaggcgacggttacgctgcctgcggcagcacctagggctgccacagaagtttcatcttgtgttcgagcggcaccctcatgtgttctacttattgttaaaggagaagacatgctttgttgtcctcaaagaggcctacatagctggagaagacactgcaattgaggcgcaccccatgttggaagtgttcaagaagtatgttgagttgatggagcagtcacgggaaatcataagatgtcgacggagcgggaagcctattgaactagagtccaaggcatgcggggatagctgagaagaaggatgggaatacatgtgcaaatatgacctctataacaagaatgtggatatgtactcttggtaggagctagtttatttctcattatttgcagagaaatacatcaagtgctgaaacagcttggtgactatatttaatctgcattcttaatttccagttgttcattacttgactgtgtactattgatgtcttaatcacacaatagtttcgtcagagatttctgatttccaggtcttcgacttaacttgtatcgatcaattcttagttcttct

SEQ ID NO: 93973 - DNA, 180 bp, Zea Mays
gggtgaataggcaagttaaaactttttcaacaaaaactagaaatgaactaggtaaaactggttcaaccggtttgcacgagctcaactaaagaatgagatataaaactgaattgatctcgaaatccacctagttaactttggaaatgagatgttctagttgatccacagggttcaaagtag

SEQ ID NO: 93974 - DNA, 2526 bp, Zea Mays
gcagtttactagttgtacacccataatgacccattctaccgtcatatacatacaccgttggcacgccatctaatcagcgaagaggagacgacgactgctctgcctttcttccctacaggaacaggacgaatcaatcaatcattcccctctgcagccgccggccctcagcaagcaagcaagggacagacgcggcggggatgggcagcggggtccgggcgctgatgcgccggaagcaggtagactccgagcggacgcgcgccgccggcagcgcccaccagctccgcaaggagctctccgtcacccagctcgtcgccatcggtgttgggtcgacgattggagctggcgtctacgtccttgttggcacagttgcgcgggagcattccgggccggcattgacgctttcatttctgatagccggaatagcagctgcgctttcagccttctgctatgcggagctggctagccgttgcccttcggcaggaagcgcctatcattattcgtacatctgcgttggcgaaggagttgcatggttgattggctgggctttgatacttgaatacacgattggtggatcagccgttgcccgtggcatttctcctaatctagccttattttttggaggacaggatagtctgccatggattttagcacgacatgagatcccatggcttgatgtcgttgtagatccttgtgcttctttcctcgttttcgtcgtcactggccttctctgtgtggggataaaagagagttcatttgtgcaaggagttgtgacggtcttaaattgctttgtgatgttatttgttatcatagccggtagctacatcggcttccaaacaggatgggttggctacaaggttgctggcggatttttcccttatggagcgaatggaatgcttgccgggtcagcaactgtcttcttcgcctacataggatttgattcagttgccagcacggctgaggaggtgaaaaatccacaacgagatctgccactgggaatcggaacagcattgtcgatttgctgttccttgtacatgttggtttcagttgttattgttggtctggtaccatactttgctatggacccagacacccctatttcatctgcttttgccaaacatgggatgcactgggcaatgtatcttgtaacaactggtgctgttcttgctctctgctcaaccttgatgggatctatattgccacagccaagaatattgatggccatggcacgagatggcctgctaccatcattcttctctgatgtccataagacgacacaagttccagtcaaaagcacagtagtgactggcatctgtgcagctgctcttgctttcttcatggatgtctctcaactggctggaatggttagtgtaggcacgctactcgcgttcactatagttgctgtgtccatcttgattcttagatacgttcctccagatgaggtacccctcccatcttccctgcaagcatcattccgcttgagccaagaaaatgacgaggaaaagctgaggggtacccttggagatgatgatcatgagcaaggctcagctgaaataagtgatgttgtagtagaaccaatcactgaccccctgatcgagaagcagctatacgcaagcaatttgagtgaggcaaaacggcgtaagaccgcggcatgcagcatcacatctgtttgcataggggttctgatcctcacgacgtcagcctcggcaacattcttgcccttcccggtgagatgctccgtttgtgttttgggtggcatgctcctcctagctggtctgggcatgctctgctggattgaccaagatgatgggaggcactcctttggccactccggaggattcatctgtccgtttgttcccttgctgccggtaatgtgtatcctcataaatacatacttgttaataaatcttggtggcggcacgtggatgcgagtgggggtgtggctagtgatgggggtgttcgtctacattttctatggccgcacccacagctcgttgacggatgtcgtgtatgtccctgtggccgaggcgaatgagatatacgggtcatcctcttcgttagggtttgtggcgtaaagagagatggaaggagatgtttgttgaagcctatcttgagccagtcatggtacttctcacaaaaacctcaaagatcctgactggagcaggtacctgcttgagctattgtgttgcaggcatgggtttgaagaattcaatttgtacgtcatatttttaaaatgtgtaaattgtaacgcacggctaagcttgtgtgtctctgttggaggaatgtaaatattagtatattgcatagaactatatataggtggtgccaatatacaggtgtttaaaaaaaagggggggggtcattctaggaatctgtatgttttactacgaacttgttctaaattcctaggaattcaaacaggcatgtctgaggcgtattatgtggttaaggcctcaaaggtccaaacacattttatttcatgttgaaatgaagattacacgagcagaaatgctcacggaaaaaacaata

SEQ ID NO: 93975 - DNA, 109 bp, Zea Mays
gctaccgttagcatcaagcgaagattatccgtaaataagggtgtatttgcttgcggagcatttgggacagccgatgatagctacgtccaacggggttctgtctcggttc

SEQ ID NO: 93976 - DNA, 641 bp, Zea Mays
ggagacgggggcgtaaacgcttggtgatgaatcggagacagaagacgactcacttctctccgagcgcgcttaatgggggtaggggagggggcgtcgggtaagggcactacctcctatggaaggggcgatgcatgtggaggatggaagggagcagcgagatttggagcatggatggtgggtgcggttcatgttgttgccgtcgccctcggtgtagtggcccttggcccagttgttgccggcgccggactggccgaagacgaaattgtcggggcggtagatctggccgaaggggcccgagcgcatggagtccatggtgccgggctcgaggtccatgaggacgacgtgcaggacgaagcggccgtcgctggcctcgttgtagtagacgttgatgcgctcgagctggaggtcggagtcgccggtgtactttccggtgtggtcgatgccgtgctcgtcgcatatcaggcatcgcgaaggtgggattcgtgggggattggggcaagagagaggaagcgtttgctgtgaggagtcaggcaggggcacggacgcgcggaaccgaggaggtggcggtgcagcgagggggagaggaggtggcgacgtaggggcgcggacgcacggtgaggaggtggcggcgtcgtcgttgg

SEQ ID NO: 93977 - DNA, 267 bp, Zea Mays
atgaaggtggcggagatggtcaagaaggggaagaagtccaggaaggggaggagcaatataggagaaactttgcaagcggcttgtgtaagtgtgcgacttctcatggctcttgattatctgcatgcaaatcacattcttcatcgagacatgaagtgctccaatatatttattgccagagataaaagcatatgccttggtgactttggtattgccaatatattggcatcagatgatcttgcgtcttctgatgttgcatttgagaaatga

SEQ ID NO: 93978 - DNA, 633 bp, Zea Mays
ctgctcctatcaagtgcagagggaatgcggccagaggatgtgggcctaagcccagacctgagattctttagggctcgagacaccgccactgctcaggtcgtcccgacgataacgcacacggcgatatacaaatgcccgagtttctcgattgtgacactattcttgccatgaaacgtggtgatccctctccacaaccaccctggaatgacggtgttcggcaagctgctcctcgggtcgatgcacatcaagtcgtacgactggctccgcgctggtcctgatccttctgcgagcactactagttcttcatcctccgatgtgaggctggtagaactggtggtggacgacgtcttcacagcgccgtacgtgcgacacctccgtgctatacccgacggtaggagggaacatgcaccagttcaccgtcatggcgaactgcacgatcctcgacgtcctcgagccccttcctccatagaggaggacagggactgcacgtactacgcggacataccatacacacaccattcgatggcgggcgcaggcggtgacctcgacggcgtggacgtggagtggggccaaggccgtctagcgtggctggcggagatcgatgttaagagtatgtgtatgtattctgttaga

SEQ ID NO: 93979 - DNA, 107 bp, Zea Mays
gaagtctattcgatcgacccatgtttttggtggactctaatctatcctctaactcttagtgtcaaccgaatcagttgactaatcatcacgatttaatagttctttgg

SEQ ID NO: 93980 - DNA, 104 bp, Zea Mays
aaaaccctatatttctttagaatcaacctgcactcctacaatcccttctctactactatagttgtcattatgattctgatccacaatgacaattagttagtgtg

SEQ ID NO: 93981 - DNA, 930 bp, Zea Mays
atggaggtggcggcggccgcgacggcgggcgcgggggttgtggagctgcagctcgacctactcgaggcggcggcgccgacggagcgagaggccaagaggcgccgggtgcacccggttccagcgggcccaccggccggggcagcagcgccgggacgccgcagctgcagccgcaggcgccgcgccgtgcagcgtctcttccaggcctgccgccacgtcttccggggccccggcaccgtgcccagtcccggcgaggtccagctgctccgccacatgctcgacaggatgcggccggaggacgtgggcctgagcccggacctgagcttcttcagggctcgagacgccacacgtggcggtggcaccccgaccataacgcacacgacgatatacaaatgcccgaatttctcgatggtcatcctcttcctgccgcgaaacgcggtgatcccgctccacaaccaccctgggatgacggtgttcagcaagctgctcctggggtcgatgcacgtcaagtcgtacgactggctcaacactgctgaccccgatccttcttccgccacgagcaccaccagctcttcgtcctccgatggcccatgcctgaggctggcagaactggtggtggacgacgtcttcacggcgccgtgcgacacctccgtgctgtacccgacggcgggagggaacatgcaccggttcaccgccatggcgccctgcgcgatcctcgacgtcctcgggcccccctactccatagaggaggacagggactgcacgtactacgcggaattaccgtacgcacaccactcgctggtggctgcgggcgaggacgtggagcggggccagggccaaggccatctggcgtggcttgaggagatcgacatgccgagagagctcaagatgtgcagcgtccactatggtggaccgccgatctccgacgagtga

SEQ ID NO: 93982 - DNA, 2523 bp, Zea Mays
gaaacgggcggaagagctaggcggtggagcgagaggcacgaaggtggacagccaagctggggcatcgccagcggtgccgagtcacgctcagacgacggagaccgtgaggccggagccggcgcggcagctgctggtgaacgctgcggcggcggtggccgtgctcgctggggtcatcgcggccgtatggcgcaccttgcaatgaacagtgtgtgtcgcttgtaactatgtggtgttttaactaaacgtctgttgtacaccatgtcaatggccaaagctaaatatgtaacaaaacagagtaccctgctgatctaccacaaaccatctgaatgcaaccaactggaagaagaaaaaacctggcaatgcaagtgtatatagttgcacacagtggagcatttagcttgccgatacgacatctttctttgagccgtgaaacagcacacctcgggggagtggtggcagatgaaacgatgcagatgtcccactcggtttttacgatacaagtacacgggcaacttcctcagaaaccaccaaacagagagtagtaaaacaggtaccgcgtgggggcgagatcaagaaaactactaacctaaccacagacggagtacaacagaacggcgggcacagccctgtttattggaaacaaattggcatcgacgacgccctcctcggaaacgaaaaaggcaaaaaaaaggtgctcacttggcgctggcgagctgggtgcggatgagcttagcggcggagaccatgttggtcagggcgggcttgacctccgtgtacttgcgggtcttgaggccgcagtcggggttcacccagaggatgttggtgtccagcaccgccagcatcttgtcgatgcggtcggcgatctcctcagccgacgggatcctgggggagtggatgtcgtagacaccggggccgatgcccgcgccgtacttgacgccctcgcggaacacggagagcagcttctcgtcggaccgcgagttctcaatggtgatcacgtccgcgtccatgtcgatgatcgagtggatgatgtcgttgaagttggagtagcacatgtgggtaatgacctgggtggtgtcctggatctcgcagttggtaattctgaaggagtggacagcccagtccaagtagaatgcatgctcagccttgcggagcggcagcccttctctcagtgcagcctcgtcgatttggataacctgaataccaccagcctcaagatcctcgacttccttcttgatcgcaagagcgatctggtagcaagtctcaaacctggaagatgggaggagcaacgtcagtaccaaaaacggaagaagaaaacggtgctctgagcaccagaaatcaaaccgttcttgctctagttactgacctcggctggtcattccggacgaaggaccagttgaggattgtgactgggccagtcagcatccccttcattgggcgagacgtcatgctctgtgccgtcttcgaccagaaaacggtcatggggttggggcggctcacgtcaccgtagatgatcggaggcttgacgcaccttgacccataagactgcacccagccattggcagtgaacgcaaaaccggagagctgctcaccgaagtactcaaccatatcgtttctctgtagaacataggccaataaagtcaattaaatgcgactacactcatggtatgggggtttatcttcttagacatcaaaaaccagcagaatggattcaagagcactgacctcaggctcgccatgcacaagcacatcaatgtcaagctcttcttgaagcttaacgaccttgttgatttcctccttgatggcagtgacgtattcctcctcagagatcctgcgatgtgaatctccaataagaaaaccagccaaaatacagacaagtgaagctaggtattaaatgacaactcacttttttgccttgtactcacggcggaccctcctgagctcaacggtttgtgggaacgaaccgattgtagtggtgggaaggatggggaggttaagcttcttctgctgggcatccaatctagcactaacgttggtcccacggcggtggtcagagcccttgagagcagcagcctccttctggacttcttcattggtcacacggggtgaggatttcctcgaggcctgagcagcagcatttgctgcgaaccatacctcatccttttgaccagccaatgccttagcaagagcatcaacctcaacaaccttctgggcagcaaaagcaagccaagacttaatctcgctgtcaagcttagtctcgttcacaagatccacagcggtgtgcatgagcgagcaggaagttgatacgacaagcttgtcttcccaacaacagcctcaagagactggagagtgctgagagatgtagcaagatcatcagcccagatgttgcgtccatccacaacaccagcaaagaggtactttccagcagggaaaccagcactcgtgacaagcccaagagtttgggttccacggacaagatcaaaaccataagcagtcacactgctcagggatgttagggtcctgcat

SEQ ID NO: 93983 - DNA, 3418 bp, Zea Mays
atggaccggcggcagcgcgcggcggcgcgggtgttcgaggacttcgacccggaggtggagtggaagctggcaggggaggagcaggacgtggtggagatcgcgctgccggggttccgcaaggaccaggtgagggtgcaggtggacaaccacggcgtgctgcgcgccaccggcgagcgacccgccaggggcggccggtgggccaggttcaagaaggacctccgcctccccgacaactgcgactccgacggcgtccgcgccaggttcgagggcgagaagctcatcatcacgctccccatcgtcgccgcgctgtcgcactcgccgactccgtcgccgtcgccacctcctcctcctccacaacaacaaccacgccggcgtccatcgccgccagagccgtccgttcctgctcctgaaccgccgccgctgacacgccagaacccatcgccaacgcaggcgcctcctctaccacctcaaccacgtcggcacccatcgcgcccagaaccttccattcctgctcctgaaccgccgccaccacaaccaccaccacctgccgctgaagagctgacagaggccggcaccgaggaacggaaacaatcgccaccgccacaccagacgccgggtgctgctcctgggccgaagactcctcccccgtggtcgtggcagccgccggtccctgtctcgcctccttctccggcgccggcgccgcctcatggtgcagaggaacagccgaagaagaggcagaagcaaccgcaaccgcaagagaccaacgccacgaaacgggcggaagagctaggcggtggagcgagaggcacgaaggtggtggacaaagccgctagggatgagaagcgacccaagaaggacagccaagctggggcatcgccagcggtgccgagtcacgctcagacgacggagaccgtgaggccggagccggcgcggcagctgctggtgaacgctgcggcggcggtggccgtgctcgctggggtcatcgcggccgtatggcgcaccttgcaatgaacagtgtgtgtcgcttgtaactatgtggtgttttaactaaacgtctgttgtacaccatgtcaatggccaaagctaaatatgtaacaaaacagagtaccctgctgatctaccacaaaccatctgaatgcaaccaactggaagaagaaaaaacctggcaatgcaagtgtatatagttgcacacagtggagcatttagcttgccgatacgacatctttctttgagccgtgaaacagcacacctcgggggagtggtggcagatgaaacgatgcagatgtcccactcggtttttacgatacaagtacacgggcaacttcctcagaaaccaccaaacagagagtagtaaaacaggtaccgcgtgggggcgagatcaagaaaactactaacctaaccacagacggagtacaacagaacggcgggcacagccctgtttattggaaacaaattggcatcgacgacgccctcctcggaaacgaaaaaggcaaaaaaaaggtgctcacttggcgctggcgagctgggtgcggatgagcttagcggcggagaccatgttggtcagggcgggcttgacctccgtgtacttgcgggtcttgaggccgcagtcggggttcacccagaggatgttggtgtccagcaccgccagcatcttgtcgatgcggtcggcgatctcctcagccgacgggatcctgggggagtggatgtcgtagacaccggggccgatgcccgcgccgtacttgacgccctcgcggaacacggagagcagcttctcgtcggaccgcgagttctcaatggtgatcacgtccgcgtccatgtcgatgatcgagtggatgatgtcgttgaagttggagtagcacatgtgggtaatgacctgggtggtgtcctggatctcgcagttggtaattctgaaggagtggacagcccagtccaagtagaatgcatgctcagccttgcggagcggcagcccttctctcagtgcagcctcgtcgatttggataacctgaataccaccagcctcaagatcctcgacttccttcttgatcgcaagagcgatctggtagcaagtctcaaacctggaagatgggaggagcaacgtcagtaccaaaaacggaagaagaaaacggtgctctgagcaccagaaatcaaaccgttcttgctctagttactgacctcggctggtcattccggacgaaggaccagttgaggattgtgactgggccagtcagcatccccttcattgggcgagacgtcatgctctgtgccgtcttcgaccagaaaacggtcatggggttggggcggctcacgtcaccgtagatgatcggaggcttgacgcaccttgacccataagactgcacccagccattggcagtgaacgcaaaaccggagagctgctcaccgaagtactcaaccatatcgtttctctgtagaacataggccaataaagtcaattaaatgcgactacactcatggtatgggggtttatcttcttagacatcaaaaaccagcagaatggattcaagagcactgacctcaggctcgccatgcacaagcacatcaatgtcaagctcttcttgaagcttaacgaccttgttgatttcctccttgatggcagtgacgtattcctcctcagagatcctgcgatgtgaatctccaataagaaaaccagccaaaatacagacaagtgaagctaggtattaaatgacaactcacttttttgccttgtactcacggcggaccctcctgagctcaacggtttgtgggaacgaaccgattgtagtggtgggaaggatggggaggttaagcttcttctgctgggcatccaatctagcactaacgttggtcccacggcggtggtcagagcccttgagagcagcagcctccttctggacttcttcattggtcacacggggtgaggatttcctcgaggcctgagcagcagcatttgctgcgaaccatacctcatccttttgaccagccaatgccttagcaagagcatcaacctcaacaaccttctgggcagcaaaagcaagccaagacttaatctcgctgtcaagcttagtctcgttcacaagatccacagcggtgtgcatgagcgagcaggaagttgatacgacaagcttgtctgaacagatggtaggcattatcagatattgccagctgtaactaaatccaattttatgacagacaataagtgcaagcatgattacccttcccaacaacagcctcaagagactggagagtgctgagagatgtagcaagatcatcagcccagatgttgcgtccatccacaacaccagcaaagaggtactttccagcagggaaaccagcactcgtgacaagcccaagagtttgggttccacggacaagatcaaaaccataagcagtcacactgctcagggatgttagggtcctgcat

SEQ ID NO: 93984 - DNA, 200 bp, Zea Mays
gccaatgcaattggtgctggattcatcgtcagattatgatgacgacgaattctttctctctagtactcatatggccatgaatgcggatgagtcagataacgaaacaaaacaatgtggttctataaaggggcaccgagtacttcagcgagatagacaagcaggatatcagaggttatatcaagattatttttcagacaatc

SEQ ID NO: 93985 - DNA, 408 bp, Zea Mays
atggtggccaccggatgcgctcctcctggccccggctctctgctgcgctcgccccaggtcgccgccgtcgagttccctgcgcgcttctctgctcggcgtcctgcttgcccccgatgccgcactcggtcgctatggcgtgcccaggctccagctcccctacgcgctctgcttccttgcgcgcgcgagctcgcttgtgatgctcctgctcctgctccagctcggtccctgctccagcccctgctcgccatggaccttcctgcgcgcgcgctcctctgctcctgcgcgctcccaattttccatggcgctcggccgcgcaaagccttcatcggccatggggcctcatcgtcgctgtccttgcttccctgcagctcggtcatgatttccatcgggcgttctgttttcgtgtga

SEQ ID NO: 93986 - DNA, 2379 bp, Zea Mays
gaggaaacaagcaattcatctcgcacggattagcacaaaacaaatcgggacgagatgaggttggccggatcggaggaggcgagagagcaaatcagttgcaatcagggccggggacctcgtgagctgccacttgtcctttccccattatttttcctgccaaattccacacacgcacgaaccctggagatccgtctcgttcctccacgagcacgaagcaaaatgcactcctctctctgtctcactctcatctgaacccaacccacaccgaccggtcggccggccaagaagaagactcaccactcatcagacgcgcagggaggcagggagccatcatagttcctcatcgtactcactcactgcccgcctccatggcgtccctgcgccagctccacaagtgcaggcgcaatgccgccgccaccgccgccttcctgctcaccctcctctccgtcgccgtcgcgcgggaccaccgccccggcgtgggccggagcagcgaggcggagctgcgggcgccggcgccggcgcccgcgcaggccggccggagctgcgaggcgcagctgcgggcgctgccggaccacgcggcgcggtgccggtacctgtcgtgggcctcgcacccggcgtgcgcgccgcgcgggtacgtgcactacctgcgcctcttctactgcgccttcggcggcgcgccgtggctcggggccgccgcgctcgcgctctggctgctgctcctcttctacctcctcggtgacaccgcgtcccagtacttctgcgccgcgctccagggcctgtccgccgcgctgcgcctcccgccggccatcgcgggcgtcacgctcctgtcgctgggcaacggcgcgcccgacgtgctctccagcgtcgtcgccttcgcggcggccgacgccgacgccggggacgtcgggctcagcagcgtcctcggcggcgcgctcttcgtgtctaccgtcgtcgccggcgtcgtcgccatcgtcgcctcctcgtccgggacccgaggaggccccgtcgagatcgagcgcgccgggttcgtgcgcgacgtctgcttcctcctcgtcgcgctctgctacctcctcgccgtgctgctcaccggctccgtcaccgtctgggccgccgcctccttcctctccctctacgccgcgtacgtcctcctcgtctggacgtcccactgctgcgcggaggacggcacgacgaagcccgccgtcgacgacgtcgctgccgcgggtcccgatcccgacctcgccgcccctctcctcgccgaggaccccgacgaacctcccgcgctccccatctcgtccaagcacgccgaggccgccgcaccgccgcggcgggggaggagcagcctcgcgcgccacgccctccacgcgctgcagtggccgctgtacctgccgcgtcgcctcacgatcccggacatcgcggcgcaccggtggtccaagcgctacgcggtggcgtccgcgctcctcgcccctctcctcctggcggcgatctcgtccccctccagccccgccgccgccctctccggcgcggtggccgggacggtcctcgcggcggcggccgcccgcggcacgtcctcctcgtccccgcccgcgggccgctgccggcgcctcccgtggctcgccggcgggttcctcatgtccgtgctctggtcctacttgctggcgcgggagctggtggcgctgctggtctccatcggcctgattgccggcgtgagggcgagcgtgctgggcgcgaccgtgctggcgtggggcaactcgctgggggacctggtggccgacgtggccatggccatgcacggcggccacggcggggcccagaccgcggtgtcgggctgctacgcgggccccgtattcaacacggtcgtgggcctgggcctgtcgctgacgctggcggccggggcccggttcccgcgcccgtacgcgatcccggcggacgcgtcggcgtaccaggcggcaggattccttgcggccgggctggtgtgggcgatcgtggtgctgcccgcgcgaggcatgcggctggacaaggtgcttggggtggggctgctcctcatctacctcggcttcctcggagttaggctaggctctctgtctctcggaggagcaaacggctcatgatccatcgtctcttcttcttctttgggatccatgacactcttgggtggtgatggatgcatggccagagtaaattattggaatgtcaattcttggagacatatacctacatgcatatatacatgtgaacatagaccctctcccaaaccaaatgtacatagcatattcgtcttcgcaagaacatttcagctagattcctagaatggtgcctgtccacccaattttgagtctggctcactgaccacgtatgtttatttttgtttttggctaatta

SEQ ID NO: 93987 - DNA, 2294 bp, Zea Mays
cctcccggctccgcaaatgcccgcgcacggcacgcgcggggacgcatccaccgccaccgtagcctgtatagctgcgcatgcaccgccgccagcaccacgcactcgctgccgccaagtcccacgccacgctcctcaagtccggcgcctcctcccccacgccctggaaccagctcctcacagcgtactccgccactggcctcgccgccgcgcgccgggtgttcgacgagatcccccaccccgacgcggcctcctggaactccctccttgccgcgcacgtcgcggctggagcgcaccgggacgcatggcgcctgcttcgggccatgcacgcgcgggggctcgccgccagcaccttcgccctcggctcggcgctccgctccgcggccgccgcgcgacgccctgagctcggcgcccagctgcagtcattttccgtcaggtgcggcctcgctgataacgtcttccctgcgagtgcgttgctcgatgtgtatgcgaaatgtggccgcttgggcgatgctcgccgggtgttcgatggaatgccagtgcggaatatcgtttcttggaacgcgatcattgctgggtatacggactctcggaagccggcagaagcaatggagctgtttcttgagatgcagagggtggggtcggtcccggatggtacgacatttgctgtcttactcgcgacaattgctggcccaaggtggtattccttgatgcggcagctgcatggcaagattgtgaagtatggttctgcgttggggttggtagcgctgaatgcagcaatcactgcatactcacagtgtgatgcgcttgcagactctagaaagatttttgatggaattgagagcagggatctgatatcatggaattctatgctaggagcctacgcttaccatgggctggacgatgaggcaatgagattctttgtcaggatgatgagagagagtggaatccagcctgacatgtatagctttacaagtgccataagtgtttgttcggagcatgggtgtgatgatcagcaagggagatcgattcatagtttggtgatcaagtttgggttggaaggagtcacacctgtttgcaatgctatgatcgccatgtacactaggtttgctgataactgcatgatggaggatgcttataactgctttagttctttggtttttaaggatgcagtctcctggaactctatgctaactggatattcacatcacggtttgagttctgatgctttgaaattcttcagatgcatgcgggcagagaatattagaacagatgagtttgggctctctgctgctctgaggtcttgctcagaccttgctgtacttcggctaggtagacaagtacacagtttggtcgtccaatctggttttgcttccaatgacttcgtttcaagttcgctgatcttcatgtattctaagtgcggagtgcttggtgacgcaagaaagtccttcgaagaggcagacaagagtagctctgtgccctggaactctatgatgtttggttatgctcaacatgggcaggcacagactgtgaccgacctcttcaatgagatgctggaccttgaggttcctttggatcatgtgacctttgttgccctgattaccgcctacagccatggtggtcttgtagatgaagggtcagaaattctcaatacgatggaaactaggtataaaattcctatgcgaatggagcactatgcatgtggtgttgatctatatgggagggcaggacagcttgataaagcaaaagagcttattgagtctatgccatttcagccagatgccatagtttggatgacccttttaggtgcttgcagaatccatgggaatatggaactagcaagcgatgtggcaaggcatttatttgtggcggaacctcgacagcactccacctacgttcttctctccagcatgtattctggtcttggtatgtggagtgacagagcaacagtgcagaaggtaatgaggaacagggcattaagcaaaattcctggatggagctggattgaggtgaaaaatgaggtgcattcctttaacgcagatgataggtcacacccaaggatggttgaaatctttgatatgttaagaatgctgcttcaggttgcaccgaggctttgctcttctggaggtgaagagattcccatgacaatatccagtgaaacatgacctgcaaccttttgtcttgcacattttttcttaacaacccagtgttatcattgtttttttttttttgaaaagaaatttactgtaggagactcctacagtatttattttattgtttcagacgattactttaca

SEQ ID NO: 93988 - DNA, 176 bp, Zea Mays
ttttttttgccatctagttcacgttgggaatacgctatcacattcagcgctgcccggacatgtgcacaacagaatgtacaacatagaaggcgacggaatgtacagacagtagacttgcagacgttgtacaacatagaaggcgacggaagagcaggcacatcttcaactcatgaacc

SEQ ID NO: 93989 - DNA, 1731 bp, Zea Mays
tttttataggccctagaactagaaattctgctcatgcttttatccttgttatagatgggcagccctagtcccaatgagtcactagtttggtgttcgaagcagcctctccgtatttgtgggggaagcgcttttctaggcctcactcatgtatagcaggagcttaaaactgaactgttggtagctctgttcttaaggcgtcgcctaggcgtccaggcggtggtcaaacgcctaggcgccttgcccgcctacctcgcctaggcgtcgcctaggcgccgcctaggcgtccaggcggtgctccaacgccttggaccgccttaccgctttaaaaacccgtttccatgccatgtcattctttgcttcgcaggagagtgacgagagcaacacagaatggctctctggttacgtagaggactgcttttcgagctccacgtcgtacacaaatcccgtctctgcaatggcaagcgagggtgtcggaaaaccaaagctacctccaccaccatcctccaacggcaggagaaagaaacggagcttggcctccgtcatgaccaacggcgactaccaacaattcgtcctcccgctgtacgtcgagccaccgctgatcctgatcgaccagaaacactggatggcagagagcgagctgatccaccccaagaaggacgacgacgaccgagaggtttgccagcaacaagggcaggagcaagagaagggcgtgccgcggctggtgaagatgtgcagcaactgtctgtcaagccaaacgccacggtggagggacgggccgtcggggcgccagatgatgtgcagcgcatgcggcatgaggctcaagccagagaccaggttgtcagccgagcagcagtgcggccaggaagaacccaccaggaaggagcaagagccagacaggaagaggaagaaggcggccaagaagacgtgctacgagagcagcgacgccccgccgtcgtcggaccagcaagagaagcggtgcgcccactgcctgtcctccaagaccccgcagtggagggcggggcctctggggcccaagaccctgtgcaacgcctgcggcgtcaggttcaagtccggcaggctgctgcccgagtaccggcccgccaacagccccaccttcgtgagctgcttgcactccaactcccacaagaaggtcatgcagatgcggcaggccgtcgcgcagcagcagtgaggccgacgtctcccggaatctatcgttggaagcgcgttaggggatctcttagatcgtagcttagtcgatgctcagagaggatgagaacagagactttggttatagtagtagtaggcaatcgtcgttagctctagcggtgttctagctcagactgatttgctcggtgtttttagacgtcggattcaatacaatctcgatgttgtcctgaattgtgctatgggttttcggtccattagatgttcaaggtttcaattgggaactcggtgtttaaagagaattgctatgaaaaggcatcagttcctggaagatctggggttgtacgttgcctggcgcgatctcgtcccagaatcaatggcgcgtttttctggcaccaagacctccaggtgcagtgctttgctttgctctgaaccaatggcagcaggttcagaacacaggtatctgcaggtcaaggtcgtccaagtatctgctaccaagctgcctttgggaggtagaggcacttttcaacttttgtgttgcgcgtggatttgttcgaatgcccttta

SEQ ID NO: 93990 - DNA, 1195 bp, Zea Mays
gtcattcacgggaaaagaggacttggcctcgccttcccttgcgtgtttaccgacgccaccggccgcctgtatatcctcacccaactccgtccctctctcccggcccagatagatctttcccccgtcctccctcgccttcgccttcgccggcaggagatttccaccaccaccgccgacaaggttggcatgtcctgtgagggctgtgttggagctgtcaagcgggtcctcggcaagatggaaggcgtcgagtcctacgacgtagacatcatggaacagaaggtcaccgtgaagggcaatgtgacacctgacgccgtcctgcaaactgtttccaagactggcaagaagacttcgttctgggaggctgaggccgtgacaagtgaatccgccacacctgccggtgccaccgcctgacaggttcgatgatctggaagtgcccggcaaggcggcaaagaaaaaaaatgtgaatgtatttagcttggatctgttacaaataattgcaaactgctagctcggtctgtacattttacagttgctattcgtgtactgtgatgttctcgtaagtttggggagatgataaaccaatatttgtatgatatatgtgtcgtgttccataaggtaaggttttgacggtgtgctatcatcacctgaggtgactttagcatcaccaggctacttcaactcggttaccccattcccatggctccatgcctggtatgatggtcccgtccaattgccagatcctcgtctatccagcgaaagcatttctttgtgggaatgagaaaaattacattcttggagatggagacactgttcaagaattgcactttattgtttctgggatggagaaagggggtatttgggtttggataatttcacgtgcaataatgcagagggacggatgaattggagatggtattgtgacagcacagcgctagcaacgttgatatagattgcgagaagaaacaaatgaaggttgcgggctcaggctagcagaagatgcctctccctaggctctactctactagctttcattgcattgcatggtcctggaacgtcctcctgtcgacagcgtagtactcctacgccgttcggtggggggtacacctctaaacctctaggagggataccatgcctgccgccttgttggaatgttggacctggtcctgctctggtattgactactgcattttttgtc

SEQ ID NO: 93991 - DNA, 1245 bp, Zea Mays
gtcattcacgggaaaagaggacttggcctcgccttcccttgcgtgtttaccgacgccaccggccgcctgtatatcctcacccaactccgtccctctctcccggcccagatagatctttcccccgtcctccctcgccttcgccttcgccggcaggagatttccaccaccaccgccgaaccgccccgaccctcctcccctctcgcgctatggcccagactgttgtgctcaaggttggcatgtcctgtgagggctgtgttggagctgtcaagcgggtcctcggcaagatggaaggcgtcgagtcctacgacgtagacatcatggaacagaaggtcaccgtgaagggcaatgtgacacctgacgccgtcctgcaaactgtttccaagactggcaagaagacttcgttctgggaggctgaggccgtgacaagtgaatccgccacacctgccggtgccaccgcctgacaggttcgatgatctggaagtgcccggcaaggcggcaaagaaaaaaaatgtgaatgtatttagcttggatctgttacaaataattgcaaactgctagctcggtctgtacattttacagttgctattcgtgtactgtgatgttctcgtaagtttggggagatgataaaccaatatttgtatgatatatgtgtcgtgttccataaggtaaggttttgacggtgtgctatcatcacctgaggtgactttagcatcaccaggctacttcaactcggttaccccattcccatggctccatgcctggtatgatggtcccgtccaattgccagatcctcgtctatccagcgaaagcatttctttgtgggaatgagaaaaattacattcttggagatggagacactgttcaagaattgcactttattgtttctgggatggagaaagggggtatttgggtttggataatttcacgtgcaataatgcagagggacggatgaattggagatggtattgtgacagcacagcgctagcaacgttgatatagattgcgagaagaaacaaatgaaggttgcgggctcaggctagcagaagatgcctctccctaggctctactctactagctttcattgcattgcatggtcctggaacgtcctcctgtcgacagcgtagtactcctacgccgttcggtggggggtacacctctaaacctctaggagggataccatgcctgccgccttgttggaatgttggacctggtcctgctctggtattgactactgcattttttgtc

SEQ ID NO: 93992 - DNA, 615 bp, Zea Mays
gtcattcacgggaaaagaggacttggcctcgccttcccttgcgtgtttaccgacgccaccggccgcctgtatatcctcacccaactccgtccctctctcccggcccagatagatctttcccccgtcctccctcgccttcgccttcgccggcaggagatttccaccaccaccgccgaaccgccccgaccctcctcccctctcgcgctatggcccagactgttgtgctcaaggttggcatgtcctgtgagggctgtgttggagctgtcaagcgggtcctcggcaagatggaaggttggtttcttgctcgtgcttaatagtacgtgtatcacctgctattagcaagctgtgattggaattggctgtgttgcgctaggagtttaattgaatatcaacaaaccatggctatgctttgcagctggcgctgcactctaaacttactatattttgatcatctgaaatgtatttcagtcatgttgctacagcatccgggtatgttattggtgtctaacttgtaatgcaattgccaattgcatgtatactagtcttaaatcaccaacttaagtggatgtaggtattagatgtactgtgtgtgtactgtagggtttctcttctatc

SEQ ID NO: 93993 - DNA, 2263 bp, Zea Mays
tgccgctccctctccctccctccgaccgccgcctcctcttccgccgaacccgccccgacccaccaacccccgcagagccgggcgtgcagtgcaacggcagcggcgacccgtctcctcgccgcaacaactcctcgctcgctggtcatcgtcgtgcgtctcctcatcctctcccgcctcgggatccaccgggattcgtcgtgaatcgagtgtatgcaatggctacaagtcttgcaatggacgagtacgcagaaccggatgtttctacgacggaccccgtcgacaagaagccgcctgccttcagagggctgaagcagtacgtgagagacctagacgcgaacacactccctccgttcctcgcccgtctgtgcgctcccgacaggccatcctcctcatactccgaggaggagatcctgtgcatcttcgagaccgcagcagaagctcacgggcgcagcatcgtaccgcacatcgggcagatcgtctcggccgtcgtcaggatcatggcgtcaggttcaagcaccccctcgcattgcgccggttgctccaaggtggtctgcacgttgtctcgctactgcatcgaccctctgggcagggaagaagagaagtccgagaccatgagctccctctgccgccccctgtcagactgcctgatgcacgccaacaagagcgtctcttccggttcagctctctgcatcgctgccctcgtccagtccaacaactggcagtttgcgtctaacgagttggttaacgatgtctgcctgaaagtgtcgggcgctctggaggaggagcctcgctgccagactgctgctgtgcatgttagattggtgcttgctctggtaaagcacagtcctctgacgctggagccttacggacggacgctgataaagtcgggcttgcaggtactggatcgtagcagcactgaggcgagcagttctcagatgatcatgtcgtcgattcagatgatccattcgatcatgagaagcgtgaacgtgaggaccatatcttctgagatcagtagcatcatccatgctctggagcactgccaggaggacggcttcgctccagatatctgcgccgcagcttctcaggcagccgagactgctaagctactactaatgaggcaggaggaacgtggggcacacagaaacgttagccctctgggaaactgcagcggtgggaacagcaggaaggggtcgaattcccctgttgatcgtgcgggtatcagagacagtgggtctagcggatctcctcgtgagacgcgatctgtccgtgggtttgacggcttcaactctccgctgcaaggtggacaacagtgcactggtgttcttggagctacgcgcgcgaggcgccggctttggagctgcggatctgagttttcgcaagggatgtccgacgatgagcgtttcttccgtacctgggcaccgtctgattcttctgatctcgtcaagtcgagcaggaggcgctctgatgtgctggcaagaatcggtgatccgtgtcctgcctgtttaacgccccaggcagctaatcaggtgtgcagcagacggcaagcgttgtcgactccaaggaagcagctgcagtctctggcctactgcagcgattccgaaagagacggacaccgccgcctgcctccaagatcagctctaacgttgtttacgcagcgcccggaccatccttcgtttcaaaagaactctggatgcgagggaaggaaaggctgttgcagctcgacgcagcagaggaggaacctccagtggagcacacggaccggggactcgctggccgaagacctgaagttcgccacaagcagcagcagcagcagcagccggcgttgttgttctgacagcgcacgagctcctcctccgccgccgtgcgaagaacgccgatgcgacgacgctgctgaacatcgtccgaaggtgactgggatcgccaagagaagagagacgaaccgtcgtcggagcacggctcggttttttatctgcgctatggtggtggtgttcgcggcggcgctgttgctggcttgctgggagcaggaccaccaccccagtaacgagctgtacttcgtagtacctacttaggcctggttcgtttctgctggattggtgggtccgaacgatttctaactggattacttttttaatttatataaattttgattagttggaacgattctaggtgcaattcgacacaaatgaaaggccttagcgtatgcctccatgtgagtgtaaccgtaagatcttacctttgtaagaaaaaaggagggtcattttcg

SEQ ID NO: 93994 - DNA, 1633 bp, Zea Mays
tgccgctccctctccctccctccgaccgccgcctcctcttccgccgaacccgccccgacccaccaacccccgcagagccgggcgtgcagtgcaacggcagcggcgacccgtctcctcgccgcaacaactcctcgctcgctggtcatcgtcgtgcgtctcctcatcctctcccgcctcgggatccaccgggattcgtcgtgaatcgagtgtatgcaatggctacaagtcttgcaatggacgagtacgcagaaccggatgtttctacgacggaccccgtcgacaagaagccgcctgccttcagagggctgaagcagtacgtgagagacctagacgcgaacacactccctccgttcctcgcccgtctgtgcgctcccgacaggccatcctcctcatactccgaggaggagatcctgtgcatcttcgagaccgcagcagaagctcacgggcgcagcatcgtaccgcacatcgggcagatcgtctcggccgtcgtcaggatcatggcgtcaggttcaagcaccccctcgcattgcgccggttgctccaaggtggtctgcacgttgtctcgctactgcatcgaccctctgggcagggaagaagagaagtccgagaccatgagctccctctgccgccccctgtcagactgcctgatgcacgccaacaagagcgtctcttccggttcagctctctgcatcgctgccctcgtccagtccaacaactggcagtttgcgtctaacgagttggttaacgatgtctgcctgaaagtgtcgggcgctctggaggaggagcctcgctgccagactgctgctgtgcatgttagattggtgcttgctctggtaaagcacagtcctctgacgctggagccttacggacggacgctgataaagtcgggcttgcaggtactggatcgtagcagcactgaggcgagcagttctcagatgatcatgtcgtcgattcagatgatccattcgatcatgagaagcgtgaacgtgaggaccatatcttctgagatcagtagcatcatccatgctctggagcactgccaggaggacggcttcgctccagatatctgcgccgcagcttctcaggcagccgagactgctaagctactactaatgaggcaggaggaacgtggggcacacagaaacgttagccctctgggaaactgcagcggtgggaacagcaggaaggggtcgaattcccctgttgatcgtgcgggtatcagagacagtgggtctagcggatctcctcgtgagacgcgatctgtccgtgggtttgacggcttcaactctccgctgcaaggtggacaacagtgcactggtgttcttggagctacgcgcgcgaggcgccggctttggagctgcggatctgagttttcgcaagggatgtccgacgatgagcgtttcttccgtacctgggcaccgtctgattcttctgatctcgtcaagtcgagcaggaggcgctctgatgtgctggcaagaatcggtgatccgtgtcctgcctgtttaacgccccaggcagctaatcaggtatacatggcatatttgttttctgtttacattgttccttgaatggttaccagaaacaatcttgtgtgagtgttgaatatatggcgatcaagaagttccacggtgtt

SEQ ID NO: 93995 - DNA, 755 bp, Zea Mays
aacgaaagaccgccccttgttccactttcttgcagcacacagcgcccccaaaggccggcttctaagcgacacaaaacccacccaaaccaagagggtaacagggagcactagcgcgaggggaggcggcgaggggactgaccaaaccggcgggctggtgcgggaacaggtctccgagagacgagtcgtcggccgcattcgcagggcgcacatccatgctgcgtctcgcggaggaacggaggccgcgtcgaggtcgagacggggggcgaaggtgcaggcaggcaaccgccggcgaggcggcgctgccagagggagagggagaggagtaggtgaggggatttcgggagctttttacttgagagcggactagcggagggagaggcttttatgggaggaaacgtatgacgtgcacaaggtagacaggactcacgagcgagaaaaacttttagctaaatatgcgggtttatcgtaaaatacatcagtcaaaaaaggttagataaagaatctcgattagtcctatacaattatgtacgaagaagatcttgtgcacatgatatgttacagacgttgggttcctctaattttgtgtgtgttgggcaacaactgtatgtggttttccatgttccttttcacattttttgtatttattttatttgcttgcttaggatacgctgcttcaatccattcatatattcaccctcggtttttttggtcggtttgcatggcatgggagcttttgatagtttcggtttcatttc

SEQ ID NO: 93996 - DNA, 1260 bp, Zea Mays
caatatgtggcacacagcagaaagagtggcctgtcggacaatggaggtaaggaggtggatccgcggatgacactagacagtagacacggcgcaggcgcaggcgcgcgcagagcgcaggccttggccggccacacctctcgatcgcagaataaaaacagggcgaataccccaatgcaaacagcaaaccgagttccttcttcgcttccgccagcaacgcggacgcgcaaagcctcgccgctgacgccacgtctccaatgctcgccggcgtcggcagccgccggcgatgccaacgatcccgctgaagcgcccggcggcgcaggccgcctgcgccgcctcctcgcgtcaatgcgcccgccggggcctctcccggtccagaccggcttcccgacctccctcgcggacatcgtcgtcaagaaccacggccgcatcaggaacaccaggaagaggcgccgcgccgctgccgcggagccccagcaaaggcgcaagctttcggtggctcgcgacgcggcggcaccggcaccggcacgcccatccaaaggcgcgggcttcagcgtccgccagggctcctcttggtcttcgctggtggtgatctggagcaagcagctggtggccgcggccacgctggcgtcggtggcgctgtcctgtatcgagtccgtccgaagcaatcgatggcgcctggctctggtccgcggccaccagcaagttgtcggccagtaacaatctcaagctaaaacagagcaggagatcgctgcgcgctactcgccaacaagttgcgaaacggcaagacgctccgcggcacggattcccggcacggcgacgacgcacgcgagcacgagcacacccggagacgcccgggcgatccaaagcgtggagcctgccgtagttgctgctaccgccgagcccacaccaccgccgccaggtcgctccaccgtcgacgcggatgcgcattaccgtttcccgcgttggtgcgttggtgccgactgcagatcatcctcgctggcctcgtcaccgggaagatgccggcgctggcgctggccgtgctctgcgttgctttctccagctcagttgggacttgggagagttccagttccgtccattggtaatgctaatgctccgattcagcaaggcagggcaggtaggtaggaggtagcacagcagagagctccgttgcgtctagacttccaggtggagcaatgagcattgtagacagtagagcacgaattgtctcccctgaaacgagaaacccgaccgaatttgctt

SEQ ID NO: 93997 - DNA, 381 bp, Zea Mays
ccccaccacaccatgaggcagctgatccggcggctctcccgcgtcggcgactgctcgccgccgccgtcccactcccaggagacgaggaagggcgaggctcacgcgggggtgccggaggggcacgtgccggtgcacgtgggcggcggcgcggacggcgcggaggagcggttcctggtgcgcgctgagctgctgggcgcgccggctctcgcggacctgctcggccgcgccgcgcaggagtacgggtaccgccatcagggcccgctccgcatcccgtgccccgtcgccgtcttccgacgcgcgctcgcctccgtggccgtggccgccgccggcgacgaggagggcgactgagtaggatcggccggaagaggaagctcgctctgg

SEQ ID NO: 93998 - DNA, 1183 bp, Zea Mays
agctgcactgcagcacacgcgccaccgaagcgctctgcccacctcgctcccctccagtggccgccagcgcggctcagcggtccatcctcctgacgccacctgcaacggcgtcaggcggtgatccattccaactcgcgctccgtcctggcaatcactttgggaaggtggtcagtggaatagctttgcttaaaaagcttgaagcagttggtagtgaaactggaaatccttcttatcaagtgaaaattgtagactgtggtgaagtttccaacacaaattctcaggatccgctaaagggagataaagtaagctcaaagacagataacagcagttcagacagtgaaaagggtggccatcgtaccaagcgttccttaccgaaaggaatgatccaggtggaagctccaggaacaatcccattcagtttgatgtaaatttaatgaaaccagtaaatgtagatggcaacattggtggtgataatgcagaggctagcatgtctagaactggtgaaggaaggcatctgccaagcaatgaacctttgtccaccaatggtaaagatttaggtgtgggttctgcagacaatgggcaacctcaacaaatcaggaaaggacgtggttttactcagaagtatgggtatgcacgccgatataggacgccatctcccgagcgtccctctgtttgaccccgctacgatggagggagagatgatagatggaacaatttcaataggtatgaaagaaatggtccttacagtagacgctcgccagtaaggagataccatggctcgccaagagccaatagcccatccagtactacccaagcctcaaccgttcaaagtgttgctcgaaggggatatgtacaggtaatgcatccatcgtactgttgatttagccatcccaacctgcaaataacctttgcatattctgtttgacatttttacatagtgttttctttaaatgaaaccgactcatactactcggcctacacagtgcccattctgcaaaacgcccaattatgctgtggagtatcgtggcatcaaaacaaaggagtaaaggagcatagagcagtttacagacaattgaaaaagagaattgatcttttttatgggcgaagtgttgaagatggctttggtgaaggaaatgtcttgttagcatcaagtaagtggcgacatcacaacccctacaagctt

SEQ ID NO: 93999 - DNA, 198 bp, Zea Mays
ccgagtgccatatatctggcactcggcaaataaggtctttaacgagtgtcttctttggacactcggcaaagcatatttttattgttttcaattttggccaccaaactttttgtggtatgttcctacactatgtagacctacatgtatcattttgggacaattctaacagtgttttcaatagctagtagatttagttcg

SEQ ID NO: 94000 - DNA, 923 bp, Zea Mays
ctcctccacactacaaacgcattaagctcttagctagccctagccacgtacccacacatcgtagacaacgcaattagctaggaatagcatccatggcgtccggggctgctgcttcctcggccctcttgctcctcgtcgcggccttggtggccaccagtgcgagggcggccacattcaccatcaccaacaactgcggctcgacggtgtggccggcggccaccccggtgggcggcggcacgcagcttgaccccgggcagacgtggaccgtggacgtgccggcggggacccagtccggcagggtgtgggggcgcacggggtgctccttcaacggcggcagcgggagctgccagacgggcgactgcggcggcgcactctcctgcacgctctcggggcagcctcccatgacgctggccgagttcaccatcggcggcggcggcagccaggacttctacgacatctcggtgatcgacggctacaacctggccatgctcttctcgtgcagcaccggcgtgaccctcaactgcggcgggcccagctgcccagacgcctacctgtttcccagcgacaacaccaagacccatgcctgcagcggcaacagcaactaccaggtcaccttctgcccgtgagatcgcgcgtgcgaggcaggcggcagtgtggccggacgacgatgcaatatgcaatgcatgctccagccaacttctttctttgcaaataataagtatgttgtttgtcctagtttgttattagtggagaaattaaaaaagtagacaatcgaataagacgatgatgttcaccccatagattatgtaacttcgatgagtttgatctatatatatgtgcttgcaaaacatagaggatgtgtatgtgtctgagaactttccgtttatgcatgtaggcctgtaaaaaaagctcaaacttgacga

SEQ ID NO: 94001 - DNA, 978 bp, Zea Mays
caaccttgccagcagcaagagtgagtagcctagctctatagctcgagtattgcttgctctccacaagaaacaaggcagagcaccaacaatggccgccgcctcctcgtcctcggtcctcctgctgctcctggccgccgccttggctggcatgagcgccaacgccgccaccttcaccatcaccaacaactgcgggttcaccgtgtggcccgcggccaccccggtgggcgggggcacgcagctgaacccgggcgggacgtggaccgtcaacgtgccggctggcaccagctccggccgcgtgtggggccgcaccggctgctccttcaacggcaacagcgggagctgccagacaggcgactgcggcggcgcgctggcctgcacgctgtcggggcagccgccgctgacgctggccgagttcaccatcggcggcagccaggacttctacgacatctcggtcatcgacggctacaacctcgccatggccttctcctgcagcaccggcgtgcggctggtgtgcacggaccctggatgccccgacgcgtaccacaacccccccgacatgaagacccatgcatgtggcggcaacagcaactaccaagtcaccttctgcccgtgatcggccggaataggctctgcatttgcatgggctagtgatttggattttgcaggaataattctgatttggatttgcacaataatatataagcgtgcattacacgtgcacgcatttgtatgtacgcgcgtatacgtcgtacctacgtagctggatttgtgtgcgtgcttcgtaccaaatattaataagaataaacaaatatgactcgtgtcatacatatacacgacatcgccgtatcattttggttgtatatctagcaatcatttcgcttaagagcaccaagagactagatataaattctagctaaatttagagtattgaaagctgtaaaaaagatatataagtttctaatggtgggtgtatccaac

SEQ ID NO: 94002 - DNA, 644 bp, Zea Mays
acgctcaataggcaaagagtagatgccttgcaattgcaagcaaggcaaaaaaaggtggagcggctgatactagcaaagctcctgctcttaaccaatagaatacaacagtgtttggggaaaatatcctcaaggaggcttttgaatttctgatccgaaaatccaagcaaactcggagtatcctgaatggatgtggcacttgctcgacaagcttcatgtactaagtgagttgtggaggaaagaccctaagacagtctcttatgaagacctgaagtgttttgtcaagttggacaacctatccaagatcaaggaaaagaataacatcggtgctaagaactgatctggagtctcagaacaaaacatgacatgttctattgtactttttttattcatatagcaccagacaacattaacatttttatggattttttggcaataatgtagccacctgggatattaaaatgtttccatttgcttggtttcgtacggttttaggcagctacgacactgacattcttttggttcttccatcttgagaagatgcagcttcccaattacttagcaaattatcaagtttcaaggttctacaacattatttgatgtcccagcataggattcacgatttatatatttttcagttcatcttg

SEQ ID NO: 94003 - DNA, 402 bp, Zea Mays
atggagctcatcgaagtacaggggttgagccgccgtcgtcgatctatgccagcaacgtcgttcgaggttaatgctggagccgcggcatggccggtgcttgtcagatcttccctaggggtttgtgcgcgcgatggtgggcggaatcgtgctagattgctcgtcgaacctcatggaacgtcgtggtgccgcgcacgccgtgtaccactcttgggtcgccatccctgcctccgcgtagcgcggtctaggtcgaagttcgagcgcaaggaacatgggtatgatgtgggcgtctatggcaccaccgtgggggcagcctgtgccgccgtgttgaagcaggccgctgcttcgtctcgaccgggtcggggaaggagaccgtccgtctgtcagatccacgttgtgcggtaa

SEQ ID NO: 94004 - DNA, 1526 bp, Zea Mays
gtttcgaaagcgataatggtcccacccacccatccacccgcacgcccaggaggtggacctaccaatcatcactgtccctgttctcttccagcggcgcgggggatagctcgccggagtccggagtcgccgctgccagtccacagccccaccgtctgcttcacctcgcccgtcatgtctgctgccgcagcagctgcagctgccgctcggtgcgtccctctccgggtgtcctcgccggagaccgcgaagtccgccgcttccattcccacctcctcggccgcctctgcgtctgctcccctccgcgccgccgtcgccgcgggacccggccgccggcttccggcgccgccgttccggtgctcctcatcgtcgccggagaactctgccccgcgcgatcttggattgcttctggaggtggaaggagttcttgcagatgtctaccgttttggcaatcgccaagctttcaatgtagcatttcgaagcctcggactagattgtgcaaattggacagagccaatatatgctgatttggtgaggaaagcttgtggtgatgaggaaaggatgctggcattattctttgacaggattggctggcctacatctttgccaactagtgagaaaggatcatttataaaaagtgttcttcgtgagaagctgaaagctttggaagagttctcagcttctgatagcttaccactacggcctggagtggaaaagttcattgacgatgcacttggtgaaggtgttcctttggccatattggctgcatatgggagaaatggagaaaagatttcaagatctatagctatgaagttaggtcccgaaagaatctcaaaaataaagattgttggaaacgttgaggttgaagaaagcttttatgggcaacttgttcttggtaaaggagtcacatccggtttggatgagcaacttgtcagggaagcccagaaggctgcttctgcagagaagcagaggattgcagaaaaggttgcatcgatcctaaaacttagtgttgacatcacagcatccgaaagctctgacaaggtaatagctgctctccgagctggttcagaatacgttgggtgcgacgtgcaaagctgcatccttgttgcgggcagccaatctggtgtccttgcagccgaacgcattggcatgccatgcatagttgttcgaagcagctttaccgcaagagccgaatttcactccgcgaaggccgttatggatggattcggcgacacagacttgaccgtttcgaaactgctgagcaaaaagtggttttgattgtctgtcacctgtggaaacgaagggttggattggaggctgttgtgatttatgaacctgtaaatgattcagtgctaaccggagcaaacctttgtataaacaagaggtgttgctgattaaagttaatgagtaacaaactgaaagaataaattcaggtggcgccatcgtgtgcttctggttatcagtaatctgcctctatcaagtgccatgcatgttttgatgtggagacaatgaaataaataggtcattatagc

SEQ ID NO: 94005 - DNA, 1685 bp, Zea Mays
caaaatgagcgtccaattgaaatacataatctcccatgcaaaaaagttgaaaacatgaatcaaaggaaaatgagacgaggaaggtgggggtgccggatgtatcggaccggagaaatgggccagatacggtgcagaactgcagatgcaggccgtcaaataatgagtttcgaaagcgataatggtcccacccacccatccacccgcacgcccaggaggtggacctaccaatcatcactgtccctgttctcttccagcggcgcgggggatagctcgccggagtccggagtcgccgctgccagtccacagccccaccgtctgcttcacctcgcccgtcatgtctgctgccgcagcagctgcagctgccgctcggtgcgtccctctccgggtgtcctcgccggagaccgcgaagtccgccgcttccattcccacctcctcggccgcctctgcgtctgctcccctccgcgccgccgtcgccgcgggacccggccgccggcttccggcgccgccgttccggtgctcctcatcgtcgccggagaactctgccccgcgcgatcttggattgcttctggaggtggaaggagttcttgcagatgtctaccgttttggcaatcgccaagctttcaatcatttcgaagcctcggactagattgtgcaaattggacagagccaatatatgctgatttggtgaggaaagcttgtggtgatgaggaaaggatgctggcattattctttgacaggattggctggcctacatctttgccaactagtgagaaaggatcatttataaaaagtgttcttcgtgagaagctgaaagctttggaagagttctcagcttctgatagcttaccactacggcctggagtggaaaagttcattgacgatgcacttggtgaaggtgttcctttggccatattggctgcatatgggagaaatggagaaaagatttcaagatctatagctatgaagttaggtcccgaaagaatctcaaaaataaagattgttggaaacgttgaggttgaagaaagcttttatgggcaacttgttcttggtaaaggagtcacatccggtttggatgagcaacttgtcagggaagcccagaaggctgcttctgcagagaagcagaggattgcagaaaaggttgcatcgatcctaaaacttagtgttgacatcacagcatccgaaagctctgacaaggtaatagctgctctccgagctggttcagaatacgttgggtgcgacgtgcaaagctgcatccttgttgcgggcagccaatctggtgtccttgcagccgaacgcattggcatgccatgcatagttgttcgaagcagctttaccgcaagagccgaatttcactccgcgaaggccgttatggatggattcggcgacacagacttgaccgtttcgaaactgctgagcaaaaagtggttttgattgtctgtcacctgtggaaacgaagggttggattggaggctgttgtgatttatgaacctgtaaatgattcagtgctaaccggagcaaacctttgtataaacaagaggtgttgctgattaaagttaatgagtaacaaactgaaagaataaattcaggtggcgccatcgtgtgcttctggttatcagtaatctgcctctatcaagtgccatgcatgttttgatgtggagacaatgaaataaataggtcattatagc

SEQ ID NO: 94006 - DNA, 2332 bp, Zea Mays
caaaatgagcgtccaattgaaatacataatctcccatgcaaaaaagttgaaaacatgaatcaaaggaaaatgagacgaggaaggtgggggtgccggatgtatcggaccggagaaatgggccagatacggtgcagaactgcagatgcaggccgtcaaataatgagtttcgaaagcgataatggtcccacccacccatccacccgcacgcccaggaggtggacctaccaatcatcactgtccctgttctcttccagcggcgcgggggatagctcgccggagtccggagtcgccgctgccagtccacagccccaccgtctgcttcacctcgcccgtcatgtctgctgccgcagcagctgcagctgccgctcggtgcgtccctctccgggtgtcctcgccggagaccgcgaagtccgccgcttccattcccacctcctcggccgcctctgcgtctgctcccctccgcgccgccgtcgccgcgggacccggccgccggcttccggcgccgccgttccggtgctcctcatcgtcgccggagaactctgccccgcgcgatcttggattgcttctggaggtggaaggagttcttgcagatgtctaccgttttggcaatcgccaagctttcaatcatttcgaagcctcggactagattgtgcaaattggacagagccaatatatgctgatttggtgaggaaagcttgtggtgatgaggaaaggatgctggcattattctttgacaggattggctggcctacatctttgccaactagtgagaaaggatcatttataaaaagtgttcttcgtgagaagctgaaagctttggaagagttctcagcttctgatagcttaccactacggcctggagtggaaaagtaagacttcaagcttctattatcactgtatgtcaaaaaaaatctctctagatatgaagtcttccaatgtaaaagttctttgtttccatacacaaatagttcacaagaattacacggccgttttactaagtgtgcattgttgaagtgtataagtggactgtctaccttctcccaacaatttaagcttttaggttaaactagttaatgcgtccactctaacatggtatcaaagtcagaggtctcaagttcgaatcctcgtagagcgttaatttatgtctccacctatttatttccacgtttgtgtctctctctctttggctgcacgtgaatgagggtgttgaagtgtataattggactacctaccttctcctagcagcttaagcttttgggttggactggttagtgcgtccactctaatatgcatgtgtggccatgtggggtctttgttatctgaacaaagggtcagaagttgcagagttgcagcatcttgataaaagtttttatatgtttctgcatgatttcttctatccatgatcattataagctaattattttttggtcctatatgtattcatgtgtacagctttggtctctgttctgtactctttgcttgccataagatatgaatgactcgttcgtgaactttaaattgtcttgtatgtgattctgtgaatgaaatcatttaaaggttcattgacgatgcacttggtgaaggtgttcctttggccatattggctgcatatgggagaaatggagaaaagatttcaagatctatagctatgaagttaggtcccgaaagaatctcaaaaataaagattgttggaaacgttgaggttgaagaaagcttttatgggcaacttgttcttggtaaaggagtcacatccggtttggatgagcaacttgtcagggaagcccagaaggctgcttctgcagagaagcagaggattgcagaaaaggttgcatcgatcctaaaacttagtgttgacatcacagcatccgaaagctctgacaaggtaatagctgctctccgagctggttcagaatacgttgggtgcgacgtgcaaagctgcatccttgttgcgggcagccaatctggtgtccttgcagccgaacgcattggcatgccatgcatagttgttcgaagcagctttaccgcaagagccgaatttcactccgcgaaggccgttatggatggattcggcgacacagacttgaccgtttcgaaactgctgagcaaaaagtggttttgattgtctgtcacctgtggaaacgaagggttggattggaggctgttgtgatttatgaacctgtaaatgattcagtgctaaccggagcaaacctttgtataaacaagaggtgttgctgattaaagttaatgagtaacaaactgaaagaataaattcaggtggcgccatcgtgtgcttctggttatcagtaatctgcctctatcaagtgccatgcat

SEQ ID NO: 94007 - DNA, 1260 bp, Zea Mays
atgtactgtaaggacgaccatgtaaagcagcttccattcagccatgcatccaaacatattaatacagcggttaaccaagtccgtacatcagcttccattaggccccatcgtcatggtcatgcatgtaagcagcaatcaagccctagaaacctcgagctagctcgtcatagaaaccaagaaagaaccatccaagccatggaggatgatgaggagaagccatcacaaaggatcaccaacaaggaggaagacgaagaggatgacgacttggtgttcccgggcttccggttccatccaaccgacctggagctcgtggggttctatctgaagaggaaagtagagaagaagggtttcagaattgacatcatcagggagatcgacatctacaagcatgacccctgggatcttccaaatgaagcacggcatgtggtgcaaggcgcaggaggagacaaggacgactggtacttcttctgcctgcgtggccgcaagtaccggaacagcatccggcccaaccgcgtcaccggctccggcttctggaaggccaccggcatcgacaagcccatacacgacggcgccggcgagcgcgtcgtcgggctcaagaagtccctcgtctactaccgcggcagcgccggaaggggcaacaagacggactggatgatgcacgagttccgactcccctccgcagagttggtcgagctccatgatgctgggatctggacgatctgccgcatcttcaagaggaacacgtcgtacactcggaggtgccagcagcagaagcaggaatacggcagcaagcgaagccagcagcaggagcaggagttgcagtactactacgactactaccgctaccatcaccaccaccatcagcaccattacttccactcgtccgaggcggtttatgctgcagctgaacaccatcgtcagccgtcgttcctgctgcgcggtttccatggctcgtcgtcgtcatcggccgagacgacgacgacatcaggattcgtgggagctcatccattgttgccgccatcaacgacatcgactctagggtggagcgacgcggcgagcttacgggacagcggcatcagcacctgggacgaactcgggaggatcctggagatctgactatgtaaatgcggattactagcgtgcatggttgtgggatgagctagtatatacagaattagttacctgacattacttaattaccgacggtcagcctcagtttgtacagcacagtggttttacagttagtttctcatgtggttt

SEQ ID NO: 94008 - DNA, 1955 bp, Zea Mays
gacaagggatatataggaggggcatatgtgtccagcaatagataattacatacacaggcatccatatatgtagcaaacaacatagcaacatcattccgccacactctccttcagtctttttctctggatccttcaagatagctgcagataacccaacacacacacacacaggggcatcggcacacatcaattttctgcagcagcagcacgacgagaaagcaggattgatatactgatctgatagatgatggatcgacatatggaggacgactcgagcacgttcctccagtgggcaatgaaccatctccagcacccggccgccgccaccgcggtttccgccgcataccagcagcaggacggcggcgccggtgttggtgtccgcatcagcggcggcgccggagaccaggaggactccgccgccgccttcccgtcgctccaggcgctccgcgcatcccagccacaggccgtgcccggcagcgtccgagtccggaacctgacggtgcaggtggctgactacggcctgaccaacagcagcagctccggcgacagccccggcgcagccatggaccacgacgcggcggccgggtggtccccccacaccgcgcgctccaggaccacgggcctcggcggcggcagcaacagcaggccggtcagctggaacttcagcgccgcgtctgcgcagccagcggacgaccgcggcgccgtcggcgtcgcgctgccggacgccccggcggcggtcgcgagggcgcaacaacgtgctgcgtcgtctgcggggaggagagggggcggcgcgggcccatccactgctgctgcgccggcatcgtcgccggggccggtgcaggaccacatcatcgccgagagacggcgcagggagaagatcaaccagcgctttatcgagctctccaccgtcatccccggcctcaaaaagatggacaaggcgaccatccttggggacgcggtgaagtacgtgagggagctgcaggagaaggtgaaggggctcgaggaggaaggaggcgccggtggcagcggcggcatccagtcggcggtgctcgtcaagaagcagctgccgccggaggacgacgccatggcgagcagccatggcggtagcggcgaccacggtggcgatggcggcggtatgccgctcccggagatcgaggcacggctgtcggagaggagcgtgctgctgctgcggatccactgctacagcgccagggggctgctggtgagggtgatctcggaggtggagcagatgcagctgtccatcacccacaccaacgtcatgcccttcccggcctctaccgccattatcaccatcacggccaaggtggaggatgggttcaatgccacggtagacgagatcgtgagaaggattaactccgcgctgcaccaacattatagcagcagttctgaagaaacaagaggataagaagtgtagtacgtctgctggtagctgctatatataataaatgccggccgcggggggaaaaaaccccaaagaagagaggatgaaatgcgagatgaaacctctctttcatttcatcgatctgacggtataaaaatctgagatcagacagaaagtccatgcagtcagtagcctcaacgtcacatttaccatgtgcccatatgcatcacgcactgccatcgtcaggtaaaaatggcacgcatcatgtcgaactggctgctggcatgcctgttgatgatgtagatgcatgacgagaatctctaagccacaagttgcaggtttttggtccaagtggtgcgctgctgttctgttctgttcgttgctcaatcagaatcacggatcggagagaaccagatgaccctttaattcgcttcacgcgtcaggattttttttttgctttagtttgttttcagaggaaagaactggctctgctgtattgtttttgtttacaacaagttgcattgtttgcgtcaaaacccaatccttccgtttc

SEQ ID NO: 94009 - DNA, 590 bp, Zea Mays
ccgccataccataagaagaccgtactacgcactcgtagtttaggtcgtcatggagtcattgaaaagccttgtgttgtcctcgtcatccgacgattccgacgatgagattgataccttgttgcttgcccaacatgttgaccaccttgtacaaggagacacgagcacacgccgtagccgctcctcattgcctcgccgagttatccatagggaccacactgctggagaaaatctcatcaaacatcactacttcggacctaatcctgtgtatccatcacatgtttttcgtcgaaggtttcggatgcatcgtcctttgttcctacgtatccttcgtgccgttcagcgagaagacgaatactttactattcgttgtgatgcaacaggtttagcagggcttggtccattgcaaaaagtatgtgctgcattgcgtatccttgcgtacgggttaccaaccgatgcggtagatgagtacatacagattggacagactaccgctagggactgccttatccgtttttgtcgcgcaatcatatcttcctttagcgaacgataccttcgtatccctaaccacgacgacattgctcgcatactac

SEQ ID NO: 94010 - DNA, 875 bp, Zea Mays
agacgctgcgggggacgcattccctctccgtgctttcttagaggtgggttggcttctcctccccctccggttcgggttcgggttccggatcgagatggcggcgtcggatgttgagtaccgctgcttcgtcggcggcctcgcctgggccacggacgaccactccctccacaacgccttcagcacctacggcgaggtcctcgagtccaagatcatcctcgatcgggagacgcagaggtcccgcggcttcggcttcgtcaccttctccacggaggaggcgatgcggaacgccatcgagggcatgaacggcaaggagctggacggccgcaacatcaccgtcaacgaggcccagtcccgcggcggccgtggaggcggcggcggtgggtacggtggtggccgtggaggcggcggctacggcggtggcgggcgccgtgatggcggtggcggctacggcggtggcggcggctacggtggcggcggcggctacggtggtggtggcggcggctacggcggtggcaaccgtggcggcggctacggcaactccgacgggaactggaggaactgagcggtggggcccgcgcggccaagttatcctgttcgctaccgtgatgtttaccctagtccagagggtttatcttcgttcgtgtcgtgtttgttgttgcccatctgtgtttttgattgcaaggtcgctctgtgtcagttgttagtgctgtgttcatcctcggtttcagcagacccatgcatcaaacagcatggactgcggatcgatggatgctgttacccccgtcaggctttattctaagttaatcttaaggaaaaaatggtgcttcttggtgctgcaaaatggttgtgctcatctgaaaagctacttactctcg

SEQ ID NO: 94011 - DNA, 1328 bp, Zea Mays
catatcctagaatattcgaatctatatttgaattcagattacaaggtagtgaattgtgacatgtattcgttcctatccgatccgtcgtttttgagcactaggtgcggtcactgtgacgcgtggacttggcttcgcccactgccatcgtggacccacgtcatcagcaagtgtccatatccaccacccgacccgacgaccgcttgccgtccgatccgtgtgctcccgagggcaaggatggcatttcgccacgcgagatatttttcggtggcctgcacaggccggcagtgcagcggccaaaacgaggtcaggtcagtcacgctgggccccgcctcacgctcccgtcctgctccgggtcccaacaaagccgtccccgggaggtgctcgtgtgctcgtagcgcggtggcgaccccgatgccccgcatattccactgggcgtccgcgccgtcggatgggatcaggacggccgcggcggccccgcgctcggctataaagacgctgcgggggacgcattccctctccgtgctttcttagaggtgggttggcttctcctccccctccggttcgggttcgggttcgtgaggttctccggggttcgggttcgtgggtgagcggatcgagatggcggcgtcggatgttgagtaccgctgcttcgtcggcggcctcgcctgggccacggacgaccactccctccacaacgccttcagcacctacggcgaggtcctcgagtccaagatcatcctcgatcgggagacgcagaggtcccgcggcttcggcttcgtcaccttctccacggaggaggcgatgcggaacgccatcgagggcatgaacggcaaggagctggacggccgcaacatcaccgtcaacgaggcccagtcccgcggcggccgtggaggcggcggctacggcggtggcgggcgccgtgatggcggtggcggctacggcggtggcggcggctacggtggcggcggcggctacggtggtggtggcggcggctacggcggtggcaaccgtggcggcggctacggcaactccgacgggaactggaggaactgagcggtggggcccgcgcggccaagttatcctgttcgctaccgtgatgtttaccctagtccagagggtttatcttcgttcgtgtcgtgtttgttgttgcccatctgtgtttttgattgcaaggtcgctctgtgtcagttgttagtgctgtgttcatcctcggtttcagcagacccatgcatcaaacagcatggactgcggatcgatggatgctgttacccccgtcaggctttattctaagttaatcttaaggaaaaaatggtgcttcttggtgctgc

SEQ ID NO: 94012 - DNA, 93 bp, Zea Mays
tctgtgggatgctcgaactggcactgccccagctgttaaggttgagaaagctcacactggagatgttcattgtgttgattggaatccccttga

SEQ ID NO: 94013 - DNA, 272 bp, Zea Mays
gcaggaaggttggagcatgaaaacagcccggcaacccacatgacctgctagtgccatctaccaaagggaggcagcaagcaactaggctccaggccggccttctgtgctgcatacatgttgcagcatgctctgtgcgtatatgcccgttcatacagagacggtgtagtccgcgctagtattgactactcaccgatgatgttgatggtcgtgcggatggtgtccggggagatcatggtcgtcgctggcttggggaagctgatggcgcgagggag

SEQ ID NO: 94014 - DNA, 100 bp, Zea Mays
gtttttatttttttttgtttcttactgtacactgagacacaaatggatgaattgattcttacactggggagaggaagagcacgagtgcagtcccattgcc

SEQ ID NO: 94015 - DNA, 780 bp, Zea Mays
ttttatatcatttcagaagcaagaaaaatataaggatgcagaacctagtgcaatagatcttttcaaggagatgcattgtagcaaaaagaaaggttttagtgaaaatgttcagaaagctattgttgacatggaagaaatggtagcagcaccagctcaggatggacaacaaccaaaatctcctacagaagttgtttctaatgtgctactaggctccagtgtgttcctatgcaatgttgatcttcagtccgcctccaagaaaagctccacaacgactgtttctgcaaaggttcaacaactttaggatgaactggagaccgagaagcaagaaaaagatggccttcgggaagaagtggaaaccttaaaggctcaagcacaagcatctcaggagaccattgatagtatgaagaggtcgatggaagaaaataacaacctccttcgtcaactattaagcttcaatcgaggccaagtgcctccatcttaagtctggttgaccactataggacctgcagccttatggctgctatagtggctggttacagtagttctagatttgaagttataggatcattttcaattatgcttaatgtttaatactttgagttgaagttattggatttgttttggattttaagttaaaggatttgcagatatatgttttaaagttatattattctcttctagatgaaatatttgtgttgaacaaattcatatgatattttggttctgatgtgtaatattctatgatgatatgaatgcatatgatgtattccttgcgatgat

SEQ ID NO: 94016 - DNA, 2273 bp, Zea Mays
ccgccattcgccgttaacagcaacaagttctcgatccgcgtattcgccgatcagatcctctcctccctcacccccttcagccttcaaactctatccgagaaccataaccacccatccgatctagctcgccatggactcggatcaggactccctctacgaatggttcgtcctcgccccctccttgtccgacgacgacgagcgtgccatcgcgctctcctccggctgcaccacccccaattcctcccgcgtcgtctccggcaccgactccggctccgacccggagcccgaccacgccgccggatcctccatgtccaagctcttcctcccctacgccgccgccgacgaccccgacgacgccgagggcgtgtacgcgttgtcggacgccgaggacacggacgcgaccccgcctccatcctcgccgctgcccaggccgctctcgggcctcttccaccacacgatggacggggacgtcgcctacgccgccttcgaccctgtccaccccaccgcagcgcctctgcgcggcggcggcggccaccacgatgccaagcagccggttccggaccccaccttctccgccttctttgatgagcccgtcgtcgcgctcgcctccaccaggggcctcctctgcctccgcggcgcctattccgccgcatactacgtcgccaacccggccaccttggcccgcgagcgcctcccagcccccgaacgcgaccaccgagcccagggcgaccccgccgtcgtcatcgttttcgacctcgacccccgtgacgctgaccctgagcgcgctgacggcagcggcaaggggttttaccgccactaccacatcgtcgtcgcgttccccctcgccgagggcatttacgccttcgagtccttctcgtcgagggcttgggcgtggagattcggcaggggggtcggcagcgccgaagccgtcctgccaagctctggggtcggcgcactcggctgcgccttctggcgcaccacaatgggcccgttcctctgctacaaccccttcgcgcgccgcgcggaactcgtccccgcgcccgtcgaggtgatgcagtggccctactgggaactcggcgagatggagggcacgctctgcgccacgtgcatggacgcccgcgtcgaagtcgtcgtcgtcctccgcctcaacttcgcgcgccgcgccacctccggcgccatctcgtggactctggctgggtacttcgagggcggctgcctcaggggacgccaagacgtcaccctgctccgctcgcagggtaaggccgaggtcgtcatgtgggaccccagctccgagacggtggtggccatggacctcgagggccgcactacacgcaccatcaggttcatccctggcagcgactactgcgacgatttcattccctacgtcagcacgtttactgccgtctctggctttggcaaacgggctcatgctgagcgttcgattgttgctacaaataaagtgggtgctgaattggctgttgatgcctaggcatactagactagtggtaacagctaaatctaaggaaagcaagttgcagcatttctttgaagcgcagattcttttgtagtgcccctctagctgtgggacaaccagtgtatgcctgtaaagattttagtatcagctggtgtgtcaaactgacagtcggtccagaactggttttttttaccatgggtgggacttgaaacgtccttttgcttggtttttggaagacaacaagacctctttggttcctgaatgaagtgctgtcgtctgccttcgtctgggattctgtccagctatggctgccattgttttttcctttcctttttttgaatataatggcaggagctatgtctttcaattaagaagaatataattaatctagtgttaagaaaaaccacacaaagctcatccagagttatcattgccgagctcaccacaagggacgagaagctctgactctccaagacaggttgcgcatgaccaaaggaactcgacgttgcctacagccaaacaccgacacacaaggagaaagattgtagtgcgtcgttcttgccatgcctcgacacaccccacacgagatagcttcaattctcgtcaccaatgagctaggagccacaacaccgagcattgggagtaagcggtcgcctgaagcgacaacaacaggtcattgttgtcgagctcaaaccaaagaacagctccaacttccaatcttgatcctctgcctcgccccgggcttttgcctaacctgtgaaacaatcaagtccacgaagaagggggttcgccttatgtc

SEQ ID NO: 94017 - DNA, 1226 bp, Zea Mays
aatcagagaggaggaggcaacacggcacgctaacaaaaaccagaccacgcggaacggcaacagcaagctgcctctctcccttgcgcgcgcgtgatttcatcttcgtccgatcccatcccaccccaccccacctcaccggagcccctctccccctaactcctccggcagctgctccgatcccgaaccgtgattcgctcgatggcggcaaccgcgggcggcaacaagatccgcaacgccaagctggttcttcttggggacgtgggcgccggcaagtccagcctggtcctccggtttgtgaaaggccagttcgtcgagttccaggaatccaccatcggcgcggctttcttctcgcagaccctggcggtgaacgacgagacggtcaagttcgagatatgggacacggcggggcaggagcggtaccacagcttggctcccatgtattaccggggcgctgcggctgccatagttgtctacgacatcacgaacgcggcctcttttacgcgtgcgaagaaatgggttcaagaacttcaagcacaaggaaactcgaatacaatagtggctcttgccgggaacaaggctgatttgttagatacgaggcaggtgtcagcagatgaagcaaaggcgtatgctcaagagaatggtctcttcttcatggaaacttctgccaaaacagctaccaatgtgaacgacgtgttctatgagattgcgaagaaactgcttcaagggcagcaggttcagaacccacaaggcgggatggttctcaaccagagaccacctgagaggatggtgagctcttcttcctgctgtgcgtgaagcgcaagatggaagtgtggatcacatgttccatggcctggactccaggagtattaggtgcgcggaggcggggaagaatgttgccgaatcttgtgaagtggttgccatcccagttgctgaaatcctgtacttttcactgcttgttcgttgccgtgttccttgtaaatgtgaatacttattactttggagactcacgtcacgtgttcttacggtgcatgatcgtgcttgtctttctatgacttgagagaacagagtgaaacaagacagattcgtttgattcacttataccaattacacgatgataaaatttatgggtttaaaggtttctagatgcaactcttttatcagtttgatgatcagtggggtgaacccaaacgacaatgttcagatgtgcatcagtttgatgtacagaa

SEQ ID NO: 94018 - DNA, 1438 bp, Zea Mays
aatcagagaggaggaggcaacacggcacgctaacaaaaaccagaccacgcggaacggcaacagcaagctgcctctctcccttgcgcgcgcgtgatttcatcttcgtccgatcccatcccaccccaccccacctcaccggagcccctctccccctaactcctccggcagctgctccgatcccgaaccgtgattcgctcgatggcggcaaccgcgggcggcaacaagatccgcaacgccaagctggtgaggaatcatccacgcccccccgagccctcgaattcgatccgttcacgccccgctcctcccggtttcgtgtctggattccagtcaactaccagccggaggagtccgtggctcgcccctccgctctgttcccctgacggaacggcgacctgcgagttccctctcggggtttcttgagagagggggcgggggatggacttcgcagcgatcgtgttcttcttggggacgtgggcgccggcaagtccagcctggtcctccggtttgtgaaaggccagttcgtcgagttccaggaatccaccatcggcgcggctttcttctcgcagaccctggcggtgaacgacgagacggtcaagttcgagatatgggacacggcggggcaggagcggtaccacagcttggctcccatgtattaccggggcgctgcggctgccatagttgtctacgacatcacgaacgcggcctcttttacgcgtgcgaagaaatgggttcaagaacttcaagcacaaggaaactcgaatacaatagtggctcttgccgggaacaaggctgatttgttagatacgaggcaggtgtcagcagatgaagcaaaggcgtatgctcaagagaatggtctcttcttcatggaaacttctgccaaaacagctaccaatgtgaacgacgtgttctatgagattgcgaagaaactgcttcaagggcagcaggttcagaacccacaaggcgggatggttctcaaccagagaccacctgagaggatggtgagctcttcttcctgctgtgcgtgaagcgcaagatggaagtgtggatcacatgttccatggcctggactccaggagtattaggtgcgcggaggcggggaagaatgttgccgaatcttgtgaagtggttgccatcccagttgctgaaatcctgtacttttcactgcttgttcgttgccgtgttccttgtaaatgtgaatacttattactttggagactcacgtcacgtgttcttacggtgcatgatcgtgcttgtctttctatgacttgagagaacagagtgaaacaagacagattcgtttgattcacttataccaattacacgatgataaaatttatgggtttaaaggtttctagatgcaactcttttatcagtttgatgatcagtggggtgaacccaaacgacaatgttcagatgtgcatcagtttgatgtacagaa

SEQ ID NO: 94019 - DNA, 913 bp, Zea Mays
aatcagagaggaggaggcaacacggcacgctaacaaaaaccagaccacgcggaacggcaacagcaagctgcctctctcccttgcgcgcgcgtgatttcatcttcgtccgatcccatcccaccccaccccacctcaccggagcccctctccccctaactcctccggcagctgctccgatcccgaaccgtgattcgctcgatggcggcaaccgcgggcggcaacaagatccgcaacgccaagctggttcttcttggggacgtgggcgccggcaagtccagcctggtcctccggtttgtgaaaggccagttcgtcgagttccaggaatccaccatcggcgcggctttcttctcgcagaccctggcggtgaacgacgagacggtcaagttcgagatatgggacacggcggggcaggagcggtaccacagcttggctcccatgtattaccggggcgctgcggctgccatagttgtctacgacatcacgaacgcggcctcttttacgcgtgcgaagaaatgggttcaagaacttcaagcacaaggaaactcgaatacaatagtggctcttgccgggaacaaggctgatttgttagatacgaggcaggtgtcagcagatgtatgttaatgtgcttctcaagttctatttttaacacattcatgagctaccacatttgtttatgtagctgctgccatcttcattctttagtggtttctcatcctagaagcttttgcattcattcgctgcatctttatcggccaacaatatgtttcagagtggtagggaacacaggatgttgagtatgtactgattttctgatgcagcctcgatagaataggaagttttggctatcttctggaatgtaacgatcggtattaaccatggaaggtacatgtaattagtgacaggctggattact

SEQ ID NO: 94020 - DNA, 810 bp, Zea Mays
atgccgcgccgggaggtgtcgctgcccgacgccttcaatctcgtcctcggcaaagatcgggacaactggcctcccgcagcgggcctcctcgtggccgcctactacggcgacatccgccgcctcaaggcccaacgagctttgattgataaagttacaccattaagcatggcattaaaacactcttatgtgtcttgtttgaaacttttggttcaacgtaatctaatacacatatgcaatgctggtaacacaaaatatgatgccatacaagaatgttcttatgacagtacaaggctgccaatagaattggctgctgagtatggtacatgggaagatgttgaacttctattccctgtcacttccaaaattccaacagtggcagattggagtgttaatggagtaattagtaatgtacacatggaagtcacacaactagaggatgacgaaattgtcaataagaaaaagtccgagctgaaacgacaaggagctgatgcgtttagcaaggaggattatctaaacgcgtcagtattctacacacaggccctgaaggttgatcagttcgacgcaacactgttctcaaacaggagcctttgctggcttcgcctgggtgatggaaagaaggctttgctcgatgctatagagtgcaaacatctgcgtccgaattggggaaaagcctactaccggcaaggagctgccctgatgtctctggaggattacagcagtgcttatgatgcgttctctcatggcttggagttggacccagaaagcgaagagatggagaaaatgctttgggaggcgatggacctgaagtag

SEQ ID NO: 94021 - DNA, 3737 bp, Zea Mays
atggccgcccaggatccctctgccgaggaggccccgcagtcgcaagcggagatggtggcatcgtccgagttagagcctgtgactcctcctcccattgtctacgagttgtaccacccgctctgcccggcagcccaccgcgtctgctgcgccaccgccaccgccaccgccgtccttttccccgcggtcactaccaagcaccaacatacgacggatgagaacatctacgaggaggcggcgcgatcgtgtaccactccagctcgggggggcctcctcgacgtgcggcatgacatggaggcactgccccgcttctcggccgcctactggcgtgacctctttgactactgccacgagtgctcacgacaccacttcctcctggaccacatggccctgggctacttcccctacaccgagcttgccaccgtgcccaccaagtgttcgatgctggtcctcaaccgtggtgcctacttcgtccccaaccctcctcttaaagcatctgccgacgaagggggcaaccttcaatcgcaacattccaccaacgcgcagctgctcgagttcacgtgggacctggccaacagcggagcagcagaccaccatcgcctgctccctcgtcgccttgctcctggacatccgtgtcgtcgtcggcgacccctactgctcagacccggactcgaggtcatggaccccgaggtccgtgagcgggtcctacaagggaacaccaacctcctcatcaacaccttccaagagatgaagctgttcgcgctgaatgtgatgtccatcttcggcgagaaggagatgcggtacatcgaggagttgaagcagtgttatatgtcactggagaaggggttccactcgatgacgcgcaagacgctcaccgacgcccagatctccgacaacgtgatcgacgtcatgttcgtcgcccgcgaagccaccgccaccgtgctcacctggatgttcaagttcctcgatgaccacactgcgttcctcaaggccatcatcgagggcgtcaaggcgttcgagcgtgacctgatcgccaaggccaacagcttcgtccacgacaacggtgtttccgagctgtaccacctcgcgcccatcgtctgtgctagcgtcaacgggaagccgtgcatgtgggtgtgcacaatgacgagcatggtggacgagttggtggtgtccgaggaggtggacgaggttctcaacgccttgcccaacaggcaaccatggccgccacctatgcactccaactgcgttgcgagcattgccgacatccataccgaggagatcagtccagagcgcaagcttgttgctgaaggtcttggtcatgatcaacggacaagcgaggtcgatttgcttccaggtggtttgaaggcacaaacaattagcatactagtaggagatgagcttggagactatgcacgtgcacgaggatttgagatatttgataaatgtgctcagagagagagagagagagagttcaaatgagtgaagctgctctgactgcaaaggcacgtatggcgttgttgcatgagatggcggaccatgggcatcgaccggatgcagttatgtatttctccatgatatctggattgacacaagcaggcagcacatgatcgtatgactcgactcgacggaattctaccagccgcagagcaactgggatgctctttacaattttgagcagtgagacacatggaatgatcagcagaccagcagcttggggacaagctgcatttcaaacggtggggaatgtcagcagactgtcatgtgagaccctggatagatgtcaagtggggggtgggggtgggggatctccctgggtgcaacggagcactcgcacttacaggcacagtcacaatcacttggtatttcagctttcgtttccaccatgctagtactgtagtcgtttgcttcctccagtcctccacatgctcacgaacagacggcatcattcgtttgtgctgcgttatgctgctactgcgtatcatgctcattgagtgccaactagagctgaatgcagtcctcaaactcactacctcaggttggggactgaaagcaaagcaaagctatgttcctgtttcatcagtaaagtacgcagtatttctgttctgttctgttcggtacaccaatgtgcttgcagcccgagcccctatgtgacacacgcatttttttactccttttggacatggaaacacttctacatttggtgtaatgcaagcagtagttggtgccgacagggaaaaaaacaaagaacaaaaagaggggaaaacaattattcttcaagaaatatgctcctgattggttgcctgagcgtctgatttttttttaaaaaagtctaactaggagtttatgtcccggatggcttttaagagctttggctctatagggtgccgtttggttcatatatttgtaacgtaatgggtaactgataacgttaaatcatgtttgttttagtctaaccgtaatcacataccacactaaaaattgataccagcctatttaaatttgttaccactagtaatagatcgtaaaccgttaccattaccatttgcgttacatttttttgaaccaaacaacacctagatggtattccaattcaaaaccaacacatcacacacatggcactatgcctaacaccttaaaaacagaacggccgagtatgatagctgcaaatcactgcaagcgattcgattacagcacagtcttccaagagcaattgtgtgcatgacaattgtggcaatttccattctgcaggtaggtaattccagttccaagagcactcgacatggcggccgctaatgttggggaatcaacaagcggcggcagcagcagcagcggcgccgacgccgggggcggattcgagtgcaacatatgcttcgagctgccgcaggagccgatcgtgacgctgtgcgggcacctcttctgctggccgtgcctctacaagtggctgcgcatccactcgcactcgcccgagtgcccggtgtgcaaggccgtggtcgaggaggagaagctcgtgcccctgtacggccgcggcaaggaccgcgtcgacccgaggtccaagaacgtccccggggcggccgacatccccagccgtccggctgggcagaggccggccacggctccgcaggcggaccccaacaacgcccacttccccaacgccgccaacccggcgaacccgtggttcatgggcggcggcggcggaggcatcccgctggccaacgcgcgctgggggaactacaccttctcggcggcgttcggtgggctgttcccgctgctcagcttccaggtgcacgggttcccggacgccacggcctatggccagccagctgggttcccgtacgggtacggccacggccacgcttttcatggcgggcacgctggagcacatgcccacgccgcagctgcagctcctcggcacgcgcagcaccagcagcagcaggcggatgtgtaccttaaggcgctgctcatcctagtcggcgttctggttatcgcgagcctcgtcacgttctagggcgtcgcctgttggtaggtgttcatcatattgttgctgccttgctggtaataaataagagagagagacagagacaacacgaccgaaactgaattattcagagcggtgcaatgtgttgatagaagggttgttgttgtacatgctgatacatgattgtatactgtggtctttgaacatacattattatcgaataataatctggaggctctgtttgaagtaatctgtattcgtttgc

SEQ ID NO: 94022 - DNA, 1129 bp, Zea Mays
gtgcgtctcctctcgcgtccccgtcttcctcttgtgatcttgtcgcctgcctctgcggctctgcctgcctctctcgaagcttctcgcgtctcctgggtggccgtgtccagtctcccacgccaccgccccgaccgccggtaggtaattccagttccaagagcactcgacatggcggccgctaatgttggggaatcaacaagcggcggcagcagcagcagcggcgccgacgccgggggcggattcgagtgcaacatatgcttcgagctgccgcaggagccgatcgtgacgctgtgcgggcacctcttctgctggccgtgcctctacaagtggctgcgcatccactcgcactcgcccgagtgcccggtgtgcaaggccgtggtcgaggaggagaagctcgtgcccctgtacggccgcggcaaggaccgcgtcgacccgaggtccaagaacgtccccggggcggccgacatccccagccgtccggctgggcagaggccggccacggctccgcaggcggaccccaacaacgcccacttccccaacgccgccaacccggcgaacccgtggttcatgggcggcggcggcggaggcatcccgctggccaacgcgcgctgggggaactacaccttctcggcggcgttcggtgggctgttcccgctgctcagcttccaggtgcacgggttcccggacgccacggcctatggccagccagctgggttcccgtacgggtacggccacggccacgcttttcatggcgggcacgctggagcacatgcccacgccgcagctgcagctcctcggcacgcgcagcaccagcagcagcaggcggatgtgtaccttaaggcgctgctcatcctagtcggcgttctggttatcgcgagcctcgtcacgttctagggcgtcgcctgttggtaggtgttcatcatattgttgctgccttgctggtaataaataagagagagagacagagacaacacgaccgaaactgaattattcagagcggtgcaatgtgttgatagaagggttgttgttgtacatgctgatacatgattgtatactgtggtctttgaacatacattattatcgaataataatctggaggctctgtttgaagtaatctgtattcgtttgc

SEQ ID NO: 94023 - DNA, 492 bp, Zea Mays
tttggcactttgctgttactggggaatccacacatagaaagggagctaaggcactttctgagtttgcatttgtaaatcatggcagctgccagatagaattcgagtgaaaaggcaagtatggataatatcttgttgtagttgctaccaagcctcactattttcgtgatctgatgttctccgggtcatggataatttcttggagtatgtcagatttctggtctgctgatgagcttggtaattctattaaaatggtgaaataccaatggagaatattttgtagatcaatttttatacttcatgtaccaggagaactcctaatacgcatgacatgtgattgattttttatggatgagcagttctcttatcttttgccaaccacatggatgaggaaaggcttcttgatttcttaaaatctttaggcaagctcatcaatcctactatgcagtggaaggaattggcattcccatgttgttgtctcttgacgatcttgtc

SEQ ID NO: 94024 - DNA, 713 bp, Zea Mays
caccacccgttacgcccgctctcaacaacctccgccccgaacacacccaagccacgcccaattcctatctctcaccgtgcctcgacgatggtgcggacgccatgatcctgcgaacgtacgggcgcagatcccgctccttctccgacggagggggcggggtctcgtcctcgcaggacgcgttcgactgcgccgccgccgccgacttgctggtgtcgtcggcctcgtagcctctcccgctcccgccatcgtaggagtcctcttcgatgtgggacttcgacgaggacccacctccgtcctcgtcgcggccccggccggagaggcggcggcgcgggacaagaagaggagggtgggagctcgcgaaagcccctgcggtggcgccgacggcaatgctgatggaggcggaggagtacggagagatgatggagagcgtgggcgaagtcacattcgcgctcgacgggctctgacccgcagcgcagaagcggacgcagcgggctagcctgctcgcgctgctcgggatctgcgcctccaccgagcgccgccgcgtgctccggtcccaaggactggtacaacaaattatcgatgctattttggttctggacattgatgatcctccatgcggtattgctgcaggagctcttttatttgttttggcaagtgatgtgagtacctcttgatctctgtctaaatcacacatgttgttatgcatattaaat

SEQ ID NO: 94025 - DNA, 1091 bp, Zea Mays
ggggggagacaagaagcctgaaataagttgaaacaaccagcaaaagcaaaagtgggggagaaaatgacagaaaggccggagcgacacaaagaaagaggcccaataccatacagtccacaagtcgcgcgcgggccgcggggtagaacgcaagcggaggcgtccctggcaacaaaggcagcaatggcgacggggtggctcgcagggtctctccccctccgctccgcatccacagccccgtcggcggccagggcacagcctctcccctccgccgccgcgccacgccgcatcccagcgcgactttcggttgccacgggcgggggcgagcagcagctcgtcaccgcgcaggaaccggcgcacgcagaacctgattatggagttgtaagcattcaccatgtcgggatcctgtgcgagaatcttgagaggtcactggcgttctacaaggacctactgggtctgagggtgaatccagctcggccaaacgacaagctcccgtacaggggcgcttggctctgggtgggttctgagatgatccacctgatggagctgccgaatcctgatccgttgaccggacgccccgagcacggcggacgtgatcggcatacctgtatagcgattagagatgttctgaagctgaaagaagtttttgatgaagctggaatcagctacacgctaagcaaatctgggaggccagcgatctttgcaagagacccagacgggaacgcgttggagttcacccaagtgtagcaactggaaaactccttccatgctagagcatctcatggataccaagaggtcatagactttgctgcttgtatttcttgtagctgctacaaataaagacctggcagataaataccgcttgtacatatattacatgtcgatcaaggatttgagcaagtaaaaataaaggcagataaacggtgtgtttggtttatggagtcactctatgcttcatgaggtgattcatcataagttcattccatcaattttggtggaatcaacccactcctcatgtatatactaattattagcttataaggaattgggtggtgatggatcaacccattttattccacaaaccaaataaaaaa

SEQ ID NO: 94026 - DNA, 1088 bp, Zea Mays
ggggggagacaagaagcctgaaataagttgaaacaaccagcaaaagcaaaagtgggggagaaaatgacagaaaggccggagcgacacaaagaaagaggcccaataccatacagtccacaagtcgcgcgcgggccgcggggtagaacgcaagcggaggcgtccctggcaacaaaggcagcaatggcgacggggtggctcgcagggtctctccccctccgctccgcatccacagccccgtcggcggccagggcacagcctctcccctccgccgccgcgccacgccgcatcccagcgcgactttcggttgccacgggcgggggcgagcagcagctcgtcaccgcgcaggaaccggcgcacgaacctgattatggagttgtaagcattcaccatgtcgggatcctgtgcgagaatcttgagaggtcactggcgttctacaaggacctactgggtctgagggtgaatccagctcggccaaacgacaagctcccgtacaggggcgcttggctctgggtgggttctgagatgatccacctgatggagctgccgaatcctgatccgttgaccggacgccccgagcacggcggacgtgatcggcatacctgtatagcgattagagatgttctgaagctgaaagaagtttttgatgaagctggaatcagctacacgctaagcaaatctgggaggccagcgatctttgcaagagacccagacgggaacgcgttggagttcacccaagtgtagcaactggaaaactccttccatgctagagcatctcatggataccaagaggtcatagactttgctgcttgtatttcttgtagctgctacaaataaagacctggcagataaataccgcttgtacatatattacatgtcgatcaaggatttgagcaagtaaaaataaaggcagataaacggtgtgtttggtttatggagtcactctatgcttcatgaggtgattcatcataagttcattccatcaattttggtggaatcaacccactcctcatgtatatactaattattagcttataaggaattgggtggtgatggatcaacccattttattccacaaaccaaataaaaaa

SEQ ID NO: 94027 - DNA, 1476 bp, Zea Mays
gaaatcccggattctgatttggactgcaccggtgcacctcctgcctgccaagtgccaacgcacaccggagagccgcgacctctccgtcgccctcgccccctcccaccctcctctgccctgcgttgtcgtctccctcgccagtccgtcgcgcccgccgaggagctgagctgaaccgaggccggccgttgcgcgccgcccgagaagaagacgaagacgagcagacgacggctcctctcctacgccgtcctctctctcttgaactgaaacagcgtcgcccacatgctgatcggcatgccgcaggcagcagcagcagtagtgcacggcaaggaccccagcaccgtccgtccggcggcggcgctgcccctgaagctcctccgccctctcctcctcgtggcggtgctcggcacgggcttcctcgccgccgtggcgctgctcgtcggcggccccgcctactcgtccgcgctcccgcgcccgccggtcgccctgccgcccgcgccgccgtcgggcggcgggaagcagccgctggagcggtgggcgcgggcgccggcgtccgcgtggcacaacatgaccgacgacgagctgctgtgggcggcgtcgtggcgccccagcgtccggcgctacccgtaccgccggacgcccaaggtggccttcatgttcctgacccgcggcccgctgccgctggcgccgctgtgggagcgcttcttcgccggcgccgggggcggggacgccggcctcttctccgtctacgtgcacgccacgccggggtaccgccccgacttcgcgccggcgtccgccttctaccgccgccaagtgcccagccaggtggccgagtggggcgagccgagcatgttcgacgcggagcggcggctgctggcgaacgcgctgctggacccgggcaacgagcgcttcgtgctgctgtccgagtcgtgcgtgccgctgtacggcttcccggcggtgtacagctacctgacgcggtcgcgggagagcttcgtgggcgcgttcgacgacccgggcccgggaggccggggccggtaccagggcgggctggccccggaggtggtccgcgagcagttccgcaagggcgcgcagtggttcgaactggagcgcgccctcgccgtcgacgtggtcgccgacggccgctactaccccaagttccgggagcactgccggccgccgtgctacgcggacgagcactacctgccgacggcgctctccatcctggcccccgcgcggatcgccaaccgcagcgtcacgtgggtggactggtcccgcggcggcgcgcacccggccacgttcggggaggccgacgtcggcgaggcgttcctcaggcggctcacggcgcccgggaaggaccagggcaactgcacctacaacggccagccggcgcaggtgtgctttttgttcgcaaggaagctggcgcccggcacgctgcagccgctgctcaggctcgccccgaagctgctcggatacggctga

SEQ ID NO: 94028 - DNA, 92 bp, Zea Mays
cacttatgtacaagatcatctcaaattgtattatacattgaagggaaccatttatcattaaagcgaaatattcagagaaggaaggcaatcac

SEQ ID NO: 94029 - DNA, 1243 bp, Zea Mays
gtggaatggtggagctagcgagcatggcatggaacatgatcctgttactgtatatgcatgtactcgtagtagtaggtagctgtaaccaatgcatgatcagcacaaccagtctggatgatgttgctggtcagctcagctggagctggtgacaacctccagcagtccagccccgggccgggcccggtgcatgtaaatatatgcggtgccggagagactactgattactgacactctcttgctgcttggcgtcgccatcgcacagtgacacggccatcggcactcaactcactccacaggcttcgtttcatcatcatcatcatcaccgtcgtcatagccatggccgcgcgtcaccacgccccgcacctcctcgcgatgctcatgctctcggcggccggcttcttctccgtggcctccgccgcgcgcgacctcgacgcagccaacccgctcgcggtcgcggtcgcggcgcccgccgctggccgaaacaacgacaacaacaaccctcccgagcctaactactactcctaccatggcggctacggcgccgtcccggcgggctacggacctgcaggcgtctctggcgccggcgggtggggcgcgggctccggcggcggtggcgggtacgcacacggcggcgtggaagcgccgacggtgatgtgccaggacaaggggccctgctacggcaagaaggtggcgtgccccaagcgctgcttctggtcctacagccgctccggcagcggatacggagccggaggcggcggcgggtcctgcaccgtcgactgcaaggacaagtgcaccgccacctgctgatggatcgacgggtagagctaactagctatctgctcatggctctccactcgatcgatgacgatatatactactacatacagtgtgtgtgcgcttgtactatatatatatatatatatatatatatatacagtatacaatagtaatcggccccttgctcttgcagtaccagctggttaatttcagaggaactatgaattacgatgaactgctgctgctgctggttcattaattaatgaataaggcgttggatcacgccacgcatgatcgatgtcggccatgcatgcagtgtgcttcatcagctattacatataacgaattttgcacgcaatctgatggagatggaatcattgcatttccagctgaagctcctgtaatgtaagccacctggagccggaaaaggctcgctcacacagttactcacgcagtcacgctgcgt

SEQ ID NO: 94030 - DNA, 975 bp, Zea Mays
atcgccatcacttgttgcactagccctaaatgccagtgctctgccgataacctcctctcccttgagcgccaaccaccgtttttccccccttcctccacctccgtctgggtctcctcacaccaagaaacacacacgcggcagagagacaatccattccaatatacaaacaggacggcaggacacagccttcgcgtgccaacgatggggcagcaggaggaagtagcggccgtgcagaagccgccggccgccgccgtggtcttcacgtgggagcctgtcgtcaccgtcaccgccaaaaggccggaaggcggcgtcggggacaccaccgccgtcatcacgccggcggggagcccgacgacgaaggcggcgcggcggctcgcggtgccgccgccgccgggccgggccgcggcgaggagcctgtcgtcgagggccggcggccgcgccgtgcggccggaggacgacccgttcctggccgcgtacctggcgtgcaccaagagcggcagcagaggaggaggagggggcggggacgccggtggcaccggcaccggcaccggcaccggcgcgccgaggcagaggcagggctggagccggttcgcgtgggcgcgcctcggcctttcctgcaagagctccgccggcgccgtcgagcggagcatggtgaagctggccaaacggccggaggcggtggaccctagagatgcttgaaatccactcactgcccgcggcctgttggcctgctcgtcttctctgcttcgatcttctagtgcgtcttgtcatgttcagttctagctgctggtcttcctcctcctcttctttttttctcttcttctttcggtgtcaagcttgaattagcgagggctagctatgcgtggtgatggaatttgagaatcactctgtgaatgaatgaaaaaaaggagacatattttagcgcaggattattatgcgagtcgtagcaatgtctgttatgtgaaaaaaataaaa

SEQ ID NO: 94031 - DNA, 95 bp, Zea Mays
gcgcgcttcacgcgccctgcagttgcaaccggatgctgtcaactacttgaacaaaacaataatcatcccatcaatttggcacgcaaataaaaaag

SEQ ID NO: 94032 - DNA, 3237 bp, Zea Mays
agattcccactccactcatatactctctctcccttcctgatagctcctcctcaccattttccataacaccccattccgtttcgcgcttgcaacaaaggttcctttcaacaacaaagctagctttgcaggcacaagaaagaaaaggcttgctcatacaatacagttcttcttcttcttcttcctcctcttctgagtttgggtcagctgttgggtgggtacggtgctatggtgtccactctttgctcacctccacccttgccctgcttccttctcttcgccatcgtcctctccttcgcgtccggcgatgatggcggtcgcgcggcggcactggagctggacacgcaggctgcctacctcgccaagatgaaggaagagttcccggggccgggcatgtcgaggtggtgggacttcacgtcgccggcgccggactactgcagcttccgcggcgtcgcctgcgacccgtcgggcaacgtcacgggcatcgacgtcacgtcgtggcgcctcgtcggccggctcccgccgggcgtctgcgcggcgctccccgcgctccgggagctccggatggcgtgcaacgacgtccgcggcgggttcccgctgggcgtgctcaactgcacctccctggaggtgctcaacctcagcttctccggcgtgtctggcgccgtgccccgcgacctgtccccgctgcgcgcgctgcgggtgctcgacctgtccaacaacctcttcaccggcgcgttcccgacgtccgtcgccaacgtcaccagcctggaggtggtgaacctcaacgagaaccccgggttcgacgtgtggcggccggccgagtcgctgttcctgccgctgcggcgcgtccgcgtgctcatcctctccaccacctccatgcgcggcggcgtccccgcgtggttcggcaacatgacgtcgctcaccgacctggagctcagcggcaacttcctcaccggccgcatcccggagtcgctggcgcgcctcacgaacctgcggttcctggagctctactacaacgagctggagggcggcatccccgccgagctcgccaatctcacgcagctcactgacatcgacctgtccgagaaccgcctcacggggcccatcccggagtcgctgtgcgcgctgcgcggcttgcgcgtgctccagctctacaccaaccgcctcacgggccccatcccggccgtgctcggcaactccacgcagctgcgcatcctctccctgtaccgcaaccagctcaccggcgggatccccgccgacctcggccgctactcggacctcaacgtcatcgaggtgtcggagaaccagctgacggggccgctgccgccgtacgcctgcgccaacggccacctccagtacatcctggtgctcagcaacctgctgaccgggcccatcccgccggcgtacgccgagtgcacgccgctgctccggttccgggtgagcaacaaccacctggagggcgacgtgccgccgggcatcttcggcctcccgcacgcctccatcctcgacctcagctacaaccacttcaccggcgccgtggcggccacggtagcgggcgccgcgaacctgacgtcgctgttcgcgtccaacaaccggatgtccggcgagctgccgccggagatcgccggcgcgtgggggctggtgaaggtcgacctgagcaacaacctcatcgccgggcccatcccggagtccgtgggcctgctgtcgaggctcaaccagctgtccctgcaggggaacctgctgaacgggtccatcccggagacgctcgcggggctcaggacgctgaacgtgctcaacctgtcggacaacgcgctgtccggcgagatcccggagtcgctgtgcaagctgcttccaaactcgctggacttctccagcaacaacctgtcgggccctgtgccgctgcagctcatcaaggagggcctgctggagagcgtggcggggaacccggggctgtgcgtggcgttccggctgaacctgacggacccggcgctgccgctgtgcccgcggccgagcctgcggcgcgggctggccggagacgtgtgggtggtgggcgtgtgcgcgctggcgtgcgccgtggcgacgctggcgctggcgcggcggtgggtgctgcgggcgcggcggtacgcggggcaggacaaggggctggcgtcgtcgtctccggcgtcgagcgagtcgtacgacgtgacgagcttccataagctgagcttcgaccagcacgagatcctggaggcgctgatcgacaagaacatcgtggggcacggcggctccgggaccgtgtacaagatcgagctcagcggcggcgagctggtggcggtgaagaagctgtgggtgtcgtcgaagcggcggctgcgtgggccgagcagcaagcaggtggactgggcggcggtgaccagcaccaccaccaacagcggagacagcgacggcggatggctgggcgaccgcgagctccgcacggaggtggagacgctgggcagcatccggcacaagaacatcgtgaagctctactgctgctactcgggcgccgactgcaacctgctggtgtacgagtacatgccgaacggcaacctatgggaggcgctgcacggctgctacctgctgctggactggccgacgcgccaccgcgtggcgctcggcgtggcgcaggggctcgcctacctccaccacgacctcctcttccccatcgtccaccgcgacatcaagtcctccaacatcctcctcgacgccgacttcgagcccaaggtcgccgacttcggcatcgccaaggtgctccaggcgcgcgggcgtggcggcgctgaccgagacgcctccaccaccaccatcgccggcacctacggctacctggcgccagagtacgcctactcgtccaaggcgacgaccaagtgcgacgtgtacagcttcggcgtggtgctcatggagctggccacggggaggaagcccatcgagccggagttcggggacacgagggacatcgtgcactgggtctccggcaaggtggcctccggcgccggagccgaggcggacgcgctggacaagcgtctcgcgtggagcccctacaaggaggagatgctgcaggcgctgcgcgtcgccgtgcgatgcacctgcagcatgccgggactccgccccaccatggccgacgtcgtgcagatgctcgccgaggccgggccgcccgccggccggacgaccaaggacgactccaaagtactcgtagcagatcatcatcatcatgctcctgctccttag

SEQ ID NO: 94033 - DNA, 1980 bp, Zea Mays
attaagtgtgagctaggcatttgctggcttgatgttacttgtacgaataaaaagagcacgtgacaaaaaaaaaacttggtgctcaaagcttgcgtgcttgtgttgcttctgctagtcattgcagccttgcagtcttgtaggcagaaggtgcaatcgacgcgtgcactatggaacatgtgatccagaacgagccaggtggttgagatgattagtatttatggttgagatgatttgtatttctggaagtgagaacagccattgagcagcaggtagcgcgtcaagcgagcagagcagcgaaaagcatggatgccgaagccgccgccgccgagggccaggtgcggcactggaccgcggacgtcaacggcatttccctccacgtcgccgagcgcggcgccgccgacgcgccggcggtcctcctcatccacggcttcccggagctctggctctcgtggcgccaccagatggccgcgctcgccgcccgcggcttccgcgcgctggctcccgacctccgtggctacggcgactcgtctgtgcccaccgaccccgccgcctactccatcctccacctcgtcggcgacttggtcgcgctccttgaccacctccaactcacaaaggtgttcgtggttgggcacgactggggcgcgatggtggcgtggcacctctgcctgttccggccggaccgggtgcgcgccgctgttgtcctggggatcccctacttcccccgcggccctcgcccgatgacggactcatttgccaagctcggcgatggattctacatcaatcagttccaggagccaggaagagccgagagggcatttgctcgctacgatgttgcgacggtcctaaagaagttctacgccttgaaaatcgacgagatgattgctcctcctggagtggagatcatagactttctccaggcaccttcttcgccgattccctggatgacagacgaagaactgggacggtacgccgagaagttcgagaagactggcttcacaggacccctcaactactaccgcatgcttgaaacaaactggagactgactgcaccttggagtggatcgaaaatcacagtgcctgcgaaattcatactcagcaagaacgacgtcggcctgcagtccttcggaaccgagaagtacgtcaagagtggcgctctgaaggagaacgttccagaccttgagatttcgatcatcgaggggcaccatttcgtccagcaggaagaggccgggacagtgaattcggaaatactctccttccttggcaagtttcccagcgagggaggatcagcgtgattgttatttattgtttgcagccagtcccggactcctgagaggaagatggcctccgaatgatccgagggtttatgattgaataaagtgagagctcagatcgatagccgtctgttggcttgcattaaaaaaataaagagcttgcatgtaaaactatttatgaacgaataaacttctgtcatatactcgcaagtctcaacattgtttacatgccagccaacgaacaactaagcagaagtgcagaacacatcatctgcagcgcacaaaagttttcttttacacaaccggggaaaacgcacagagaaaaaaaaaactgcacaagatgagccaattcatttacacagtccataaaaaggcgaacgggaacagttcagcctcgtcagcatacaggtgaagcgcacttctccgccgacggcgacgcacgcttgggcttgatggaccggaccttcacgtagcggcgcaccattccgatcaccctccgtcccgccggcacctgtccagcccgccgcgttgcctcgcctgctgcagctccttgtagttgtgcaaattcacgaacaccagcagcaggagtgttcccttccgtggtgcctccggtggcggcgccgtcgacggcctcgtcctcgatcagctcctgcagcgagaaacgacggtcctgacactcttcctccgtcgagggttctgacgcctcgtg

SEQ ID NO: 94034 - DNA, 633 bp, Zea Mays
aaagttccagattcatatttgcaggagcccggaagagctgaagccgcattcgctcaatacgatgttgcaactgtactaaagaagttctactccattgaaatagatgaactcactgctcctcctggagtggagatcatagactttctcgaggcatctccatcaccacttccttggctcagcgaggaagaactgggccagtacgccgaaaagtttcggaagtctgggttcactggacccctcaactactaccgcatgtgggagacgaattggagacttcttgcaccctggaacgaggccaagattacagtgcccgtcaagttcatagctggtgataaggacatcggtgtccagtcctttggggttgagaagtacatcaagagtggggaattcaagtccactgtcccagatcttgaagtcgcggtcattgaaggccaccattttctccagcaagaacaggccgagagggtgaattcggagataatttcctacctcgtcaggtttactagccaggaggcatcatcttgatgctttgctcccagttgaacctgaccagaaaaaaaatgatgtgcgatgggactccatttctttctgaactgaaaaggtcttgaattgccgaataaagtgtgagtagag

SEQ ID NO: 94035 - DNA, 1033 bp, Zea Mays
aaaagaataataaagaaaagaaaaaaaacggaagcatccaagtctgaaatcgatataaaagaggatgaatagcagactgcgccgcggtttcgttccttctccttggccttcgtctccgccttccgacttcctctagaattcgattccctttcccaagaaaccaagaacccagccccccaccatgacgagctcctcctctccttccagaaaggcgctgagcaagatcgcttgcaatcggctgcagaaagagctcgccgagtggcagcaaaacccccccgtcgggttcaagcacaaggtctccgataacctccaaaggtgggtaattgaggtcaccggagcggcgggcaccctttacgccggcgaggcttaccagttgcaggttgacttccctgagcattatcctatggaggcacctcaggtcatttttctcaatccagcgccaatgcatccacacatttacagcaacgggcacatctgcttagatattctgtatgactcgtggtcaccagcgatgaccgtgagctctgtctgtatcagtatcctgtctatgttgtctagttcgccagcaaagcaacgcccggcggacaatgaccgctatgttaggaactgccgcaacgggaggtcgccaaaggagactagatggtggttccatgacgacacggtgtaatgatctctgtggcattgcctgtcagccttctgtactgtgatatatctcttcaagggggagatgagatgatttaggcctatttctaagcagccctctattggattgcgaagcttaccttgctgtggtggtatgtaaatgagttgctcacgtgtcagtctgggaatatgtgttatcaccatcaatgatataatatagaataaagcaagattgtaccctgcctaagtcactgaaacgagctcaaaagtaatgtgcaggtttgactatgatttgttgtggtcaatgtgccttcgtatcagtctgcagtctgcttatgcatttgcctatttgttcattgtagtgctgtactgctgctactgtgatagttcc

SEQ ID NO: 94036 - DNA, 1294 bp, Zea Mays
tattttatatgattgtactccctccagtgcagtaaaggtagtcgtttaggacatgattgtgcataccaaggagtgattaattatcatagagttttccctgtttgcccctattaaatagggatatgggtgcattaacgtcactaaaacaatcaggcttgattggttgctgcagcagctccaaggcattctagactggaggtctcaagttcgattcctcttaaatgcatctttttttgtgcaattactaggggcaacaacgtccaaattccagacccacgcgcgctatgacttctttttgtgcacgcgcaggatgacttcttttactgcaccggagggagtatacataatttggtggacacaacctagcatgggaaaataactgttccccatgacaatgacaccctcggcattcgcccccctccaagtccaaaacatacctgaaaagtacattctgaagcgatatacacgtaatgcaagatcagtggttccgtggggcaggcccgatgtgagtgttggtggtcaaaatgagacagagcagtcaaggttgttgaagctgctgccaaagttaatgcgactgggaagagcgggaagcaaatctgatagagcatacactgaaactatcaggcacatcgacatgataactcctgggattgagcttctacgaacatcggagattggtccgattggtccggacgaagcaacaaatactgagttgcagcaagatgcagaaggacggcggaatattggtcccatcgcaccaacacaacaaagttctgacaacaatatagaacctgttgtgatgccaactggacctacaccaccaccagaatcgggcctcaatccagattctgcaaactgcctcactgatctaagattgactgaaccgccagtgtcgcgcacgaagggtaggaagtctgccagtggggctaaatgtgctaaaaatagtgtggaacctgctaatccatacaacacatatagtgggggtcagggcataagagagtgtcaaacctgccatgttagggggcactatagcacaacatgccctcagaacccaaacagaagcagagcggtcgagaacaaggacaaaaagagaagtgcgaaaactgtaggttggactccaagaaaaagaggtcgcccaacaataaaaaaaggactagatgggaatcaagatgaggcacagagtgagggggatgagacacagcaatctggatgcactatggcggtggaggagtcagcagcacacgcggtgattgcaagaattaggagggcgacaacttgccatgttaattactag

SEQ ID NO: 94037 - DNA, 2317 bp, Zea Mays
ctcacacactccactgctcccctcctttttccttcaaatcctcccaacaccacccagggagacaaccacccccgccgcaatggacaagattgagacgacgacgaggaggaggaggaaagggagaagcagcagccgccgccgccgccagggggcacggggaccggcgggcctcgtagccacggccttggccctcctctgcgcctgcgccttctccacgcctgccgccacggctctcaccccggacggcgaggcgttgctggagctcaagctggccttcaacgccaccgtgcatcatcggctcaccagctggcggcgcagcgaccccaacccctgtgtctgggagggcatctcctgctccgtccccgacctcagggtacaatccataaatctcccatacatgcagcttgggggcatcatttcgcccagcatcgggaggctggacaagctgcagagactagctctgcaccagaacagcttgcacggcccaatccccgcagagatcaagaactgcaccgagctcagggcaatttacctgagagccaactacctgcaaggaggtatcccttcggagattggcgagctcgtgcacctcaccatcttggacctgtcaagcaatctgttgaggggaacgataccggcctccatcggaagcctcactcaccttcgcttcctgaacctgtctactaatttcttctccggagagatcccaaatgtcggtgtcctcggagccttcaaaagcagctcgttcgttggaaatctggagctctgtggcctgtccatccagaaagcttgccgtggaaccctcggctttcctgccgtgctgccccactccgatccgctctcttcagctggcggtgtctctccaatcagtaacaacaacaagaagacatcgcgctttctgaatggcgtcgtgatcggctcgatgtcaaccttggctcttgccctgatcgctgtgctcggattcctgtggatctgcttgctgtccaggaagaagagcgtcggtggaaactacgtaaagatggacaagaaaactgttcctgacggcgcgaagcttgtgacgtaccagtggaaccttccgtactcgtcgagtgagatcattagaaggctggagctgcttgacgaagaggatgtggttggctgcgggggcttcggcacggtgtacagaatggtgatggacgatggcacgtcgttcgccgtcaagaggattgatctcagccgccaaagccgcgacaggaccatggagaaggagctcgagttcctgggcagcatcaggcacataaatcttgtcactttgcgaggctactgccggctgctccctgcagcaaagctactcgtatacgatttcgttgagctgggcagcttggactgctaccttcatggagatggacaagaggaccagccgttgaactggaacgcgcgtatgaagatcgcccttggctcggctcgaggcctggcatatctgcaccatgattgctcgcctgggatcgtgcacagggacatcaaggccagcaatatcctgctggacagaagcttggagcctcgtgtctctgattttggacttgcaaagctgcttgtagacaatgccgccgcccatgttaccactgttgtggcgggcacctttggatacctagcaccagagtacttgcaaaacgggcatgctactgagaaatcagacgtgtatagctttggagtgcttttgctggagctagtgacgggaaagaggccaaccgattcatgcttcatcaagaagggactgaacattgttggctggctgaacaccctgacgggggagcaccggctggaggatatcgttgacgagcgatgcggcgacgtcgaggtggaagccgtggaagccatcctggacatcgcagcgatgtgcaccgacgcagacccggcgcagcggccgtccatgagcgctgtcctcaagatgctggaggaagagatcctgtccccctgcatgagcgagctgtgctacgagcagcacctggagctctgagccgaggaagcctgacctgactacgatgcagtgcatgatggatgagactgtgtaggaaacaaaagttttgtagatatgacgatgatgaaccgcgtacgtagtgtaggtgtttgtgagcagctcaaaagtaggacaagtgcagaaccaacaacctgatcggcacgttacatacatagatcttctctctgtctgtcttctaatcctttttggcctttttgttctcagttttctttggacggccgtattctgtagatgagctgggaaacagtgaacggcattgagacctgagaatgaataccagagcaggacaaaataacaaca

SEQ ID NO: 94038 - DNA, 907 bp, Zea Mays
ctcacacactccactgctcccctcctttttccttcaaatcctcccaacaccacccagggagacaaccacccccgccgcaatggacaagattgagacgacgacgaggaggaggaggaaagggagaagcagcagccgccgccgccgccagggggcacggggaccggcgggcctcgtagccacggccttggccctcctctgcgcctgcgccttctccacgcctgccgccacggctctcaccccggacggcgaggcgttgctggagctcaagctggccttcaacgccaccgtgcatcatcggctcaccagctggcggcgcagcgaccccaacccctgtgtctgggagggcatctcctgctccgtccccgacctcagggtacaatccataaatctcccatacatgcagcttgggggcatcatttcgcccagcatcgggaggctggacaagctgcagagactagctctgcaccagaacagcttgcacggcccaatccccgcagagatcaagaactgcaccgagctcagggcaatgtaagatacttaccagtatgattcggttactactggtatttggctagtcccagtgtcgttgatttgttcagctaactgggcacagcgttcaatcaaatgtttgcttctttttaaaaaaaactgtgtatgtatgtatgtatgtatgtatgtatgtatgtatgttcagttacctgagagccaactacctgcaaggaggtatcccttcggagattggcgagctcgtgcacctcaccatcttggacctgtcaagcaatctgttgaggggaacgataccggcctccatcggaagcctcactcaccttcgcttcctacccaggcccgttgtgtgcattgaccatgaacgagtatgcgattggttgcctgtgccatccgaacgcag

SEQ ID NO: 94039 - DNA, 1134 bp, Zea Mays
ctctattttagacatcaaagtttgtcaattattaaaattatattctggaattatattttgtaaccttgaatgtttgttgtttatacaggctccggaactttttacaaccaccccagcacttgcgataccaaaggctatatcaaatgctggattagagtcatcccatgttgatttttttgagattaatgaagcattttctgctgtcgcacttgcaaatcaaaagcttcttgggattccttcagaaaagattaatgtccatggaggagctgtgtctctagggcatcctcttgggtgcagcggtgctcgcattttggtcacccttcttggtgtccttagggaaaagggcggcaagatcggtgttgctggtgtctgcaacggcggaggtggagcatcagctcttgttctcgaactcgcataagaagcattggcttgaagcactggatatgtagttaattcagtcgcatgcatctatgcatgatgaagtattgaaaaaaaaagaccctacgatatccatgccgggtgccactgtctgcttaattcaacagaatatgattgtgcaatcattctgccgtgccgcttttgctgaccttaggaacacggcgtcggaggcgcaatcattctggcaattagcaccagctagctccctgaggggcgaccttgtactctctacattgatgtatgtgtagtgctggacattcttaagttaattcggcaataaagtgtgttgtgcttctgctacctgcatcttagataagagaaatggagcagcctctttgatcagttcaattcatctttacatcccacttggagactccggtttcaagtattttttttttgaactgaagctcgtctgcttaaactctgagggtcttgctgatattggagaagccaggtttcagtccaggtagagcaggacatggtgcaagtcagttgtgtgttactgatgcttccaaaattgccttggtcagctacttatcaccagttctcagattttctttcccctgtgaatgcaactctgttctgagccctgtggatgaatggtcggtataaacatgctctcttctccaaaattgagatggatgctaatcatgttgatatcatatggatggaggagtcatcaagcaataatatagt

SEQ ID NO: 94040 - DNA, 2024 bp, Zea Mays
gccaaccgccgccgccactcgccactctcacgtctcgcccatcccgccactgctgctctccagagtccaggcgacccaggctgcgcggtcgctcggtgttgttagtcccgaccgccgccggccatggcatccaacggcatcgccccaagagatgtatgtgttgttggcgttgcacgcacccctttgggtggtttccttggtgccttgtcttccttgcccgcaacaaagcttggttctatagcaattgaagctgctctgaaaagagcaaatgtggatccggccctcgtgcaggaggtctttttcggaaacgtcttgagtgctaatttgggacaagctcctgcaaggcaagccgctctgggtgcagggataccaaacactgttgtttgcaccactgttaacaaagtctgcgcatctggcatgaaagctactatgttcgccgcacagtcaattcagctgggtatcaatgatattgttgtggcaggtggcatggaaagcatgtccaatgccccaaagtacattgctgaagctaggaaagggtctcgttttggacatgacacacttgttgatgccatgcttaaggatggactttgggatgtatacaatgactgtgccatgggaatgtgtgccgaactttgtgctgacaatcatgccctcacaagagaagaccaggatgcttttgctatccaaagcaaccagcgtggaattgctgctcgtgacagtggtgcgattgaagttcctgttgggagaggaaaaccacctgtacttattgagaaagatgaaagcctggataagtttgacccagcaaaactgaagaaacttcgcccaagtttcaaggagaatggtggtaccgttacagctggaaatgcttctagtataagtgatggggcggctgcattagttttggtgagtgggcagaaggctcaagagcttggcctgcaagtccttgcaaggatcagaggatatgcagatgcggctcaagctccggaactttttacaaccaccccagcacttgcgataccaaaggctatatcaaatgctggattagagtcatcccatgttgatttttttgagattaatgaagcattttctgctgtcgcacttgcaaatcaaaagcttcttgggattccttcagaaaagattaatgtccatggaggagctgtgtctctagggcatcctcttgggtgcagcggtgctcgcattttggtcacccttcttggtgtccttagggaaaagggcggcaagatcggtgttgctggtgtctgcaacggcggaggtggagcatcagctcttgttctcgaactcgcataagaagcattggcttgaagcactggatatgtagttaattcagtcgcatgcatctatgcatgatgaagtattgaaaaaaaaagaccctacgatatccatgccgggtgccactgtctgcttaattcaacagaatatgattgtgcaatcattctgccgtgccgcttttgctgaccttaggaacacggcgtcggaggcgcaatcattctggcaattagcaccagctagctccctgaggggcgaccttgtactctctacattgatgtatgtgtagtgctggacattcttaagttaattcggcaataaagtgtgttgtgcttctgctacctgcatcttagataagagaaatggagcagcctctttgatcagttcaattcatctttacatcccacttggagactccggtttcaagtattttttttttgaactgaagctcgtctgcttaaactctgagggtcttgctgatattggagaagccaggtttcagtccaggtagagcaggacatggtgcaagtcagttgtgtgttactgatgcttccaaaattgccttggtcagctacttatcaccagttctcagattttctttcccctgtgaatgcaactctgttctgagccctgtggatgaatggtcggtataaacatgctctcttctccaaaattgagatggatgctaatcatgttgatatcatatggatggaggagtcatcaagcaataatatagt

SEQ ID NO: 94041 - DNA, 2110 bp, Zea Mays
aactgcccgcgttcccgtgcccgtactaaaaataaataacggactgccatctcctcgtgcactccgccaaccgccgccgccactcgccactctcacgtctcgcccatcccgccactgctgctctccagagtccaggcgacccaggctgcgcggtcgctcggtgttgttagtcccgaccgccgccggccatggcatccaacggcatcgccccaagagatgtatgtgttgttggcgttgcacgcacccctttgggtggtttccttggtgccttgtcttccttgcccgcaacaaagcttggttctatagcaattgaagctgctctgaaaagagcaaatgtggatccggccctcgtgcaggaggtctttttcggaaacgtcttgagtgctaatttgggacaagctcctgcaaggcaagccgctctgggtgcagggataccaaacactgttgtttgcaccactgttaacaaagtctgcgcatctggcatgaaagctactatgttcgccgcacagtcaattcagctgggtatcaatgatattgttgtggcaggtggcatggaaagcatgtccaatgccccaaagtacattgctgaagctaggaaagggtctcgttttggacatgacacacttgttgatgccatgcttaaggatggactttgggatgtatacaatgactgtgccatgggaatgtgtgccgaactttgtgctgacaatcatgccctcacaagagaagaccaggatgcttttgctatccaaagcaaccagcgtggaattgctgctcgtgacagtggtgcttttgcatgggagattgttccgattgaagttcctgttgggagaggaaaaccacctgtacttattgagaaagatgaaagcctggataagtttgacccagcaaaactgaagaaacttcgcccaagtttcaaggagaatggtggtaccgttacagctggaaatgcttctagtataagtgatggggcggctgcattagttttggtgagtgggcagaaggctcaagagcttggcctgcaagtccttgcaaggatcagaggatatgcagatgcggctcaagctccggaactttttacaaccaccccagcacttgcgataccaaaggctatatcaaatgctggattagagtcatcccatgttgatttttttgagattaatgaagcattttctgctgtcgcacttgcaaatcaaaagcttcttgggattccttcagaaaagattaatgtccatggaggagctgtgtctctagggcatcctcttgggtgcagcggtgctcgcattttggtcacccttcttggtgtccttagggaaaagggcggcaagatcggtgttgctggtgtctgcaacggcggaggtggagcatcagctcttgttctcgaactcgcataagaagcattggcttgaagcactggatatgtagttaattcagtcgcatgcatctatgcatgatgaagtattgaaaaaaaaagaccctacgatatccatgccgggtgccactgtctgcttaattcaacagaatatgattgtgcaatcattctgccgtgccgcttttgctgaccttaggaacacggcgtcggaggcgcaatcattctggcaattagcaccagctagctccctgaggggcgaccttgtactctctacattgatgtatgtgtagtgctggacattcttaagttaattcggcaataaagtgtgttgtgcttctgctacctgcatcttagataagagaaatggagcagcctctttgatcagttcaattcatctttacatcccacttggagactccggtttcaagtattttttttttgaactgaagctcgtctgcttaaactctgagggtcttgctgatattggagaagccaggtttcagtccaggtagagcaggacatggtgcaagtcagttgtgtgttactgatgcttccaaaattgccttggtcagctacttatcaccagttctcagattttctttcccctgtgaatgcaactctgttctgagccctgtggatgaatggtcggtataaacatgctctcttctccaaaattgagatggatgctaatcatgttgatatcatatggatggaggagtcatcaagcaataatatagt

SEQ ID NO: 94042 - DNA, 1707 bp, Zea Mays
cccaactgcccgcgttcccgtgcccgtactaaaaataaataacggactgccatctcctcgtgcactccgccaaccgccgccgccactcgccactctcacgtctcgcccatcccgccactgctgctctccagagtccaggcgacccaggctgcgcggtcgctcggtgttgttagtcccgaccgccgccggccatggcatccaacggcatcgccccaagagatgtatgtgttgttggcgttgcacgcacccctttgggtggtttccttggtgccttgtcttccttgcccgcaacaaagcttggttctatagcaattgaagctgctctgaaaagagcaaatgtggatccggccctcgtgcaggaggtctttttcggaaacgtcttgagtgctaatttgggacaagctcctgcaaggcaagccgctctgggtgcagggataccaaacactgttgtttgcaccactgttaacaaagtctgcgcatctggcatgaaagctactatgttcgccgcacagtcaattcagctgggtatcaatgatattgttgtggcaggtggcatggaaagcatgtccaatgccccaaagtacattgctgaagctaggaaagggtctcgttttggacatgacacacttgttgatgccatgcttaaggatggactttgggatgtatacaatgactgtgccatgggaatgtgtgccgaactttgtgctgacaatcatgccctcacaagagaagaccaggatgcttttgctatccaaagcaaccagcgtggaattgctgctcgtgacagtggtgcttttgcatgggagattgttccgattgaagttcctgttgggagaggaaaaccacctgtacttattgagaaagatgaaagcctggataagtttgacccagcaaaactgaagaaacttcgcccaagtttcaaggagaatggtggtaccgttacagctggaaatgcttctagtataagtgatggggcggctgcattagttttggtgagtgggcagaaggctcaagagcttggcctgcaagtccttgcaaggatcagaggatatgcagatgcggctcaagctccggaactttttacaaccaccccagcacttgcgataccaaaggctatatcaaatgctggattagagtcatcccatgttgatttttttgagattaatgaagcattttctgctgtcgcacttgcaaatcaaaagcttcttgggattccttcagaaaagattaatgtccatggaggagctgtgtctctagggcatcctcttgggtgcagcggtgctcgcattttggtcacccttcttggtgtccttagggaaaagggcggcaagatcggtgttgctggtgtctgcaacggcggaggtggagcatcagctcttgttctcgaactcgcataagaagcattggcttgaagcactggatatgtagttaattcagtcgcatgcatctatgcatgattgatgtatgtgtagtgctggacattcttaagttaattcggcaataaagtgtgttgtgcttctgctacctgcatcttagataagagaaatggagcagcctctttgatcagttcaattcatctttacatcccacttggagactccggtttcaagtattttttttttgaactgaagctcgtctgcttaaactctgagggtcttgctgatattggagaagccaggtttcagtccaggtagagcaggacatggt

SEQ ID NO: 94043 - DNA, 2716 bp, Zea Mays
ctaatgtacatcctaaacgaaccttatatgttgatttgcatcaacgttttctttcaggtctgccattgaggagtcacatgtgtttcagtggcggttagaagcctacaactctacactcacgtgaagttgtggttggatttgttaaccgtccatgttgagggcaaagcaactcagcaccctaactcagtgtgcacggtccttctatcttaatggatcaaggtgcggtagcacagatggagcttcatgcacatgccctgaggatgagacttatgctccaaaaaggcagactgcaagtgctatcgagcagaattctcattcaacccacagaacatttgtgaagattcagcctcctttgcaagatgctactagagctactggccacccagttccagctgttcatgccactacctcaacttcaggaaaggaggctgcatctagtaacagaagcaatcatcctcacagtcatcatcagatcataagaagtgattatgtacagccatctaagcagacagccagaagcatttctcaatctggaattgctggagctggtgtatattcagagctggttaatatcaggtcctcatctaataatggaagcactgatcaggctccacagatgggtactaactattcttatcagattttatctgataaccattcttctaataatagggcacagaatcaacttaactttcctgagggaaagatggcttataacccttccgtgaacaatgaatttgggaagggttacccaagagctggctatgcaaagccaaagcagagtttctcaggaccttctgtgatggtttccagttcaccatcacaaataaggagtcaagggcatcctggtctacctcctgcaaaatatcattctaatcatttcaattcagatgccaggcaagatgatgtacaaactcggaacccatcaggtcccaatgtgtttagtggttctggcaacaaaattcagggttctacaggaagggtaaaagctcatagtggaggaccccaatctaacttaagatcattgaagttattgcgatcagttgagcagtactaccacacactgcagcaaatgaaatggggtccaatgaccgagcatgttctagacaatcttcattgcaagatagatgcattccaggcaaatcaagtactcaagctgcttcatgaccacactgtcgctcttggcttctttcaatggttaaagaggcaacctggattcaagcacgatggtcatacttacacaaccatgataggcatccttggacaagccaggcaatttggtgttttgaaggaacttctggatgagatgagccgagctcactgcaaaccaactgtggtgacctacaacagaataatacatgcatatggccgtgcaaattatcttaaggaggctgtcaaagtatttgaggaaatgcaggaagctggttatgagcctgatcgggttacatattgtacattgattgatatccatgctaaagctggatacctagacattgcaatggatttatatggcaggatgcaagaagtaggcttgtcacctgatacgttcacctacagtgtcatggttaattgccttggtaaaggtggtcaattagcggctgcttataagcttttctgtgagatgattgaaaatggctgcacacctaaccttgttacttacaatattatgattgcgctccaggccaaagcaagaaattatgagaatgttgttaagctgtacaaagacatgcaggttgctgggtttcgtcctgacaaaataacttacagcatcgttatggaagttcttggtcattgcggccatctggatgaggctgaggcggtttttattgagatgaggcgtgattgggctcctgatgagccggtatatggacttttggtcgatctctggggcaaagctggcaatgttgacaaagcgctaggatggtaccaagcgatgcttcaggatggtttgcagcctaacgtgccgacctgcaattcgctcttgagtgctttcctgaagatgaacagatttcaagatgcctacatcgtgctccagaacatgcttgctcgggggcttgttccatctgtgcagacttacaccctgctactcagctgctgcaccgtgggtcaggcacagatgggtttgtgctgccagctcatggccatcactggacatccagctcacatgttcctgctgtacttgcctgatgcagaagctggtggccagaacgtcagggatcacactggttatttcttggacatgatgcacagtgaggacagagagagtaaaaggggtctaatggatgctgtcatagacttcttgcacaagtccggtctcaaggaggaagcaggctttatatgggaggttgctgcacagaagaacgtgtacccagattctgtaagggagaagagctcgtcgtattggctcatcaaccttcatctgatgtctgagggcacagcagtgactgcactgtccaggacgcttgcctggttccataggcaggttctgacattgggcactggtcctgaaagaattgacattgtcactggctggggcaggaggagcagggtaactggatcttcgctggttaggcaatcgattcaaaagcttctaaacctctttgaatccccattcttcaccacccgtggaaatactggctgctttgtcggctgcggggagccactcaacaagtggttgcacaatccttatgttgagcgcatgcatttattgtaagct

SEQ ID NO: 94044 - DNA, 751 bp, Zea Mays
catatccttagcttccattccatccatcatatcgcgcccatggatcatcgtcagccgccgccgaataagacggcggagcttgaccccgtgctgcactccatcggcttccagatcgaggaggtgtcgccgtcgcaggtcaccggccggctccccgtcacacccaggtgctgccaggtacgccgttccaggtgctccacggcggcgtgtcggcgctggtggcggagggcctggccagcatgggcgcgcacatggcgtcgggcttccgccgggttgccggcgtcagcctcaccatcaaccacttccgcagcgccaaggtgggagacgtcgtcctcgtccgcgccgccccgctccacgtcggccgttcgacgcaggtgtgggacgtgaagctatggaaggaggatcagcaggggaagaaggggagtcagatatccgagtcaagggtgacgctgctatgcaacctgcccgtgccggacatcctcaagcacgctggcgatgcactcaagaagtatgccgacgcccccgccgcccaaaaacccaccgccaccagcagattgtagatatatagttaagttattagtagagtgatatgcagagatttatttattttaatacataacgatataaacactcattactcatacatgtatatctagtatacaattgtacacctacatgaactattacttgtgtgttggtgtgctcttcatctctgcttgcatttttcgtctagcttaattagctttagtatggt

SEQ ID NO: 94045 - DNA, 807 bp, Zea Mays
acgtcacccaacctctcgtcctcttcctctcaataatataatccccttcatccatccattccatatccttagcttccattccatccatcatatcgcgcccatggatcatcgtcagccgccgccgaataagacggcggagcttgaccccgtgctgcactccatcggcttccagatcgaggaggtgtcgccgtcgcaggtcaccggccggctccccgtcacacccaggtgctgccagccgttccaggtgctccacggcggcgtgtcggcgctggtggcggagggcctggccagcatgggcgcgcacatggcgtcgggcttccgccgggttgccggcgtcagcctcaccatcaaccacttccgcagcgccaaggtgggagacgtcgtcctcgtccgcgccgccccgctccacgtcggccgttcgacgcaggtgtgggacgtgaagctatggaaggaggatcagcaggggaagaaggggagtcagatatccgagtcaagggtgacgctgctatgcaacctgcccgtgccggacatcctcaagcacgctggcgatgcactcaagaagtatgccgacgcccccgccgcccaaaaacccaccgccaccagcagattgtagatatatagttaagttattagtagagtgatatgcagagatttatttattttaatacataacgatataaacactcattactcatacatgtatatctagtatacaattgtacacctacatgaactattacttgtgtgttggtgtgctcttcatctctgcttgcatttttcgtctagcttaattagctttagtatggt

SEQ ID NO: 94046 - DNA, 1906 bp, Zea Mays
acggcgaaatcaccgctcgctacctagtactcgtcactcgtgtacacgtgtagcaagcacgaagcagcaaaggcgggatcggcagccatggcgatgatggacaagtggacaggcctgggctcggcgctggcaagcatgctcttcctctggtccatggtgcagaaccacctccccgccgccttcggctaccgcctcagcacctgggggaacaagctcgcctctctcttcagcccttacctggagatcaccatctccgagtacggcgccgagcgcttccgccgcagcgacttcttcctcgccgccgaggcctacctctccgacgcctgctcccgccgcgcgcgcaagctccgggccgacctcggcaaggacagcaagaacctccaggtctccgtcgacgacaacgacgaggtcaccgacgccttctccggggccaccatctggtggtacgcgtccaagcagctggccaggtcacaggtcatcagcttctacccgggcgaggacgagcgccgcttctaccgggtcgtcttccacaggcgccaccgcgacctcgtcgtcgacgagtacctgccccacgtcctcgaggaaggccgcgccgtgaccgtccgcaaccgccagcgccgcctcttcaccaacaaccccagcggcagctggaactcctaccgcggcaagagcgtctggagccacgtccccttcgagcacccggccacgttcgacacgctcgccatggacccggacgacaaggaggacatcctcgacgagctccgcgcgttccgggacgctaaggcctactacaccaaggtcggcaagccgtggaagcgagggtacctgctctacgggccccccggcaccggcaagtccaccatgatcgccgccatggccaacttcctcgactacgacgtctacgacctcgagctcacggcggtcaagaacaacaccgagctgcggaagctcttcatcgagaccaccggcaagtccatcatcgtcatcgaggacatcgactgctccatcgacctcaccggcaagcgcaaggacgacaagaagcgggcgtcggccgaggcagacgacaagcccaaaaccccaacggatcccgacaaggacgagggaagcaaggtcacgctctcagggctgctcaacttcatcgacgggctgtggtcggcgtgcggcggcgagcgcatcatcatcttcacaaccaaccacaaggacaagctggacccggcgctgatccggcggggcaggatggacaggcacatcgagatgtcctactgccgcttccggaccttcaaggtgctcgccaagaactacctggatgtcgaggagccgcacgagctgttcggccagatagaaaagctgctcgaggagacggacatgtcgccggcagacgtggccgagaacctgatgcccatgtccaagaagaagaagcggagggacgccaacgcgtgtctggagagtcttgtggaggctctgaagcaggccaaggaggatgctgctgctgctgctgctgctaaggcactagctgacgctagggcggccaaggaggaagcggaggaggcgaaggagaaagaggccaaagagaaagacgaggcaacaaatagcaaaggagcagcagacccagcagggaaggacactaagatgagcaatggagatgttactgccaataaggaaggtgatgacgagtgacaagtatagaatggagacgagctcgcttgctagtgaagtaatggagaaacatggctataaataatgacagtggcctatgtaaaatagtgcagtctctagtgaagattacagtcacacgtcgtcatcttccatgttaaaaagataaaaagatagacttgatttggattagttaaaaatagaaagatgtaatgtaacaaccaaatcgagccttctttgcctttcaacttgt

SEQ ID NO: 94047 - DNA, 2013 bp, Zea Mays
cgcgcgcgcggaccgtccgcgccaccaccgcggacagtccggaccgcggaccgtccggcctcagggccggaccgtccgccaggctcattttagcctccaacactacggcacgtactaaatttatgagtggcctttgaacttgcaaaaaaaaaaggtggtgtgtacacttgggcgccgcagtttctacgcgtcagtgttcgtccacacacacactgtcagctgtctgtcacttggccacacgcgtgacagagtattatatatacatgctcacccgtgatgatttgagcaccacccaccaacccaccatccccgatcgcccttggagatggagatggtcggcggcagcgccgacgccatccccggcctcttgtcatacggctgggccgggctctggtccacgctggcgagcctcctgttcctgtggtccatggtgcaggaccacctccctttccagctcgaggagcagctgtccgcactggcgcgccgcgccctcgccgccgtcaccccctacgtcaccatcaccatcgacgagcacgacgccgactccttcggccgcagcgaggcctacctcgccgcggaggcctacctgggcgccaccttcgccggccgcgccagcaggctccgcgccgagctcccgggcggcagcgaccgcgtcagcctcgtcgtcgacgacctcgacatgttccgcgacggcagggactactacgcgtccgtgggcaaggcgtggaagcgcggctacctgctgttcggcccgcccggcaccggcaagtccaccatgatcgccgccatggccaactacctgggctacgacatctacgacctggagctcacggcggtcaagagcaacacggagctcaggaagctcttcatcgagaccaagagcaagtccatcatcgtcatcgaggacatcgactgctccatcgacctcaccggcaagcgaaagaagaagaagaaggacaagaacgatactaggaagaagaagaagaaggcgccgtgggaagaagaagacaaggacgaaggcagcaaggtgactctttcagggctcctcaacttcatcgacgggctgtggtcggcttgcggcggcgagcgcatcatcgtgttcaccaccaaccacaaggacaagctggacccggcgctgatccggcggggcaggatggacatgcacatcgagatgtcctactgctgcttccagggcttcaaggtgctcgccaagaactacctgggcgtgcaggagcatgacggcgagctgttcggcgacatccgtcggctgctggaggaggtggacatgactccggcggacgtggcagagaacttgatgcctaggtccaagaccaaggacgccgatgcctgtctccggaggctcgtcaaagcgctcgaggaggccaaggaggcggcgttgttggcggccaaagccaaacaactggacgggatcaaggacgatgagggaaccgacgatgaagacgacagcgatgacgatggcagcgttaccagcagaggtcacccctccgacggtgacgaaaagagtgccaaaaaagaggaaatgtaataaaaaagtttaaaacctataaaagcctgaaagctaggtgaggatacttgacttgagcattcctttccaaagctggtggtacctagaattacttttcttacttgtatgctaactatcttgtcgtttttctgttgtccctccctctgattctaaaaccaaaggggtaactgcgccattaagggggtatttggttctgtggactaaagtttagtctgggtcacatcaaacgtttgacttttaaataggagtatgaaatatagacccaaccaactgtactagattcgtctcactttttaatcttcggctgagaaattagttttataatctgactacatttaataccccgaacggatgtttaaacattcgatgtgataggggctaaattttagcaggggcaaaccaaacaccccttaggcgggcgggcatgcatccgtccaatcagaccaggttccgtggtctgcactgaa

SEQ ID NO: 94048 - DNA, 2186 bp, Zea Mays
cgcgcgcgcggaccgtccgcgccaccaccgcggacagtccggaccgcggaccgtccggcctcagggccggaccgtccgccaggctcattttagcctccaacactacggcacgtactaaatttatgagtggcctttgaacttgcaaaaaaaaaaggtggtgtgtacacttgggcgccgcagtttctacgcgtcagtgttcgtccacacacacactgtcagctgtctgtcacttggccacacgcgtgacagagtattatatatacatgctcacccgtgatgatttgagcaccacccaccaacccaccatccccgatcgcccttggagatggagatggtcggcggcagcgccgacgccatccccggcctcttgtcatacggctgggccgggctctggtccacgctggcgagcctcctgttcctgtggtccatggtgcaggaccacctccctttccagctcgaggagcagctgtccgcactggcgcgccgcgccctcgccgccgtcaccccctacgtcaccatcaccatcgacgagcacgacgccgactccttcggccgcagcgaggcctacctcgccgcggaggcctacctgggcgccaccttcgccggccgcgccagcaggctccgcgccgagctcccgggcggcagcgaccgcgtcagcctcgccgtcgacgaccacgtcgaggtcaccgacgccttccgcggcgcccggatgcggtggcgcaagacgcggacgctccgccgcggcaacgtgatcgcctggaacccgcgtgaggaggagcgccgcgcctactgcctcaccttccaccgccgccaccgcgcgctcgtcgaggccgcctacctgccgcacgtcctcgccgagggccgcgccgccaccgtccggaaccgccagcgccgcctctacaccaacaacgccagcggggactggggcggcggcgacgacgggccccgcgcctggacgcacgtcaagctggagcacccgtccacgttcgccacgctcgccatggacccggacaggaagcgggaggtcgtcgacgacctcgacatgttccgcgacggcagggactactacgcgtccgtgggcaaggcgtggaagcgcggctacctgctgttcggcccgcccggcaccggcaagtccaccatgatcgccgccatggccaactacctgggctacgacatctacgacctggagctcacggcggtcaagagcaacacggagctcaggaagctcttcatcgagaccaagagcaagtccatcatcgtcatcgaggacatcgactgctccatcgacctcaccggcaagcgaaagaagaagaagaaggacaagaacgatactaggaagaagaagaagaaggcgccgtgggaagaagaagacaaggacgaaggcagcaaggtgactctttcagggctcctcaacttcatcgacgggctgtggtcggcttgcggcggcgagcgcatcatcgtgttcaccaccaaccacaaggacaagctggacccggcgctgatccggcggggcaggatggacatgcacatcgagatgtcctactgctgcttccagggcttcaaggtgctcgccaagaactacctgggcgtgcaggagcatgacggcgagctgttcggcgacatccgtcggctgctggaggaggtggacatgactccggcggacgtggcagagaacttgatgcctaggtccaagaccaaggacgccgatgcctgtctccggaggctcgtcaaagcgctcgaggaggccaaggaggcggcgttgttggcggccaaagccaaacaactggacgggatcaaggacgatgagggaaccgacgatgaagacgacagcgatgacgatggcagcgttaccagcagaggtcacccctccgacggtgacgaaaagagtgccaaaaaagaggaaatgtaataaaaaagtttaaaacctataaaagcctgaaagctaggtgaggatacttgacttgagcattcctttccaaagctggtggtacctagaattacttttcttacttgtatgctaactatcttgtcgtttttctgttgtccctccctctgattctaaaaccaaaggggtaactgcgccattaagggggtatttggttctgtggactaaagtttagtctgggtcacatcaaacgtttgacttttaaataggagtatgaaatatagacccaaccaactgtact

SEQ ID NO: 94049 - DNA, 967 bp, Zea Mays
aggcaggcatccggcgcatcctcctccaattgatccggcccgatcccgtacgtccatagtttcccttgcttattatccgggcccggccgccatggcgtctcagggagtagtgggcggcggcggcggcggcggcggcggcggccggcacaggttcttcaaggtcctactgcccggctctttcgagatcagcctgtccctgccgcccaagttcgcggcggggctcggcgtgctgtgcccagcatggcgcgccgccgccaagctgcgggatcgcacggggaggtcgtgggacgtggagctccggcgagacgccggccaccaccgggtgtccttcacgggcggcggctggcgcggcttcgtctcggccaacgccctctccgcggggcagctgctggtcttcgagcaccgcggctgcctggacttcgccgtcgatcggttcgacgcctccgggtgttgctgtgacgacgaccaagatggaggaggagtcgttgttgccgagcacatggcgacgacgacgacgacagggacagaggccacggccgacaaggagtccggctgctccggccaagaggcggcggcggcggtcaagaggaggaggcggtcgccgctcagcacgaccaccaccgtctgcggcggcgatgacaacgacgagacgctctgccgccgcatcgagagggcttaccagctgcggttcttggacctgagcaaggacttctgcgaccgcgtgggctggtcgtcgtcgcgccaagtcgtgctctgcgccgccggtgacagcgggaagcgttggcaggtgagcgtgaaggtgtcggcaaagagcggcatgatgtgcgcgggctgggccgagttcgcgcaggacaacgggctcaccgtctccgatgcctgcgagttcgtgccaccaccactccatgcccatggctccggctccgacgtccttcaagtccacctcgtgaggggcggcggcacctcttga

SEQ ID NO: 94050 - DNA, 270 bp, Zea Mays
ttccaaagtgagtatgaaaagtcactagcagcctatgtagtaggttcaaatggaactaatgaatttgtcattgcaattggagcttatggagggacagttacacttgatgaagagcgaaaggttatactggatcctactagtcagattgtctcatgcaaatgttgactctttgagagaactggtatattatgtaggcatggactaaaaggtctccatttgttgaacattaaattactgcctgaaagatatattttgaagcgatggactcga

SEQ ID NO: 94051 - DNA, 3144 bp, Zea Mays
ttatagtatatttaagaaaaaagaaaaaagaatggttccacttgctaagggtgccagctccagcccagcagctagcaaagtcaacgctcttcgcgccgttccctttccttgcgctcagcgccttcctccaaatcgtcaatcgcaaccactccggccgccagcgccaggcgcaaacgcgcgcccctcccatgtccatggcgtcgcctgtcctccaccgcctgatcctactctcggtctcgctgtcggtggcaatcgccgctgccgatgccagcgctgtgcccgtcgagtacctctacccgaccctgaatctcacctacatacactccatcgacaccgacggagtcttcctccgctcccccagcgccaacttctccgccgccatctacaacgccgccggagccggccagtcctcagacgactcccagtcccgcttcttcttctccgtcctgcacactgcctcacggaccccagtctggaccgccaccgccaccggctcaaccatgttcaactccatcgtcctgtccgtcgcccccaccgggctcgctctctacgacccttccgccgccaagcccgacgacccggcctggtccacgccgcgcctccgcgaacccgtcgtagcgctgcgcctcctcgacaccggcgagctcgcgctcatcgatagccgaaacaccacgctctggtcctccttcgaccgccccaccgacacgctgctcccgggacagccgctcctcctcgggagcccgctcacgtcctccgcgtccgaccgcgacctctcccccggagcttaccgccttgtcctcacacccaacgacgcgctccttcagtgggccaccaacgcctccactgccttcctcacctactggtccatgtcctccgaccccgccgccttgcaagactccaaccaagccgtcgccgccatggccgtcaactcctccggcctctacctcttcgccgccaacggcagggacaccgtttacaggctcctcttcccttcgccgccggcgtcaaagtccgagtcgcgcatcctcaagctctacccttccggcagcctgcgtgcggtcgccctcaccgccgccgccaccgtctccaccatctgggccgcgccagccaacgactgcgacctcccgctgccgtgcccgtccctcagcctctgcacatcggacgccaacggatccacctgcacctgtcccgaggccttcagcacctactccaacggcggctgcgagccggccgacggctccgcgctgccatccatcgccgacacctgtgccaaacaagaggcaacgacgcgttacaactacgtcagcctcggcgccgggatcggctacctgtcgaccaagttcgcggtagccgatacctccggcgacgagctcccagcgtgccgcgacctctgctccgccaattgctcctgcctcggcttcttctacaagaacacctccgggtcctgcttcctcctgcacaaccggatcggctccgtcttccgcgccggcgccgacgtcgccgtgggcttcatcaagactctcccgttaccgcagcagcagcagcgcggcagtaaaggctcgtcgtcgtccctgagcctgataactatcgtgttcggcatcgtgttccccaccgtggcggccgtgctcatctccttcctgctctacgcgctcaggaggcgccggccgcagcacgtcaagaagagcaccagcagcagctggttcaagctgccggcgatgctgtcgtcgtcctccgccccgtccgacagcgagggcctcgacgaggacgtgctcatcccgggcctgccgacccggttcacgtacgccgacctggacgctgcgacggacggcttcaagtggcagatcggctccggcgggttcggctccgtgttccgcggcgagctccccgaccggagccccgtggcggtgaagcggatgaacgggctgggcacgcagggccggcgcgagttcctgacggagatcgccgtgatcggcaacgtccatcacgtgaacctggtgaagctccgtgggttctgcgccgagggcgcggggcggcagctgctggtgtacgagtatatgaaccggggctccctggaccagacgctcttccgcagcgcgccggcgctggagctggagtgggcggcccggctgcgggtgtgcgtgggcgcggcgcgcgggctggcgtacctccacgctgggtgcgaccgtaagatcctgcactgcgacgtgaaaccagagaacatcctcctggacgaccacggcggcgtgaagatctccgacttcgggctggcgaagctgatgagcccggagcagtcggggctgttcacgacgatgcgcggcacgcgcgggtacctggcgccggagtggctcatgaacgcgcccatcaccgacaaggcggacgtgtacagcttcggcatggtgctcctggagatcgtgcgcgggaggaagaactcaaagaagcagggggaggagcatcagatggcgagcgggtccagcgcgtcgtcgtcgtcgtcgtcatcggagagcagcggctacttccccgcgctggcgctggagctgcacgagcagggccggtacgaggagctggtggacccgaggctggaggggcgcgcggacgcggtgcaggtggaacgtgtggtgcgggtggcgctctgctgcctccacgaggacgcggcgctgcggcccaccatgacggtggtgtccgccatgctcgacggcagcatggaggcgggccagccccgggcggagctcctccggtaccttaggatgtacgggcgtgggttggtggacctgcggcccgccgctgccgggtggatggagcaagggaaagccaggggaagcgccggcggcgtcagcagtggctggtcgccgccgtcgtgcgtgtcggcgcagcagctctcgggacccagatgacgggactgtctgtctcacaccgtacagaccaaatcgatcaatgtcgtagcttttctcttccttttcgtttcggagccaagatgatttcagcaggtcttgcctcttctcttggttgggaatttccatctctctttttagtaacaaaaaaagtatttagattgacactttttcttttttttctatgaattgagttcttgccacgacgtacactgattagcgtgatcagcagttcaatacatacagaacagcaagc

SEQ ID NO: 94052 - DNA, 3664 bp, Zea Mays
atggccgccggcggagagccctcccccctgtcccctgccaaatactctcgcttgcccgacgacgcccagcccgacgcatccccgaagcgccgcaagcgccaccaccgccaccaccaccaccaccaccaccgtcgacaccgtcacgccgattccccgatacccgaggcggccgacgaagaggtagaggagggggagatactcgacgatgcttcctccgtctctgctatggaggtcaatgccgagtccgccgccccacagtcttcccttgctccggagcactttggtaatggtgctgatattaacacagatgcaaccaagatgcaagctcctgctccgcctacccttccatcctcaaaagatagaaggaggtcacttcacggtgcccctgagtctgaaagcggaggtatcctatcaagtgatgctgaggataacaaagggcatggacggaggcaaagtcaaagttgttcaaaatctccaaagcccagaagggagaaggaaaggaggcacaaagatgggcatcactcttcatcttcaaaagatcattatcccaaaaatcgctctagagcatctccatactcaaggcatcagagtgaagctcattcaagagatcacttgagatctggagaaagaggtgatgatactaatggttctgatcgtgagagcaatgatcagaatgggaagtctggcagacatacgactgggacccaggagaatgaaagagaaaggagcagcagccatggtattcatgatagacatggtgataggcataatgacagacatggcagccaggaaaggtacagagacgataggacatatagagacaaaattgattcgctagaagctacttggaagcacagagaaagaagcaggagtcatagtagatcggatctaagggaaagtacacgtcttcgtgatcaaagccgggagagtgaaagacggattggtagttcaatgcatagggatcatggcagcaagagggatacaagtaaacatagagaatctgacagggttaacagtgcatatgaaagggagagagggagagatgctggggacagggaatggcacagggtcaagggaagcgaaactcatagagctaaggaaggacgggacaaagttagcgatagtgataggtacagggattcaacacgctcgaaatatagtgtgtctgatggctacaaagagagaacaagatctggggagaaaggtagagatgttgaccgtaaaaaccgaaagtttgaagaaatgaaggaaaattatctcaaggaggaagatgaagagaagtaccaagagaaaatagaacagcagttagcaatgcaggaggaagaggaccctgaaaaaatcaaagaggaagcaaggaggaggaaagaagctatcatggcgaagtacaggcagcagcaatcacagaagcaggatatggaagctaaaccaagcagcaatgatgaagaagtaagagctatggatggaaatgtaactatgcatcagaaagatgataacggtagcagttccacgggcaatgacaaagctgaaaataagcatgattcttcagaggtatttgatggcaaaaccgacttttctgtgggaaagtctcctgctcaaaatgatacttcaactagcacgggagcattcactgatgagaggacaatagatgtttcaggtcttggagagggttctcccaagggcaagggtgatggtttgcatgttgagagaaatgctcttcatgacaactgggatgatgcagatgggtactacacttaccggttcggagaattgctggatggccattacgaaatcatagcagcacatgggaagggtgtgttctcaaaagtcgtgcgggcaaaagatcttaaagcgagtaaagatgatcctgaagaagttgctatcaaaattattcgcaacaaggagacaatgtacaaggctggtaagcaagaggtttcaatactggaaaaacttgcaagtgtggaccgtgaggacaaacgccactgcgtgcggtttatttctagtttcatgtaccggaaccatctttgcttagtttttgaatctctcaatatgaatcttcgtgaggttttaaagaaatttggtcgtaatattgggcttaaactgactgcggtgagggcatattcaaagcagcttttcatcgccctgaagcacctgaagaactgcaaagttttgcactgtgatattaaacctgacaatatgctggtgaatgaggctaagaatgtgctcaagctatgtgattttgggaatgctatgcttgctggtatgaatgaagttacgccttatcttgttagccgtttctatcgggcacctgagatcattcttgggttagcctatgatcatcctttagacatgtggtcagttggctgctgtctatatgagctttataccggtaaagtcttatttcctggtccatcaaacaatgccatgcttcggcttcatatggaattgaagggtccattccctaagaagatgcttcgaaagggtgcctttactatgcaacactttgatcaagatctcaattttcatgctaccgaggaggatcctgtgacaaaaacggctgtgagaaggttaattttgaacattaaaccaaaggatgtcggttttttgattttgaactctcctggcgaggatccaaaaatgctatccagttttaaagatcttcttgataaaatgtttatattagatccagaaaagaggataaccgtatcacaagcacttagccatccatttatcactggcaagtgacataagatgctgattcctcttgatattgaacttagcatctacactgtaaaatacaatttgggtttctcttgtctaatcatcgacgtttctgtcttgtgtcctgggagctctgagaacaaatacatggatgaagcacggaactatcgaagagatggctatctgcagaccttgttgcatgcacttatcatttggatatgttctgttgcttgattctgccagggcctctgctgtgtgtacactttatatgcttaagcgccaacatttgaaggtcctgggatggagatcgctggaccctcctctcctcatcatggcttctcatccccatcaacagtgctccatgtgattaacaaaggctcagatgtcctaatgcgatcctccacaacatgtcagaatcgtatagaaagcaaaatctcacagattttcatcttcgcctctatggaagccaatttggacttgaccaatcaccacttaaaaaaagttggctcaaagcatccttaggccttgttcgtttgtgtcggattgatgggtcggaacgaatccgagccggattgcttctttaatttatataaactttgattagccggaatgattccgggtgcaatccgatgtaaacgaacaaggccttatgcttgtattcgtgagaaaagcagaagtgaaaagcattggcaaatcgagtggctacatgtctcaataaatctgggacatagaagcacgcaggcgaaatttgtagtgccccacaattttttattgagatcattggaaggcatcttggctgttacaaattattgtatttgtgatcaatccaaggggtgcgacagataattcccaagggacacaccccttgtgaactcaccccttcatatgtatataaacataacccctgctgcaataaagatagaactgtcatttgtctctctctcaa

SEQ ID NO: 94053 - DNA, 1417 bp, Zea Mays
aaatttatccctttcacacgcctctttttaaacatttccataatcttcatgttatattatacataaaccaaattattcaatctttggtgttccagtcggtttcgtttctttgtatgtatatagaaagtaaatactagtaccgtcttcaacaatttacccatatggttatcaaaaacactgtcgcggagtgaagtttgaatgatgatgtggatgagtaagctgctggagatagcctaatgagtaagcacgaaccaactatcaaagaaacacaataactcaagtatgctttattacttacaaattaaaaactactccaattatgttcacagccgaaggtctcagttaaggctgtcaatagcatcccaccaaccaactgaaatgtttatctctatgttagagaactagcatgttcaaaactaactaaaataaatgaattagaattttaaattacttacgagagttctttgccttttgttgctttattgccaattgcttcccaaagtttctgctccttttgtcatagtcatctgtttggttacttaattttttcaagcacatcatcatcggttaccatcatttcaaacatatcattcaaagcaatctggagcctagaagcatgctaaacatcattcgtggtgtcagaatgtatttggattaaaaacaatggagccccatgtagtttttgctccatttgatgcaatcacctcgtgtcaatggagccccatgtcagaatttatttgcttccaagagaggtacttgtcttttttatagcaaaattcatggtagcagaaatctctggcatggcaggcttctcatccccatcaacagtgctccatgtgattaacaaaggctcagatgtcctaatgcgatcctccacaacatgtcagaatcgtatagaaagcaaaatctcacagattttcatcttcgcctctatggaagccaatttggacttgaccaatcaccacttaaaaaaagttggctcaaagcatccttaggccttgttcgtttgtgtcggattgatgggtcggaacgaatccgagccggattgcttctttaatttatataaactttgattagccggaatgattccgggtgcaatccgatgtaaacgaacaaggccttatgcttgtattcgtgagaaaagcagaagtgaaaagcattggcaaatcgagtggctacatgtctcaataaatctgggacatagaagcacgcaggcgaaatttgtagtgccccacaattttttattgagatcattggaaggcatcttggctgttacaaattattgtatttgtgatcaatccaaggggtgcgacagataattcccaagggacacaccccttgtgaactcaccccttcatatgtatataaacataacccctgctgcaataaagatagaactgtcatttgtctctctctc

SEQ ID NO: 94054 - DNA, 3684 bp, Zea Mays
atggccgccggcggagagccctcccccctgtcccctgccaaatactctcgcttgcccgacgacgcccagcccgacgcatccccgaagcgccgcaagcgccaccaccgccaccaccaccaccaccaccaccgtcgacaccgtcacgccgattccccgatacccgaggcggccgacgaagaggtagaggagggggagatactcgacgatgcttcctccgtctctgctatggaggtcaatgccgagtccgccgccccacagtcttcccttgctccggagcactttggtaatggtgctgatattaacacagatgcaaccaagatgcaagctcctgctccgcctacccttccatcctcaaaagatagaaggaggtcacttcacggtgcccctgagtctgaaagcggaggtatcctatcaagtgatgctgaggataacaaagggcatggacggaggcaaagtcaaagttgttcaaaatctccaaagcccagaagggagaaggaaaggaggcacaaagatgggcatcactcttcatcttcaaaagatcattatcccaaaaatcgctctagagcatctccatactcaaggcatcagagtgaagctcattcaagagatcacttgagatctggagaaagaggtgatgatactaatggttctgatcgtgagagcaatgatcagaatgggaagtctggcagacatacgactgggacccaggagaatgaaagagaaaggagcagcagccatggtattcatgatagacatggtgataggcataatgacagacatggcagccaggaaaggtacagagacgataggacatatagagacaaaattgattcgctagaagctacttggaagcacagagaaagaagcaggagtcatagtagatcggatctaagggaaagtacacgtcttcgtgatcaaagccgggagagtgaaagacggattggtagttcaatgcatagggatcatggcagcaagagggatacaagtaaacatagagaatctgacagggttaacagtgcatatgaaagggagagagggagagatgctggggacagggaatggcacagggtcaagggaagcgaaactcatagagctaaggaaggacgggacaaagttagcgatagtgataggtacagggattcaacacgctcgaaatatagtgtgtctgatggctacaaagagagaacaagatctggggagaaaggtagagatgttgaccgtaaaaaccgaaagtttgaagaaatgaaggaaaattatctcaaggaggaagatgaagagaagtaccaagagaaaatagaacagcagttagcaatgcaggaggaagaggaccctgaaaaaatcaaagaggaagcaaggaggaggaaagaagctatcatggcgaagtacaggcagcagcaatcacagaagcaggatatggaagctaaaccaagcagcaatgatgaagaagtaagagctatggatggaaatgtaactatgcatcagaaagatgataacggtagcagttccacgggcaatgacaaagctgaaaataagcatgattcttcagaggtatttgatggcaaaaccgacttttctgtgggaaagtctcctgctcaaaatgatacttcaactagcacgggagcattcactgatgagaggacaatagatgtttcaggtcttggagagggttctcccaagggcaagggtgatggtttgcatgttgagagaaatgctcttcatgacaactgggatgatgcagatgggtactacacttaccggttcggagaattgctggatggccattacgaaatcatagcagcacatgggaagggtgtgttctcaaaagtcgtgcgggcaaaagatcttaaagcgagtaaagatgatcctgaagaagttgctatcaaaattattcgcaacaaggagacaatgtacaaggctggtaagcaagaggtttcaatactggaaaaacttgcaagtgtggaccgtgaggacaaacgccactgcgtgcggtttatttctagtttcatgtaccggaaccatctttgcttagtttttgaatctctcaatatgaatcttcgtgaggttttaaagaaatttggtcgtaatattgggcttaaactgactgcggtgagggcatattcaaagcagcttttcatcgccctgaagcacctgaagaactgcaaagttttgcactgtgatattaaacctgacaatatgctggtgaatgaggctaagaatgtgctcaagctatgtgattttgggaatgctatgcttgctggtatgaatgaagttacgccttatcttgttagccgtttctatcgggcacctgagatcattcttgggttagcctatgatcatcctttagacatgtggtcagttggctgctgtctatatgagctttataccggtaaagtcttatttcctggtccatcaaacaatgccatgcttcggcttcatatggaattgaagggtccattccctaagaagatgcttcgaaagggtgcctttactatgcaacactttgatcaagatctcaattttcatgctaccgaggaggatcctgtgacaaaaacggctgtgagaaggttaattttgaacattaaaccaaaggatgtcggttttttgattttgaactctcctggcgaggatccaaaaatgctatccagttttaaagatcttcttgataaaatgtttatattagatccagaaaagaggataaccgtatcacaagcacttagccatccatttatcactggcaagtgacataagatgctgattcctcttgatattgaacttagcatctacactgtaaaatacaatttgggtttctcttgtctaatcatcgacgtttctgtcttgtgtcctgggagctctgagaacaaatacatggatgaagcacggaactatcgaagagatggctatctgcagaccttgttgcatgcacttatcatttggatatgttctgttgcttgattctgccagggcctctgctgtgtgtacactttatatgcttaagcgccaacatttgaagtatcaattgaatggttttgcttttatgttattgaggtcctgggatggagatcgctggaccctcctctcctcatcatggcttctcatccccatcaacagtgctccatgtgattaacaaaggctcagatgtcctaatgcgatcctccacaacatgtcagaatcgtatagaaagcaaaatctcacagattttcatcttcgcctctatggaagccaatttggacttgaccaatcaccacttaaaaaaagttggctcaaagcatccttaggccttgttcgtttgtgtcggattgatgggtcggaacgaatccgagccggattgcttctttaatttatataaactttgattagccggaatgattccgggtgcaatccgatgtaaacgaacaaggccttatgcttgtattcgtgagaaaagcagaagtgaaaagcattggcaaatcgagtggctacatgtctcaataaatctgggacatagaagcacgcaggcgaaatttgtagtgccccacaattttttattgagatcattggaaggcatcttggctgttacaaattattgtatttgtgatcaatccaaggggtgcgacagataattcccaagggacacaccccttgtgaactcaccccttcatatgtatataaacataacccctgctgcaataaagatagaactgtcat

SEQ ID NO: 94055 - DNA, 3372 bp, Zea Mays
atggccgccggcggagagccctcccccctgtcccctgccaaatactctcgcttgcccgacgacgcccagcccgacgcatccccgaagcgccgcaagcgccaccaccgccaccaccaccaccaccaccaccgtcgacaccgtcacgccgattccccgatacccgaggcggccgacgaagaggtagaggagggggagatactcgacgatgcttcctccgtctctgctatggaggtcaatgccgagtccgccgccccacagtcttcccttgctccggagcactttggtaatggtgctgatattaacacagatgcaaccaagatgcaagctcctgctccgcctacccttccatcctcaaaagatagaaggaggtcacttcacggtgcccctgagtctgaaagcggaggtatcctatcaagtgatgctgaggataacaaagggcatggacggaggcaaagtcaaagttgttcaaaatctccaaagcccagaagggagaaggaaaggaggcacaaagatgggcatcactcttcatcttcaaaagatcattatcccaaaaatcgctctagagcatctccatactcaaggcatcagagtgaagctcattcaagagatcacttgagatctggagaaagaggtgatgatactaatggttctgatcgtgagagcaatgatcagaatgggaagtctggcagacatacgactgggacccaggagaatgaaagagaaaggagcagcagccatggtattcatgatagacatggtgataggcataatgacagacatggcagccaggaaaggtacagagacgataggacatatagagacaaaattgattcgctagaagctacttggaagcacagagaaagaagcaggagtcatagtagatcggatctaagggaaagtacacgtcttcgtgatcaaagccgggagagtgaaagacggattggtagttcaatgcatagggatcatggcagcaagagggatacaagtaaacatagagaatctgacagggttaacagtgcatatgaaagggagagagggagagatgctggggacagggaatggcacagggtcaagggaagcgaaactcatagagctaaggaaggacgggacaaagttagcgatagtgataggtacagggattcaacacgctcgaaatatagtgtgtctgatggctacaaagagagaacaagatctggggagaaaggtagagatgttgaccgtaaaaaccgaaagtttgaagaaatgaaggaaaattatctcaaggaggaagatgaagagaagtaccaagagaaaatagaacagcagttagcaatgcaggaggaagaggaccctgaaaaaatcaaagaggaagcaaggaggaggaaagaagctatcatggcgaagtacaggcagcagcaatcacagaagcaggatatggaagctaaaccaagcagcaatgatgaagaagtaagagctatggatggaaatgtaactatgcatcagaaagatgataacggtagcagttccacgggcaatgacaaagctgaaaataagcatgattcttcagaggtatttgatggcaaaaccgacttttctgtgggaaagtctcctgctcaaaatgatacttcaactagcacgggagcattcactgatgagaggacaatagatgtttcaggtcttggagagggttctcccaagggcaagggtgatggtttgcatgttgagagaaatgctcttcatgacaactgggatgatgcagatgggtactacacttaccggttcggagaattgctggatggccattacgaaatcatagcagcacatgggaagggtgtgttctcaaaagtcgtgcgggcaaaagatcttaaagcgagtaaagatgatcctgaagaagttgctatcaaaattattcgcaacaaggagacaatgtacaaggctggtaagcaagaggtttcaatactggaaaaacttgcaagtgtggaccgtgaggacaaacgccactgcgtgcggtttatttctagtttcatgtaccggaaccatctttgcttagtttttgaatctctcaatatgaatcttcgtgaggttttaaagaaatttggtcgtaatattgggcttaaactgactgcggtgagggcatattcaaagcagcttttcatcgccctgaagcacctgaagaactgcaaagttttgcactgtgatattaaacctgacaatatgctggtgaatgaggctaagaatgtgctcaagctatgtgattttgggaatgctatgcttgctggtatgaatgaagttacgccttatcttgttagccgtttctatcgggcacctgagatcattcttgggttagcctatgatcatcctttagacatgtggtcagttggctgctgtctatatgagctttataccggtaaagtcttatttcctggtccatcaaacaatgccatgcttcggcttcatatggaattgaagggtccattccctaagaagatgcttcgaaagggtgcctttactatgcaacactttgatcaagatctcaattttcatgctaccgaggaggatcctgtgacaaaaacggctgtgagaaggttaattttgaacattaaaccaaaggatgtcggttttttgattttgaactctcctggcgaggatccaaaaatgctatccagttttaaagatcttcttgataaaatgtttatattagatccagaaaagaggataaccgtatcacaagcacttagccatccatttatcactggcaagtgacataagatgctgattcctcttgatattgaacttagcatctacactgtaaaatacaatttgggtttctcttgtctaatcatcgacgtttctgtcttgtgtcctgggagctctgagaacaaatacatggatgaagcacggaactatcgaagagatggctatctgcagaccttgttgcatgcacttatcatttggatatgttctgttgcttgattctgccagggcctctgctgtgtgtacactttatatgcttaagcgccaacatttgaagtatcaattgaatggttttgcttttatgttattgaggtcctgggatggagatcgctggaccctcctctcctcatcatggtaaatactttgaactctggatgtcttccatttttttttcttattaaagacttgtcacctaatagttggtaatgggttggtgcattaaggttgatttagtttctcaatttagcaaccgttactgtttatcaggtgtatttctaattgtttttgcgttttggtaagtaatttctttttgtcagtttcatcaaacattgatcttccaaacaatttgtttgtcttttgtgtgtccgacaaacttttccatattaatgggttgtgaaattcaagtactatatagtatat

SEQ ID NO: 94056 - DNA, 3039 bp, Zea Mays
atggccgccggcggagagccctcccccctgtcccctgccaaatactctcgcttgcccgacgacgcccagcccgacgcatccccgaagcgccgcaagcgccaccaccgccaccaccaccaccaccaccaccgtcgacaccgtcacgccgattccccgatacccgaggcggccgacgaagaggtagaggagggggagatactcgacgatgcttcctccgtctctgctatggaggtcaatgccgagtccgccgccccacagtcttcccttgctccggagcactttggtaatggtgctgatattaacacagatgcaaccaagatgcaagctcctgctccgcctacccttccatcctcaaaagatagaaggaggtcacttcacggtgcccctgagtctgaaagcggaggtatcctatcaagtgatgctgaggataacaaagggcatggacggaggcaaagtcaaagttgttcaaaatctccaaagcccagaagggagaaggaaaggaggcacaaagatgggcatcactcttcatcttcaaaagatcattatcccaaaaatcgctctagagcatctccatactcaaggcatcagagtgaagctcattcaagagatcacttgagatctggagaaagaggtgatgatactaatggttctgatcgtgagagcaatgatcagaatgggaagtctggcagacatacgactgggacccaggagaatgaaagagaaaggagcagcagccatggtattcatgatagacatggtgataggcataatgacagacatggcagccaggaaaggtacagagacgataggacatatagagacaaaattgattcgctagaagctacttggaagcacagagaaagaagcaggagtcatagtagatcggatctaagggaaagtacacgtcttcgtgatcaaagccgggagagtgaaagacggattggtagttcaatgcatagggatcatggcagcaagagggatacaagtaaacatagagaatctgacagggttaacagtgcatatgaaagggagagagggagagatgctggggacagggaatggcacagggtcaagggaagcgaaactcatagagctaaggaaggacgggacaaagttagcgatagtgataggtacagggattcaacacgctcgaaatatagtgtgtctgatggctacaaagagagaacaagatctggggagaaaggtagagatgttgaccgtaaaaaccgaaagtttgaagaaatgaaggaaaattatctcaaggaggaagatgaagagaagtaccaagagaaaatagaacagcagttagcaatgcaggaggaagaggaccctgaaaaaatcaaagaggaagcaaggaggaggaaagaagctatcatggcgaagtacaggcagcagcaatcacagaagcaggatatggaagctaaaccaagcagcaatgatgaagaagtaagagctatggatggaaatgtaactatgcatcagaaagatgataacggtagcagttccacgggcaatgacaaagctgaaaataagcatgattcttcagaggtatttgatggcaaaaccgacttttctgtgggaaagtctcctgctcaaaatgatacttcaactagcacgggagcattcactgatgagaggacaatagatgtttcaggtcttggagagggttctcccaagggcaagggtgatggtttgcatgttgagagaaatgctcttcatgacaactgggatgatgcagatgggtactacacttaccggttcggagaattgctggatggccattacgaaatcatagcagcacatgggaagggtgtgttctcaaaagtcgtgcgggcaaaagatcttaaagcgagtaaagatgatcctgaagaagttgctatcaaaattattcgcaacaaggagacaatgtacaaggctggtaagcaagaggtttcaatactggaaaaacttgcaagtgtggaccgtgaggacaaacgccactgcgtgcggtttatttctagtttcatgtaccggaaccatctttgcttagtttttgaatctctcaatatgaatcttcgtgaggttttaaagaaatttggtcgtaatattgggcttaaactgactgcggtgagggcatattcaaagcagcttttcatcgccctgaagcacctgaagaactgcaaagttttgcactgtgatattaaacctgacaatatgctggtgaatgaggctaagaatgtgctcaagctatgtgattttgggaatgctatgcttgctggtatgaatgaagttacgccttatcttgttagccgtttctatcgggcacctgagatcattcttgggttagcctatgatcatcctttagacatgtggtcagttggctgctgtctatatgagctttataccggtaaagtcttatttcctggtccatcaaacaatgccatgcttcggcttcatatggaattgaagggtccattccctaagaagatgcttcgaaagggtgcctttactatgcaacactttgatcaagatctcaattttcatgctaccgaggaggatcctgtgacaaaaacggctgtgagaaggttaattttgaacattaaaccaaaggatgtcggttttttgattttgaactctcctggcgaggatccaaaaatgctatccagttttaaagatcttcttgataaaatgtttatattagatccagaaaagaggataaccgtatcacaagcacttagccatccatttatcactggcaagtgacataagatgctgattcctcttgatattgaacttagcatctacactgtaaaatacaatttgggtttctcttgtctaatcatcgacgtttctgtcttgtgtcctgggagctctgagaacaaatacatggatgaagcacggaactatcgaagagatggctatctgcagaccttgttgcatgcacttatcatttggatatgttctgttgcttgtaagacaactagccagttgacattccattccctgtatacaatctttcctatggatttacaagatatacatgaaagtcttcttcatttc

SEQ ID NO: 94057 - DNA, 3762 bp, Zea Mays
tggtctccggccaaggggtcgtcacatacaaggaccagcgagatgggcggcgaggctgagcctgacaacgcggtgctcttcgttggggtgtcgctggtgctgggcatcgcctcccggcacctcctccgcggcacccgcgtgccctacaccgtcgcccttctcgtcctcggcgtcgcgcttggatccctcgagtacggaacacaacatggtctaggcaagcttggagctggaattcgtatctgggctaacataaaccctgatcttctgctggctgtttttctacctgccctcctctttgaaagctccttctccatggaagtacaccaaataaagagatgtatggcacagatggtgttacttgctggacctggtgtgctaatatcaacagttttacttggcgttgccgtaaagctcacttttccttacaactggagctggaaaacatcattgttgcttggcggactgcttagtgcaactgatccagttgctgtggttgcactgctaaaagaactcggagcaagtaaaaagcttagcacaatcattgaaggaccgctattgttgcctatcagctattctatcgaatggtgcttggaagaacctttgatgctggctcaataataaagttcttgtctgaagtttcacttggagctgttgctctgggccttgcatttggaatcatgtcaatactgtggctgggctttatttttaacgatacaatcatagagattgcacttactcttgctgtcagttatatagctttcttcactgcacaagactcactggaggtctctggtgttttgactgtcatgacactgggaatgttctatgcagcttttgcaaaaactgcttttaagggtgaaagtcagcaaagcttacaccatttctggtttaaggtccagacccagtcatggtttctcacattggctgcagtacgccagtaccactgtgtaaaggtgagacaggatttcaagggctttctcgacctatttgcacctggggactatcttacccccataggccaatttttcttgttggttaccaaaagtaccatgaaatcttcagttgacactgaattaagggaaatggttgcttacattgcaaatacacttatttttatactgagtggggttgttattgcagatggtgttctacaaaataatggccactttgagaggcacggcagttcatggggcttccttcttctgctctatgtctttgtacaaatatctcgagttatagttgttggtgttttgtacccgatgttgcgtcactttgggtatgggttggacttgaaagaggccatgattcttgtttggtcagggctgcgaggggctgttgctctgtcactatcattatctgttaagcgtaccagcgattcagttcaaccttaccttaaaccagaagttggaacaatgtttgtgttcttcactggtggcattgtgtttctgacattgatttttaatggctcaaccacacaatttttgctacatatactcggcatggacaaattgttgcccacaaagcttcgtatattgaaatatacaaggtacgaaatgctaaagaaagcattagaggcttttggtgaactaagggatgacgaggaacttggacctgctgactgggttactgtaaagaaatatatcacatgtttgaatgacctagactatgagccagagcatccccatgatgttggtgacgaagatgactgcatgcatatcatgaacttaacagatatccgagtgcggcttttgaatggtgtgcaagccgcgtactggggaatgcttgaagaaggacgaataactcaagttacagcaaatattctgatgagatcggttgatgaagctatggaccttgtttctggacaaacattatgtgattggaaaggtttaaagtccaatgtgcagttcccaaattactataggttccttcagaggagtaggttaccacgaaagcttgtcacatacttcacagtcgaaagattagagtctggatgttacatctgtgctgcatttcttcgtgctcacagaatcgcaaggcggcagctacatgattttcttggtgatagtgaggttgcaagaactgttattgatgaaagtaacgctgagggggaggaagctagaaaattcttggaagatgttcgagttacattcccgcaggtgctacgagtgctaaagacacgacaagtcacatattctgtgctgacacacttgagtgagtatattcaaaacctccagaagactgggctgctggaagagaaggaaatggtccatttagatgatgctctgcagacagacttgaagaagttgcagaggaatccaccaatagtgaaaatgccaagagtcagtgatcttctgaacactcatcctttagttggcgcgctgcctgctgctgtacgtgatactttgctaagcaatacgaaggaaaccctgcgagggcagggcacaacgctgtatagagaaggatccaggccaaccggtatctggcttgtttctattggtgtagtgaagtggacaagtcagagattaagcagaaggcattccttggatccaattttatcgcatgggagcactctgggtctgtatgaggtgctgattggaaagccatatatctgtgacatgaccacagattcgatggtacagtgtttcttcatcgaaactgaaaagatagaagagctgctccattcagatccttcgattgagattttcctgtggcaggaaagtgctctggtgcttgccaggcttttggtccctcatagattcgagaaaatgggaatgcatgagatgagggttctggttgctgaaaggtcgacgatgaacatatacatcaagggagaagacttggaagtggagcagaattgcattggcattttgctggaagggttcttgaagatcgagaacctgactctcatcacgcccccagcgttgcttctgccatggaatgctgacttgagcttattcggtctcgagtcctcagactactgccatactgcacgcaggtatcaggtggaagccagagcgcggatcatcttcttcgacgaggcagaggccgcccatcttcatgttcagacaagtgcgtcgctgccccaaggtgagccagcacggagcatgagcaaggagcacagcggcttgctcagctggcccgagagcttccggaggtctcgtggcagcctaggcttagcagctgagatgctgccgggcggcttgtcttccagggccctgcaactgagcatgtacgggggcagcgtggtgagcctctcctccggccagcagggtcaccggcggcagaggccacgtcatcgcgtgcaggcggccacgacgatgacaaaccagaagaagcacagctcttcctaccccaggatgccatccatatccaaggagcggcatctgctctccgtgcagtcggagggctccaacatgaagagagtggcagctctacctgaggttgctgccaccgctcctgctccggcaggggcagcacaggggcagcggagggctatgaacttgcaggaggaatacaactcgagcgaagactccgccggcgaagaagtcatcgtcagagttgactcgcccagcatgctctctttccgtgagtccaccgccgtgcctccgccccaggagcagtagctggatgcctggatgtggtcttctcttctcgtgtattgtattgtactgtatgtattgtatcagggaagctttggcgcagtggtgtggtgtggtgtggtgtggtaaacaaaataaataaaacacatttccgcgttccata

SEQ ID NO: 94058 - DNA, 388 bp, Zea Mays
ctcctttgtcgttatttttagctcaaaatgggtgtttttgcacaatgttgaggtttatttggttgggtagggcacctaaccaaattgaaggatatagtttaggaaaggtttactgggagttttttttgaaagctggtgtatttgtctcagttcataaaattcctagttacgtgcagttcacctctcctattcgacgatatgttgacttgctagctcattatcagataaatatgattatgagtgaggaaaggttttatagcatacaagaaattaagtatttgtgcatttttttattttgatgttctagctttatgatagtgccatcgaattcgtcatcttatcgatagacctttgatccaaagaatatatcaatagtcgacttatattc

SEQ ID NO: 94059 - DNA, 2582 bp, Zea Mays
ttattgattaaaatgaactatacatccaactttaaatagttcaaacaggtgatgcttccattacttttaacacaagttaatgatacaatttattacaacaaatatatctactatcattcaaaagacttacaaactagctcaagcgcgcgccccatatactagttatttagaaactcgtgtagtttagcagacgcttgacggggcatgctattctgtatttttcataatatctttgtgtgattgtgaacttgtggccattcttagctttggcttgtcaggtcaacggtgatggagtatatttggacagcaatttcacaccaatttatatagggctagatgcagctgcttctgtatatgtaacgtgacccaaattaaattaattttctgtatctgcaatgcattgttattatggtctgatcttttccttttccatttctatttctatatgtgatatattagtgctgtagatatagtcaaatgcaatttattctccacatacatttttttaaagcgcaggagagctgcgtttcattaaaattagagagaaatagatgggtcccctacatgatcatcactcatatgaggaccagaacatgagtgaggcagttacacataagttggagcagatccataactgaaacaaaaacacacacacaatctagagacttagcttgctgatgaagtaagcacgagattaagctctcgtaacctcttagccctggccaaaccccaaagactaagatcatcctttatggcatctcgaattgtgttaatagaaggagaaactcctttcaaaacatagtcatttcgatgcttccagatagaccaagcagcaagaatgctgagggaatttgctccttttttctgctgcttccttactcttttcattattctgcgccaccagtcagcaaagctgcgttcattttgctgaggcactgaaattatgagctgcaacaggtttaacaagatgaaccatacttgtcttgccgccagacaagatgttagaagatgttgtgctgtttcctcttcttgatcacatagtggacatttgtctggatgatcgggccctctcttagcgagtgtgtcagctgtccaacatctgttttttgatggccaacaataggaacattttgcatttagaaggtgccaaagtcttccagagttggtgtcaaggctcctctccccatataaatgaaattttatcttccatggaagtcatgttttctttgttcttatttgaaaattcattttgcattaaaaaatattagcgttattacaattgatggtagcaataaaaacaacaacaaccaagcgtgtcagtcgcaagcaagttggggtaggctagagttgaaacccaacaagcacccgcagtcacggttgaggcacatcaatagccgttttccaagcacacctattcagacatagatctctaggtatatcccgttctttcacatctttttttatttcttccccttatatcaacttcggtctacctctgcctctcctcacattattatcttgacttagaactccacaatgggttcttactttgttcctgaaacaagtatctcgagagcatctactttattcatgaagccaaattctaaatggattacaccacatggtgacagattatattcagactgcagcctgacacagttgtgttcgggacccgatgcagctcttttgagaaatgattatggttctcactttgttcctacagaagaagatacatcgcatcagaagtctgtgcttggtccacaatttgttcatgaaacatgggaaacatcacttgaagatttttttcggatacctggtaatgagttctctgaagctataattatatttgctgatggtactttcttataggttgctgatactacaaagataggaagagtttttagactggatctgttgcaagaaatgattttttttctaataacgtgggattaagttggaatggacagtttgacgttagtacaatagttgtcattgatggggtccgtgctgaaatccgcgcactctattgtgacaagttctctgaaaaggcgaaattcaataactacttcagttacattcacaatattattgagctatatagaataaaaggggttggtctgccgtcattttttacctacttgaccaataagttgtcagaatctccctgcagaccttttgtgtgtagcccacaacaacttaagggctaccgacgtcgactttatggattctgtgattgtgtattgagtatcttggcgctgaggtcctcattggctagagctggattatattctgaaattcataggatacgccgcttgccaccatcagatgtgagaaatgctttgaaatcagtgctgtcaagtactcctcttaaatatgattggagagagtaaatttaacaacatggacatccagttctcaaaaaggttttaaggcacatccccgttgaagataaaagtaacaaaaaggttcaggagaatgaagacgcacgcgcacgggggtatgagttgtataaacctgatgctggtagcttgtctatttttacaagacaaataagcgaacatggaaaacaaaagcctaaagtg

SEQ ID NO: 94060 - DNA, 359 bp, Zea Mays
ttattatcttgacttagaactccacaatgggttcttactttgttcctgaaacaagtatctcgagagcatctactttattcatgaagccaaattctaaatggattacaccacatggtgacagattatattcagactgcagcctgacacagttgtgttcgggacccgatgcagctcttttgagaaatgattatggttctcactttgttcctacagaagaagatacatcgcatcagaagtctgtgcttggtccacaatttgttcatgaaacatgggaaacatcacttgaagatttttttcggatacctggtaatgagttctctgaagctataattatatttgctgatggtactttcttatag

SEQ ID NO: 94061 - DNA, 862 bp, Zea Mays
gggggacatctcttttgaaccacatgaaactgtggtgtcaatggagtatctacttggccttgtcctcgctcttcttggaggaagtgtgaaaatgcaggactattctgatgaaagaaaaagtcagatattgaatgtggtgaagagtctggccggagggtttgatatggatgttatcttcaccagaacggatggttttacaatgactccagagtggttgcttctggattgcttagatctcaaccttcgacatggttggattgctgctaggaacgagctgccccttctcaagaacgagctggacgccaccccatcgctcaagaaggccattacaaggatggccacagcgctgtggcacaggacgagggaggttgccgctctgttggacgaaattcggacgccgaagaagcccatagaggagctagcgacggacgtgaagctgatcccgacgccggagaagttggaggagacgctgaaagcgcacggccgtagccggcggcgtaggctgaggcggcgacggtggcgacggatgacctcatgtccgttgaacgagagctcaacattggcatcgagccaccgaggctgggcggaaccctgtcaagcgcaaggcggaggtcaagctgccagagagagtgttctgttggggagaaacaacatggatcagaattttggattcgccaaatccggatgtacccaattgcaacttatcatggccatactaatagaagaacataagaaagaaacaactaacttgatgggaacaggtggtcagataaactggattgcagtggtctctattacgcttcatgtacaaccactaagccttgttatatttggcatggcaactgacagcctctccatttaa

SEQ ID NO: 94062 - DNA, 210 bp, Zea Mays
atccagccactcttgccaccatagggtgaacgctcctccggtgcacgccatcccaagttcgagggagatgaatgagtacttcgctgccgaacagcgacgccaacagcaggatttcattgacaagtacaacttcgatcctgcaaacgactgccctctcccaggcaggtttgagtgggtgaagctagactgatggatttagagggatgagag

SEQ ID NO: 94063 - DNA, 1634 bp, Zea Mays
gcgggcagcctaacggactcctggtcggtgggcccctatcgcacaacccaataaagagaaggtggggaccacgatgcggcgatccgagggcgatttcgtgcgctcctccccttaccggcgagctcgtcggtctggccccgctctggtgaccgctgcggccatcgaagatgcggtggattgcggctcctcatctgtgagcgggacgggtgtgtggaagagggctcccgccggcgagaaggtcccctcccttctcaatttggcaccgcttaggggtcaagttctgggttgtggcgatgaagcggtggcggcgacgcggcagcagacatggtggttccggccctccatccgccttgacggcgcgtgctccggtgccagcgaggggccagtaaagcttggtttgagcgatttgggagcaaccatcctcaacctcgacgacgacgcatctgacctcggtggcagcgatgtctactggtacagtctcttccccttctctggcgcttgctggtttgtagaggagactcgaccccggtggcggcaactgacggcgacgacggaggtggcggcggttgttgaggattggagattcatcctgaagggtcttgtagttcttagtttatctagggttggtaggtttcgtcctagcgggtctagggttaggtttctggctggcttggtgctggttcggccggatctagggtttgccgggggatgccagtcctcagcggcttgcttttcctggcgtcatcggcgaggctgaggtggcgatggtgcagaggaataacatcttccgacctcttcctcgcccctgtgacgttctgctctggcatcaacggagaggttgcggagatcctcttaggagtcttcggctggcggctcatcgtcttgacaggagtcttctggccatttgctcgacgattgtgcgacatttgcgatgtagtggtagtggtttgtgttggaaggtatgtggatctagcgttcccttttgtcgtttacaggcgatgtgctcagatccaagactaagacagagtggggtgcgtccccagccgttgtgttccattggttgtttcaaggccttggcgccatggtgcttgtcttggtatgcggtggccaactatctttggatggcagttcaggaggatgcagagccccatagggtcctctgtgtcagtttggtgtcacctccttgttgtatgcatcggttgtacatctagatgtacgtttttccttacaatctagatgtaaaaaaacacagatcaggagtaaaatggtttttttacctgtcactcatatttgacggaaggacagggaaggaaaaaaacaaaaacaggtctgatagggaacttcagattctggaggtcaatgaagaaagcgacgtttcttttgagggcagaattttcttgaattggaatcggggaaccaataccgtggaatcaacatacacctaaaataggtgtaaaaacatcatttttttctattgttcaatcgattgaaagcattgtaacattcagtcaattcctttatcgactccgcaacgtctaatgggtttagtccaaacccggttttgaccatcaagactgtgtaactgttaacagatctgtggttgtgtgttaatgggttttaacagttttggtttg

SEQ ID NO: 94064 - DNA, 631 bp, Zea Mays
atggcatcgattgcatactcacaaacttccataaaaaatacagacacgaccgctcgattagtacaccatggatacgttggtcacggaatcgaccacgagggccacgacaaatcttcaggctcgaaaggctacctgtcgagcttcggcgacgtcgtcagagactgctcggaccatttcaagagtgtctgtgagaaacaggagaacaggctgaagaaaaggttcctctacggcttctccatgggaggaaccgtggtgcttcagctccacaggaaggatcctctctactgggacggtgccgtgctgcttgccccaatgtgcaagggttattgtatattaacagccaacagtagtgtcgaaggagcacaagatgaggtgtgagcacaaagtggccagcaagaatggagtcatggaacatgggcaggaggggtgcggcagcggcaaccgatgtatcccttggacaatctggttttgacatgatgcaaatcaatctgctgtacattgtattctgcacttgcacagattgtttggctaattacaagattatctcaatgttttggtttggatttagagtacagttatgtatgaaatatttattggtactcatctatattatattaattatattattatt

SEQ ID NO: 94065 - DNA, 582 bp, Zea Mays
atggtgctgcagcggacgatctggtacgtgcaggcggacaatcttggcaacttcaacctgaacccgaacggttggccctcgttcgagttccatgctcaagtgaaggtgcgactgttggaggaagacaacaatgcagggaagtttgggttctacagctactgccttaagtgtcataaggttgccaaagaagagcaccttaggcatcaagatgttattatcccttttgcgtggcacaagggaaagttggtagcatgggtgattggcaaagagacttggtctagcagctttcatgatattcagggtcttatgagtttccgttcttctatcgatcgctcattcctcctgcaccagccaaaagattgtagatgcacatcatgcaaggatttgatgtctactaaacagctttatggttgcttaatctcctactactcaattaactgttgggattggacgaccgatagaaaaacggaaactcataagaccctgcaagtgtgcatcacagttgcaccttcacttgagctacgcagcgggtacaaagttttccgacacatactttttggcaagtcacgtaaccaaaaatag

SEQ ID NO: 94066 - DNA, 536 bp, Zea Mays
ttgtctccttataatgtaattatttatttattttttcaaaaaaaaattatgccaatacactgattcactgcccagaagtttaactgtttataacttgtcaaccaatttgttgatcctgtactgaattgcttattttgagctgttgcagccgttgcaacacaatgcatgtggcctagcacctatgtcctaagtcctaactgtgtccctatgttttccttgttccattgttgctcagggtcaggagttggtgtatccagatgttgatgcgtagaggaatacgagagcatgacttctgacaatagcatcaaggtgcatcttcttcagaaatcgaatgtatcattgctccggatacagtgaggttttggtagtaggttcgattgttgatctttcagtttgagaaattgagaactgctgaaagcattacatggaaacaatgttggatcaattttgcacagttcagaactgttgaaagcattacatggaaacaatgctggatcaattttgcacagtgacattggttgtaattgctacctttc

SEQ ID NO: 94067 - DNA, 124 bp, Zea Mays
ttattttatcacttataaagaaactcggttttcatatttaaatccaaaccgtgtacaaaaacatttaaatcttgacatgcaacatttttaaaccttagatctgactcagaggagtcctacaaaa

SEQ ID NO: 94068 - DNA, 964 bp, Zea Mays
acaactttttggctaatgacattcacctcactatcagtaggtgcaagaacatgatcctcctcctccatgtggtcattgcagttgccattaacatccccccaataccatgtatctcattttcattcgacacattgttgtcaatgtcacaaatattatccacatccatggtgttgttattgtccatcacaaagataagaacaaagttaattataaactatgctaatcaaatacataagaaaatagaaagcaacaataccttagaagagagcgaggagctgcaaaacggggccacggcggtagagttcgagcgtgaggcgcctccggttgttgctgatgagccgtcggagccgatgacgatgagccggcgacgacgaccggtggcgatgagctaggaccggacctgctggcgtggggcggctgcatcgtgcgagcgcgggtgaagagcgcctcgggtgacggcgagctgggaccggacgacacggtgtggcaggggcgatgatgcctggatcctgagccgaactacaccgtgataggagcagtgacgactggcttgcagcctgcgatgtggcgcggtcgaagtggcacggtcctacgacgcggcggcgcctggctgcagacttgcacggaagtcggtgagctgtcgcttggcttggacgcgtcggtgcagtctacagtgccagtgcggcgaggcctgcggcggcgccttgtccttgccctagcgcccgatcacgccgagggaaatcaatggaactggaactggattactggatcgtgggtctgtgcgccggtgaaaaggtaccagatacccggtagcgaggtacccgtatccgcccgccagtccctgagtatttaccagattgacaaggcatccatgcttcatgaggccatcgagtatccgaagccattgcagtatatttctttttacagaatttcaaataagactttagttactgctttcagttaa

SEQ ID NO: 94069 - DNA, 104 bp, Zea Mays
tttttttatccttccactgagaggctacatgtgagcagagatgttctgtttcaagaagataagagttggaattgggacagtgaaaacagtactgaacagattcc

SEQ ID NO: 94070 - DNA, 1950 bp, Zea Mays
cgttttataaaaacaaaacaaacaaaaacaaatcttacctgtcgttgctctccgccgccaccagtgcccgtagcgctcgccgccgccgccgccgccgccaccaatggagagcctccggctcgccgtcacccaccgaccggctctccctctcccgacctcccatagccacctccgccgccgccatctgcacctccacctccactcttaccccaatcccctctccctctcaccccccatcgcctcccacctctcacctatccctcgccgccacctgcccccgctcctcgcctccgcatcggcctctcaagcgagctctaagccggcggcgtcggcggcatctggcggtgctaaaccgctgcccctctttctctcgcttgccgccggcctcgccgtccgcttcctcgtgccgcggccggccgaggtaaccccagaggcctggcagctcctctccatcttcctctccaccatcgcggggctcgtcctcggcccgctccccgtcggtgcgtgggcgttccttggcctcacagccaccgtcgccacccgcacgctccccttcaccgccgcgttcggggcgttcactaacgaagtcatctggctcatcgtcatatccttcttcttcgcgcgcggctttgtcaaaaccggactcggcgaccgcgtcgccacgtacttcgtcaaatggctggggcgcagcactttgggcctatcctatgggcttgccatcagcgaggctctcatctcccctgccatgcccagcaccacggccagggctggaggtgttttccttcccatcgtcaagtcgctatcgctctcgtccggaagcaagcccaacgatccatcggcgaagaaactcggctcttatcttgtgcaatcgcagttacaggcagctgcgaactccagtgctctcttcttgacagcagctgcacagaacctgttgtgtctgaagttagcagaggagattggtgacactcctgaagccccagcattagctgccgagaagctaaagaacatgggtccagtaacaaaaaatgaatgggtcatgattgggacgatgcttcttgcagtctcactatggatttttggggaaactattggcgtatccagcgttgttgctgcaatgattggactctcaatacttcttgtgcttggagtgctaaactgggaggattgtttgaatgagaagtctgcatgggacaccctagcttggtttgctattttagttggtttggctgggcagcttactaaccttgggattgtgtcctggatgtcgaattgtgttgccaaggttcttcaatctttctcattgagctggcctgcagcatttgttgtccttcaggcctcgtacttctttattcactatatatttgcaagccaaactgcacatgttggagctttatactcagcatttcttgcgatgcatttagcagctggtgtgccagctctaatgtcggcacttgctttggcatacaatgcaaacctctttggagcactaacacactatagtagcgggcaatctgcagtatactttggagcggggtatgttgaccttccggatgtattcaagctgggttttataacagccgcaatcaatgctgtaatttggggagttgctggtgcattatggtggaaatttttgggtctttattgagtgtcggggcagtgtaagtacgtgaaaatcgtaccatattatcaaacaagtaattcatgatccagcatcggaggtggccaggtgggttcgtttttcttccgagggcctatgaatgcatcataacagaggaacgctcatctttagaagtttttgagcattatcatcaacctagaaagcagatatgttttcgtaggttcttaaatcgacggtcgttatatatcctttgatttgattgttgtaccctcgtatctcctccccaaggtaaataaaatgcatgagggacttttgaattttgatggtccaaa

SEQ ID NO: 94071 - DNA, 2064 bp, Zea Mays
cgttttataaaaacaaaacaaacaaaaacaaatcttacctgtcgttgctctccgccgccaccagtgcccgtagcgctcgccgccgccgccgccgccgccaccaatggagagcctccggctcgccgtcacccaccgaccggctctccctctcccgacctcccatagccacctccgccgccgccatctgcacctccacctccactcttaccccaatcccctctccctctcaccccccatcgcctcccacctctcacctatccctcgccgccacctgcccccgctcctcgcctccgcatcggcctctcaagcgagctctaagccggcggcgtcggcggcatctggcggtgctaaaccgctgcccctctttctctcgcttgccgccggcctcgccgtccgcttcctcgtgccgcggccggccgaggtaaccccagaggcctggcagctcctctccatcttcctctccaccatcgcggggctcgtcctcggcccgctccccgtcggtgcgtgggcgttccttggcctcacagccaccgtcgccacccgcacgctccccttcaccgccgcgttcggggcgttcactaacgaagtcatctggctcatcgtcatatccttcttcttcgcgcgcggctttgtcaaaaccggactcggcgaccgcgtcgccacgtacttcgtcaaatggctggggcgcagcactttgggcctatcctatgggcttgccatcagcgaggctctcatctcccctgccatgcccagcaccacggccagggctggaggtgttttccttcccatcgtcaagtcgctatcgctctcgtccggaagcaagcccaacgatccatcggcgaagaaactcggctcttatcttgtgcaatcgcagttacaggcagctgcgaactccagtgctctcttcttgacagcagctgcacagaacctgttgtgtctgaagttagcagaggagattggtgttagtatcggaaacccatggattacttggttcaaggtttctagcgtgccagcagttcttgggcttttagtgactccttatttgatttacaaaatattcccccctgaaataaaggacactcctgaagccccagcattagctgccgagaagctaaagaacatgggtccagtaacaaaaaatgaatgggtcatgattgggacgatgcttcttgcagtctcactatggatttttggggaaactattggcgtatccagcgttgttgctgcaatgattggactctcaatacttcttgtgcttggagtgctaaactgggaggattgtttgaatgagaagtctgcatgggacaccctagcttggtttgctattttagttggtttggctgggcagcttactaaccttgggattgtgtcctggatgtcgaattgtgttgccaaggttcttcaatctttctcattgagctggcctgcagcatttgttgtccttcaggcctcgtacttctttattcactatatatttgcaagccaaactgcacatgttggagctttatactcagcatttcttgcgatgcatttagcagctggtgtgccagctctaatgtcggcacttgctttggcatacaatgcaaacctctttggagcactaacacactatagtagcgggcaatctgcagtatactttggagcggggtatgttgaccttccggatgtattcaagctgggttttataacagccgcaatcaatgctgtaatttggggagttgctggtgcattatggtggaaatttttgggtctttattgagtgtcggggcagtgtaagtacgtgaaaatcgtaccatattatcaaacaagtaattcatgatccagcatcggaggtggccaggtgggttcgtttttcttccgagggcctatgaatgcatcataacagaggaacgctcatctttagaagtttttgagcattatcatcaacctagaaagcagatatgttttcgtaggttcttaaatcgacggtcgttatatatcctttgatttgattgttgtaccctcgtatctcctccccaaggtaaataaaatgcatgagggacttttgaattttgatggtccaaa

SEQ ID NO: 94072 - DNA, 1018 bp, Zea Mays
attcgagaggaaaggaggaagaactggagaggaaacaaaagtgtaggatcgagggagagggagagcggccaagcgtggaccaacgactcctcttctccgatcctcccgcagctgcaggccgtagctagctctataaaaagctaagggagcctgcctgccatcgtcgtgcatcgtcatccaccacgatcgataaagctaattaagctgctactgctacgctagcctcgatcgatcaagcaagcagctcacagacccaccggcccacccacccacccacatggcggcgtcccgttccgctctgatcacgctgctcgtccttgtgagctccgtcgcggcggcctcggcgaccacgttcaccgtcggcgacagtagcggctggagtcgtagcgtcaactacgacaactgggccagtggcaagaccttcacggatggagatcagctagtgttcaacttcgccaccgggaaccacgacgtggtggaggtggacaagagcggatacgacggctgctccaccaccaacgccgccaacacaatccaaaacggccccgccaccgtcaacctcacctccggcacccactactacatctgcggcatcagcggccactgcagcggcgggatgaagctcgctgtcaccgtcggctccggctccggctccggctccgggtcccccacccccggcggcggctcgcccagcacacccacaccaaccaccccgagcgcccccgcccccgacactccggccggcgcgtccgtgcgcctcacggccggcccagcgctcgccgtggccgccaccgtgctcgtcgccctcttctgatctgatctgatacttcatgcatgcaccgtgccaggaccaggatagaggcagtgcaggattatagtattcttgtgtacgtacgtacatactttgttgttgagctagcgttttcattctgacgacggcggattattgtactctcgtacgtttttatttccacatgtattactactatcattcatgctttcaattcttcattgttaa

SEQ ID NO: 94073 - DNA, 1499 bp, Zea Mays
aatttgtctcgtctttttaattttatagtttctatatttaatactcgtaattactatttaaacattcggtgtgacataaattaaattttagttaggtggaaccaaacagagaattgaggggggttgcagtgaattaggagaggattttgacatatagggcatttgtagatttaagacaaacgaacatgagtcatgggcagccaatgaacatgattccatacgtattgttggccgacgaaaggaaaataagtatactcggacgtatttgcgtaggagcatagcagttggactggacatgccgtgtaatgcaccacgacgcggttaactcgggacggaagcaacgcaactcggcacgaagaaggaaaagccaccaccggttcctccgccgtccccgcggtttcagttccttgcttgcttgcttgctcttgctctccctctctcgtggaagccagccacacaaggcagaaagagagagtgacgttgtgttccatcccgttccgctgaagcaaccgctctcctacaccaaaccacccacaccactctaggtctctagccgatgcgatggatgtggatccagcagcggaccagcggaggaagaacaagggcgggctggagtcggagctggagcgccactacgacgacctgcagcgggagatgatgctgatggccgccgatcggccgcacaagcaactgcaacagcatcgacgtcacgggcaccgccccgatctgctccagaactgcgacctgcccccaccggccaagctcttcggccccgtacccaccctgcagaggctggagaccgctgctgccaaggaccacaaggccgacgacggcctgctgcgggcgctgcgcctgtcgcagtcgcgcgcgcgggaggcggaggacaagctggcggccgcgggcgccaccaacgtcgacctcgcggcgctgctcgtgcgggactccgtcgcgctctccgcccaccgccgctgggtcatgatgctggaggccgagaattccctgctccgaggaccacgacgagatgcggatggtccggaaccggaccacggagccggcggggtggccgcgtggtgggtcgcgctcgccgtctgcgtcggcgtcgccggcgtcggcctcgcgctcggcaggttcctctgctgaacaactgtgatggatcattctccttccttcctgctgctgtagaaagtgtaaatctacttcgagacgacgatcgatcgatcaatcaatcagtcaaaaaaaaaactgtaaatactgctacagtagtacggagtaggattggtctccaagttaaagtacccattcctgcacgctttctgctttagcttgtggaaacaatctgttgagaatttgatgcctgccgtgaggttccgtgtcactttccattgctcacagtcacagcacagaaattgtcgcgcattcatgtacgacgacaaggacttttccctgtagttgtaatccattttttttgaaaaaaacaattaattgattttacctgtaaa

SEQ ID NO: 94074 - DNA, 1027 bp, Zea Mays
tggcgggataaagcccaacgagcccgcgttacggatatcttcgccatccgttgcctcgcgagctcgccgccatggcattggctctccccctcgcccgcctcgtccccgcctgccagtgccagccttggccccacctgcgctttcggaagcgccacgtctccttcgccgctcacgccagttctcgcgccgccttcgctgcctgcgcggcggcccctgccctccaggtccaggcgccggaggcggaggcggaggcggagacggtcgagcaagtgggcccgaagacacgcctcgtcgcgcagaacatcccgtgggactgcacggccgacgaaatgcgcgcgctcttcgagagccacggctccgtcgtcggcgtcgagctttcaatgtacagcgccaataaaaacagagggttggcgtttgtaaccatgggttcagaagaggaggctcttgcagctctcacccatctcaattcaactattttaaatgataggaaaattaaggtggacttcgcaaggcctagaaagaagcaacctaagcaacctgctgtggtatcggatgacacggaaaagtgtggtatcagctgaagttatcttccataccaccactccgagacgatctgctggctacgcgtttgtttctttttcttcgaaagagagcgcaggggccgccatatctgctttcaacggaaagatattgatgggacggcccattaacgtgatgttcaaagatgaaaatggtgaaaagaatgaaccttcttctgtcccaaagaaggccgaggtggaaccatctgatgaccagagtgataagctaagcatgaactgttaacgaaacaaataggtcatatctgtcattacacacacatatatattctgacccatggtatttccttttcagaaatagttatgtcccttgttttattgatttgccaatctggtgtatgttcgtcgtgaggcaaacgtgagcgctgtgagggcgtcaaatcctcccgcgcgcgttgcaagggtcctaaatataaacttaattaggttta

SEQ ID NO: 94075 - DNA, 1056 bp, Zea Mays
cgatggccgtggagctagctgcctgggaatgggataggatattttcccgtggcgggataaagcccaacgagcccgcgttacggatatcttcgccatccgttgcctcgcgagctcgccgccatggcattggctctccccctcgcccgcctcgtccccgcctgccagtgccagccttggccccacctgcgctttcggaagcgccacgtctccttcgccgctcacgccagttctcgcgccgccttcgctgcctgcgcggcggcccctgccctccaggtccaggcgccggaggcggaggcggaggcggagacggtcgagcaagtgggcccgaagacacgcctcgtcgcgcagaacatcccgtgggactgcacggccgacgaaatgcgcgcgctcttcgagagccacggctccgtcgtcggcgtcgagctttcaatgtacagcgccaataaaaacagagggttggcgtttgtaaccatgggttcagaagaggaggctcttgcagctctcacccatctcaattcaactattttaaatgataggaaaattaaggtggacttcgcaaggcctagaaagaagcaacctaagcaacctgctgtggtatcggatgacacggaaaagtatgttgtgtttgtcgggaatttgacatggagggtaagaaatcgtcaccttcgggaattatttgcctctgccccaggtgtggtatcagctgaagttatcttccataccaccactccgagacgatctgctggctacgcgtttgtttctttttcttcgaaagagagcgcaggggccgccatatctgctttcaacggaaagatattgatgggacggcccattaacgtgatgttcaaagatgaaaatggtgaaaagaatgaaccttcttctgtcccaaagaaggccgaggtggaaccatctgatgaccagagtgataagctaagcatgaactgttaacgaaacaaataggtcatatctgtcattacacacacatatatattctgacccatggtatttccttttcagaaatagttatgtcccttgttttattgatttgccaatctg

SEQ ID NO: 94076 - DNA, 884 bp, Zea Mays
gaggccccctccccattctatctcattcccaattcctcatctgcttcgcttccccccaaatcgaatcctcatcgctccgtctatggcgactctaaccatgcagccgatcggtcccacccctgctccggctgcgcagcaagacccaagcaagggagagaatcctcctaccgtggatggtaccgatctgggtgacatcgactcgggctgggttatcctcaagaactcggatgtcgtttccgcggatttggcagccgccgccgtctgtggcggtcagcgtctaggctcttctacgattcctagctgggcacggtgggttctcggaggtgtggtttacacgctcgtgccgttctacaacagagttaggcatctcgaagacgagacggtgggattcgtggagaatgctgtggaggttgtggagcatttagctgaagtaacagagaagctagctgcgaatgtggctaagcaacttcctgaagatgggtctctgcagaaagcagtggaagaggttgaacacattgctgaggtagtggatgatgatgcggagaaggttgaagcagtcactgaaaagatcgacaaggtcagtgatgagattgatgctgctgtggagccggtcatcgcggagcttgaaaaggaactcgatcagagcacaacctcagacgatggagttgacacaaagaattgatcaactgcatgttaggtgtgctcttcattgtacatagcgtgtgtactgttgtttttcttctctctctcctctttggagaaactgcttgtacatatgtatgtatggaccatgaagattattggtactgtatcaagtcactatccataaataaatacacgttggcctgtgaaaaaaaatatactagctcgcagagctgtgaatt

SEQ ID NO: 94077 - DNA, 521 bp, Zea Mays
gctgcctagggagcggacggagtgccgagtccgagcctgctaggagtagaaccaccgagcacgctccgcctggggagcagatggaatgtcgaggctgaggccgctaggctaggacctccgagcgcgctgccgcctggggagcgaacagagtttgggtggatgtactctaggaggagttggtgggcagcggtgcgacgatgaacgatagcacgaagaagcgggacgtgtcgggcaactccatgaacgtggcacgcaggaacacgagcttccttggaccgacgcgccttggcagtagctaccctagtgcggcatggagggggaaaggtttggcttccggtgggatggcaaaggaggatctcaagtgagtttctggaatgcttcggtgttgtgtactagtcaaagaaagggaaaccttccgtccgttaaacaccaatcgtgaaaaaaactgacgtggatagcttgggagctcgccgttgctcccagctttaatgtatagatagatagatagaaaagaaatatcc

SEQ ID NO: 94078 - DNA, 943 bp, Zea Mays
aattccatcgcaacagctcaccaccaccaccatggcgctcccgccgcacatcatggcactcagcaaggtgcagcgcctctacgacgcctgcgacgtcgtcttctcctcgccgccggtggcgcccacgctcggggacatcacatggctgcagaacatcctcgatggcgtggaagcagccgacgtcgggatcgacgacggggagaagccgacgtcgtcctcgtcctcgtccgacgacgacctcctcctgccggcgccggcgttcacgcggatcacctacgtgcacatacaccagtgcgacgatttctcgattggcgtcttctgcttcccggccggcgcgacgctgccgctgcacgaccacccggagatggtagtgctcagcaagctgctgtacggctccgtgcgcgtgcgctcctacgactgggtcgccgcgccgcctgataattcgccgtcgccgcccaggaggaggaaacgtggcctggccagggtggtggccgcggacgtggtgcgccgggcgccctgcccggcgtccgtcctcttcccgcgcagcggcggcaacctgcacgccttcaccgccgtcacgccctgcgccatcctcgacgtgctcacgccgccctactcggaggaccacggccgcccctccacctacttcaccgacgtccccgtcccgtccctcccgggcttcgctgtcttggaagagacggacctgcccgagggtttcaccgtcgccggggcgccatatcttggccctcagctcacggtcgatacggaggatgacgacgacgacaactacgacagctacgacgacgagctagtagtttagcttagttatgttttgcttttcatctcttggtcgaaagagatagatagtagtacatagttcatagttgcaaactcaaaactctctcatctgatctgtacaaatccttccttcgtccaggcccaa

SEQ ID NO: 94079 - DNA, 1990 bp, Zea Mays
ttttttattttcttgtgccgtgtctggctggcccagagcgtcggagcgcttgatgccgccgccaccaacgctgccaccgtcgtccccggacgaccccgcggagccatcgtccatggggcgggagatggacgacgaggacctggtggaggagctcctgctcaccgtcaacgcggcgcgcgccttcgcggagttccggcgcacgcagcgcaaggagtgcgccaacctcctccgctggctgcagctcgtcctcccgctcctggaggagctccgcgacgccgcgccccggctcaccgacgacgcctaccgccggctcgcccttctcggccgcgcgctcgccgccgcgcgacgcctgctacgaacctgccacgacggcagcaagatctacctggcgcttgagagcgagacggtgcttgcccagttccgcgacgtgtacgagaagatgcacagcgcgctggacgggatgccgtacgccgagctcgccatctccgacgaggtcaaggagcaagtggagctgatgaacgcacagctgatgaggtgcaagaagcgaacggacactcaagacatggagctgtcgatggatctgatggtgatcctccagaacaaggaggaggaggagcaggagaggaacgccgacagggccatcctggagaggctcgccaggaagctggagctgcagacgctggcggagctgagggcagagacgatggccgtaaagaagctcatcaacgagaggaacgagagcacgacgcagatggtgggcctgctgaaccgcttcaaggagatcgcgggcgtggacgagaaggacgtccttggcggcgacgtgtccatgcccaaaagccttgacaagtgcccctccctgatgatccccaacgacttcctgtgccccatcacgctggggatcatgacggacccggtgatcgtggccagcgggcagacgtacgagcggcggagcatccagaagtggctggacggcggggagcggacgtgccccaagtcgcggcagccgctggcgcacctgtcgctggcgcccaactacgcgctcaagaacctgatcctgcagtggtgcgagaggaacatggtggagctgcagaagcgggagccggcggagacggagtcggagcggaagggggaggcggcggacgcggccgacagcatcccgtcgctggtggaaggcatgtcgtccatccaccccgacgtgcagcgcaaggcggtgaagaagatccgtcggctctccaaggagtgccccgagaaccgggcgctgatcgtcgacagcggcggcatcccggcgctgatcgggctgctggcgtgccccgacaagaaggcgcaggagaacacggtgacgtcgctgctgaacctgtccatcgacgacaagaacaaggccctgatcgcgaggggaggcgccatcccgctggtgatcgagatcctgcggaacggcagcccggaggcgcaggagaactcggcggcgacgctgttcagcctgtcgatgctggacgagaacaaggcggcgatcgggagcctgggcgggctggccccgctggtggagctcctgcgcagcagcggcaccgcccgcgggaagaaggacgcggccacggccatcttcaacctggtgctgagcccgcagaacaaggtccgggccacgcaggcgggcgtggtggcggcgctgatcggggtgatggacgacagcgcgctgggcatggtggacgaggcgctgtccatcttcctggtgctgtcgtcgcacgcggcgtgccgcgcggagatcgggacgacggcgttcgtggagaggctggtgcggctgatcaaggacggcacgcccaagaacaaggagtgcgcgctgtcggtgctgctggagctgggcagcaacaacaggccgctgctggtgcacgggctcaggttcggactccacgaggacctctccaggatcgccaagaacggcaccagcagggcgcagaggaaagccaacttgctcatccagctcgcgcgcaagctctga

SEQ ID NO: 94080 - DNA, 111 bp, Zea Mays
gtgctagccttttggtggttcactgtgactggttctggaatctggacttctggacctttcgttgtttaattttcatggcaggaaagtgcttgtaaaagtggccaaaatctt

SEQ ID NO: 94081 - DNA, 89 bp, Zea Mays
cgctgatatccattgcagtcagcctacggaaggctccctagacgaccatcataccaccacaggtgctcataaacagcatggatccaagt

SEQ ID NO: 94082 - DNA, 1765 bp, Zea Mays
gttctgttgagtttcagctttgagatttggattgtcacgtaattcgtttccctgtcctccccctctcgctgagctgagcccacctactccctcccaccacttgcattcacacactcgattccgctgctctctccctcttcctctcccccgcggcggagccataaaccctaggcctcgccgtcgtcggaggcgccgccgtgatgtcgcactttggaaggacgggtccgccggacatccgcgacaccttctcgctgctcgtcctcaacatcagcttccgaaccacggccgacgaccttttcccgctcttcgagcgctgcggcaaggtcgtcgacgtcttcatcccgagggaccgcaggaccggggactcgaggggttttgcgttcgtgcggtacaagtacgccgacgaggcgcagaaggctatagatcggctcgatggtggttttttttttcgactgtgctccacatgtggggattttggagcttctatttttgataattgtagattttttgggtgcaggccgtaatgtggatgggaggaacatcatggtgcagtttgcaaagtacggccccaatgctgtgccaatccacaaaggaagggtcaaagagggggttgagaaatcaagagacaggtcaaggagccgtagtccaaggccaaggcacagagacagagatgatagaaggcgaagtcgcagcaggagcaggagcagagaaaggcatgtccatgatagagatagggactatcgtcgtcggagcagaagtagaagccgaagtatgagttcaagccctgaccacaaaagtcatcgtagagcaagagatgatgttaagcgcaagagcagaagcaagagtagaagcaggagcaggagtagaagccgctcataccacagttcttcacctgcccggcgcagtgctagtcctcccaagagcccaccgccacagaggagccccactcctgaaaagcatgccaatggaaaagattcacctctgtcacgcagtgtatctccatcaccgaagcgtgcaagctcccgcagcccaggcagcgatagcaaggaataaagcttgttgatctggtgatgcttaaagagcagtcttcccatgggattgcagaacgttgagaaggctgtttgaacatgatggcagtagcaatctgcaatcaaccgctatccaagttatctgttcgtgagaggggttgctgtttaccggtagaatggtattgctcgggaccgactatggtggatgatgtcttgctgttagtctttgtcattggtgttgatatggggatgacacagctgatgatgtgacggtgctgatattgtatcgatattgatgctgatgctgcttacagtgaccatcttgatgcagtctatatttttgttcaagaggttctgaatcaaatcatgaaattccagatggatctcatgattgttctagttggaacaaggtgcagactggcagagatgctgaggggtgtgtgtactcatagtaacaatggtactcgtcgtcgtcgtaatatggctaataatctctacgggaatggaggtatcagttatgattagcgtgggtcctgttgatcatgtggtggtgaaccaatttattttggtccttctctatcatattgttttattattctgctagtgttgagtgactcgaatcagatgctctagatttattcattctcctaagcaccagtaatgaaatccatgaagacaatgcctctgtaccaaggctcaatattaacatgtcatctctgtctggaaatgtatttgtg

SEQ ID NO: 94083 - DNA, 1677 bp, Zea Mays
gttctgttgagtttcagctttgagatttggattgtcacgtaattcgtttccctgtcctccccctctcgctgagctgagcccacctactccctcccaccacttgcattcacacactcgattccgctgctctctccctcttcctctcccccgcggcggagccataaaccctaggcctcgccgtcgtcggaggcgccgccgtgatgtcgcactttggaaggacgggtccgccggacatccgcgacaccttctcgctgctcgtcctcaacatcagcttccgaaccacggccgacgaccttttcccgctcttcgagcgctgcggcaaggtcgtcgacgtcttcatcccgagggaccgcaggaccggggactcgaggggttttgcgttcgtgcggtacaagtacgccgacgaggcgcagaaggctatagatcggctcgatggccgtaatgtggatgggaggaacatcatggtgcagtttgcaaagtacggccccaatgctgtgccaatccacaaaggaagggtcaaagagggggttgagaaatcaagagacaggtcaaggagccgtagtccaaggccaagagacagagatgatagaaggcgaagtcgcagcaggagcaggagcagagaaaggcatgtccatgatagagatagggactatcgtcgtcggagcagaagtagaagccgaagtatgagttcaagccctgaccacaaaagtcatcgtagagcaagagatgatgttaagcgcaagagcagaagcaagagtagaagcaggagcaggagtagaagccgctcataccacagttcttcacctgcccggcgcagtgctagtcctcccaagagcccaccgccacagaggagccccactcctgaaaagcatgccaatggaaaagattcacctctgtcacgcagtgtatctccatcaccgaagcgtgcaagctcccgcagcccaggcagcgatagcaaggaataaagcttgttgatctggtgatgcttaaagagcagtcttcccatgggattgcagaacgttgagaaggctgtttgaacatgatggcagtagcaatctgcaatcaaccgctatccaagttatctgttcgtgagaggggttgctgtttaccggtagaatggtattgctcgggaccgactatggtggatgatgtcttgctgttagtctttgtcattggtgttgatatggggatgacacagctgatgatgtgacggtgctgatattgtatcgatattgatgctgatgctgcttacagtgaccatcttgatgcagtctatatttttgttcaagaggttctgaatcaaatcatgaaattccagatggatctcatgattgttctagttggaacaaggtgcagactggcagagatgctgaggggtgtgtgtactcatagtaacaatggtactcgtcgtcgtcgtaatatggctaataatctctacgggaatggaggtatcagttatgattagcgtgggtcctgttgatcatgtggtggtgaaccaatttattttggtccttctctatcatattgttttattattctgctagtgttgagtgactcgaatcagatgctctagatttattcattctcctaagcaccagtaatgaaatccatgaagacaatgcctctgtaccaaggctcaatattaacatgtcatctctgtctggaaatgtatttgtg

SEQ ID NO: 94084 - DNA, 1305 bp, Zea Mays
gttctgttgagtttcagctttgagatttggattgtcacgtaattcgtttccctgtcctccccctctcgctgagctgagcccacctactccctcccaccacttgcattcacacactcgattccgctgctctctccctcttcctctcccccgcggcggagccataaaccctaggcctcgccgtcgtcggaggcgccgccgtgatgtcgcactttggaaggacgggtccgccggacatccgcgacaccttctcgctgctcgtcctcaacatcagcttccgaaccacggccgacgaccttttcccgctcttcgagcgctgcggcaaggtcgtcgacgtcttcatcccgagggaccgcaggaccggggactcgaggggttttgcgttcgtgcggtacaagtacgccgacgaggcgcagaaggctatagatcggctcgatggccgtaatgtggatgggaggaacatcatggtgcagtttgcaaaccacaaaggaagggtcaaagagggggttgagaaatcaagagacaggtcaaggagccgtagtccaaggccaaggcacagagacagagatgatagaaggcgaagtcgcagcaggagcaggagcagagaaaggcatgtccatgatagagatagggactatcgtcgtcggagcagaagtagaagccgaagtatgagttcaagccctgaccacaaaagtcatcgtagagcaagagatgatgttaagcgcaagagcagaagcaagagtagaagcaggagcaggagtagaagccgctcataccacagttcttcacctgcccggcgcagtgctagtcctcccaagagcccaccgccacagaggagccccactcctgaaaagcatgccaatggaaaagattcacctctgtcacgcagtgtatctccatcaccgaagcgtgcaagctcccgcagcccaggcagcgatagcaaggaataaagcttgttgatctggtgatgcttaaagagcagtcttcccatgggattgcagaacgttgagaaggctgtttgaacatgatggcagtagcaatctgcaatcaaccgctatccaaggttgctagttgttcttttaatgacttctagaattgtgttttccagttgtcaaaatatgctgttggtttgtatttcgacctctattgtcttttaatacccttgtactgcatcatctactttatgtgcatccgtttcttgactccatattaatttgttaaaacatttgtgcattttctagttatctgttcgtgagaggggttgctgtttaccggtagaatggtattgctcgggaccgactatggtgg

SEQ ID NO: 94085 - DNA, 1329 bp, Zea Mays
gttctgttgagtttcagctttgagatttggattgtcacgtaattcgtttccctgtcctccccctctcgctgagctgagcccacctactccctcccaccacttgcattcacacactcgattccgctgctctctccctcttcctctcccccgcggcggagccataaaccctaggcctcgccgtcgtcggaggcgccgccgtgatgtcgcactttggaaggacgggtccgccggacatccgcgacaccttctcgctgctcgtcctcaacatcagcttccgaaccacggccgacgaccttttcccgctcttcgagcgctgcggcaaggtcgtcgacgtcttcatcccgagggaccgcaggaccggggactcgaggggttttgcgttcgtgcggtacaagtacgccgacgaggcgcagaaggctatagatcggctcgatggccgtaatgtggatgggaggaacatcatggtgcagtttgcaaagtacggccccaatgctgtgccaatccacaaaggaagggtcaaagagggggttgagaaatcaagagacaggtcaaggagccgtagtccaaggccaaggcacagagacagagatgatagaaggcgaagtcgcagcaggagcaggagcagagaaaggcatgtccatgatagagatagggactatcgtcgtcggagcagaagtagaagccgaagtatgagttcaagccctgaccacaaaagtcatcgtagagcaagagatgatgttaagcgcaagagcagaagcaagagtagaagcaggagcaggagtagaagccgctcataccacagttcttcacctgcccggcgcagtgctagtcctcccaagagcccaccgccacagaggagccccactcctgaaaagcatgccaatggaaaagattcacctctgtcacgcagtgtatctccatcaccgaagcgtgcaagctcccgcagcccaggcagcgatagcaaggaataaagcttgttgatctggtgatgcttaaagagcagtcttcccatgggattgcagaacgttgagaaggctgtttgaacatgatggcagtagcaatctgcaatcaaccgctatccaaggttgctagttgttcttttaatgacttctagaattgtgttttccagttgtcaaaatatgctgttggtttgtatttcgacctctattgtcttttaatacccttgtactgcatcatctactttatgtgcatccgtttcttgactccatattaatttgttaaaacatttgtgcattttctagttatctgttcgtgagaggggttgctgtttaccggtagaatggtattgctcgggaccgactatggtgg

SEQ ID NO: 94086 - DNA, 1218 bp, Zea Mays
caccacacccactccaccattcggttgaattgaattggtgctgtatgtactgtgctgtgttagttgcatcggttttgccggccggcaggccagcatggggaggtctccttgctgcgacgagaatggcctgaagaaggggccttggactcaggaggaagatgagaagctgctgcactacatccagaagaacgggcatggcagttggcggaccctgcccaggctggccgggctgaacaggtgcggcaagagctgccggctgcggtggaccaactacctgcggccggacatcaagcggggcaagttctcgcgggaggaggagcagaccatcctccacctgcactccgtcctcggcaacaagtggtccgccatcgccacgcacctcccaggccgcaccgacaacgagatcaagaacttctggaacacgcacctcaggaagcgcctcatccagatgggcttcgaccccatgacgcaccgcccccgcaccgacttcttcgccgcgctgccgcagctcatcgcgctcgcagccctacgcgggcagctgcccgccgaccccgacccgccgcagcaggccgggacgacggcggcggctctcgccggtctcatcggcgccctctgctcgccgcaactgacgctcctcgacaccaccaccactactaccgctgctgctgccccgccggtggtgtcgtcgtcgtccgcggacgacgatgccgcccaccagtactacttaccgcgcaccacgttccccgacgcgcccggcagcggtgaagctgcccaccagcggcaacagcaagcagcaggcctcatcagctatggccgacgacccgacgacgacgacggcggtgatgttgacgtgttcgcgtgctacggtgctggcggtggtggaagctcgctgccgcccctgaccgacctctccgacgacgcagccaccctgctgcaggtggacacggcgtcgtcccaattcggtagtggcggctccatcccgctcctcccttggccggagttcttccccgacgatccattcatcactgatttcctatgacatcgtcgacacactgtatatttgctcgatcgtcgtgcaatatcgtactacatgcggatctatatatgtacgtcgtatctccctctgaactttgtaagctttgcgtactgtacacacacaaacatatacgtgcattcctttcagaacagttggaaagtgtgcagagcagggtcgactga

SEQ ID NO: 94087 - DNA, 297 bp, Zea Mays
atggcttcaccagccagaggtcgagaaatgcccttctcagtagagctcttttctcggcaaaatcttgctggatctgcaaacaaccttgtaaacggccacctgaaggagaaaaaaaagatggttgctgcagtgaaacttcagatcagcactccaagatgcaaattaatagaacaccacctgcttaaccggacggtctttgattctataacaatttcttcaaacacatatcctgttcacggcatggtaaacacggtaaagagaatcagaataacacatatgaccgcattgccagtgtag

SEQ ID NO: 94088 - DNA, 159 bp, Zea Mays
caaaggtcagcaacctgcgcgagatgctcacatcacagggcccaagcaacagtgaacaaaagacaccaggcgccggtggaagaagcaccaatgcaccatcatccaccatgccatgtctcacagtgctggccatggacctggaagaaacaactggaaagt

SEQ ID NO: 94089 - DNA, 907 bp, Zea Mays
aagtctcagacgggatgagagtatagagctgtgtgcctgactataaaaggggcctcaccaacccaggcctagcaaaccaaaccaaaccaaagcatcacaagcaagcaagtaatataagcactaactagcaaagaagaagagaaccccgtcgagcaagactagaagagagagcaataatcatgtaccaccaccatttccatggcgaggtggctagcctccgcttcctgtcccctccgaacgtctcgacgtccttcgcggcgcaccaccacatgaacatggcactgccgcctccatcctacttccaagacgacgacgctacccttgcagccatcgacggcggtgacgcggcctgttttgatgagcttgacaccatcgtcgtcgtcccggaagcagatgccgcagccgcagcccgctgccacctcaccggcagcaacaatggcggcttgtcggactccgaccagctgctggacgctgctgtgattatggcggccgacgaggagcgccggcgccggcggatggtgtcgaaccgggagtcggcgcggcggtcgcgcatgcgcaagcagcggcagctcagcgagctgtgggcgcaggtctcgcacctccgcggcgccaaccgccgcctcctcgacgacctcaaccgcgcgctcaggagctgcgccgacgcccgccgggagagcgccaggctgagggaagagaaggccgagctgacgaagaagctcgagcagctgctgcaggcggagaagggctcgttatcggaggcggccgagccatgcaagtcgtattgctgaatgaccaagaagatggagttaattaattatcatccgcccgggcgacccagtttttagtcgagaggagttaattatttatatctcgataactaataagaacatgcatgtgtgatgatcaa

SEQ ID NO: 94090 - DNA, 94 bp, Zea Mays
ctgccatatgtaagaaagaagattatgcaatctgttatatgataacctcaattttgatcatctttggtcttgatcttcaacttggagtagcaag

SEQ ID NO: 94091 - DNA, 2068 bp, Zea Mays
ccccacccacccccaatctattccctaaccctagtcgccatggaccgagacggcgacccggcgttccaccggaacgaggccatctccgccgtgcaggacgtcgaccagtactacggagaggacgacgatttcgacgagctctacaacgacgtcaacgtcggcgacgtcttcctccgcaacgcccatccgccgccgccgcccgcgcagcagaatcaccaccaccaccagcagcagctccctccaacgcccgcgcagcagaatcaccaccagcagctccctccaacgcccgcgcagcagaatcaccaccaccagcagcagctccctcctccgcccctgtcgcagccgctacaggccccgcctcattctctcccgccgccgccgccgcatgctccgccccagcagaaggcctacgcgcctgctgttgcagcgccgggtccgagtcagccgccgcctcagacgaatctcccgccgccaccttctcatcccccatccgcgtccgtgcttctgccgcctcagcaccaccagggcgacgggttccaccgtcctggagggaactacagcggtggtcctgtcgttgtcgccaacggagccggctttggcgggggcgatgtctccggcggcacgacgctgttcgtcggcgacctccactggtggactaccgacgctgatctggaggctgagctcagcaagtatgggacggtgaaggaggtgaggttcttcgacgagaaggccagcggcaagtccaaggggtactgccaggtcgacttctacgaccctggtgccgctgcttcctgcaaggagggcatgaacggccactcttttaatggccgtccatgtgttgtggcattcgcatctcccaacactgtgcgtcgcatgggcgaggcgcaggcgaagtcccagcaggccttggctgtacagacatcatcactgcaaccaaagggtggtagagggggtggtggtttcggaatgcctcatgccggtggtaattacagtggcggacgtggaggtgctgtatcaggaggcggtggtgggaactggggtagaggtggtggtggtagaggccctattggtaatatgaggaacaacagaatgggtccggcagttggccgtggaatcgggaatggcatggttgcgccgccacccccaatgctgcctcagggaggcatgctggggcaggggtttgatcctggttatggcgccatgggaaggatgggtggtgggtttggtaacttccctgttggaccaggtgctgggccgtttcctgggatgatgcagccatttcctccagttgttgcaccacacataaacccggccttctttggtcgtggtgcgatgggggctggtggggtggggatgtggcctgatcccggcatgggggcttggggtgtggaagaacaatcaaattatggggataatgcagtgtctgaccatcaatatggggaagggggaggccatgggaaggagaggccaccggatagggaatggtctggtgcaccagagaagaggctggacagagagaaagatatgcaccctcaacaggagcagccggagaggaggcaccggaatgagcgtgacatgggccgagagagagatcgcaactatgacagagacagggaaagagatcgtgacagagagagagaccgagacagagatagggacagacacagggatgacagagatcgttatggtgatcatcacaggcacagggaccgtgattcagagcgtaatgaagactgggacagggggaggtcatctgggaaacgcagcaggtccagggaagctgaccattctaaacgtagacggatgactgctcaatagtgtagctggctgagctacatctagtgtagaggctatgacgttccagggcagcgacctctttgcacccaggcattgttcagtaacaaccatcaactgcttactgcttgtagctgtgatggctttcactgcatatatctccgcggtctgttgtagcaataatttgagatgtaagttatgcttgatctgatctcttgtttgttttggaatgtaactcttgagttgttctgtaaggtagtgatgtggcatagcg

SEQ ID NO: 94092 - DNA, 2776 bp, Zea Mays
gtcaacttcaacaccagctccacctgctgcacctccgctcccgactccctccgcccacacggatcccgaaaaccctaaccctagacatcgccccgccgccgccatggaccccgccggcgacccggcgttccaccgcaacgaggctatctccgcggtccaggacgtagaccagtactacggagacgacgacgacttcgacgacctatacaacgacgtcaacgtcggggacggcttcctccacgcctcccaccaggcgccaccaccgcggcctccgactcagcaggccccaccgccgcagcagctccatcctccgccacagcagcagccccctccgccaccacagcagcagccgccggcccacaccctcccaccgccgccgccgcatgtcccgccgccgccgcagcaggtacgcatcccgggggtggccgtccctgctcctggcatacctccaggtcagaccaacctccatccgccgcctcagccgctagccgcgcccgcgccgccgccagctcagcaccaccagattcagcaaggcgacgggttccaccgatctggagggaacttcgccggcggccccatcgtggtcgggaatggtggcgctgctggcgggggtgacggccctggcggcacgacgctgttcgtgggggaactccactggtggacgacggacgcggatctggaatctgagcttatcaagtatggttcggtcaaggaggtgaggttctttgacgagaaggccagcggcaagtccaagggctactgccaggtcgatttctatgaccctggcgcagctgctgcctgcaaggaggccatgaacgggcacacatttaatggacgtccatgtgttgtggcattcgccacacccaacagcgttcgccgcatgggcgaggcgcaggtgaagaaccagcaggctatggctgcacagacatcgaatatgcagcccaagggtggcagagggggcggtggtgccgcagggccacaggtgggcggtaattatggtggtgggcgtggaggagctgttggatctggtgccggtggtggagcaggcggaggtggtggaaattggggaagaggtggcggaggcatggggaacagaggccctgttggtaacatgaggaacaggatgggcccagctggcggcggccgcgggataatggggaatggggggatggttgcaccgccgccaccaatgatgccaccgggtggaatgctggggcagggctttgatcctgctggttatggcgctatgggaaggatgggtggtgggtttggcggttttcctggtggaccaggggctatgccattccctgggctgatgcagccatttccgccggttgtcgctccacatgttaacccagctttctttggtcgggctgggatgggtgccggtggaatgtggcctgatcccaacatgggagcctggggtggggaggaacagtccagttacggggatgatgcagcttctgatcagcagtatggagaaggggggagccatgggaaagagaggccaccagagagggagtggtctggtgtgccagagaggaggcgtgaaagggagaaggatgcgccccctgcacaggagtggccagagaggaggcaccgagatgagcgtgacatggaccgtgagaggaatcgtgactatgacagagacagggaaagagaccgtgaccgggaaagagaccgagatcgagatagggagagggagagggagagggacagagatagggagagggagagacacaaggatgacagagatcgctatggcgataatcacaggcacagggatcgtgattcagaacgtaatgaggactgggacagagggaggtcatctgggatacgcagcaggtcaagggaggctgaccactctaagcgcaggcggatgacacctcagtagtcatagctagtgagatactaatgtagaggcaaaatggcacatgtttatccagacctgagtcttacttgcacactggcatggttgaaagctagcatcttcttactgcttctggctgtggtggttctaatattttgtgtctctggcgatgtgttgtagcaagaatgtgagatgaatgtttggttggaacctgttcagctgtgcggagatggacttccctggatgatagctgctgcctcttattgtgcgccgtgttaaatgtctgcgtttcccaaagatacaaatgatctatttagtgtgtaattcaggaccgatgcttttgcatccttgttgttgttgttaaagacaccagtatttctgccctagccttgtagggcgatgataaactggtctgtattatgactgtcctatgttcatccttcctctgttgtaacggagaaatgtgttttgacattcttgaggtttatccttcctgagatagctgacaggcagacatagctgcttccttgctaaatgttttgtggttgagaagagtccaggggaccagctgtaacgctccacctgtgttaagaacagtgtagcatatatattaaattttgttgccttatcaggttttagtcgccggcgttatttttttttatgttgcattacagtatcaatttcatcgaccatgcgtcggaggaaacatatctgattgtttcaatgataagaaatattcttaatctttagttctttaccatcaacatttttctttctgttatctgtgccactacgcctcctccctgcaaagctcattcacatttccattcccggctatcacgtgtctttctcattccccctcccacaaagcctattctcattcccacgtgcatcccacgtctagct

SEQ ID NO: 94093 - DNA, 1045 bp, Zea Mays
agacttccctctaattcccaaattttccagctaccgcctctcctgagtcgccgccccatccatcctcctcgtcgatctgctctagcctccaatcccgcttgggcatcgggcccagccaccctcgcgctagtgctaggctgctaaccatagccagtccttcctcctctcgcgtggccgcgcctgcatccggccacgggccaccgcgcacagccctagccagacaccgtgcacgacccagcctagccgcagcggtggaggcgcgcagccccaccccgccccgcacgaccaaatgaacagccgcaaccagcgaggctaggcccgcaacagcaacgcccttcgctcgccagcaacggcagtgcgtccgacatccttcgctcgcctagttgccctgcagatggccaggaccagcaccactgcggtctgcagcagcgcccctaactgttgaggataagaggaggttgacatgggatgacaagttgacaacctgctaattgcaatgttcaattcactcttcttcaactaccaggaggattgctagcagaattgtttggccgaagtaggaactgccaactggtatatggttcataagctgaacatatccctatttgttttaacccctttacaagatgaaaatacttcatattacatagaggattgcatggaggcacctggggcctttgtcctccacctcctcaagtgcgtgcttgtcagcggtggtgtggctgcgttcctcgcccttgtgcatctttctcctattacgaccgcgtcctgcgtaatatggatacaatggaagcacttgcggccgagcctagaatagaagaaaaagaatctaagacccgtatagaagcagttgctcaagtattggcttcatcaaaatttattcaaattgttggtcttgtagctgcaaaaaagagaagcaataatgttggtgatgtgacacgtgtacaagcagcaatgttggtcttgtagcatcaagatttggttattgatgaatgatatctatgataaatatatgtgatgatcattgattatagtttaattataa

SEQ ID NO: 94094 - DNA, 963 bp, Zea Mays
agacttccctctaattcccaaattttccagctaccgcctctcctgagtcgccgccccatccatcctcctcgtcgatctgctctagcctccaatcccgcttgggcatcgggcccagccaccctcgcgctagtgctaggctgctaaccatagccagtccttcctcctctcgcgtggccgcgcctgcatccggccacgggccaccgcgcacagccctagccagacaccgtgcacgacccagcctagccgcagcggtggaggcgcgcagccccaccccgccccgcacgaccaaatgaacagccgcaaccagcgaggctaggcccgcaacagcaacgcccttcgctcgccagcaacggcagtgcgtccgacatccttcgctcgcctagttgccctgcagatggccaggaccagcaccactgcggtctgcagcagcgcccctaactgttgaggataagaggaggttgacatgggatgacaagttgacaacctgctaattgcaatgttcaattcactcttcttcaactaccaggaggattgctagcagaattgtttggccgaaggtttgtttaggaggattgcatggaggcacctggggcctttgtcctccacctcctcaagtgcgtgcttgtcagcggtggtgtggctgcgttcctcgcccttgtgcatctttctcctattacgaccgcgtcctgcgtaatatggatacaatggaagcacttgcggccgagcctagaatagaagaaaaagaatctaagacccgtatagaagcagttgctcaagtattggcttcatcaaaatttattcaaattgttggtcttgtagctgcaaaaaagagaagcaataatgttggtgatgtgacacgtgtacaagcagcaatgttggtcttgtagcatcaagatttggttattgatgaatgatatctatgataaatatatgtgatgatcattgattatagtttaattataa

SEQ ID NO: 94095 - DNA, 894 bp, Zea Mays
agacttccctctaattcccaaattttccagctaccgcctctcctgagtcgccgccccatccatcctcctcgtcgatctgctctagcctccaatcccgcttgggcatcgggcccagccaccctcgcgctagtgctaggctgctaaccatagccagtccttcctcctctcgcgtggccgcgcctgcatccggccacgggccaccgcgcacagccctagccagacaccgtgcacgacccagcctagccgcagcggtggaggcgcgcagccccaccccgccccgcacgaccaaatgaacagccgcaaccagcgaggctaggcccgcaacagcaacgcccttcgctcgccagcaacggcagtgcgtccgacatccttcgctcgcctagttgccctgcagatggccaggaccagcaccactgcggtctgcagcagcgcccctaactgttgaggataagaggaggttgacatgggatgacaagttgacaacctgctaattgcaatgaggattgcatggaggcacctggggcctttgtcctccacctcctcaagtgcgtgcttgtcagcggtggtgtggctgcgttcctcgcccttgtgcatctttctcctattacgaccgcgtcctgcgtaatatggatacaatggaagcacttgcggccgagcctagaatagaagaaaaagaatctaagacccgtatagaagcagttgctcaagtattggcttcatcaaaatttattcaaattgttggtcttgtagctgcaaaaaagagaagcaataatgttggtgatgtgacacgtgtacaagcagcaatgttggtcttgtagcatcaagatttggttattgatgaatgatatctatgataaatatatgtgatgatcattgattatagtttaattataa

SEQ ID NO: 94096 - DNA, 957 bp, Zea Mays
agcccaagactgaccgtattattaataataataagtatgaaaatcacttagcttacaattggctgcaaagttgggtaagggacgacatgcacgcatcactatcacgtcctagtaatggatacatgtcagataggcgatcgagagagaggtgggtggtccagcgagccatcacatgcttgctctgtatatacgtagtaatatgggacatccatgtgtatggcattggttgcttgttttgtttcttggcggcaatgaggcatgtggcacgcggcctacgttgcagcgcggcaaaaggcaaactgctggatacaagaacaagaactgtaaaataacacaatgctctgtctgttcaaataaaataaaccgagaaaatggtgtcatcgtcaccacagaattaaagcgcgttgcatatattgggtatatcacattattatattacatgcatgaagaaaaattaaacaaccgagagagagagacagatatgaagaaaagtaaagaagaaaaaagaaacaacaacaattagctaggcggcaagcacattccatgcgtttgccgcacgcatttcatgcacatatttaaatatcatccggggcacagcatatatactattagttattccagataatcaaatgagacatgatcttttttatttgctagatagatcatgacaagaactgcgttgtgcgcggctagtcggatgagctgctgctggagggcgcctccgacgacgagtccggagatgaggcggagtcgggaccaggagcgggcgcgtcagccgccgcctcaggcgcgtcggcggacgccatggacctgccctccacgacatccacgcgcgcagcccccgcaaacggcgccaccgcgacggcggccaggaggagcaccacgaggaacacgcacgcgcgggccattattgtgatgatgcttttgcttttttgtgtgtgggggggcttcgttgcg

SEQ ID NO: 94097 - DNA, 1606 bp, Zea Mays
cccgggtagaggtaaccgatgatgagctccgtgacgacgttgagccccggctgctggttggtggtggcggtgatgatgccgatggggagcgtgaagaagaaggcgaggccggcggccaggaggacgccccagtaggggagctggagctggcggccgaagccctcgcaggtgaagagcgagaggccgagcacgagcagcagcagcacctggaaccaccactgcggcacggcggcgtagttcctcctcatcagccgggcgtgcacgtcgccgccggcggcacgcaccgtcgccctggtctgctcccatatggacctgccgtggtagagcgcgacgtgggacagcgtggccgccagcgtcgcgaagctgagcccgtagctgaaggcgaagaagatgctgaggtggatctggccggcgccgtcgtagccggcctggctgaactggaacgtgccggcgcccagcaccctgttcacgtcgtaccggctgccgttggccatgaacacgtgggaggagatgatggggaagcgcctggcgccgtacgcgtcgctccagtaggcgaaggggacgatgacgtagacgatgaggaagaagcccgccatgatgttggcgatggcgaacgccggcgtcgacagcggcgtgccgaggaacccggccacggtggcccagtccaggccgaaggcgccgacgccgaggccgtacacgccggacccgatctgctgcgccgtgacggagcgcctccagacgaggcacgccaccgagacggtggagatggtcgggaacaggtagttgggcacaatgtagtaggcgaagctggtggcgaggacggtgaggaagaactgcagcctggtggtgcctcccctgggcctcctggtctccctctcgtgcagcgcccggaagagggagacctgcaccaggttggccggccaccacatgtagggggagtcgacgaggaacttcctgaagaggccggcccagccgtaccccatgagctgcgtggtctgggtgagcagcatggcggccagcgggtggatctcccggtggtagaaggccttgacgatggtgatgatgccgacggcgtagacggagttggagccggtgttggcgaagatggtgatgaggacgtgctccttgaggttgaagggccccgggttgagggagaaggagcggcccatgacccggacggccttggtggggaggcacgccgccatgagcttgccgagaggcagcaccacgatctgcaccgacagcgaggagatgtacagcgggttctggcggtagccgaagaactggttggagaaggccagcagcgcgcaggagaggagccccaggaaccatgtccggaacgtgagcgcgggcaatgccgggtcgtcggtgatcggcaccgtcagccggacctcctcgatggggcagtcgtctacttcctcttctttctctgcagtcagccagcaaaagaaagcaaaattaaaaagaagttcctgtcaagaagagagagaggaaagagcaagctctcgcctgttcttgcactcccgccattggtgcctggcctggagctggcattcaggcggttgagctccacttgctgctgaggctccaccggctccattctgag

SEQ ID NO: 94098 - DNA, 894 bp, Zea Mays
cgcaccggcaccgcctataaatacttgtggcagccctcgccgagctgctccttccactgcaggttcctaacccccacccacctcgcccaaattgcaaccttccccgagtgctccaggtcccgtggccggcccccagatcctctccaatcccaatccaagtatcgaacggatcccatcggtggcgctcgagcgagcgagtgcggccggaaccgagcgaagatgggcatctcgagcatgccggcgcccgaggacagcctgctggggttcgtgctgtacaacacggcggcgtcggtggcgatcctggcggggctggtgcgcgccgcgctgctgttcctgggcctggcggcggcggcggaggacgaggagccgcggcagcaggcggaggccgtgacggtcacggccgtggggcccagcctcgcggaccggttccggagcaggttccggccgtcgcgctacgggcggcgccggggcggggactgccgcgtgtgcctggtgcggttcgagacggagtcggtggtgcagcggctcccctgcggccacctcttccaccgcgcatgcctcgagacctggatcgactacgaccacgccacctgcccgctgtgccgccaccgcctcctgccccccgccgctgccgccgacgaggtgccccggattgcctgattagcgccctaggaattgagagtaggcgtagcactctgcacctcgcagcagcagtgtctctgtacaggttttttttttcttttcctttttgttcgggggagagagaggacagaacggagattgaaggaagaaaatggtggcaacaaagctgttcccctttcgtttctccgaagctctctgttgtctttattcattccaaaagtataatctactcgtatgaaccaagtactaaaa

SEQ ID NO: 94099 - DNA, 270 bp, Zea Mays
aaaaggccggcataccaggggggagaagagggcgacggcattctgggtgctgaaggcgacgagaccgcaggctccccacgagacgttgttcaccacgcggttgcagccggcgcctatgaagaccctccgcgcctccacggccctgccctctcggtgggctccagagagctgctctccggcggccggcgacatcacgagcgaaaccaggctccccgcagcggagctggaagggaaccgcgcttagggctgcaatggacggccagtgagtaa

SEQ ID NO: 94100 - DNA, 1239 bp, Zea Mays
ctcgttgctgttgttgttgctgctcttctctagcttgctttcccccaataggcctctctgcactcttgagcttctttgccttgttgaacttggtagctgtggcgttgccgaaatgggcgctccctaccacctccaatcaccaagaaccatcataaccaaggtaatgagcatgaagcagctgccaccggccctgccacagctgccgccgccgccggtggatcagtccgaggtgaccgagcagacaccggtgctgccacggtcgcagccggtggatccacccacgataaccaggcagccacaggcgccccggcagccagcgcgggcgccttccaaggtaatcctgcaaccgcgccagcggacctcgccggcgatgtggtgcgcggccatcgcttgcttcgccttcagcatcctcctcatcgtcgcaggcgtcgtcaccctggtcgtcttcctggcggtgaagccgaggccgccgtccttcgacgccgctaacgccatcctcaacagcgtctacgtggactcgccggccccctacttcaacaacgacatgacgctcgttgccaacatctccaaccccaacagggagatcgacttggtgttccggtccgccactgtcgagctcttcttccaggacaggcccatggccgtgcaggcgctgcctccgttcgcgcagcggcgaggccagtcccagctcctgaacatgcacctgctctccagccgggtcctgctgccgccccaggtggcggtaaagatggtggaccaggtgaggagcaacagggtggtgtacacaatcagaggcgccttcaaagtggaggccaggttcaggttcggccactactcgtactggatgtacacggtctgtcagctggaactcactgcccctccttctggagttcttgttgcccggagatgcacaacaaaatgactggctctagaaaaattcccctcgttttcttttgttattatatataaaatcttagctattttttatactgatgatggaaatggcccgagaacagcggaacatacctattgttgattcatgtgaattcgaagttggttcttcagctttgtcgatctcttggctgctcagttgttgctgcgtcctagtggctagctgcaacacacagtaggtcagtagcttagatcgtaagcaacctgaacagagttcaacaaagtgtgtaatgtacagcatagaactctttgcttgagtgtaagcggtacagtggattttttttctcg

SEQ ID NO: 94101 - DNA, 808 bp, Zea Mays
gcagctgccaccggccctgccacagctgccgccgccgccggtggatcagtccgaggtgaccgagcagacaccggtgctgccacggtcgcagccggtggatccacccacgataaccaggcagccacaggcgccccggcagccagcgcgggcgccttccaaggcgtcgtcaccctggtcgtcttcctggcggtgaagccgaggccgccgtccttcgacgccgctaacgccatcctcaacagcgtctacgtggactcgccggccccctacttcaacaacgacatgacgctcgttgccaacatctccaaccccaacagggagatcgacttggtgttccggtccgccactgtcgagctcttcttccaggacaggcccatggccgtgcaggcgctgcctccgttcgcgcagcggcgaggccagtcccagctcctgaacatgcacctgctctccagccgggtcctgctgccgccccaggtggcggtaaagatggtggaccaggtgaggagcaacagggtggtgtacacaatcagaggcgccttcaaagtggaggccaggttcaggttcggccactactcgtactggatgtacacggtctgtcagctggaactcactgcccctccttctggagttcttgttgcccggagatgcacaacaaaatgactggctctagaaaaattcccctcgttttcttttgttattatatataaaatcttagctattttttatactgatgatggaaatggcccgagaacagcggaacatacctattgttgattcatgtgaattcgaagttggttcttcagctttgtcg

SEQ ID NO: 94102 - DNA, 2334 bp, Zea Mays
atcttctctcacgccgccgccgccctttccagggttccaccgagggtgttccataagggtgttccatctacgatggagcaccgcgcggcggcgccagatgtgatcgtccaggtgaactccgcagccgtggcggccgtggacgagagaatctcgacgtgtcagatcaccgaggaggaaggcggcatcgtcggccacgagcaggtccccgtcggctgcctcgcccgccggaccttcagccagtcgtacagaacgaggccccgcaaccctctggagttcaccgggtggcagctggcgctgctggcgtaccagtcgctgggcgtggtgtacggcgacatcgggacgtcgccgctctataccttctcgtccttcgcgcttccggaccccggcaccgccgacatcctcggcatcctcagcctcatcctctggacactcacgctcgtcagcctcgtcaagtacgtcttcatcgtgctccacgcagatgaccatggagaaggtggcacctttgccctgtactcgctcctgcggcagcacgtcaacttcagcggcaagtcggtgccggtgccggtcacccggctggcgtcggatgccaacctcaggttccacagcaggaagagcagccagcaaccgaggatgctcgagttcctggaaggcagcgccatggcgcaggcggtcatcacctaccttgtgctggttggaacatgcatggtgatgggtgacggtgccctcactccatccatctcagtcctgtcagcagttcaagggatccagtcaagatcttctagcatcaaacaaggccacgttgtccttctgtgcgtggttatcttggtcatccttttcctgtttcaacagtacggcacgagcaaagttggcttcaccttttctcccatcatgctcgtctggtttgcgttgatcgcgtccactggactgtacaacatcatcaagcattatcccccgatggcatactcgtgcctggtctacccatcactgatactcgcatacgctggccaggcagcatttctgatcaagaacccatctaagctcagcacaacgttctacagcagcgtcccagagccactgttttggccggtgttcgtcgtagccactttggctgccatcgttgcgagccaggcactgatatctgccagcttctccatcgtcaggcagtcggttgctctaggttgttttcctagagttaccatgaagcatacctcaaagaagtacgagggtcgagtgtactctccagagatcaactacttcttgatggttgcctgcatattgatcactgttggcttcaagggtggaccagagattgggcaagcctatggtgttgcagtgatatgggttatgcttatcacaacacacctgatcacagtggtcatggtgataatatggcagctccattctgcgatagcttggtcattttatgtcatcttcgctgccatcgaaggtcttatgacgatctcactgctgtataagattgcacagggtggctgggttccatttgcaataactgcattcttccttataatcacactctcttggacctacgggcgaagcaagaagcaggaatacgaggtgagcaacctgatggataggcaggagttcatcaagacagtgaacacgagcaacagagtacctggaatatgcatcttctgcacggacttgatgaacggcatcccgccgattgtgcgccactacgtcgagcacatgggctgcctccgcgagctgatggtgttcgtcactgtgaggcatctgcctgtgacgtctgtgctgcctgaggagcgcttcctcttcgacaggctggagccttttggtgtctacaggtgcatagtccagtatggttacatggacacccagaacatggaggacgatgagtacgtcgtgtcgatcgttgcgtccctcaaggaaatagctcaaagcggtgctgagatcctgatgatggattccgctctagcgaacgggacgacctttgtgcttggaagggtcatcctaaacatgagtccccagcggaacaactgcttcaagcgctttgttatcaacaacctgtacaggttcctgcagaagaacttcaggtccaacatttccagtctgaagatagctcctagcaaaaccttgcaggttggaatgcaatatgagatttgagtagaggagccttgcaagatatgatggacgtgagattctagaacatgcagacgtgggtagtttagaattagatgttttttgttttgtttttgaaactagcgatctgtttgtaattaggtcagcctcgccatacaaagctaccatggtcataactttggaactatttatttgagtgtggtctttgttgcacaa

SEQ ID NO: 94103 - DNA, 591 bp, Zea Mays
atgggaggaggcgtctctgctgatccaggccggcgcgagcctagcgctcgcggtcagaggaaccaatcacgcggtatatttcaaggagtggtcaacgaagacgacagaagtggccatacctgcagcggtactgcgatggagccaatcccctgcgaggggcagagtcgaggtgacgccaagctccggttatcgattccgaccacgcccagccatgcaccaacttgcgtgacccgcaccggaggcgctacggctcccccaacccggtctttgaccacggcgcggtcccagcgaccctcttcctcactttcgctctttactggcttccgtgggagactccgggaggacgaatgggtgacgggggtgcccgaccaaggatataacctagggaggaagaaggggggaattcggcaacccatcgggtccagtagtcgtgaagattacgcgagagaggccccaaccatgcgaatccgtcacagacggcgtcaaactcggagtccgttgcgcgagcagcaagatgacaatagggggccaccagtcggcgtgcggtcacatgggtccagggagcaaccggccagtgagctcgtgaattag

SEQ ID NO: 94104 - DNA, 333 bp, Zea Mays
atggcgtcttcccctgctggctcgctggctccatgctccctgctccccgcgctccgggtcgcctgccagcagttcagctcgctcccagcgcttctctccagccaagacgcgcccatctctctgctccctcacgctcggatcctcatcgcgcgcgctgctccgtggtactcgctggcgttcctccttctctgctcgccgcacgcacgaaatttccctgctcgttggtgcttggtccttgctccactgcgtcgtgctgtttctctgcgcgcgtcaagttccctcgccgagttcgccttggtcgcaagcctgtgtgtcctcgctgcgcctgtatag

SEQ ID NO: 94105 - DNA, 433 bp, Zea Mays
tgtccaagaccatcggtcgtgtcgctggttatggctttgcctcctgccagctgcttctactttgcgcttgcggttcgctgatgtgtgtgttgtgtgctttttaggtatgacatactcttctcgtttggttgatactggcgcatgtcctcaatttggcttgctctacgttgtctagcctcgacaaacccgcggtttgaacacgtgacagatgatagattagcttctgtggatggacatcttagtcgcttttgtagatggaatgtttggttgcctattgtagacagaatcaggctgcacttgtgcttgtgtaacgtttatgtgcatggttgtgtggactgtgtcggcagtcggccaaagtttgcctcccagtgccttgtatatatcacctgcttagctgtctatccccaactaggtagcctgataatagacttcg

SEQ ID NO: 94106 - DNA, 375 bp, Zea Mays
gccaggtcgtcggtgccgagcgcgcgggcgtcgtgcagctcgcgggaccagtccgtcgagcggctgctagaggcggacgcagccctcgcatggaagaagtgcgtcgagaagagcgtgctggcgccgaggacgctgccgggcaacagatcctccggcacggcgaggtcttggtcttggtcttggagcagggtcttggtcttggagcactgcacgaggagcaaatcagcatgggagatagtggataaagagcttcgaaaagaaagaccctctattgataaccaaagacttctaagtaggagagtagatggagatgattttgttttgaacaaggcacaacgtttggcgttgaaacgtaacttgggaaactgtgagctt

SEQ ID NO: 94107 - DNA, 1265 bp, Zea Mays
ggcagatcatcgtgcttccactctcgcctttccatctgcgagtccccttcccggctccaatctcacatcaactcgggtctttccctgagagatcgtcgttttccctgtttctttcctcccccagcccggttccgattccgacaaagatccgttcttcctagatagacaaggaaagaaagaaaccaagaaccaacctttggcacatggcggagccggccaagaacgaggcccacgtcgtggagatcccggtcgctgtcgacggcggcgaagcctccggaggcgaggaggcctttcttgacaaggcggcggcggcgggcgagggtcacccgctcggggagatcgcggctagcgagggacacctgctgctgctgaagctgtggcagcgggaggaggaccgcctgggccgccgcgcgtgcgcgctggaggcgcgcatggacgcggcgcgccgggacgccttctacctctgcgcggccttcctcgcctttcacggcctttccctcgcgctcctcttcgccgcgtccgtggtcgccgcggccgccacctccccctccgccgcgtgcaggaggtggtgggcgccgtcgtctctgtccctggcggcgtccctcgcgctcgccgcggccgtgcagctccgggtgggcgcctactggcgcgccgcggcgcggctgcgccgggaccgcggcgacgcgcgcgcactcgcgcgggccgtgcaggagctgcgcttgaagggcgccgcgttcgacctgtccaaggagccgcagtacggggtgacgagggccaagtgcgccagcgtggagggcgcgggcctgtgggcgccgctccggtggttccggcagaacgtcgtcacagcctgcctgctcgccgtcgccgccgcggccttgccctccggcaagttcatcctctgcgcctaggatgcatggatgcggggtcgccagcttctttaaggctcgttcggttcctccggaatgagcgcctggaataattcacggttggatctttataagctggaatgactctggtgctcaatcctgatgaaccgaacagaccgctgatcttcagaaccaaaaatggggactgctcgccgcacagggaacagagacaccacttgtgctccctaggcaagatccccatgaaatggcagaaatgcgcattctttcttgtaattttttctagctggaccttcagttgacattctataatggaaatgctttaggcttattttgtttgagcctccgtagcacgaaaaatttacgcaatttcagaaagac

SEQ ID NO: 94108 - DNA, 180 bp, Zea Mays
atggcggcggccctggacgaacttggggcgacgccgaagagcgcgaggacggccggcagcgccgccgtcgtgaacgggatggagtcggcggcgcggcgcggcaggaatcccagcgcggccggcgccgcggcctggaagtggagcggcaggcgctcgcccacgcgcaccgcttcctcgtga

SEQ ID NO: 94109 - DNA, 893 bp, Zea Mays
cataatgttaatttatagaattaaaatgatacggaaaatgcctataattataacacggtcaagggctgctgtcaccgggctccgtcgacgataccaggaggctggttctcggcaacgcgctcacttcagaggagcctgggcgaggaagctggacgcgtcggaaacaagagacggcgagttccacctcctcgacgggagctcggtcgaggcgccattcatgtccagcacagacgacgaccagtacattgcatcgtacggagacttgctcaggctcccgtacgagcaaggcggtgacaagcactcaagcagaggcagttctccatgtacatcctcctcccggaagcacgagactgcctccgggccttggcccggccgagaagctgagcgccgagcctgggttcctggacaagcacatcccaacgaggaaggtcccagttggggagaccaaggtccccaggttcaaggtgtccttcgtgttcgaagcgtccgagctgctcaataaggctctggggctctggctgccgtttagcgccgaagaagcagggctcgtcgtcggtgatccacccatgttgtatgtctcctccgttttccacaggtcggttgtggaggttcacgaggaagggaccgaggctgctgcggcatcggctgtcctgatgatggtggtgggtgcttcacttgggagcagcacggattgcagtttcatggcggatcaccctttcgtcttcctgatccgagaagacacaccaccggtgtggtgctgttcgtcggccatgtggtcaatcccctgctcgcttgaacgcataataagtggctttgtcttgtctgaaacaaacaaaggttgtgggatgatcagatgatgcattgtacttcgctctatgacgacgatgatcctt

SEQ ID NO: 94110 - DNA, 793 bp, Zea Mays
tctcgagtgaaatatatcatattcctacctttataaaacaaacaggaacaacttgagtcggtcggtcggccagatccaaaaccctggggaaccatagcgggtttaactgaagagaggaaaaataaaataattctggatttttttggcatgaattgtgggctagattggatccgattcaatccagattaaaccatagtctaatttaactgaatgaggctttaactggtggctggtgcttggctttctggagacctggacgtagcgaaatctagatctgccactggacgcagcgctgctccgcttcctggcttcatgctggtctccgtgctgttccgcttcggcgcttcctcctcttctccacttcggcagttcctgcttgtctccacttcggcgttgctgagctgctccgcttcggcgcttcttgctcgtctccacttcggtgctgctgagctgctccgctggcggactggacgcgactacgcgacgccccgacgcaggcacgcggctggaggctgtaggcggagacacggcttgtactgggcctattcgcttgtactaggccgcgaccggggctgcagcccgggcagccccggtcgtagatccgcccctggtcgtcaggatgcagaagctgctgctcgagtgaacgcatgggcagagagaaagccaagtcaggtacagtttgttggatcttttataggcctgacctatttattgaataaactatatggtgtgtaatagtggagaataccaatagtaccatattggaagtccaagggtcttttgacttgactta

SEQ ID NO: 94111 - DNA, 156 bp, Zea Mays
gacgcggccgacagcctgcacgctctcgccgagcaggtggcgcggatcgccttcgcggacgccgtcttcgccgacgcgtcgctgaagctgaggccggccttcgaggaggtcgccgtggggaagtacggcgccgagatccactccgtcgagttccag

SEQ ID NO: 94112 - DNA, 1812 bp, Zea Mays
ccgagttttagctccggttccagaaaaaaactcggaaccagatctcaaaccacacaatccacggctgctccttcgctggacaccgagaaaccgtcaaggcgcaacgaacgaacttgcagcaaaatttcccggagaccctcgagcaaaaatctgcgcgacggcgacctcgccgccggagctcatccggaagaaggagaccgccacgccgttcgaatggatggctccgacgatgagctggaccaacctacgagtaaagcgactgagcacatcacggctatggacgtgaggaaggggaaggatatgcaagggatcccctggaacgtgatgccgactacaagggacaagtacaggcagtcacggctgcaggggtacgccaactttgagaacgtgcctaattccggaaggctttctgagaaggaatgcatgcctgcagagaaaggccaactctactacgagtttcagcacagcacgaggtcggtgaaaccgaccatccgtcatttccagttgaggaatttagtgtgggcaacaacaaggcacgatgtgtatcttatgtcaaacttttctgtgcttcattggtcagcaatgacttataagaagcaagaagtcattaatcttcaaggacatgtgacaccgtgcgagaagcaccatcggaatcactacgagggtttttatcagactccagtcagtactttggcggtgaagcataacttgcttgttactggtgggtttcatggggagataatatgcaagtttctggatcgtcaaggagtaagctactgttgcaagacaacaaatgatgacgacggtattactaattctctggagatatttgagaagcctagtggttctctgcacttccttgcgtcaaacaatgattgtggacttagagactttgacatggaaaagtttcgaatatgcaaccacttccattttgcttggcctgtgaatcatacatcgttgagcccagatggtaaacttgctgctattgtgggggacagtcctgatggacttctgattgacgctaattcaggaaagacggttcacaaactccatggccatttggattactcctttgcgtcggcatggaatccagacggccgaacattcgccacggggaaccaagacaagacgtgcagggtctgggacgtccgcaatctctccagatcagttgttgtattgggtggcaacatcggagccgtcaggtcgattcgctacacgccagacgggaagttcatggcgatgactgaacccgcggacttcatccacatcttcgatgttgagagtgggtacagcaggaagcaggagctggacttctttggtgagatcgcaggcatatcgttcagtcctgacactgaagctctctttgtcggtgtgcatgatcgcttcttcaactgctgcctcctccagttcagtcggcgacggttctactcgtaccttgattcaacactgtgagcttgtgctggtgtagacctgtgaggtcgacatcacaggctttagaagcaagaaagttgtggctatgttcataggtgttgctgtgaagaaactggagaacgatacgtttacttttgctgaacaagctgtaggtattcggcgacccatcttttctgggtgatcagagtctcaattaagattcccgctttctgttatctatcccatacttacaccgtacgactacgattagatcatcctatcctacgggcgagacgtgagtctacgtaattgattgagacctgctgagggctttgctttcacatgcatgcatatgtaatcatcgatcatggaattgctaataagctgtctgtttgaaactca

SEQ ID NO: 94113 - DNA, 1882 bp, Zea Mays
actggaaaggccgagttttagctccggttccagaaaaaaactcggaaccagatctcaaaccacacaatccacggctgctccttcgctggacaccgagaaaccgtcaaggcgcaacgaacgaacttgcagcaaaatttcccggagaccctcgagcaaaaatctggtctggttcaaactcgccttttgcctgtgggcggccgcgttcttacgggccatgtcgcagcgcgacggcgacctcgccgccggagctcatccggaagaaggagaccgccacgccgttcgaatggatggctccgacgatgagctggaccaacctacgagtaaagcgactgagcacatcacggctatggacgtgaggaaggggaaggatatgcaagggatcccctggaacgtgatgccgactacaagggacaagtacaggcagtcacggctgcaggggtacgccaactttgagaacgtgcctaattccggaaggctttctgagaaggaatgcatgcctgcagagaaaggccaactctactacgagtttcagcacagcacgaggtcggtgaaaccgaccatccgtcatttccagttgaggaatttagtgtgggcaacaacaaggcacgatgtgtatcttatgtcaaacttttctgtgcttcattggtcagcaatgacttataagaagcaagaagtcattaatcttcaaggacatgtgacaccgtgcgagaagcaccatcggaatcactacgagggtttttatcagactccagtcagtactttggcggtgaagcataacttgcttgttactggtgggtttcatggggagataatatgcaagtttctggatcgtcaaggagtaagctactgttgcaagacaacaaatgatgacgacggtattactaattctctggagatatttgagaagcctagtggttctctgcacttccttgcgtcaaacaatgattgtggacttagagactttgacatggaaaagtttcgaatatgcaaccacttccattttgcttggcctgtgaatcatacatcgttgagcccagatggtaaacttgctgctattgtgggggacagtcctgatggacttctgattgacgctaattcaggaaagacggttcacaaactccatggccatttggattactcctttgcgtcggcatggaatccagacggccgaacattcgccacggggaaccaagacaagacgtgcagggtctgggacgtccgcaatctctccagatcagttgttgtattgggtggcaacatcggagccgtcaggtcgattcgctacacgccagacgggaagttcatggcgatgactgaacccgcggacttcatccacatcttcgatgttgagagtgggtacagcaggaagcaggagctggacttctttggtgagatcgcaggcatatcgttcagtcctgacactgaagctctctttgtcggtgtgcatgatcgcttcttcaactgctgcctcctccagttcagtcggcgacggttctactcgtaccttgattcaacactgtgagcttgtgctggtgtagacctgtgaggtcgacatcacaggctttagaagcaagaaagttgtggctatgttcataggtgttgctgtgaagaaactggagaacgatacgtttacttttgctgaacaagctgtaggtattcggcgacccatcttttctgggtgatcagagtctcaattaagattcccgctttctgttatctatcccatacttacaccgtacgactacgattagatcatcctatcctacgggcgagacgtgagtctacgtaattgattgagacctgctgagggctttgctttcacatgcatgcatatgtaatcatcgatcatggaattgctaataagctgtctgtttgaaactca

SEQ ID NO: 94114 - DNA, 1872 bp, Zea Mays
actggaaaggccgagttttagctccggttccagaaaaaaactcggaaccagatctcaaaccacacaatccacggctgctccttcgctggacaccgagaaaccgtcaaggcgcaacgaacgaacttgcagcaaaatttcccggagaccctcgagcaaaaatctggtctggttcaaactcgccttttgcctgtgggcggccgcgttcttacgggccatgtcgcagcgcgacggcgacctcgccgccggagctcatccggaagaaggagaccgccacgccgttcgaatggatggctccgacgatgagctggaccaacctcgactgagcacatcacggctatggacgtgaggaaggggaaggatatgcaagggatcccctggaacgtgatgccgactacaagggacaagtacaggcagtcacggctgcaggggtacgccaactttgagaacgtgcctaattccggaaggctttctgagaaggaatgcatgcctgcagagaaaggccaactctactacgagtttcagcacagcacgaggtcggtgaaaccgaccatccgtcatttccagttgaggaatttagtgtgggcaacaacaaggcacgatgtgtatcttatgtcaaacttttctgtgcttcattggtcagcaatgacttataagaagcaagaagtcattaatcttcaaggacatgtgacaccgtgcgagaagcaccatcggaatcactacgagggtttttatcagactccagtcagtactttggcggtgaagcataacttgcttgttactggtgggtttcatggggagataatatgcaagtttctggatcgtcaaggagtaagctactgttgcaagacaacaaatgatgacgacggtattactaattctctggagatatttgagaagcctagtggttctctgcacttccttgcgtcaaacaatgattgtggacttagagactttgacatggaaaagtttcgaatatgcaaccacttccattttgcttggcctgtgaatcatacatcgttgagcccagatggtaaacttgctgctattgtgggggacagtcctgatggacttctgattgacgctaattcaggaaagacggttcacaaactccatggccatttggattactcctttgcgtcggcatggaatccagacggccgaacattcgccacggggaaccaagacaagacgtgcagggtctgggacgtccgcaatctctccagatcagttgttgtattgggtggcaacatcggagccgtcaggtcgattcgctacacgccagacgggaagttcatggcgatgactgaacccgcggacttcatccacatcttcgatgttgagagtgggtacagcaggaagcaggagctggacttctttggtgagatcgcaggcatatcgttcagtcctgacactgaagctctctttgtcggtgtgcatgatcgcttcttcaactgctgcctcctccagttcagtcggcgacggttctactcgtaccttgattcaacactgtgagcttgtgctggtgtagacctgtgaggtcgacatcacaggctttagaagcaagaaagttgtggctatgttcataggtgttgctgtgaagaaactggagaacgatacgtttacttttgctgaacaagctgtaggtattcggcgacccatcttttctgggtgatcagagtctcaattaagattcccgctttctgttatctatcccatacttacaccgtacgactacgattagatcatcctatcctacgggcgagacgtgagtctacgtaattgattgagacctgctgagggctttgctttcacatgcatgcatatgtaatcatcgatcatggaattgctaataagctgtctgtttgaaactca

SEQ ID NO: 94115 - DNA, 2677 bp, Zea Mays
gccgcctccccactgtcggtcgacacatgccgttccactgggtggaatttatggcgactcggacgcggcgctgcttttagtagtaaccaatgcagcttcctcctcagggcctggaagaagctgcgaccttctttgtgtgtgtgttttttttggcgacgagatctgacgacagtggcggcggttcgaggttcggtgcgagagcgcgacgtcccggaatcggcggcggcgaagatgtcggtgagccacgcggaggacatcgagatatcactgtgcgacggcaactcggaggacgagcggcggcggcgtaagatcggctcgctgcggcggaaggctatccacgcgctcaagaagcgagggaggcgccgcgtcgacttccgcttcccgccggcggccatctccatcgaggacgtccgcgacgccgaggaggagcgcgccgtcgcctccttccgggaccgcctcgccgcgcacggcttcctccccgacaagcacgatgactaccacatgatgctcaggttcctcaaggccaggaagtttgaagccgataaggcaatgcagatgtggtcggagatgctgaaatggaggaaggagttcggaactgacaccatcctcgaggattttgatttcgcagaactggatgatgtgctgcgctactaccctcagggctaccatggtgtggaccgcgaaggccggcccgtgtacattgagaggctagggaaggtggatcccaacaaactcatgcagatcacgtctgtggatcgctacatcaagtaccatgtccaggagtttgagagagccttcagggagaggttccctgcctgcacattggctgccaagaggcacattgactcgaccactaccatcttggacgtccagggtgtggggtttaagaatttctccaagactgccagagaacttgtgcaccggatgcagaagattgatagcgactattatcccgagacactccaccaaatgtttgttgtgaacgctgggagtggatttaagtggatctggaacagcgtgaagggcttccttgacccaaagacttcatccaagattcatgtgcttggttcgaactaccagagcaggcttcttgaagtaatggattcgagtgagctgccagaattccttggcggttcatgcacatgtagtgacaagggtggttgtcttggatcgaacaaagggccgtggaatgatccttatatattgaagctgatccacaatttggaagctggatgcgcgagggaaatcaaacctgtttctgagggggaagaaagaaacagctcatcctttcggttggaacagatgaaatggcagggcttgctaagtgatacatcaaatgctgaatctggatctgatgttgatgattttggtgcatcatttgttcataaagtttctgactatggttgcttgactccagttcatgaggaagtaaagggcacagatcgtgtgacatacttcagctatgatgatcaaagccacccggatatggctcctgaatcttaccatggagcgcgacgagctactggaatggagcaccacaaaccaatggctgatttcagccaatattctgccaatagaaggcctggggacagtgctcttaacgtcaatggtacggccgctcaaagcggctgggaaaacgtggtgaagctagtggttacaactttggtcaagctcttctacttcatccggcttttcctctccacagccgagaggaggctcgagagcatccatcgccctgctccaccagcggccccagcagcggcagaggagccaagacctcgcgccatcagtgatgaagaggtgtgcgcctgcctgcagcgccttgacaatcttgagtcgatgtgcagtcacctcgccgccaaaccgccgcagatcccagaggacaaggaactcattctgttgagctcgttcgagcggatcagatccgttgaggctgacctcgagaggaccaaaagagtattgaatgcgaccgtggtgaagcagaaggcactggtggagactctggaatccgtacaggagtcgtcgtctagagtcaagaagaggatgttctgttcataggacattgagccgagctgagcaccagcagatcccaggaaccatgccatctgcgtcgtcattaaccaacaaactgtgaagctgacgtgcgaagctgccagcagccggagcggagccgccattttgacctcgtcgcgaccacccacttcgtcagccctccgaggaggatgaaccagcctacaccaaaatggaagagaagaccgtagcacccatgtcccttcctttcattcccactcgtttttgtagcctccgtacggttgtatttgttccctgccttccggcgctcccgttttttgattggtgaattctctgctccggccggccgccgagcgccatgccaagtgctgtgttacatcttcttttccttggtgccgtccgaatggctggagtcgttcttctgtatactgatgagtacagagtagtgacccccgcggcaggagctgagctggggagaagcacggtggcgagcttggtctggctgcagctcctgtgctgtcgtctgtacatggcacagactgcttctggtggccctgctaatacagattgctatgaaatggcctgtttgggttctgtgctgggatttgtcgctggatggattggtttaggccacctccccggctga

SEQ ID NO: 94116 - DNA, 2632 bp, Zea Mays
ccagttcccatcaagcagcaacaaactgagaggagacagaggggcgcaggagaaagagaggcagtgccgagcagggagagagagagagaatccccgacctctcgcctccgccctagccaccaaggttcctcctgatcgattgattcccatccatccaaaaccccaacaaaatacgacagtggcggcggttcgaggttcggtgcgagagcgcgacgtcccggaatcggcggcggcgaagatgtcggtgagccacgcggaggacatcgagatatcactgtgcgacggcaactcggaggacgagcggcggcggcgtaagatcggctcgctgcggcggaaggctatccacgcgctcaagaagcgagggaggcgccgcgtcgacttccgcttcccgccggcggccatctccatcgaggacgtccgcgacgccgaggaggagcgcgccgtcgcctccttccgggaccgcctcgccgcgcacggcttcctccccgacaagcacgatgactaccacatgatgctcaggttcctcaaggccaggaagtttgaagccgataaggcaatgcagatgtggtcggagatgctgaaatggaggaaggagttcggaactgacaccatcctcgaggattttgatttcgcagaactggatgatgtgctgcgctactaccctcagggctaccatggtgtggaccgcgaaggccggcccgtgtacattgagaggctagggaaggtggatcccaacaaactcatgcagatcacgtctgtggatcgctacatcaagtaccatgtccaggagtttgagagagccttcagggagaggttccctgcctgcacattggctgccaagaggcacattgactcgaccactaccatcttggacgtccagggtgtggggtttaagaatttctccaagactgccagagaacttgtgcaccggatgcagaagattgatagcgactattatcccgagacactccaccaaatgtttgttgtgaacgctgggagtggatttaagtggatctggaacagcgtgaagggcttccttgacccaaagacttcatccaagattcatgtgcttggttcgaactaccagagcaggcttcttgaagtaatggattcgagtgagctgccagaattccttggcggttcatgcacatgtagtgacaagggtggttgtcttggatcgaacaaagggccgtggaatgatccttatatattgaagctgatccacaatttggaagctggatgcgcgagggaaatcaaacctgtttctgagggggaagaaagaaacagctcatcctttcggttggaacagatgaaatggcagggcttgctaagtgatacatcaaatgctgaatctggatctgatgttgatgattttggtgcatcatttgttcataaagtttctgactatggttgcttgactccagttcatgaggaagtaaagggcacagatcgtgtgacatacttcagctatgatgatcaaagccacccggatatggctcctgaatcttaccatggagcgcgacgagctactggaatggagcaccacaaaccaatggctgatttcagccaatattctgccaatagaaggcctggggacagtgctcttaacgtcaatggtacggccgctcaaagcggctgggaaaacgtggtgaagctagtggttacaactttggtcaagctcttctacttcatccggcttttcctctccacagccgagaggaggctcgagagcatccatcgccctgctccaccagcggccccagcagcggcagaggagccaagacctcgcgccatcagtgatgaagaggtgtgcgcctgcctgcagcgccttgacaatcttgagtcgatgtgcagtcacctcgccgccaaaccgccgcagatcccagaggacaaggaactcattctgttgagctcgttcgagcggatcagatccgttgaggctgacctcgagaggaccaaaagagtattgaatgcgaccgtggtgaagcagaaggcactggtggagactctggaatccgtacaggagtcgtcgtctagagtcaagaagaggatgttctgttcataggacattgagccgagctgagcaccagcagatcccaggaaccatgccatctgcgtcgtcattaaccaacaaactgtgaagctgacgtgcgaagctgccagcagccggagcggagccgccattttgacctcgtcgcgaccacccacttcgtcagccctccgaggaggatgaaccagcctacaccaaaatggaagagaagaccgtagcacccatgtcccttcctttcattcccactcgtttttgtagcctccgtacggttgtatttgttccctgccttccggcgctcccgttttttgattggtgaattctctgctccggccggccgccgagcgccatgccaagtgctgtgttacatcttcttttccttggtgccgtccgaatggctggagtcgttcttctgtatactgatgagtacagagtagtgacccccgcggcaggagctgagctggggagaagcacggtggcgagcttggtctggctgcagctcctgtgctgtcgtctgtacatggcacagactgcttctggtggccctgctaatacagattgctatgaaatggcctgtttgggttc

SEQ ID NO: 94117 - DNA, 1480 bp, Zea Mays
ttattgtttcaagaggtaaagctagctcaaaaaatgttctcaccgtagatacatcctgttggctttaactatgcccttagagtgtatagggcttgaccattctaggacaccccaaaacacatgaatttcatgaactatagctcaaaaaaatattgaaaactatcaaagtcggtctaagagcgctggattcttaaaactgcatgtagttgagtgactagatagacaaatttaatgtacaagataaccaaaatcctttgaatcctatcccaaatttgatgcaaaaaataatcatttgagtggtggtgagtctacagaacatgaactcacgttggattcttaaaactacatgtagttgcctagatagacaaatttgatgtgcacgacaaccaaaatccttggaatcctatcccaaatttgatgcaaaaaataatcatgagtggtagcgagcctacaaaacataaagaactcatcgcaaagactacctagaaaaatagtctcgaccaaggtacatactgctctccttaatgtttcattaagaacgtctggtgcccgatagttccgggaccctaaaacatctaaaacccatgaactatatagctcataaaaatgctaaaaacatgaaaatcggtacgagtccaagagcataggacataaaaaatgtacccacaaaactgaacccaaaaaggaacaaagcatgttactgtacatatttcgtgtccgaacttcagcactccacaacgaaatctgacaacagcacaccgcacatgacacatctcttatatatcgatcacctcttaaacctcatcgtatatgtttgatacagaatgcatatcttggcaaaactcaagaatttacactttgatgaggagactctttaacagcagtgttcctaagttaaccctagttttatcggaatgtcactttatatatttcgtatcttatcttcttcgctacgaggtaaacaagccttcaattttgcatattcagtgcccattaactgcagtctgctggaaattctctctctggtatattgccttccaccgctcaagctcttccctgcagatccgtaacagcccaaacattagcatcaacttttttttgtttattgtaaagtaatatgaagcacaagggttctcctgtgtcagtcaatcggttacacctttgctcttgcacagttagtcaaatgctgaaaggctcttaagaaaaatctggttatttgttagtattctagagctagaaacgtcggtcctataaaacagaatcctggtttcacaatttctgtgaggtatctggagatcaaaactgtttgctcctgtcagatttgcaagtttcaaggttttctaagaattttggtgttattaatgataagacaggtctactaggaatttgagccatgaagaatgggtgctcgaaaactaaaacatgatcacctccagtttctcatccagtttacttccaagttttcaaaactttggttgtg

SEQ ID NO: 94118 - DNA, 1347 bp, Zea Mays
ttattgtttcaagaggtaaagctagctcaaaaaatgttctcaccgtagatacatcctgttggctttaactatgcccttagagtgtatagggcttgaccattctaggacaccccaaaacacatgaatttcatgaactatagctcaaaaaaatattgaaaactatcaaagtcggtctaagagcgctggattcttaaaactgcatgtagttgagtgactagatagacaaatttaatgtacaagataaccaaaatcctttgaatcctatcccaaatttgatgcaaaaaataatcatttgagtggtggtgagtctacagaacatgaactcacgttggattcttaaaactacatgtagttgcctagatagacaaatttgatgtgcacgacaaccaaaatccttggaatcctatcccaaatttgatgcaaaaaataatcatgagtggtagcgagcctacaaaacataaagaactcatcgcaaagactacctagaaaaatagtctcgaccaaggtacatactgctctccttaatgtttcattaagaacgtctggtgcccgatagttccgggaccctaaaacatctaaaacccatgaactatatagctcataaaaatgctaaaaacatgaaaatcggtacgagtccaagagcataggacataaaaaatgtacccacaaaactgaacccaaaaaggaacaaagcatgttactgtacatatttcgtgtccgaacttcagcactccacaacgaaatctgacaacagcacaccgcacatgacacatctcttatatatcgatcacctcttaaacctcatcgtatatgtttgatacagaatgcatatcttggcaaaactcaagaatttacactttgatgaggagactctttaacagcagtgttcctaagttaaccctagttttatcggaatgtcactttatatatttcgtatcttatcttcttcgctacgaggtaaacaagccttcaattttgcatattcagtgcccattaactgcagtctgctggaaattctctctctggtatattgccttccaccgctcaagctcttccctgcagatccgtaacagcccaaacattagcatcaacttttttttgtttattgtaaagtaatatgaagcacaagggttctcctgtgtcagtcaatcggttacacctttgctcttgcacagttagtcaaatgctgaaaggctcttaagaaaaatctggttatttgttagtattctagagctagaaacgtcggtcctataaaacagaatcctggtttcacaatttctgtgaggtatctggagatcaaaactgtttgctcctgtcagatttgcaagtttcaaggttttctaagaa

SEQ ID NO: 94119 - DNA, 1182 bp, Zea Mays
atgacatgcttttggtgtgggatactaatcagtaaaacacctaaccagcatgcagtagttgttccagctaaggtgttccaagtacttgggccctatgtaagagatgctcgccgagttatgcagcctgaaagaggacctgcgcaccgcgaacaagggagctcccagagtagcagcaggtggggcgacttggaaacgccgacgtcttcatctggcctctgggggcacctgtctctgagctccatggattttatggagctcgagaagaggaagaccatgatcttgtccatggttgaagaggcaaagctaggagaaagaaaagagacagtgaagaataggactgacatcagcttcacaaccacgactggcattattgatcgcagaaccaaggatgatgcccaagcttttgcagcaggtttcatttcatcatttttatcgagctttgcgaggcttataccaattaactttggggctaaatatgttgttgaatcttctggtgtccttacaacgactgataaagcattaacacacttaaagggtggtgctaagaaagtggtgacatctgtagatgctccaatgtttgtagttggagttaatgagaatagctatgatctaaagatgaatgttgtttctaatgcaaattgcaccaccaactgccttgctccacctgccaagatcatgcggtctcatcaagtagcagctgacattgagcaggaccttcacagtggtgaaaagcggtcagaagaaccttctggtcacttaatatttgtcagtgatctagctgctgatgttactgatgaagatcagcccctcctgaaccttgtcccaataacaccaccttttgataacaacgccatatcagataaaagaagatggagcttctgtaggaggtctacaaggcaccgagttttgaagaactctgatatctcagaacctgagactcttagttctagcaaagcaaaggctgacattacaccgagcaacaatgtttatacttcaacatattcatatgcctcggagaagcctctccaacaagacaagccggatgaagaagaagctacaaatgaggacgagtgtgctgcctgcaagaagactgtgtacccactagagaagttgaaaatcaatggcatgtgttgcgcccatcttgcggcaagggttccaaatggctccttaaaaatgatgtga

SEQ ID NO: 94120 - DNA, 1537 bp, Zea Mays
ccacgccggcctcacccagagcgcagaacccccaaccccacttgtcgggcttcggctcttcgcatcctgcccgtcccccgtcacagtgtcccaatcgcaacccccgcctgcagcacgcgtcacgccacgccacctctccccagggtccggcgatgtcggcgccctccgacgccgcggtggcagccgcagcgcccgcatccacgaccaccgccgccgcctccagcggtgggctcaccttcaagctccacccgctcgtcatcgtgaacgtctccgaccaccacacccgcgtcaaggcccaggccgcctgctccggggacagctcttccccctcctcgtccgccccgggggccgggcagccgccgagggtgttcgggtgcgtgatcggggtgcagcgcggccggaccgtggagatcttcaacagcttcgagctcgtgctcgaccccgtctccggaaccctcgaccgcgccttcctcgacaagaagcaggagctctataagaaggtgttccccgacttctacgtgctcggttggtactccactggaagcgatgtgcacgacaccgacatgctaatccacaaatcattgatggatattaacgaaagccctgtttatctcctattaaatcctacaatcaacctctcccaaaaagatctccctgtgactatctatgagagtgagttgcatgtcatcgatgggattcctcagctcatcttcgtcagatcaaattatacaattgagactgtagaggctgagaggatatctgtggaccatgttgcccatctcaaaccttctgatggtggctcagcagcaactcagttggctgctcatcttacaggaatacacagtgccatcaagatgctcaatagcagggtccgtgttatccatcagtatctcgttgccatgcaaaaaggtgacattccattagataattcgctgcttaggcaagtctcaagcctcgtaagaaggctaccagctatggagtcacagaaattccaagacgacttcttaatggaatacaacgacactctcctcatgacctaccttgcaatggtcactaaatgttcaagcacaatgaacgagttggtcgagaagataaacacgagctatgagagaacgactagcaggagaggaggtcgaggtgctttcatgtagctcaccggccgtgatcctgctgctgctttcatctgtggagattttttgaaagagctaatgttctcgaggcagttttttgcatacattctattatgtgcaacctgctatacgcaggagaggaggccgaggtgcctgccttcatgcaggctacccggaggcattttttttttcatgcaatttattatgcgcaagcggctatacggcagctctcgactcacttgctaccttctaggcaaaaatgatgatttgctggaactgtatcaaatcctgcttgaagttgatctgtaaagttcatgtctcagttaggccttatttggttgggtgtttgtatctaaagggattgtatcgaaagagattggagaggattaaattttttttagttaaaa

SEQ ID NO: 94121 - DNA, 798 bp, Zea Mays
catttttccctagccgccaccagcagctcttctctgtttcctggacgtgcgcagggagctgagctccttctcccatggcgcctccacactcccagccgccctcctctgcccagcagccgagcgcccagctcctcccctcggcagccatggcgtcctccccttcctcccgccctctgctgtccacggcgagctgcagcagggagccgagctccaagctcccacggcgctcgagctccactcctccctgttcgtcttcaacccaagtcggcgccctctcgctggctgtcctctccgtcgcgcccctgctggccgtgcccctcacgctggcacacaggcgcccaggcaagcttccccatggcgctcgactccctgttccatggtgccctgtggtcgcccccttcttccccttgtggctgcgctcctctgctccctccatggcgccccctgctccttcctcgacgcgctgtaggtgctcgacaaatgcgcagctccatttctcccatggccgtggcctgcttttcccggcgccctgcgcagcatctccctcccccaagtccctgcgcccgcacagcagcagctcgccccaccttccctcgctgcgcagcccctcggcgaaacgccgctgttcctgcagccccgacaccttccctggcttcctcactgctagcgctgcgcgcgtgccacgtgttcggcgatctgtccaagtggggtgttgagcagtgagcagcacgccgtcgacgcccgccgtgtgctcgctgttttgcgcagcccatccgcgacgccgtcgaaaaccgtggt

SEQ ID NO: 94122 - DNA, 1138 bp, Zea Mays
caccactcccgtgcactgttgcactgaccatcgtctcactcatctcatcaccgctttccgtttcgctcgtccgatcctcatcaccagctcgggagggaggtcgggagagagcacggacgatgtggcacgccgcggcggcccccaacaaccttcacccggccgtcgccacaacatcgtcccctgcccttcgccgtgcgaggtggcccatcgctcgaccctcgtcgtcggtgaaggtccagtcctccaccaggaacggcaatggctccgctgacaacctggaccacctgcagagggcgtccaagggcaggcagcagcggcagggggcgagtgctccaggcccgagggctagaagggtcgtccgcaccacaccattcgggctgtggtgggacagcttcccggaagcaaggacgctggaccagatggtgcggaccatcatggacgccgacgacgctgacaccgacacccgcttcggcggcgtcgtgcctgcggcggcggcggcggcccccaccgccgtgccgcgcgccgaccacgggcggacgccgtgggaggtcagggagcgcgcgggggagtacctggtccggttcgacatgccagggatggcgcgggacgacgtgcgggtcagcgtgcaggaccggacgctcgtcgtggccgcagagaagaagcaacagcctgctgctgacggcggcggcgacgaggagggagataatgaggaggaggcgtggccgccggcgagcttcgggcggtacaggacgcgggtggagctgccggagaacgtggacgtggagaggatcgccgcagaagtgaaggacggagtgctgtacctcaccatccccaagctgtcggcgggggccaaggtcgtcaacatccaggtgcagtgatgctgtgggtcagattcatcaggacgatgagcacctgctgccgtgcttttcgcagcttctagaatctggatgcttgggacgagagcgatatcgatctagctaccactcttcttttcactcttctttttctgtttcgttcctcgattttgtttgctatgtcacacatggtaaatcttggtagttggtgccagaagataaggtgtaatctttgacctgtttggaacaaattccagaatcgaacgcaagagaatttaaatatt

SEQ ID NO: 94123 - DNA, 2583 bp, Zea Mays
atcccacatctgtgagacacgagccgccgccagaagaccaccgcgcgccccggcccttcttccacgcctccgtcttccgcgcctggccacggcccaccgccgtccgcccttcgacgcctgacgcgccccggcaccgcccaggcaaggcggccgccggtagctacggacagcccaccgcgtccgcggcaccgcccaccggcagcagctaccggcaaccgcgcccgcggctctgtacccagggagtagcctatcatggggaagaggccgaggacaactctgcggcgcacgccagcacggggccttccaaagtccaagcgggccgacgagctgccatcgatgcctgattctgacaacgacgaaattgatgcatttcacaagcagcgggacatgatccctttcgacgccaatgatgtaagggagtcggaggatgatgatgtggagcagcccgtgtttgacctcaagggtgtttctgatagcgaaagtgatgacagcaaaggagaattgtccggtgacatggctgaagctgattatgaaggatgggacaaagggtatatttcgaaattaaaaagagcacagagggctgtcaaacaaattgctggaggtgatgatagcatggatgagcaggaggatgaaacacaagaaaatgtttggggcagaggtaaaaatgcatactatgctcctggtgaacaatctggtgatgatgaggtggattacgaggaggcacaaaggatacaaaaaaataaggaaaaaaggctgtctatgaaggattttggattagaagatggtgaaagtgatgaagagggtaatgcaacaaaggtatccaaccatgaatccaaaatgaaagaagactttgctgtcttatcaggcgatgagaaaatggatgtgctatacagttctgcccctgaactcgttagcttgttgtctgagttgaaggatgcccatgaagaacttagggccataggacagctaacaagtgaggtcacgtcttgtctaggcaaagataaaatgcaaccttttgaagtgaagaaagcttgtttgcttgctcattgtcaagctattaccttctatctccttatgaaatctgaggggttgtccgtacaggatcatcctgtaatttctcgcttgatagagaccaagaatatggtagagaagataaagcaaatcactttgaatccagtgagccaaaaagggtgcgctgatgaccatagtatgcattgtggcaccatccaaacagataagatagtctcattggacaaacaggagggcaaatttagcaatgtactagcactggataaagtgaaacaaggtgctgaagtctctgaatcaagaaagagtgagccttgtaataacgattatcatgaagttaatgaacagaagaacaaggatgaacgaatgggcttgcatagccttgaaatgttgaaggtaagagcaaaccttgaggaaaggttaaagaaaaaagggctctataatttgacacgctcgaagccagagaagtcgtcaaaaaccaggacaactagtgataaaagtggcctgcagacattggatgattttgatgatgaagtgctgaagaataaccaaatgatgaagcctagcaagcttgttgcagcagctgctaaatcaaataaaagcatgtttgtttctggtgatgatgaccttccgaagagagataatatcggagaaagacggagaaaacatgagcttcgcgtcctatcaagagtaggggctaactcagcagaggatcatgagctgccagatggtgacgcttctgaagaggaggaccaccatgagttgccagaaggtggtgatgaatctgaagacgacatccatcgggatgtcaaaagaaagaggactgaaaagctatcaaccaagaatgctctgtactcgccaactccgggcgttgaacatctggaggaagaaacagaaggcgatggcaagaggacgatttcgtatcagatcttgaagaacagggggttgactcgttccaggaataagaagaagaagaacccgcggaagaactacagggataagcacaagaacaagcttgtcaagcggaaaggccaagtgcgtgatatcaagaagcagtctggtccgtatggaggtgaaacgtctggcatcaacccgaatgtcagccgcagtgttcggttcaagagttgagttgatgcaagtagtatatttaggttggacatggaaggagttgtttctggtcttaacttggcattttctttattttttgtttgcatgtcattcgaacgcataaactccagaatttgtcttacggtattagatgagtacaattttgcttgcgaaaaatatcattatcaccgttgcctgtgtgtgtgaaaactaggtggtataattatcaaggaaatttgtatattatttcgaaccatatatattagtaggggctgtttatttagataaatgtccttaccgtgagacattgctagtagcatgacagcatgcataacatggcagcctttcattcttgacaataaccagctgtggaactgatatgggtccctaggtaattctacacatatgcagcctgttcacttggctttaatccgaacccgcttagacctt

SEQ ID NO: 94124 - DNA, 2561 bp, Zea Mays
acatcccacatctgtgagacacgagccgccgccagaagaccaccgcgcgccccggcccttcttccacgcctccgtcttccgcgcctggccacggcccaccgccgtccgcccttcgacgcctgacgcgccccggcaccgcccaggcaaggcggccgccggtagctacggacagcccaccgcgtccgcggcaccgcccaccggcagcagctaccggcaaccgcgcccgcggctctgtacccagggagtagcctatcatggggaagaggccgaggacaactctgcggcgcacgccagcacggggccttccaaagtccaagcgggccgacgagctgccatcgatgcctgattctgacaacgacgaaattgatgcatttcacaagcagcgggacatgatccctttcgacgccaatgatgtaagggagtcggaggatgatgatgtggagcagcccgtgtttgacctcaagggtgtttctgatagcgaaagtgatgacagcaaaggagaattgtccggtgacatggctgaagctgattatgaaggatgggacaaagggtatatttcgaaattaaaaagagcacagagggctgtcaaacaaattgctggaggtgatgatagcatggatgagcaggaggatgaaacacaagaaaatgtttggggcagaggtaaaaatgcatactatgctcctggtgaacaatctggtgatgatgaggtggattacgaggaggcacaaaggatacaaaaaaataaggaaaaaaggctgtctatgaaggattttggattagaagatggtgaaagtgatgaagagggtaatgcaacaaaggtatccaaccatgaatccaaaatgaaagaagactttgctgtcttatcaggcgatgagaaaatggatgtgctatacagcttgttgtctgagttgaaggatgcccatgaagaacttagggccataggacagctaacaagtgaggtcacgtcttgtctaggcaaagataaaatgcaaccttttgaagtgaagaaagcttgtttgcttgctcattgtcaagctattaccttctatctccttatgaaatctgaggggttgtccgtacaggatcatcctgtaatttctcgcttgatagagaccaagaatatggtagagaagataaagcaaatcactttgaatccagtgagccaaaaagggtgcgctgatgaccatagtatgcattgtggcaccatccaaacagataagatagtctcattggacaaacaggagggcaaatttagcaatgtactagcactggataaagtgaaacaaggtgctgaagtctctgaatcaagaaagagtgagccttgtaataacgattatcatgaagttaatgaacagaagaacaaggatgaacgaatgggcttgcatagccttgaaatgttgaaggtaagagcaaaccttgaggaaaggttaaagaaaaaagggctctataatttgacacgctcgaagccagagaagtcgtcaaaaaccaggacaactagtgataatggcctgcagacattggatgattttgatgatgaagtgctgaagaataaccaaatgatgaagcctagcaagcttgttgcagcagctgctaaatcaaataaaagcatgtttgtttctggtgatgatgaccttccgaagagagataatatcggagaaagacggagaaaacatgagcttcgcgtcctatcaagagtaggggctaactcagcagaggatcatgagctgccagatggtgacgcttctgaagaggaggaccaccatgagttgccagaaggtggtgatgaatctgaagacgacatccatcgggatgtcaaaagaaagaggactgaaaagctatcaaccaagaatgctctgtactcgccaactccgggcgttgaacatctggaggaagaaacagaaggcgatggcaagaggacgatttcgtatcagatcttgaagaacagggggttgactcgttccaggaataagaagaagaagaacccgcggaagaactacagggataagcacaagaacaagcttgtcaagcggaaaggccaagtgcgtgatatcaagaagcagtctggtccgtatggaggtgaaacgtctggcatcaacccgaatgtcagccgcagtgttcggttcaagagttgagttgatgcaagtagtatatttaggttggacatggaaggagttgtttctggtcttaacttggcattttctttattttttgtttgcatgtcattcgaacgcataaactccagaatttgtcttacggtattagatgagtacaattttgcttgcgaaaaatatcattatcaccgttgcctgtgtgtgtgaaaactaggtggtataattatcaaggaaatttgtatattatttcgaaccatatatattagtaggggctgtttatttagataaatgtccttaccgtgagacattgctagtagcatgacagcatgcataacatggcagcctttcattcttgacaataaccagctgtggaactgatatgggtccctaggtaattctacacatatgcagcctgttcacttggctttaatccgaacccgcttagacctt

SEQ ID NO: 94125 - DNA, 942 bp, Zea Mays
ggatcagctcattccggaccttattccgggtgaaaccaatgcacctggtttagaatttggtacagcccattaaaagtgttcgttttggcccgaactggaattgaaactggcccggattaaaatttcccttcacgccacggcctggaaccaacccttgtgtcgtaccctccggatcgaagcctggacgacgcgactggcacggcggcggcgcacagccccgacgacgaccctccccgctgccttctccccgatctctacgacaccaattatagatggggaaggtgaacctcctccctcttgagatcctgtaccaactccaaaaattctacactcagatgagacaggcgaggttaaggttcgacgactcctcgagggacatgccaagaactatcaagttacattgttgtttattttccctgtcttattgggaagcaaagtattggaaaaaactgcatttatttgatgatccactagaagtttaggctatgtcccactcgagtctttatactgtggtgttgtttcttgttatgctatgttccctgcatgatttttgtttttggcatgtctacaactggttcagctgttcggctgctcattatggttgcagtcaaccataagattgttgtcttagcacctttgatatgtcttagcaaaaactgctagttcactctttgatatgtctagattgaaccagttcactctttaatatgtcttagcattgaacttgttttagatttaacaaatattcttgtcacggtgccagcagtatattaaatctgcattgtgcaatatattgtcaaacaagacttgggttgctagctttaactgcatggaatggaattagtccaggctgaaacgaacagactttagtggccaccaggtttcattccagagccggatctataacagaccaggtttcagtgaaccagccggatccactct

SEQ ID NO: 94126 - DNA, 2771 bp, Zea Mays
ggccgagtcggggcctcgatctgaccttctcttcaatcgcatccgcccgcgtcgtctcgtcacccccgttgtggtcgcctgggaagaggagggaggccagcttgccgctagggttagggtttcgggcgggagggacagaggcggggctgcagccatggcgctcaagttcctgaacaagaagggatggcacacggggtccctccgcaacatcgagcgggtatggaaggcggagcaggcggaggaggcggagcgccgcaagacggaggagctcaagaagcaggtcgcggccgagagggagaaggccgagttccgggccatgcaggagcgcgccggcctcaggccggcgcaggagaggctcgacttcctctacgagtcggggttggccgtcggcaagagctccgaagggttccaggcgctgcagcaatctgcaccgggggcagctgccgcgtccacttctgcacaggcgagtgcggctgattcttccaaggcagctacaccgggagctttatttgaggataaaccccaatctgcaaatgatacatggagaaaactccactctgatcctctactcctaataaggcagcgggagcaggatgcgatttcaaggattaaaaacaatccaatcaagatggccgagataaagaaatctgttgaagctgagaaaaagcaaaaagaagagaagaaagcgaagaaaaagcacaagaagcatcaccaccataagtcaaagagtaagaggcatcactcagatgagaattctgattcagatgaaataagtgatggcaaagatgagagaaggaagaggtctcattcttctcttcataagaaagaagagaacatgtccaggcataagaagcagcacagagaagattcatcagattcagacgatgaaccgcagagaagaaagcaggatgtatcagaaaatgatgaaccgaggagaagactacatgacgacaatgaaccgaggagaagatggcaggatgacgttgaaccgaggagaagactgcatgacgacgatgaaccgagaagatggcaggatgacgttgaaccgaggagaagaagacaggatgatggtgaatcaaggagaagatggcaggacgacgatgaactaaggggaagacggcaggttgatgagaaaccaagggaaagaagctacgttaatcgtccaagatatgaccgctctgacgctgatgataggaggagacaccattcacctcgagacactaagcccaaaagagtggatgatggccacaaaactggaaattccacttctgaacaccattcccgctctgaacaaggctctggcgagcagacaaggcaagagagcgaacatgacaggaatagtggtccttcattgaaccgacgacgcggtggtgtccaccatatgtcagaagaggagaggttagctcgtctgcaccagatgcaggctgacgctgaggtccacgaggagcagagatggaagaggctcaagaaagctgcagacgacgatgctaaagaggcaacaactgtgaatgcaaaccagttcaaagggaagaacttcttggaagatgaaaagaagagcatatttggaacagataagggtggcagtgccacgattgaagagagcatcaggcgccgcgctttctactcgcagggtgggcgtgatgccgagggcaatgccttcaggcggtgaatatattgttttgttgtttgctgccttgttggactcatcttgccgtcgtgttcgttttattattgtacgtgaaagttgagaactatgtacaacaatttctcaataacagcaattttatatgcaacttcaaatttttgatacagaatttggcctaaactgcaccgaagagtgattgcctcggatttgatcttgctgacgtttcttctgggttggtaatgcaaaaaccttgcttattagactgtctccagccgcgtcccctaaaggaatattctctgtcctttacagaacactctaaaagattctgtcctctatatattctccgtctccagcagcgtcctctaaattccgtcctctaaagctacagtgttaacagattcacattttccatttctttttcatttttctttgttttgttcgcatttcacgctgcataaatgatacgtaaaaattgtattcattaattttgaaattaataaattcgaattgtcaatattaattacattgcttgttttgttgttgtgtaattgttctcgataacgcgccacatagtataatatccttggcaaaatatgttttcaaatggataagcttgcaccgtaagccagtactcttcttcgagaagccatagcctagcttcccttgcacggcaaccgcatggcttgtatccgaagcgtacttcctctataaatatcgagtgagccttccatacttcactcaaccttgcctttacaaactccacaaccatgaatccctacttagaaaacaattttcttgtgcggttgatggaagaaatggaagaggaagaagaagagttgaagttggcgaggcacatggtcaataggaggcgacgtgcacacaatgagtgtcgtcatggtggttcgattccagggcgtgttaggattcatcgtgatcacatgagcggcgatgcaagaatccgagcggactactttggagcgaacccggtgtacacggatgctcaatttcgtaggaggttccgcatgcgtcgccatgtgtttgagcgccttgttgatgttgtgcaacaagtggatccatattttattcagcgtccaaactgtgcgggtgagattggtctttctgctct

SEQ ID NO: 94127 - DNA, 2256 bp, Zea Mays
accctaattaaaaaccaaaatgccatttttttaagcacggacctccaagcaacaagaccatacgatacaaatgactccactagacctgcaaatctcgagcatcatcagaacagtttgcagacagacaggcaggcagcggcagttaccaccgccacctccaccctgtgctccaccgtgtcgcttccctcccgttggccgtcatgggctcctgcctctcctccgaggcccccgccgccggcgatggcccagcggcgtggcggaagcggcgccacgggagccgggagggcgcggccgccggcgccggcgccgccggcggcggtgggaagaagctgcccggaggagcgggggagatgacggaggacgagctcgcgcgggtccccgggaggttgtgcggcaaaggcgccagcgcggtggcgtgcctccacacgcagcagggccggaagggcaccaaccaggacgccatggtcgtgtgggagagttttaattcaagcgacagcatcttctgtggtgtgtttgatggccatgggccatacggtcattttgttgcaaagaaagttagagattcacttcctgtcaagttgcgcacacaatggcaaactagtgctaatgggggctctagtcctcatcaaaatggaagcatcaactccgaagaaacagggtctattgttgacgatgaatggggtgatggtgatgacactgaaaagctccctgagatgtttcttccactgaagcaatcttacctaaaagctttcaaattgatggacaaggaactcaagctgcatcccacagttgactgtttctgcagtggatctacggcagtaacattggtgaaacagggattggaccttgtaatcggaaatcttggggactcaagagcaattatggggacaagagacgcctctaacaatctaactgctctgcaactcacagttgatttgaagcctaaccttcccagggaagctgcgaggatacaacaatgtaaaggacgggtctttgctcttcaggatgagccagaagttgccagggtatggttgccaaataatgactctcctggattggcaatggcaagagccttcggggacttctgccttaaagattatggtttaatatctgttccagagatatcatatcgccgccttaccgaaaaggatgaatttataatactagccaccgatggggtatgggatgttctctcaaataaggaggctgtcgacatagtagcatcagccccatctcgtgcgacagcagccagggcccttgttgactgtgctgtcaggtcatggaggttgaagttcccaacatccaagagcgatgactgtgctgttgtctgcttattcttgggtcacgagaagtcggccgactcggttcaagggagtgaacccaatgtggagacagcagaacccaccgtggaggtttccagttccacacaggattccagtgcaggggttgacgaagacattgcagatgctggcatgcatgtatctagtgcagtgcacatttccgaggccacgctgcagcactccaccacgttaagggaggtcgacgagattgtaccggtcgacgaacctacagcctcgaaggagcctggaaggtgcgggtctgctcgcagcctggcagattgcatatcgacaaacgaggaagaggaatggtccgcgctcgaaggcgtgacacgggtgaattccctcctgaacctccctagactactgtcgggcgacaagcgatcgaccagctggaggaagcggcggtgaccggtgaggaagctctcctacaattctttgccgagttcaggtgggggttcatgcagaggcgcggctcaacccagtactggcattttcagccaggcgcgtgcaaaatcctttagtctctgggaatttgttatagctgatttttaggcttccccagattgttttgccggcaggcgcgggcgtttcagattgcttcttcattcttgtgcctttgccgggaggtgttcccagaaccattcttgggcttctctgtgtccgtttgtgcataaggaagtttttgttctgtgagaagcttcttttgtaaaacatgcagtgcctcctgatgttggatgggatgggatgctcgcctgcctcccgaggctgtcttaaaacatgcagttctttttttttggttgtcctgtgaaatccagactattctcaaccctctgatttggctgccagtcttgattgttgcatcgccttcgaatgtaaaggattgtgtcacatgatcaaatggggtgtaaatttcaaa

SEQ ID NO: 94128 - DNA, 467 bp, Zea Mays
gcttaagagaccgttatgatatatatgagaatattaattcgtctttaggaaaagtctatatagagagagacgcgcactctcattctaccgagagacaaggctaaaataatgtattatacacattctaatcgtttacctgtttgtctgtttgatcagttgccgcgaactgttccctccgggcgcgggcgaaggcgcagatcagagcggccgcgagctgatcgagcgagaacgacctccgagctagctccgccacgtagtcacgtacgggaccgggggagcggtgggcggcgagttcgccgccgcatttaattacggaagactactgcatggaccggggggcggtgagcgttgccttttggtggcccgcgcgcgatgcatgagctcgctgcctcgctccttgttggttcctggttggacggcgaccacgagccccggccgggcgaaggatccgtccgcagcaggcgacc

SEQ ID NO: 94129 - DNA, 2550 bp, Zea Mays
ctcgtagaacattcgagaacccctcgttagccaacaataaattcccagcgccccgcatcccactcccgtcccacacagacacagcctcccaccacaaaccctcctccagtgctcttttcttctagccgccgccgcaaccgcttgctagcgctctgcgctctcatcctcgcgtccgtggaaggtcgtctcgacatggcctccgagacggagacgttcgccttccaggcggagatcaaccagctgctatcgctcatcatcaacaccttctactccaacaaggagatcttccttagggagctcatttcaaactcctccgatgccttggataagatcaggttcgagagtttgacggacaagagcaagctggatgcccagccggagctgttcatccacatcgtccctgacaaggccaacaatactctgacaatcattgacagtggcattggtatgaccaagtcagaccttgtgaacaaccttggtaccattgcacgatctggcacaaaagagttcatggaggcactggctgctggtgccgacgtgtccatgattggtcagtttggtgtcggtttctactcggcataccttgttgctgagagggttgtcgtgaccaccaagcacaacgatgatgagcagtatgtatgggagtctcaggccggtggctccttcactgtcacacgtgatacctctggggagcaacttggcaggggtacaaagatgaccctttacctcaaggatgatcagttagagtatcttgaggagcgccggctgaaggatctgatcaagaagcactcagagttcatcagctacccaatctctctctggatcgagaagaccactgagaaggaaatatctgatgatgaggacgaggaagataagaaggacgaggagggcaaggttgaggatgttgatgagaaggaagaaaaggaaaagaagaagaagaagatcaaggaggtttctcatgagtggcaattggttaacaagcagaagcctatctggatgagaaagcctgaggagattaccaaagaagagtatgctgctttctacaagagcttgaccaacgactgggaggagcatctcgccgttaagcacttctctgttgagggtcagcttgagttcaaggctgtcctgtttgtgccgaagagggccccctttgacctcttcgacaccaggaagaaactgaacaacatcaagctctatgtgcgccgtgtcttcatcatggacaactgtgaggagctgatcccagagtgactgagctttgtcaagggcattgttgactctgaggaccttcccctcaacatctcccgtgagaccctccagcagaacaagatcctcaaggtcatccggaagaacctggtgaagaagtgcattgagctgttctttgagattgctgagaacaaggaggactacaacaagttctatgaggccttctcgaagaacctgaagcttggcatccacgaggactccacgaacaggaacaagattgcggagctgctgaggtatcactccaccaagagcggagatgagctgacaagcctcaaggactatgtgactaggatgaaggagggccagaatgacatctactacatcactggcgagagcaagaaggccgtggagaactcccccttccttgagaagctgaagaagaagggctatgaagtcctgtacatggtggacgccatcgacgagtatgctattggccagctcaaggagttcgagggcaagaagctcgtctcggccaccaaggagggcctgaagctcgatgagagtgaggatgagaagaagcggaaggaggagcttaaggagaagttcgagggcctgtgcaaggtgatcaaggaggtgctgggcgacaaggtggagaaggttgtggtctctgaccgcgtggtggactccccctgctgcctggtgacgggcgagtacggctggacggccaacatggagaggatcatgaaggcacaggcgctcagggactcgagcatgtctgggtacatgtcctccaagaagaccatggagatcaacccggacaacgccatcatggaggagctgcgcaagcgcgcggaggccgacaagaacgacaagtctgtcaaggaccttgtcatgcttctgttcgagacggcgctgctcacctcgggcttcagccttgacgaccccaacaccttcggcggccgcatccaccgcatgctcaagctgggcctcagcatcgacgaggacgaggctccggaggccgacaccgacatgcctcctctggaggatgacgctggcgagagcaagatggaggaggtcgactagtctggctatcgtgtcttaattggtgtgtgcgtgttttttttacttttgctagcctgcaaacttcgtacgtttattattgtcggtataatagtgctccggctgcccatctctgcttgctcggtcagttttatatatgccagctgctcatcgcagcattctccctgtgcacaactccaaaatgcgggaagagatcaattattaaccgagtgaaaagtgtttatagaacatcgtcaagtctcttgtgcactttggcactttcagtca

SEQ ID NO: 94130 - DNA, 2344 bp, Zea Mays
cagcctcccaccacaaaccctcctccagtgctcttttcttctagccgccgccgcaaccgcttgtcgtctcgacatggcctccgagacggagacgttcgccttccaggcggagatcaaccagctgctatcgctcatcatcaacaccttctactccaacaaggagatcttccttagggagctcatttcaaactcctccgatgccttggataagatcaggttcgagagtttgacggacaagagcaagctggatgcccagccggagctgttcatccacatcgtccctgacaaggccaacaatactctgacaatcattgacagtggcattggtatgaccaagtcagaccttgtgaacaaccttggtaccattgcacgatctggcacaaaagagttcatggaggcactggctgctggtgccgacgtgtccatgattggtcagtttggtgtcggtttctactcggcataccttgttgctgagagggttgtcgtgaccaccaagcacaacgatgatgagcagtatgtatgggagtctcaggccggtggctccttcactgtcacacgtgatacctctggggagcaacttggcaggggtacaaagatgaccctttacctcaaggatgatcagttagagtatcttgaggagcgccggctgaaggatctgatcaagaagcactcagagttcatcagctacccaatctctctctggatcgagaagaccactgagaaggaaatatctgatgatgaggacgaggaagataagaaggacgaggagggcaaggttgaggatgttgatgagaaggaagaaaaggaaaagaagaagaagaagatcaaggaggtttctcatgagtggcaattggttaacaagcagaagcctatctggatgagaaagcctgaggagattaccaaagaagagtatgctgctttctacaagagcttgaccaacgactgggaggagcatctcgccgttaagcacttctctgttgagggtcagcttgagttcaaggctgtcctgtttgtgccgaagagggccccctttgacctcttcgacaccaggaagaaactgaacaacatcaagctctatgtgcgccgtgtcttcatcatggacaactgtgaggagctgatcccagagtgactgagctttgtcaagggcattgttgactctgaggaccttcccctcaacatctcccgtgagaccctccagcagaacaagatcctcaaggtcatccggaagaacctggtgaagaagtgcattgagctgttctttgagattgctgagaacaaggaggactacaacaagttctatgaggccttctcgaagaacctgaagcttggcatccacgaggactccacgaacaggaacaagattgcggagctgctgaggtatcactccaccaagagcggagatgagctgacaagcctcaaggactatgtgactaggatgaaggagggccagaatgacatctactacatcactggcgagagcaagaaggccgtggagaactcccccttccttgagaagctgaagaagaagggctatgaagtcctgtacatggtggacgccatcgacgagtatgctattggccagctcaaggagttcgagggcaagaagctcgtctcggccaccaaggagggcctgaagctcgatgagagtgaggatgagaagaagcggaaggaggagcttaaggagaagttcgagggcctgtgcaaggtgatcaaggaggtgctgggcgacaaggtggagaaggttgtggtctctgaccgcgtggtggactccccctgctgcctggtgacgggcgagtacggctggacggccaacatggagaggatcatgaaggcacaggcgctcagggactcgagcatgtctgggtacatgtcctccaagaagaccatggagatcaacccggacaacgccatcatggaggagctgcgcaagcgcgcggaggccgacaagaacgacaagtctgtcaaggaccttgtcatgcttctgttcgagacggcgctgctcacctcgggcttcagccttgacgaccccaacaccttcggcggccgcatccaccgcatgctcaagctgggcctcagcatcgacgaggacgaggctccggaggccgacaccgacatgcctcctctggaggatgacgctggcgagagcaagatggaggaggtcgactagtctggctatcgtgtcttaattggtgtgtgcgtgttttttttacttttgctagcctgcaaacttcgtacgtttattattgtcggtataatagtgctccggctgcccatctctgcttgctcggtcagttttatatatgccagctgctcatcgcagcattctccctgtgcacaactccaa

SEQ ID NO: 94131 - DNA, 1452 bp, Zea Mays
ctgcaaaaaaaatcccagcagtcttatcttcctagtcgctcttctatccccagccgatgagctcgatcctccctcatctccctcctctcggcgccctgctcggccctatcatattccctggcgcccgcgcgtgaaatttctcgcccagctcctttgttctccctgctcgttctccagtggagtcttctctgcgcggcgagctctctgccgcggcttcctttctccctcggctcgccccgatggcgctccaccgagcttctccatcttcctcggtcgcctctctctgcgcgccggctgccagctcggtgttccagccccacgcgcgctgccggagctcgctcctgcgcatccatggtgcgcacccctctccttcctccgtgctccattgcgtcgagctcctcccagccgagttcctccccggccccttgttttccccatggccgaagcctcttccagctccagcgtcggctgctcctccctggccaaaccgcgcccctgtagccgcggcactccctctggtcgcagggacgcacatgccccatccccattggcgctcggtcgcccagctccctgttcctcccactcgcccaactcggatctcgatttcctgctcggctcgtccttggcgctcggctccctgtttcagtctgtttttgtcatcgcgtcgtggtgttcgccggtagccgccccgtcgtgcttgtctccggtgctcgcttcggtcgcagacgctatcgagcccgtcgttctccctgtctagtgctcgcgtggttttctggtcgccagcgcgccctctcggctcgctcggccttaatccccatcgcgtcgtcgacctggccgattgtcgtcgttaatatggagagattccaagaattgcggatggaagagaaagtaaagctccattctatactcatcagttgtctgactgaagacttcaatcgaagactaccgccgttctcgcaaatattgaatgaagttgataacggtacgttgattaaccacgagatgcggagaacttaagtcaagtcgaccccaagcgcggactacttcgcagaataatgctgatggatgaacctgcctgatcaagtgctaggacaaggatgatcgccaaatggacgtctaacaaacactaacctagtgtttattccaggcaagccccggtgtattttaagtctagtgaaatgtgcattaggtttataggagttgcttgaaaccctttgatgcattgccttccttgatatccatacctgttatagatacttctttggaagtatcaaaatttgatttacaaaaatgcttagccctgcttagatcttgtggatagaggttgtcttttgcgttaaggccttgctcaggggttatcctgaggaaagatgacttctacctgcaaggttatattttcattgggagcatggtgggatcttactgcaaagttccctatgatgctcttttcat

SEQ ID NO: 94132 - DNA, 1269 bp, Zea Mays
cgggtagtaaaagatctatttttcttttgactttgacatagagtttgatcctcaattatttctcgcgctatcttcttacgaagttttgttagggcatctataacagcctctggtttaggcgggcaacccggcaggtagatctcgaacaaattgacttttattccttattcagatctaattctattgttgagacggttgaaaatcgtgtttacttgttccggaatcctttatctttgatttgtgaaatccttgggtttagacattacttcgggaactcctattcttttttctttcaaaagagtagcaacataccctttcttttttcttatttccttcgataaagcatttcactcttctatagaaatcaaatatgaacaattgattcagatagacttttcatcaaaaaagtttttacaatcttccaaaattagactttttcttattttaaccttttgatttctatattaaggatagactgacaaagttggcctaatttattagttttcactaaccctagattctttcccttgatcaaaaagaaattctgtcctctcgagctccatcgtgtactatttactttacttacaaacaacccagcgaaaattcggttcgggacgaatagaacagactatgtcgagccaagagcattttcattactatggaaaatgatggataagcaaatccacaatcgatcatgtccttcaagtcgcacgttgctttctaccacatcgttttaaacgaagttttaccataacattcctctaatttcattgcaaaatggtatcgagaattgatccaatatggatggaatcatgaatagtcattgcttttgtatactaattcaaacctgctatctatggagaaaattggataaaagaaataagtatttatcggggaacactctgcaaagatacaatttatttaaacccatattctatcatatgaatgaaacatagttcgaaaaagaggaataaaatagtttacttaagacttatttattattattattgaatttccattttcaacagagaactcaagatgattaatcctgaaatgagaaggatccactctttcccaacaaataaactattaacctcaaaaaatgtggaattaatttaatgaattaatctatttttctgtaacaaaaacaattaactatataaacaaataagttatgccaatgaaaagattggtcgtttttgagtagttctaaaattctcatacttcttcgactcgaataacaaaagaaagaactcaaaataaaaaaaa

SEQ ID NO: 94133 - DNA, 450 bp, Zea Mays
attgcgaacgccaggctgagcgtcacggccagtggcaggccctcggggacggccacgacgacgatcgtgacggcgatggcgaagacctccagcagctccagcgcgtcgtcgccggtccagctgaagtaggagccgtcggcgagcttgcgccagaacaggccctgcgtgagcaccgcgaacgtgaccacggcgaaggcgaggccgatcttgccgatgatggtggccacgccgttgagcttgacctgcagcggcgtctcgtcgtcgccgccctcgctgagcgtggccatgagcttgccccactgcgtccgcatgccgacggtggtgaccagcatcttgcacgcgccgtcctgcaccttggtccccgacagcaggaacgggttctcggcgctcaccgcgacgggttcgctctctccggtgaggctggactcgttgatgagcagggagaagccc

SEQ ID NO: 94134 - DNA, 1625 bp, Zea Mays
agaaaatcctggctcgtgcgatgcgacctcttggctctcgctaggttgtatgtgtgtgtgtgtttaaaagcctaatctaccgcaccagcggcctctagtgtctcctcctcctctatccctcgcaaagcaaacacacacgcgctttctcggtgccaccaccagcagcaccccgtctccgtcccggcccccgacgcccggcgggacatgaagaaagacgaggagggcgccaatgccaccgtcgccggcgacggcgacgcacgacgacgttccgcgctccccgtccgcctgctgccgctccggtgacggtgacccctacctagctctctccttcgtcctcgccttctgagtcgccgtccttcttgcctctatggagcgagctcgccgtcgccgttaccgtcgtcgtggtgcagaccagcggctcagcggattgaggggagccctggcggcggagaaggcgtcgtacgtgtcctggtgatgggtgcggatttggcatgcgggaaagccaggcatcgtttttttttaatttcccccctcggtggtgattgttgctagctgttgctgcttttgttgtcagttttagcccccttttttcaccttctctcttctttttgaccccccctcccaactactttgtagttttgccaatcacggttctactaagaacatatcggttatcggagagcgaaatgttcgtgcggattctgctctttatctctctccctctctctatgtataaagctggctaccatgctttggcaacacgcgcgacttaactgcagctgtgcaatgctacagcctacagcagctcaattaactaactagtccaatacgaaataggagtacctttctctcatcattcttcttttttacatgatgcaagcaaacaatgtccttcggtgatgattattaccttctgaaaccatgaatcctgcctgccttttgtttgtttgtgtttcaactgtgtgtctaatagtgcaatgcagttactgtttactgcagctactgtgcatgtaaagcgtggcataataatgtaatccccggtagattttcagcgctaagcatttctcgtgcagataagatagagcagcagcagcccgcagctgatccttaccgctgcggctgtgtatcaattaggcctcgccggctgcactagccatgatgaatcccatggagaagagaggagaagagaagagaagctagccacaaaagggatgaggtgacagatgagggggagagccagacagacaacctaactggcgaaccctatgcagtcagatgcccctgcctctgaccaggcaaaaacttcagcggtccccaacgatgcagcaaaatggcattcagaggcagtagtgatcggcgaaaccagacgggccctctgcgtgctgtattttgtgttgcacacaggatgggcatagcttggttctatgattgagctgtcattggtgatatgggaagcagcgggttctaagaactactcgtgtactgcctgatattattgttgtttgttctgggatgtgctgcgggcgtgcctgataaatgggcgatggcatgcatacagttgttctcaatcttgtgaccttgttaagaaccacatgataatgcgcatgtatgtatgtactccaagc

SEQ ID NO: 94135 - DNA, 504 bp, Zea Mays
atggccgccgtcgaggtccaggtcccgactgccgctcccgtcgaggaggctgcccagctggccgccgcctccgccgtcgagaccccgaacgaggagaccgctgctccggcggtggagaccgaggtcgtcgtcgctaaggagccggagccggtggaggccgagactgagactgagaccaaggaggccgaggccgttgctgagccgaccgaggcagagcccaaggaagcagagccggaggccgccgcgccggcagcagagacggaggtcaaggaagcagagacggaggccgccgcgccggcagcagagacggaggctgctgctgccccggtcgaggctgctgagccggagatagccgccgagaccaaagaggtggcggctgtggaggctaacgaggaggaggaggaggcagcgcctgctgttgctgccactcctgaggtcgcagcgaccgaggaggaagcggcggcccctgctcccgaggccgccgtcgagaagtccgtcgagtga

SEQ ID NO: 94136 - DNA, 740 bp, Zea Mays
atggcggcggcctcccgtcgagcaaccatggtggcagcggcctcccgtcgagcaaccatggcggcgacggcggtaaccctcctccgccttcctctcgcccgactctcctaccacctccgctccgtagaggaggaatctgcggccaaggcggaggcgcctaggtcgttcgtgctcccacagttgccgtggccgaagctgagcgtgaaggaagatgtgtgcccgcatggaagcacaattgttggtattggttcaccggatcctcctgcattcgtgtatgacgatgaagactacaatgatgtttttgtgtcagaggcttgcttgctcactcgcgacgagaacgagtggtacagggaaccaatctcgaccaatgccacgtctggcaaagaagatacagaatttgatcaacgcctcgacatggtaggaaagaacactacggaacttggagctgttaaacaatgtatggagtttgggagccttaaaacaagaggatacaagtggcgacatcacaacccctacaagcttgtgccttaaaacaagaggatacaagaagttggagtgcttttgtgaaggcttttgcgaatcacttgaagcgttagtacttttgtgaatcttgaagcgttagtacttttgtgaatgattttgtaaagtgtttgcaaatatgtgcaaaacataataacatgtgtaggttttgtgaatgattttgttgtggtgcttgttgatggtttatgtgatgtggatct

SEQ ID NO: 94137 - DNA, 309 bp, Zea Mays
atggccatgtgtgaggaggtgccccgactgcacctagatcccacctctgactgcaccatgaagctgcgcggggtcgtcggggagttcctagagaaggccgggtcagggtcgccgcgtttgtttttgccgttgctgtgctttggcgggcacctggcatcactgtggctgatgagcgtcgtggccgttgtcaccatgtcgcgttgtcgggagtccggaaaagctcgcgggtcttgtaccggtgaatcttctgctggtctgcgcagcgcgccgccatgggagctgtgctccgtcgagtttgggcagcgatag

SEQ ID NO: 94138 - DNA, 2529 bp, Zea Mays
atgtgctccactgcagtgctgctagttcgcacaggcgttgtgcttgtgtgtttggccgccttggcgcgagcgccgagcaaggtccatgctgccgccggcaccggggatgggctccttgctatccctaccaacgcctccctgtcgcactgcccctcttggtgcggggatgtccaaatctcctacccgttcgggatagggccgggctgcttccgtcaaggcttcgagctcacctgcgatcacacagctccttctcccaggctcttcttcgtgtcggggaacagctcgatccaggtgacttctgtacatatcggcatcagtagggttcgggtttcagctgttgggttcaacgtcaccatgagcgcaggcgtggacacctacacccagtcctggaaggcccctccaggtgtcatttcttatggaagtaattatctgttcactgttggatgtggtgtctacgtctacgtgttcggtgataatatgacagatatcattggttattgcacgagtatttgcacagataacagagagatcatggagagggcaaacacgccttatagtgcctgtacagggttaggctgctgcatgattccaatacgtggcggccaaggcatcactctcaaactaggtcgcctcaatagtaccattccacacttcggtgaagcgctctcccgtgtcaagattatcgtttcacaatactatgaattcgttgctgatgatgtttacacaagttgggtgaatacaagcaacgttgatgacatgctattttacattgcaatcatggaccaaccgagctgcgcgagtgcccagtcccaagagaacaagaatacctacgcatgcagtagtgaaagcatctgcgacgacgatctaccaccagtagtatctcaaggaggctacaattgcttctgccctggtcgtcaaatagagggcgtcaacccctatattgaagatggctgcatagcatattataacccagaggcaccgagtattaggaactgtatgagattatgtggaaacataagcgttccatttccttttgggattgaagaaggctgctacgcaaatgataacctacgactcaactgcacaagcaacggcactcttattcttgatcgagggtacgcacaatatcatgtgaccaatttgtcacttgatgatgggcttttgatggttacaaacatgctgaatgccacaagcttcaacaatatggagagggtagtcatcactaactatgacggttactatcacaacaacttccaaccaacttacatggcggttgtggatgggattgtaattgggcttgtttgtggtcttggatccataagttttgcacttggtgcaattgtactcaccggtaagtggaaaaaaggtatccaaaggagaattcgaagagagtacttcaagaaaaatcaaggtctactcttggagcaactaatatcaaatgaaaatgccacaaacaaaacaaagatattcactttggatgaactagaggaagcaaccaacaagtttgatgctactcgtgttctaggtcatggtgggcatggcactgtttacaaagggattttgtgtgatcagcgtgtcgtggctataaaaaaatctaaaatagtggagcaaatagagatagatcagttcatcaatgaggttgctattttatctcaaatcattcaccgcaatgtggtgaaactttttggttgttgcctagaagatgaggtacccttgctagtctatgagttcatatcgaatggcactttgtatgacattcttcatgaaaatattgcaacaaaatgcttgttgtcatgggatgatcgaattaggattgcaacggaagcatcaggagcacttgcttatttacactcagctgctgcaataccaattttccatagagatgtgaagtcttctaatatactcttggacgacaacttcactgtaaaggtttcagattttggtgcttcaagatctctatcccttgatgaaacacatgtggtgacaattgtccaaggaacattcggttatttagatccagagtattatcatactggttctctaactgagaagagtgatgtgtatagttttggagtgatacttgtggaacttttgacaagaaagaaaccaatttttatcaatgaatcgggtgccaaacaaaacttatctcattacttcattgaaggactacaggaagggactctcatggaaataatagattctcaagttgtggaagaggcagaccaagaagagattaatgaaatctcctcacttatagaagcgtgcttaagatccaaaggaggacatagaccaagcatgaaagaagtagatatgagattgcaatgtctaagaacaaagaggctacggaataaaacacatcttttgattgaaaagggtggagaaatggaacctttgttatgcgcagaagctcagcacccacatgaacgtatcaatccaatttataatgaggaacgtttaacaattccaatgatgtctgggtgttacagtttggagcaagaacttgcggcagcatctagtatgattcgctaa

SEQ ID NO: 94139 - DNA, 104 bp, Zea Mays
ctgtccagcgcacatggcaaggggtacgagaaagcgcatcattcaaagccaggaagagtatttggcagaggagcctattggggaaacaagtcatcgaccacgag

SEQ ID NO: 94140 - DNA, 1585 bp, Zea Mays
aatatgtgtcatgctcgagcaagaaatatcatagagagggcttttggaaggcttaaagggcgatgggcgattcttagatccccttcatattttcctataaagacgcaatgtcgtataataatggcatgtgcccttttgcacaatctaattttgcaaaaaatgtctagagaccctatggacagtgaggaacaattggtggtagattctaaaatgcccgagggagaagttggagaactagaattcattatgggtttctccacaacaaatgcgtggagtacttttcgagacactcttgcacaggggatgtataatgcttatagggcttctcattgattatttttcatgaatggacatttcagagggctctattgctgttcgtggtagggggaaaacaaaaggaagtggatccctgttgaagatgatgaactgatcaaagcattggttgatgtttctttggattcgaggtggaggagtgatgggagtttcaagaatggttacacttcagtacttgaagctcgcctcgctgaaaagctacctgattcaagaatttctgcaactcctcatatcgattcaagattaagatacttcaagacaaagtattctgctttggagcagatgttgaacaagagtgggttcacatgggatccgaccaagaatatgattcagtgcgagaaacaacaatatgagacacattgcaagaataatctagatgtaaaagggttgtatggagtctcctttccttactatgatgaactctcaatggtatattccaaggacatggctacaggtgaaggtgcggaagacatgacagatgttgttaataacttggaagaagagttagtttgtgtaaatgctaataatgaagaggttggagaggatatgacatctgtagagacaccgaggcgttctgttgactcaacatcatctagctccaagaaacggaagaaagagtggaaaggaatgaagaccacatcaattgacccgcttcttgacatgttcaatgaagtgagtggtgatctaaaggttgccaccatgtcaattggaaaaatggcgcaagctatggatcgtgaggcatccaaccaagagaaggcaagggatgaggatccacaacaaaagctaagagagaaggtgatcaatgaggcccgaagacttgaatttactggctcagaagttatcaaagcagctactgtgtttgtcaggatgccagatcaaatggggatgttgtttgcacttccagaaccactgaggagggaatacattgtcgacatgctacgtgatgaaacagcaaggagagagagagagagaggtcaaagtgaaggtgctagtcttgctgttgaatgatggagctttggaagttgctgttggtttagttggtcttaaactttttagctttagtgttcttcatatgttgctattgaatgatggtaaaaactgaaactttatgatgttgaatgttgttgaatcttcacgaatggtattgaatgtggcattgtatctgtcggcaactttcaatgtggtttgttgaatgttagcactcaatgtggtaaaaactgatttttatgagttttgaatgttgttgaatgtt

SEQ ID NO: 94141 - DNA, 1616 bp, Zea Mays
aaagcaatgcaaaataatgctacatatgcgtgcgtaagtgacaacagtatatgcaaagatgtcatgcgagggaatatacgtgacgggtaccgctgcaagtgttccgatggcttccaaggaaacccataccttcaaaataattgtacagatattaatgagtgctttattccaaataaatgcaatggaatatgccacaattttgatggaggcttcaattgtacaagttgccctcatgggaaagagtatgatccaaaaaatcaaaaatgtgtcatgtcagctaagcagcgtattctaatttttggtgagtcatgactttatgcaacaaattaaaagacatgaaatattcatggtctcatttaatggatgtagggattgtaattgggcttgtttgtggtcttggatccataagttttgcacttggtgcaattgtactcaccggtaagtggaaaaaaggtatccaaaggagaattcgaagagagtacttcaagaaaaatcaaggtctactcttggagcaactaatatcgaatgaaaatgctacaaacaaaacaaagatattcactttggatgaattagaggaagcaaccaacaagtttgatgctactcgtgttctaggtcatggtgggcatggcactgtttacaaagggattttggctgatcagcgtgtcgtggctataaaaaaatctaaaatagtggagcaaatagagatagatcagttcatcaatgaggttgctattttatctcaaatcattcaccgcaatgtggtgaagctttttggttgttgcctagaagatgaggtacccttgctagtctatgagttcatatcaaatggcactttgtatgacattcttcatgaaaatattgcaacaaaatgcttgttctcatgggatgatcgaattaggattgcaacggaagcatcaggagcacttgcttatctacactcagctgctgcaataccaattttccatagagatgtgaagtcttctaatatactcttggacgacaacttcactgtaaaggtttcagattttggtgcttcaagatctctatcccttgatgaaacacatgtggtgacaattgtccaaggaacatttggttatttagatccagagtactattatactggttctctaactgagaagagtgatgtgtatagttttggagtgatacttgtggaacttttgacaagaaagaaaccaatttttatcaatgaatcgagtgccaaacaaaacttatctcattacttcattgaaggactacaggaaggggctctcatggaaataatagattctcaagttgtggaagaggcagaccaagaagagattaatgatatctcctcacttatagaaacgtgcttaagatccaaaggagggcatagaccaagcatgaaagaagtagatatgagattgcaatgtctaagaacaaagaggctacggaataaaacacatcttttgattgaaaagggtggagaaatggaacctttgttatgcgtagaagctcagcacccacatgaacgtatcaatccaatttataatgaggaacatttaacaattccaatgatgtctgggtgctacagtttggagcaagaacttgcggcagcatccagtatggttcgctaa

SEQ ID NO: 94142 - DNA, 1260 bp, Zea Mays
atcttttattgggaagctgaagcggcaggtcatggtaaagtcaaagaagtagcgggcacccgacacacgtacgcccaagatttgaagtagcggtggacaccggacacgtgaatggtgaggattttttgaacgacgtggacacaatgattggcgaggaagccgtatcggcttaataagaagaaataccaaaagtgaacaaaaaatattgatgcttgtcatggagtcaccgtttggtcctaggagccttggataaaaatatcaagcaattagacaaaagtttacatgggattaaacaatagtatatgtacacgtttggccaaaagcaaaaaaaaagagagataaagactggataaatggggtcgaaccctgcacctcgagcaccaccaaacgagggtacagaaacatgctacatgacagtattgtacaagcaaacaaacgatcgtatttttttaggttcggcatgtctgttcagttcagacttcagaccttccctgatacagcttctagtctccaccgcaacttctgcagcacattacaacacatgttccctgcaggctgcagcacatgttccctgcaaattctgttgagtcgcaaaggtcagccttgagggatagtggagtcgcacacagaggggaggaggaggttgctgaaattgctgatgtccgcgctcgatggatacggacagggcacggagccacggacaatgcgctgttcaatagaataggagcgtgcggcgcaaggagaggagctcgacggagattgagacggagccagaggaagcagcagatcaatgcacgtgacataggtctcgtcgggctcagcgcgacgcagatctgcggcagggagcagacccacgccagaggccgcaagcccacgctggaggacacgtcaggggcgccgactccggtggagagcaggcccctgccggaggccgcaagcacgcgccgttggagctcgacgggcgtgtactcgacggggcacgctgcacagagatctccggggcacggagcagggagccagcttgccggagtttggacctgggagatctcgacggggatggagatgatagggatggagatgcggcgggacctggtggtggacgtgctcggcgggcgtgaaggaccaatgaaaaatgtcgcgggagaggcgctaggagctggaggcgacgggaagagatgtcgaagagccggcggcgggcacctggcggctgtcctcaagcacgtctggatggatcgggtctgttgtggtccccacctgtaa

SEQ ID NO: 94143 - DNA, 573 bp, Zea Mays
cacgaatgaacagttgtggaactcatcccggccaacggcgtagaagcaatgacggcgacacgatttggaggaagtgacggcggcgacacaaggccccttccactgatgtatgccctcttcgttggcgatcttctctcgtttttcttgtgcagaactgcatcggtgcaattgatggcactcatgtgcccattacaatttcacctgacaaagctgctccttttagaaacaggaagggaactctcaatcaagaagtgcatatccattattggtacaatggaagttacaaaggaggaaaaagcgaaagcctacaatgtcttcaaggaccttgacaataggcaaattttcttgagtgcatgcgatgatgatgccgagtctgcactaatttggctgagaaacgagatggcttagctggtggagtcgtctgaattgcttgttggatatccaatatgttatgttgttcaaatgaaaaattactcatctccctttggtttgtttttaatctaaatgcacacactctattgtaatgtaataatagacaaatgagcgaccaacttctgattttgatgcttcaaa

SEQ ID NO: 94144 - DNA, 927 bp, Zea Mays
atgggggtttcgccacatgatatcattgtcgagccacatcacctgaagcaacaccttcgacttcacgttgcaaagccccaccttcacacgcataccagacgccgagaagcgaaaacaacaatcgagggtgatgtcgtggccgagaagaactttaataacgacaccttcagtaagcgagtgatgtctaggacactaccgtcgcttgtccaagatggaccgaactttcatcgaaagaagacagtgttgaagaatgcgacgccctcaacaggagaagcggcgtccacaagcatcaccgtcgccgagactttcgcccaagaaatccccagcacatcgtcatgccaagacctagggacaaagcatgcagctttcgctgtcatcctaacatctcgcacaaaccctttagaggggcatcgacacgccggctgccgcagcagccgcaaagctgcgatgatcaccatcctctctggctgggcacacagattgggcacacagaaccgggcaacacctggccacgtgcgccacactgtcgcgcgcgcgccagagccgatgccgactgtcggccaccgaagccaaccagcaccaccaccctgcgccaggccctgccgctgccggccaacgccaccccggcgctgtcgtatgcaaccaaacgagaggacctatcgccgccattttggccggttgcgcagccctgccgacacaccccgccagaccactggacgcgtcctctccgcccgcgcccctccccgagcgtcgacgtccaagccctgcacgaggtctgccaaaaccggccaaccacgagcaccgtcgaggcatcgacaccgagggccatctccaaccatccactcccatctccggcagccatgtgcctgcactgaactcctctccgccctcgacagccgcgtcggtgtcgagccccttcccggctga

SEQ ID NO: 94145 - DNA, 2450 bp, Zea Mays
atggctttgctcaaaaagacacatccttccattactctccccatatttcttctccatttctgcgcaattacatttggtgcgactgatactatctccaggacccaacctctatcaggcgatataactattgtgtcaaaagaagggaattttgagcttggattcttctccccaggtaataatgggaacttttatgttggtatctggttcaggactatttcaaagaggactgttatttgggtggccaatcgggatatacctgtttcaaatgcttcatctccagaacttgcaataactatggatggaaatttagtactcaactctctaggagcacccatatggtcatcgaatagcacaaggaagtcaagtagatctagcactgcagttctccttgatagtggaaaccttatcctaagagatcaatacaactcttctgatattttctggcaaagctttgatcatccaacagacacggtagtgagcgggcagtggtttggcatagacaagatcacgtatgaatatcaggacagtgtttcttggaagaaccaagaagatcctgcaccaggtcctttctcctatcacgcagatcttgttacgatgagccaatatgtgtcaatatggaatcactcggaagtttactggcaatctgggaactggacaggcaaagcattcacgtccatccctggaatgccactaaagagtgactacatatatgacttcgttaacaacagtcgcgagcttaagtttcggtggactacgaaggatgtgtcagtaatcacaagagtaattctaagcaataatggccaactacaacgtctcacatggtccaatgattcggaggaatggataacagggtggtattttcctgcagctctatgtgacgtatattctgtatgcgggccttttggagtctgcaggacaggttctgatgagcaatgcttctgcttgccaggtttcagaccagcttcctcaagaagttggcgtcttggagcatggagtcaaggatgtgttaggcaaacagatatccaatgtgctgagtcaaatatatcaagtgccataaaggagagtgatgcgtttctcaagatcactaacatcaagttttcacaaaacccagtaaaactgaaagtccaaagcatggaggggtgcagatctatatgcttgagtaattgctcttgcactgcatatgcacacaagcaggattgcaatatctggaatagtgaactctgggatcttaaacaactacctaatggtaatactgatggttcagatatgtatatacgtcttgcagcatctgatcatgtagttcaagatagcgaaaaaaaggcacaccatctgaggctaattgtgctatttgcagtgctgggtagtatttttatggcactatgtgctcttagcataacagttaagatgtttcaaaggacttcatctagaaaggcattctcagataattactctctcgtcgtctatgattactcgtttttgcggcactgcacaaagaacttttcagatagagtggggcaaggtagctttggttcagtgttcaaaggattgctcccagactccaaaccgatagctgtcaagaagcttcaaggcatgaaacaaggagagaagcaatttcacaccgaggtgagggctttagggaaaattcaccataacaatctagtccacctcattgggttctgcttgagaggggctgaaaggatgttggtgtatgactttatggtgaatggatctttagatgctcatctcttcaaggatgaaaagatattggattggaacaccagatttttaattattctaggtgttgcaaagggattacagtatctccatgatgaatgtcaggagtgcatcatacattgtgatataaagcctgaaaacgtacttcttgatgtaaacttcagtccgaaactggctgactttggtctggcgaagcttatggaaagacattttagcagggccttgacaactatgagaggaacagcagggtatcttgcaccagagtggattggaggtctgcccataacaccaaaagcagatgtgtacagctatggaatgatgctatttgagatcatttcgggcagaaggaattcagaattgatggagagcggagccataaggtactttccagtgtgggccgcaataaggataagtgaaggtgacatttctgaaattttggatcccagactaagtgccgtgaattttcaagagctagagagagcatgcaaggttgcatgctggtgcattcaggacaatgaggctcacaggccaaccatgcgacagatagttcaaatcctgcaggacattcaagatgtcagcgcggccccagtaccggtatttttaaaacaactagtggatggagaatacattagctcataaccctgcaaattatagcaatagcattcatccagaactacattgtgatttttgaaagcacaagctgagtcgaaatagag

SEQ ID NO: 94146 - DNA, 111 bp, Zea Mays
aaatatgatgagtctgtagctgattataattcagttcctgccgcttcacagtatgggtttaagcagttgttactccaattcttgtatgggaacaagtccatcaaagtttga

SEQ ID NO: 94147 - DNA, 954 bp, Zea Mays
atggagtatgccacaattttgatggaggcttcaattgtacaagttgccctcatgggaaagaggattgtaattgggcttgtttgtggtcttggatccataagttttgcacttggtgcaattgtactcaccggtaagtggaaaaaaggtatccaaaggagaattcgaagagagtacttcaagaaaaatcaaggtctactcttggagcaactaatatcaaatgaaaatgctacaaacaaaacaaagatattcactttggatgaactagaggaagcaaccaacaagtttgatgctactcgtgttctaggtcatggtgggcatggcactgtttacaaagggattttgtctgatcagcgtgtcgtggctataaaaaaatctaaaatagtggagcaaatagagatagatcagttcatcgatgaggttgctattttatctcaaatcattcaccgcaatgtggtgaagctttttggttgttgcctagaagatgaggtacccttgctagtctatgagttcatatcgaatggcactttgtatgacattcttcatgaaaatattgcaacaaaatgcttgttgtcatgggatgatcgaattaggattgcaacagaagcatcaggagcacttgcttatctacactcagctgctgcaataccaattttccatagagatgtgaagtcttctaatatactcttggacgacaacttcactgtaaaggtttcagattttggtgcttcaagatctctatcccttgatgaaacacatgtggtgacaattgtccaaggaacattcggttatttagatccagagtattattatactggttctctaactgagaagagtgatgtgtatagttttggagtgatacttgtggaacttttgacaagaaagaaaccaatttttatcaatgaatcgggtgccaaacaaaacttatctcattactttattgaaggactacagtaa

SEQ ID NO: 94148 - DNA, 101 bp, Zea Mays
caaagaactcgaatagaggcagtgcttaatgaagaacgactcatcgcttgggtctatagatcgccttctggggctcttgtacttgtggtacctgaacaaag

SEQ ID NO: 94149 - DNA, 1630 bp, Zea Mays
gcagcgatgtgctccactgcagtgctgctagttcgcacatgcgttgtgcttgtgtgtttggccgccttggcgcgagcgccggccaaggtccatgctgccgccggcaccggggatgggctccttgctatccctaccaacgcctccctgtcgcactgcccctctcgctgcggggatgtccaaatctcgtacccgttcgggatagggccgggctgcttccggcaaggcttcgagctcagctgcgatcgcacaactccttctcccaggctcttcttcgtgtcggggaacagctcgatccaggtgacttcactatatgtccgcaacagtgtggtttgggtttcagctgttgggttcaacgtcaccatgagcgcaggcgtggacacctacaccaagtcttgggaggcccctactgccacgggtgtttgtttttatccagattataataatctgtacactgttggatgtggtgtctacgtctatgtgttcggtgataatatgacagatatcattggttcttgcacaagtatttgcacagataacagagagatcatggagagcgcaaacactggttctggtgcctgtgaagggttaggctgctgcagcattccaatacgtggcggccaaggcttcactctcaaactaggtcgcctcaatagtaccattccacagttcggtgaagcgctctccaatgtcaagattatcttttcgcaaaactatgacttcgttacagatgatgtttacgcaagttgggtggtgaatacaagcaatgttcacgccatgctacttaacattgcaatcacggatcaaccaagctgcgcgagtgcccagtcccaagagaacaaggatacctacgcatgcagtagtgaaagcatctgctacgactatctaccaccatcagtatctcaaagaggctacacttgcttctgccctggtcaaatagagggcaacccctatattgaagatggctgcataggttggtgcctctctgctgcttcctttttgctcgtttttccatgctttggatcaatcataactcctctctttgtctaccatatatgaagcatattacaacccagaggcgcccaataggaactgtatgagattatgtggaaacataagcgttccatttccttttgggattcaagaaggctgttacgcaaatgataacctacgactcgactgcacaagtaacgacactcttattcttgatcgagggtacgcacagtatcgcgtgaccaatttgtcacttgatgatgggcttctgatggttacaaacatgttgaatgacacaagctccaacaatgtggggaggataatcatcactagtaacaatgacaaataccaggaggttatggatggtaattatgatttctctcaggaggacgtggcaataaaatgggttatatcaaacataacttgtcagaaagcaatgcaaaataatgctacatatgcgtgcgtaagtgacaacagtatatgcaaagatgtcatgcgaggaaatatacgtgacgggtaccgctgcaagtgttccgatggcttccaaggaaacccataccttcataataactgtacaggttatattcctctctctttatgtaaacttatttccgctaggtttcttgtttctctaacaata

SEQ ID NO: 94150 - DNA, 109 bp, Zea Mays
tgtagtaagcatttatgcaaaacagagtctttgatcattgagaaaccttaccttgactcccttataaccagcatacccttgagagtcttttctttagtcgggtaagact

SEQ ID NO: 94151 - DNA, 1343 bp, Zea Mays
tttttgtaaatcatatttttgatacttcactagaagtatctataaaggtatggatatcaaggaaggcaatgcatcaaagggtttccaagcaactcctacaaacctaatgcacatttcactagacttaaagtgtgcaaaaattatttaaaaacacaaggaaggggttgcatgcaccggggcttgcctgggtaacactaggttagtgttgttaggcgacgaccacttgacgagtatccctcgatcgagcacttgcttgatttaaccatcttcaggttggtccattagcttcatcctgcggattagctcgcgcttgtggtcgacttgactcaagttctccgcatctcgtggttaatcaacgtacctaaatgatttgcataatgcacatgaatgcacataaatagaaatatcataaacctaaataaggctacacgacggtgaattaaacaactagcggcgaggcgttgaacaatttcataagaagacactaattatcgacgtacgactaagcgcaataatcacgcttctctaaattaaacgaacctaacgcaaacatcatgaaacaacaaactatacacatttaacacaattagcctaaacacaacttatcagctaattaattaaattctaaacttatccctcattttataaattatactacatcgctcacaaagaactattttaattttattttactcctcacatattttatatgtcaacaattaatcaaacatttcttatcgtaaatatatacacatctttataagtgattaaactatttcatcatcacacaggcctactaatattctactcagtacactaattcaactaattaaccggaatagcgaaataactcgctataactgaacctggctcaataatcgcaagaattgcgaagtcgacgagagtttcgtgacttgcacaatttattgagcacctaaatgagcctcgcactagcacattaatttattcaacgatcgaactattctgaataatttatcagcttaccgtttccacagctgacacgaatccacgagatcggtagcgattttccgattcaggcaatttgtcgagcgcttggggaatatcacgctgctagcttcgtcttcacccgatttttgggatttcttgctgacgcgcggaacgacgacgactttcagctgaagtcgggagcaagctggtgaggtggggtttgagcagaggaggacgtgtttgacgactcgacggcaaacaacgcgacgatgaactgggcaggatccgagctaataggtatcgtatgagatagcgaccagcatgacggacgaactaagtcgcgacaaggtcgaccgatgagagaaattaaggaa

SEQ ID NO: 94152 - DNA, 141 bp, Zea Mays
atggaggaagacagcgggtccgccgccgtgattagcgccattgggagggttgaggaaggacctaggcgtaacaccgatgatgtccgctgctcaatcgggggaaaatggatgatcgggtggtttgggaattgctcacccgcg

SEQ ID NO: 94153 - DNA, 110 bp, Zea Mays
agatttttaatttctttacccaaaaatctcagatatttgtggatcgagatttttagctacaataaaaggatcaacgcactagacgacaactggctacacattttaatttc

SEQ ID NO: 94154 - DNA, 636 bp, Zea Mays
atgccggtgaactccacgaatcaggggcaaccaggcgcgacgatggttcagcggataaccatgaccaggactggacgcgacaaaggagcccagggaggcgcgagagcgcggcaaccagagccatggcgcgcgcgagtcctggcagcctgctggtgtgctgaagacagcaaccacgaccaacacggccgaaggtcacaggtagagaacgacggcggtcggcactattgggaaacagagacgtgcaccaaaatcccgggcgtgacggcggccaaggccagagccgcccgcggccaggaggtctgtgcggccaggctgcgtgcagggagccggcgcggccatggcgagcaaggagcgcgcgcgcagccagagaccgagctgggggaaaagaaatctgcgcgtgtaggaaggaagcctcggccatgcgcgcggcaagctgaagctccggccagcagagaggcacggcagcaagagaaggtggagctcgccatgggagggagaatcaaagggcgtgccatgggagggagccgacgagcttggggagatggggaggagacaggcccacgcgcatccatggagttgagcagagccgagaccggcgccatgggagatgaagacgagaaggcgcgctggcgttga

SEQ ID NO: 94155 - DNA, 1962 bp, Zea Mays
atggccgccgccctccgcctgcaacgccagagtctcgccgccagcccctttctcttctccgcccatggcctccgcaccgcaagctcgaggtcatcctcactacgctcgatccgggtgacttctctacatgtccgcggcaattgggttatggcttctgctgttgggtacaacgtcaccatgagcgcaggcgtggacacctacaccaagtcttgggaggcccctactgccacgggtgtcagtttttatccagattataataatctgtacactgttggatgtggtgtctacgtctacgtgttcggtgataatatgacagatatcattggttcttgcacgagtatttgcacagataacagagagatcatggagagcgcaaacactggttctggtgcctgtgaagggttaggctgctgcagcattccaatacgtggcggccaaggcttcactctcaaactaggtcgcctcaatagtaccattccacagttcggtgaagcgctctccaatgtcaagattatcttttcgcaaaactatgacttcgttacagatgatgtttacgcaagttgggtggtgaatacaagcaatgttcacggcatgctacttaacattgcaatcacggaccaaccaagctgcgcgagtgcccagtcccaagagaacaaggatacctacgcatgcagtagtgaaagcatctgcgacgacgatctatcaccatcagggtttaacttaccgtatcgtgtgaccaatttgtcacttgatgatgggcttctgatggttacaaacatgctgaatgacacaagctccaacaatatggagagggtagtcctcgttaactatgacggttacaaccagaacggcttctattcaaccgacttctattcaaccgatgaggacgttgtggatgatattgatgagtgccttattccaaataaatgcaatggaatatgccacaatgttgatggcggtttcaattgtacaagttgccctcatgggaaagagtatgatccaaaaaagaaaaaatgtgtcatgtcagctaagcagcgtattctaatttttgggattgtaattgggcttgtttgtggtcttggatccataagttttgcacttggtgcaattatactcaccggtaagtggaaaaaaggcatccaaaggagaattcgaagagagtacttcaagaaaaatcaaggtctactcttggagcaactaatatcgaatgaaaatgctacaaccaaaacaaagatattcactttggatgaactagaggaagcaaccaacaagtttgatgctactcgtgttctaggtcatggtgggcatggcactgtttacaaagggattttgtctgatcagcgtgtcgtggctataaaaaaatctaaaatagtggagcaaatagagatagatcagttcatcaatgaggttgctattttatctcaaatcattcaccgcaatgtggtgaagctttttggttgttgcctagaagatgaggtacccttgctagtctatgagttcatatcgaatggcactctgtatgacattcttcatgaaaatattgcaacaaaatgcttgttgtcatgggatgatcgaattaggattgcaacggaagcatcaggagcacttgcttatctacactcagctgctgcaataccaattttccatagagatgtgaagtcttctaatatactcttggacgacaacttcactgtaaaggtttcagattttggtgcttcaagatctttatcccttgatgaaacacatgtggtgacaattgtccaaggaacattcggttatttagatccagagtattattatactggttctctaactgagaagagtgacgtgtatagttttggagtgatacttgtggaacttttgacaagaaagaaaccaatttttatcaatgaattgggtgccaaacaaaacttatctcattacttcattgaaggatacaggaagggactctcgtggaaataa

SEQ ID NO: 94156 - DNA, 387 bp, Zea Mays
atggcacccactggaggagcaccgtataatacgacctctagatctgtcccaacccctcgtctcttgttggagccgccttcacctcgtcttccattaatcgttggccaaactgcaccttcaggtagtgttgcggcatcaactgcaagtgcaaatccaatcgttagtcctgtggtgactgaaagtagtggcattgcacaagcagcacaaccaattctagtggattctgaaccagttaatattaatgatgatgatgatgagcatgattctaagagtgttgcttccattattggtgaccttgaggttatagatgtcatgactaatctggcagctcaggatgatgacatagagagtgattcagatgtcatggatgaagacaaggagctgtag

SEQ ID NO: 94157 - DNA, 659 bp, Zea Mays
atggtttctcctgtggaaagagtggatctacctgttaggagctcggatttgtcggatccccaagattttctgttaggggatgaacagagaatggaggtattagaaattgattggggggcaatacaaattgatgatagatgggaggaagaagaagaacaagagactgcctctgagtcagtgatgtatgatcggaaaaggaaacctcgaaaaaataccacaaaacaatggtttccaaagaatatggccgaatcagctcaacagcaggatgacaacccacaagatgaccccggaagaactgaatgtactagtgaaacacagctgatgttgcgacagggaggtgatgttgtgcggcaggagttcgaggatgtggtggttgggcagcaggagttcgaggatgtggtggttgggcagcaggagttcgagggatgtgaagctgttgacgttgggcagttaaccccacgaaggcacaaaaaaagagcagtaggaaagaagttgacgccgaaaaagaaaaatgtgtagctgtgtgtatttctgaaccagcagtgtgtatgtgtattaactatctcctgttttcagtgaaccagaaatctgtatgtgatttcagtttgaagctgtaatgtgtagtgaaccagaaatctgtatgtgtttgaagcagtgtg

SEQ ID NO: 94158 - DNA, 3451 bp, Zea Mays
atggcgcgagcgccggccaaggtccatgctgccgccggcaccgggaccaaggcctccctgtcgccgtgcccctctcgctgcggggatgtcgaaatctcgtacccgttcgggatagggctgggctgcttccgtcaaggcttcgagctcacctgcgatcaaacagctccttctcccaggctcttcttcgtgtcggggaacagctcgatccaggtgacttctctatatgtcggcaacagtgcggttttagcttcagctgttgggttcaacgtcaccatgaacgcaggcgtcgacacctacaccaagtcttgggaggcccctactgccactggtgtcagtttttatgcagataataattatctgtacactgttggatgtggtgtctacgtctacgtgttcggtgataacagagagatcatggagagcgcaaacactggttctggtgtctgtgaagggttaggctgctgcagcattccaatgcgtggcggccaaggcttcactctcaaactaggtcgcctcaatagtaccattccacagttcggtgaagcgctctccagtgttaagattatcgtttcccaaaactatgaatttgttactgatgatgtttatgcaagttgggtgaatacaagcaatgttcagggcatgctacttgacattgcaatcacggaccaaccaaactgcgcgagtgcccagtcccaagagaacaaggatacctacgcatgtactagtgaaagcatctgcaacgacgttctaccaccagtagtatctcaaggaggctacagttgcttctgccctggtcaaatagagggcaacccctatattgaagatggctgcatagcatattacaacccagaggcaccgagtattaggaactgtacgagattatgtggaaacataagcgttccatttccttttgggatcgaagaaggctgttacgcaaatgataacctacgactcaactgcacaattaacgacactactcttattcttgatcgagggtacgcacagtatcgtgtgaccaatttgtcacttgatgatgggcttctgatggttacaaacatgttgaatgacacaagctccaaaaatgtggagagaataatcatcactagtaactatgacaattaccaggaggttatggatgggattgtaattgggcttgtttgtggtcttggatccataagttttgcacttggtgcaattgtactcactggtaagtggaaaaaaggcatccaaaggagaattcgaagagagtacttcaagaaaaatcaaggtctactcttggagcaactaatatcgaatgaaaatgctacaaccaaaacaaagatattcactttggatgaactagaggaagcaaccaacaagtttgatgctactcgtgttctaggtcatggtgggcatggcactgtttacaaagggattttgtctgatcagcgtgtcgtggccataaaaaaatctaaaatagtggagcaaatagagatagatcagttcatcaatgaggttgctattttatctcaaatcattcaccgcaatgtggtgaagctttttggttgttgcctagaagatgaggtacccttgctagtctatgagttcatatcaaatggcactttgtatgacattcttcatgaaaatattgcaacaaaatgcttgttctcatgggatgatcgaattaggattgcaacggaagcatcaggagcacttgcttatctacactcagctgctgcaataccaattttccatagagatgtgaagtcttctaatatactcttggacgacaacttcactgtaaaggtttcagattttggtgcttcaagatctctatcccttgatgaaacacatgtggtgacaattgtccaaggaacattcggttatttagatccagagtattattatactggttctctaactgagaagagtgatgtgtatagttttggagtgatacttgtggaacttttgacaagaaagaaaccaatttttatcaatgaatcgggtgccaaacaaaacttatctcattacttcattgaaggactacaggaagggactctcatggaaataatagattctcaagttgtggaagaggcagaccaagaagagattaacgatatctcctcacttatagaaacatgcttaagatccaaaggagggcatagaccaagcatgaaagaagtagatatgagattgcaatgtctaagaacaaagaggctacggaataaaacacatcttttgattgaaaagggtggagaaatggaacctttgttatgcgcagaagctcagcacccacatgaacgtatcaatccaatttataatgaggaacatttaacaattccaatgatgtctgggtgctacagtttggagcaagaacttgcggcagcatctagtatgggcagcacagatctatcaccttcgacttggagggctactactccaccgtcgtccggggacctgtgcatggtgggcaccagatccaggagcgcatctccgaccacctccacccgtggagctgcagagctgctccgcacagttttgggtctgcgccgcggacatctacaccatctacgaggcctggttgtgcgccattggcaaaaaatctcctccaagctggtgtccaactgcctgttccggatgggcggcaccgcggtgctactctcgaaccagcggtccgaccggcggcgggccaagtacgagctggtgcacacggtgtgcacgcacaagggcgccgacgaccggtgcttcggctgcgtgacacagaaggaggacggcgagggcgtcctaggcgtgtcgctgtcgagggacctgatggcggtggcgggtgacgcgctcaagacgaacataaggacgctaggcccgctggtgctgccactgtcggagcagctgctgttcatggcgacgctggtcgccaagaagctgctcaaaatgaagaaggtgaagtcgtacatcccggacttcaaacaggcgttcgagcacttctgcatccatgccggcggccacgccgtgctggacgaactggagagcaacctggcgcttacggattggcacatggagccgtcgcggatgatgcttcaccagttcgggaacacgtccagtagctcgctctggtatgagctagcctacagcgaggccaaggggaggatccggcactgccaccgggtgtggcagattgcgttcgggtcagggttcaagtgcaacagcgccgtgtggagggcgctccggtcggtgaacccggcggaggagacgaacctgtggatggacgagatcgataggtttcccgtggatgttcccaaggtctctaaagtttcaagcgactgaaatgcattgcttgcgtgaatgatggagcttgcaattgtttgatagaagatctggttggaatttttcatagttcattactatatagttgtagaagataggaaaggcgatcaacttctctaagcttgaattatacatctgttcatgttgtttc

SEQ ID NO: 94159 - DNA, 315 bp, Zea Mays
atggccgctgccctccgcctgcagcgccagagcctcaccgctagcccctttctcttctccgcccatggcctccgctaccgcaagctcgaggtcatcctcactacgaacatagacgggttagacgggattggcaatcacgagcctatcaagacaaaggataagaaattttacgagagatctgaacactggctttatcaaactcctcaacgaattaaaggctacctgaatctggcctcggcaaaaatcaaacaactgtacatgataggagtggtcacatctatcaagtggcatttaagtagaataattggtcaatga

SEQ ID NO: 94160 - DNA, 2307 bp, Zea Mays
atggccgcgatggaagcagtcatgaacgcgggggatcccgcgaggctcaaccagccctcaccgtccccttccctactcgtcgtggggaacctgttgctgccctccctcgcggtgccgcaactacaagccgaggtcgtggacaagcagtaccgcgccgcgatgagtccagtgcatcctcttcccgtcgtcgacgacctgtaccatgacgacgctgcgggggtgatgaccttgggctcaaccgcgttcaaggtgctcgacagaatggacgagagcgcgagagccaacggtctggtggtgttcgatgtctggcggccccgagtggacgcctccatcgagcatcttcaaacctctatggcgcagatctgtgcgtccctcccctctctagagtcgccatggtcccagtacactcgccatgacggatccggacacccgaacgcccacggcgccgccagcatcctcgtcctcgtcaagtgcgtgctccacgaacccccactcggtggctatgacggctccctcgatgacgaaccagagtccggtgtcacctacatcgacgcgccactcgaccgagccatcggttgcgttggccacgcatcggtagcggcggccacacaccgcaccgatgctgtgggtgtagtaggtcatgggctactggctcatgtggtggctgccgggtcaacacaagccacctgttcgacgatttacctggccgacgaccgcaacttcgctgacatctccgttggcgcgctctgggaggagacgatggaacaagcgacaacgactctacatcctagttttcctaagaagaaattggtgctcctctcctcatccactgatggtaaacttggaggtatgaaggcctatcatctctggttcgacccctccgtgttggtcatgctgctcaccaggtacctcgctgagcggatgacgctctactacgacgccaacaccgatgactaccacaacgtgccccgcgtcgagactagggtatccgacttcgggtccacctccaccctccgctacctgccaagggggcaaccttctcagatgggtagcgcaaagcatgacccacccaggtcgactgttatgaaccttggaagtcttaacgtgatgattgatgcatactgccatgttgaatggtttttagatgcgattttggtgtttggaaagatggtcgagaagaggtgtgctcccgatgcactctcctacaataatctgattgactggctagggaagaacaaaattctggaggaggcattagacaaagaggggttgctaacactgcgagccggcgagggtgtccaccgggccgtggctgctcagctggtcgaactccgcccagcgcgtggtacgggagcagcgaccggagctgaggttgcccagcgtcgtctcctcgccaaacgccgcgaaagccgagtccttgggcacgaagacggtgataccttgcttcgtgctgttcgctcgatgacgtccgtcttctgcatgcagtccaggaacgtgtggaacctccgcgaggtccacgtgggaaaaaataaggattggttaaaggattgaaggaagtaaataataactattttactcttatgtaaataaactgaatagttaaggaatgcaaggtctttctatacgaactacaaagacgtgaagctctaaaatatcctcaatgtatacgaaaaaaattatataatactccgtataatttattctccatatattatgttcgaaatttcctcgctctctctcgaatagtgtatatactggtagtattccgcgcgcgtgagtgagcttcatttacgcagctttggcgagctggccgagctccctgtcgacggcgaccttgaggaagctgccttcctccacgaccatctgcacggggaggaagccgaggccgttggccacggcgagcatcacctccttcatctccgcgcggaactcgtgccggtccaccttgccgctgccgtccctgtcgaaccgcgcgaacaggccgcggtagagcgccccgagctcctccggcgccatcgcggcctcgtccacgccgaagtgcttctccagcacgcgcaggctcatgagctccccggccatctcggcgtaggtgagcaggccgtcgtggtcggcgtccagcgcggcgaagcggccgtccactgaggagttgaaggcgcgctcgtcctccacaaagctctgcaccgtgctcccgtccaggatctccacgctcatcttcgggttcctctcgctgttcgtgttccggggatgtgttgtgtcttgtgtgttggtgattggtgtgtgtgagtttgctctgggctctctgctctg

SEQ ID NO: 94161 - DNA, 1955 bp, Zea Mays
accctcctgctgatctgctcactttctaaaatcctggggctctgtctggtcctaattctcccttccgatccgtcgagcgaatgcgtttcttcttcagctccggcagcgacgacgacttggattctgctgactgcatgctgcatgcctcacgatgaggaccggcggctggagagcagcctcttttataatagtggcggagatcggtgagcgcttcgccttctacgccgtcgcctctaatctgatcatcttcctgacgggacccctgcaagaggggatcgcggccgcggctgcggccaccaacgtgtggaacggcacggcgctgatgctgccgctgctcggcggcgccattgccgacctgtggctgggaagatatctcaccatcatctcagcgtcgctcctgtacaccctgggtttaggcctgctggccgtgtcaaccttggttgggcatcactgcaacgccgccgccaccggcgacaggtgcccggcgccgcccaccatccaggtcaccctattctacgtgtcgctctacatggtggccgtcggcgagggcggccacaagccgtgcgcgcacgcgttcggcgccgaccagttcgaccagagcgaccccggcgagtccgtctcccggagctccttcttcaactggtggtacttcggcgtgtgcgccggcaccgccgccacgctcctggtcgtcagctacgtgcaggagagccttggctggcaccccggcttcgccatcccgtgcgccgtcatggcctgcaccctcgtcgtgttcctgctcggtacgaggacgtaccggtacaccgacacgagcgggacgcggaacctgttcgctcacgccgccgaggctttcgctggctggcgccggcgccagcggagcaggctcagggctgcacaccgcacgtcgcatcaggcttcacaccaaggcgtcgtcggggtgtctgcagaagagccgccggaggccagaaggagcagaatcgatgaagaggcgcaggtggtggcggcaacgacggcagccacgaacacagccgtcgtggtcagcgaagccaaggacgtcctccgtctgttcccgatatgggcgatgacgctggtatacgccgtggtgtactcgcagtccatgacgttcttcacaaagcaggccacgaccctggaccgacgcgtcggcgaggtagtcaaggtgccggcggcggcgctgctagccttcatcagcatcaccatcatggtgctcatcccggtctacgacggcttgatcgtgccgctgtcgcgccggttcacgggcaggccgtcggggatcacgatgctgcagcgcatcggcgccgggatgctcctgtccaccgtgtccacggtgatcgcggcgctcgtcgaggagcggcggctccgggtcgcgcgtgaggccggcctggccgacgagcccaggatccagctgccgatgagcctgtggtggatggtgccgcagtacgtggtgttcggcgccgccgacgtgttcgccatggtggggctgcaggagttcttctacgaccaggtgcctgacaggctgcgcagcgtcgggctggcgctctacatcagcatctttggcatcggaagcttcgtcagcagcgcgctcgtgtcaggcatccaccgggtgacggcggcgaggggccagagctggttctcagataatatgaaccgcggccacctcgactacttctactggctgctcgcagggctcagcgccctccagttcttcgcctatgtcttctttgcgtggagatacaaatatataaacagaacgttggagccgagaacatgtgacacatagttttaggattttcttccctattttcgtcacgataccaccctttttttttacgaccccccccccccccccccctatttcattaagcaatagaaaccatacgttccttacaaagacgccatgaccgacatctaccagcaaaagagcaaaaccttatacacta

SEQ ID NO: 94162 - DNA, 333 bp, Zea Mays
atggaatccgacaagggctcctccgtgcagtttcaggacttcctgccactgatggcgaggaagctgggcgtggagggcctgatccaggagctctgcaaggggttccagctgctcatggagcccagggcaggaaagatcaccatctggagcttgaagcagagcgcggccaggctcgggcttggccagctccaggatgatgagctcctggagatgatgaaagaaggcgacctggacgaggacggggcactggatcagatggagttctgcatcctcatggtcagattgagccctgacctgatggaagaagaggcatacatgatgtttcagcattga

SEQ ID NO: 94163 - DNA, 93 bp, Zea Mays
gtgctggcccgtcccgacacgattattcaggccggcatgacgtgtctgtgtcatagttgtggcccgcgtgcatctagctcatgtcgggcgttg

SEQ ID NO: 94164 - DNA, 109 bp, Zea Mays
aaacgagattttactctgcttttaagaaagcatataacaatgttcaaacacatacggggataccagtttacaatcatcagacaaccaaccaccagaactaaaggaacct

SEQ ID NO: 94165 - DNA, 101 bp, Zea Mays
ctatctcaaatatccaaattctaggtataattcaggtttgagtttcatcttcaaaaacaaatgcgtaaacaaaacttcagcatgtcatacaatatacacat

SEQ ID NO: 94166 - DNA, 3354 bp, Zea Mays
atgtcgtgcgccgccgcgctgtcgctcctcgtcgcgctcgccgcctccgtcgcgccggcggcggcgtcgcagggagccggcaacggcgacggcgacgcggccgtcctgcgtgcgttcctcgtctccctgccgccatcctcccagcgcatcctcctcccgtcgtggaacgccaccaacagcagcagcagcaccgggtcgagccactgcgcgttccgcggcgtggagtgcaccgccgcgggcgcggtcgcggcggtgaacctgtccgggctggcgctgtccggcgcgctcgcggcgtccgcgccggggctctgcgcgctgccggcgctcgcggcgctcgacctgagcctgaacagcttcacgggcgccgtccccgcggcgctcgccgcgtgctccgcgctcgccacgctcgacctcagcaacaactcgctctcgggcgccgtcccgcgcgagctcgccgcgctcccggcgctcaccgacctcaggctcagcgggaacggcctcaccgggccggtcccggagttcccggcgcgctgcgggctgcggtacctcagcctctacggcaaccggatcagcggcgcgctgccccgcagcctcggcaactgcgtcaacctcaccgtcctgttcctgtcctccaaccggatcgggggcgccctgcccgacgtcttcggctccctgcccatgctgcagaagctgtacctcgacagcaacctgttcgccggggcgctgccggagagcgtcggcgagctcgggagcctggagaggtttgtggcctcgacgaactgcttcaacggctccatccctgcgtccatcgggagatgcgggtctctcacgacgctgctcctgcacaacaaccagttcacggggccaattccggcgagcatcggcaacctcagcagactgcagtggctcactatcaaggacacgttcgtcaccggcgcgatcccgccggagatcgggaggtgccaggagctggtcatccttgacctgcagaacaacaacctgacagggacgataccgccggagctcgccgagctcaagaagctgcggtccctgtccctgtaccgcaacatgctgcacggaccagtgcctgcggcgctgtggcagatgccggagctggagaagctggcgctctacaacaacagcctgagcggagagatccctgaggagataaaccacatgaggaacctgagagagctgctcctggcgttcaacaacttcaccggcgagctcccgcaaggcctggggtcgaacacgacgcatggacttgtttgggtcgacgtcatggggaaccacttccacggcgcgatcccacctggtctctgcaccggaggtcagctcgccattctcgaccttgcgctgaacagattcagcgggggcattccgagtgagatcatcaagtgccagtctctgtggagggcccgtcttgcgaacaacctgttcagcgggagcttcccttcagatctggggataaacaccgggtggtcgtacgtggaactgggcggcaaccggtttgacggcaggataccaagcgtgctcggttcatggcggaacctcacggtgcttgatctatccaggaacagcttctccggtcccataccacccgagctcggcgctctcgcccatcttggcgacctgaacctgtcgtcgaacaagctgtccgggcgaataccacacgagctgggaaactgcaggggactcgtccgtttggatcttgagaacaaccttctcaacggaagcatacctgcagagatcgtatcgctcggtagcctgcagcatctggtgctcggtgggaacaagctcagcggggagatcccggacgccttcacctcaacgcagggcctcctagagctgcagctcggcggcaactccctggagggagctgtgccatggagcctaggcaagctccagttcatctcccagatcataaacatgagcagcaacatgctgagcggcacgatcccaagcagcctcggcaaccttcgcatgctggaaatgcttgacctgtcagagaactccctgtctggcccgatcccatcacagctgagcaacatggtctcgctctccgcggcgaacgtgtcgttcaatcggctctccggtccgctccccgtcggctgggccaacaagctcccagccgacgggtttctgggaaaccctcagctctgcgtacggcctgaagacgcagcttgctccaagaaccagtacaggagtcgcacaagaaggaacacgcggatcatcgtggcgctgctgctgtcgtctctggccgtcatggcttccgggctgtgcgctgttcgctacgcggtgaagacgtcgcggcggcgcctgctggcgaagcgcgtctcggtgcgcgggctggacgcgacgacgacggaggagctgccggaggacctgagctacgacgacatcatccgcgccaccgacaactggagcgagaagtacgtgatcgggaggggccgccacggcacggtgtaccggacggagctcgccccggggaggcggtgggcggtgaagacggtggacctgtcgcgggtcaagttccccatcgagatgaagatcctcaacatggtgaggcaccggaacatcgtcaagatggaggggtactgcatccgcggcaacttcggcgtgatcctctccgagtacatgccccgaggcacactgttcgagctgctgcacgggcggaagcctcaggtggtggctctcgactggaaggcccgccaccagatcgccctcggcgcggcgcagggcctgtcgtacctgcaccatgactgcgtgccgatggtggttcatcgggatgtcaagtcgagcaacattctcatggacgcggatctggtgcccaagatcgcggacttcggtatggggaagatcgtaggcgacgaggacgcagatgccacggtgtccgttgtggtcggcacccttggctacatcgctccagagcatggatacaacacgaggctgacggagaagagcgacgtctacagctacggcgtggtgctgctggagctcctgtgcaggaggatgcccgtcgaccctgctttcggagacggcgttgacattgtggcctggatgaggctgaacctgaagcacgctgactgctgcagcgtgatgacatttctggacgaggagatcatgtactggcctgaagacgagaaggcaaaggcgctggacgtactggacatggcgatttcctgcacccaggtggccttcgagtcgaggccttccatgagggaggtggtgggcgccttgatgaggatagatgatcagtatatataacacttccactcatgaatatatacatggtaaaatggagacctcaattgtgaaatcttgttgcagattaattaaggtgttctggttgtt

SEQ ID NO: 94167 - DNA, 763 bp, Zea Mays
agtatccggtagggttttcctctcgcgccgccgcggaacacaacaccgcaccacactacccagcggaatccgcccacccgcacccggagcagaggagatatgtcgcaggggaagggaggagcgtcgaggaaggaggaggtggtcaccagggagtacaccatcaacctccacaagcgcctccacggctgcacattcaagaagaaggcacccaacgccatcaaggagatcaggaagtttgcgcagaaggccatgggcaccacggacattaggattgatgtgaagctcaacaagcacatctggagcagcgggatcaggagcgtgccgcggagggttcgtgtgaggatcgcccgcaagaggaacgacgaggaggatgccaaggaggagctctactcccttgtcaccgtcgcggagatccccgccgagggcttgaaagggctggggaccaaggtcgttgacgataccgattaagctgtcgcgttatctacatctttagagagttcctagtttgtatttgcaacagcaaaaccttttgtattcacaaagttgtctatttccgcaacagaattgcatggctagttttcttttcattgctgctgcatccttttcttcattatcgccccctgggaagtcgctgctcatgggacaagtttggaaatctccatgtgtggtgtttacgttatcaagttgtgttccttggataacttgtcagtatggttttagcaacttcgccctgtgatggcttggaatcccccatttcaatggc

SEQ ID NO: 94168 - DNA, 1368 bp, Zea Mays
agtatccggtagggttttcctctcgcgccgccgcggaacacaacaccgcaccacactacccagcggaatccgcccacccgcacccggagcagaggagatatgtcgcaggggaagggaggagcgtcgaggaaggaggaggtggtcaccagggagtacaccatcaacctccacaagcgcctccacggctggtacttctccctctggccaccttgctgcgggggctgcacactgttctcgctgcgagatctggctcgcttgcgagattcttcgtctcgctgctgatagtatttaggcgcggtagcggatggttttttctattcgatactactcgtagacgagatctggctcaactagtgtatgttctgtgtgatcagttatatactattcgtactctgcttaggagcacgaggagatgaaacagtacgatgaccttgcctgcttgtggtttgtagtatttgtagcggcactggtttggtattttcctcatttcatttgctaattagtttgtcgaaaggtaaatgtaataggcatctagctccgccctttattaccatttggaattgcaaaatttgctgccagttaggaattgatgaacctatattgagaaggcagatatagcctgtatatgctcaattaacattcttatcaggtaaaattctagtgactgttagagtttgcttttaacaaaccatgcaaggcttagaaacctcatgaatcatgactaatgagatagtgtgcatttcattgattttggctttgtctatgtatgagtatactcaaattgttaagcatgactagaaggttggctgctttgatccaatgtgtttttttcagttgctgaatgcttatccaagtgtcttctgttatctgcatgacctctcgttcctgcttgacattgtactgttactgtaattgaaggttactgaatgccgcgatcccacttcttaccaacattttctcatgtctggcagcacattcaagaagaaggcacccaacgccatcaaggagatcaggaagtttgcgcagaaggccatgggcaccacggacattaggattgatgtgaagctcaacaagcacatctggagcagcgggatcaggagcgtgccgcggagggttcgtgtgaggatcgcccgcaagaggaacgacgaggaggatgccaaggaggagctctactcccttgtcaccgtcgcggagatccccgccgagggcttgaaagggctggggaccaaggtcgttgacgataccgattaagctgtcgcgttatctacatctttagagagttcctagtttgtatttgcaacagcaaaaccttttgtattcacaaagttgtctatttccgcaacagaattgcatggctagttttctttt

SEQ ID NO: 94169 - DNA, 836 bp, Zea Mays
tttgtttgaaaattaaaattgaaatatggagcagcacacacatcaaaatctctgcttctagactaacacatttttttggagtatagcagcggcaatatgtatgatattcatggctcatgctcgcaattttgaatattatttttctaacccatttctttaagcttctgtttgttttcagtcaaacttgagaataagcgcggatggagtaagctcgataagtggcaggttacttctaggtacggccgaagttataccacctggtgaactcgtagatacaactggcgctggagatgcattcattggagcagttctatatggtttatgcaccagcatgccaccggagaggatgctaccttttgctgcacgagtggctggttgtggttgcagaggtctgggggctcgaaccagccttccccatcgcgcagacccacgcctggctggctattgatccgaattcagaagggctgcatcctccatgaccacctgcctgcaccccgtccaatggttgtgaatattccagtcccgatcagatcaaataagtcatcaactattagcagcacatgaagactatcattgtgatagctattattttgcgatgattatgcaactatatggttccaacttgctagctccaggcataccaggcctgtgcaccttttacgggtgtagaaagttatacaaattccgattgtcacgaggtgtggtgtgccctaatcaaagctaaaggtgaaattatcaaaacgatacaaaatcgattgtaaagaggtcttgaagtttaagacccattaaattttctatcaataaatgtagtctaatgtatctatcattcacacaaa

SEQ ID NO: 94170 - DNA, 1753 bp, Zea Mays
acatcatcgcaccgcattggatttggtttggttttggttggaggtagttcgttttggcgggtagcgtagcgttgcagtgacaggcgagccgcgagcgtacagccattggagttttagagaagcagcacagaggaggggagaccggagatggtgccctgcgcccagcagccgcagctgcccacagctcctcctttccacactttccgtcaagcgggcaggagggttattccgcttcctcgtttacatcgccgcagccgccgtaccatcgccaccatggcctccgcctccggctcccccaacccagtcgtgctagggtgcggcggcatctccgtcgactacctggccgcggtggcatccttccccaaccccgacgataagatccgcagcctcgccctcaaggtgcaggggggcggcaacactggcaacgcgctcactgcagctgcacgcctcggcctccgtcccaggatcatttccaaggtagccaacgatgctcaaggaagaagcatcctcagcgaactccaaactgatggcgtggacacatcctacatcctggtcgcagagaacgggaactcacccttcacctacataatagttgatgaacagacgaaaactcgtacatgtatacacactcctggttctcctcccatggtgccagaagagctcacaaaggcaaacttgtcgtccgctttagatggcgtggacatcgtctacttcgatgtacgattgcatgacattgctttgcttgttgctgaagaggcaagtcaaagaaaaatccctattttgattgatgccgaaagaaagagggagggactggacgagcttctcaactttgcatcttacgttgtatgctctgcaaagtttcctcaggcttggacaggagcctcatcaatacctgttgctttagtatccatgctttcaaggttaccaaacatcaaatttgttattgtaactctgggggagaaaggttgcttgatgcttgagagaagcagtacagatgcttctgaggcaggggaaatagatgcagaggctttattcgaatcactagagaagagcattgatcagagttctactataccaaaatgtgttgcttccaagtcaaacttgagaataagcgcggatggagtaagctcgataagtggcaggttacttctaggtacggccgaagttataccacctggtgaactcgtagatacaactggcgctggagatgcattcattggagcagttctatatggtttatgcaccagcatgccaccggagaggatgctaccttttgctgcacgagtggctggttgtggttgcagaggtctgggggctcgaaccagccttccccatcgcgcagacccacgcctggctggctattgatccgaattcagaagggctgcatcctccatgaccacctgcctgcaccccgtccaatggttgtgaatattccagtcccgatcagatcaaataagtcatcaactattagcagcacatgaagactatcattgtgatagctattattttgcgatgattatgcaactatatggttccaacttgctagctccaggcataccaggcctgtgcaccttttacgggtgtagaaagttatacaaattccgattgtcacgaggtgtggtgtgccctaatcaaagctaaaggtgaaattatcaaaacgatacaaaatcgattgtaaagaggtcttgaagtttaagacccattaaattttctatcaataaatgtagtctaatgtatctatcattcacacaaa

SEQ ID NO: 94171 - DNA, 1487 bp, Zea Mays
gctcctcctgctcgtctcctgtttgccatgtgctgctgcagctagggtgcggcggcatctccgtcgactacctggccgcggtggcatccttccccaaccccgacgataagatccgcagcctcgccctcaaggtgcaggggggcggcaacactggcaacgcgctcactgcagctgcacgcctcggcctccgtcccaggatcatttccaaggtagccaacgatgctcaaggaagaagcatcctcagcgaactccaaactgatggcgtggacacatcctacatcctggtcgcagagaacgggaactcacccttcacctacataatagttgatgaacagacgaaaactcgtacatgtatacacactcctggttctcctcccatggtgccagaagagctcacaaaggcaaacttgtcgtccgctttagatggcgtggacatcgtctacttcgatgtacgattgcatgacattgctttgcttgttgctgaagagtgcaggcaagtcaaagaaaaatccctattttgattgatgccgaaagaaagagggagggactggacgagcttctcaactttgcatcttacgttgtatgctctgcaaagtttcctcaggcttggacaggagcctcatcaatacctgttgctttagtatccatgctttcaaggttaccaaacatcaaatttgttattgtaactctgggggagaaaggttgcttgatgcttgagagaagcagtacagatgcttctgaggcaggggaaatagatgcagaggctttattcgaatcactagagaagagcattgatcagagttctactataccaaaatgtgttgcttccaagtcaaacttgagaataagcgcggatggagtaagctcgataagtggcaggttacttctaggtacggccgaagttataccacctggtgaactcgtagatacaactggcgctggagatgcattcattggagcagttctatatggtttatgcaccagcatgccaccggagaggatgctaccttttgctgcacgagtggctggttgtggttgcagaggtctgggggctcgaaccagccttccccatcgcgcagacccacgcctggctggctattgatccgaattcagaagggctgcatcctccatgaccacctgcctgcaccccgtccaatggttgtgaatattccagtcccgatcagatcaaataagtcatcaactattagcagcacatgaagactatcattgtgatagctattattttgcgatgattatgcaactatatggttccaacttgctagctccaggcataccaggcctgtgcaccttttacgggtgtagaaagttatacaaattccgattgtcacgaggtgtggtgtgccctaatcaaagctaaaggtgaaattatcaaaacgatacaaaatcgattgtaaagaggtcttgaagtttaagacccattaaattttctatcaataaatgtagtctaatgtatctatcattcacac

SEQ ID NO: 94172 - DNA, 445 bp, Zea Mays
ctccatgtcgtattttaaaaaaatataaataaaatttgatcggatatttatcgaatcatgttcggattcggatgtattcgaaaaatgtatcggatatttggtatccgatgtcggataatatttgttcaaattacacccctgcgcacgcaggaactgaaccgggtacccgctaaccgggtacctgtatcctacccgtacttctcgggtatttgccgggtagtggtcatcctgtatcctacccgtatccgatgtatatccgggtagtatccgtatccgacccgtatacaaaattacccgtatccggtacctgaaaaactgggtattttaagtacccgtatccggtatccgccgggtaatctcgtcccgttttcacccctactttcaggcgggcaccagcctatgtgggaggcaaagccgcggctcagctcgctccccaccaccgcaa

SEQ ID NO: 94173 - DNA, 1742 bp, Zea Mays
cgcgtttgattcttcggcagacagaaacaataagcaagatgatgaggcgccaaagtgaaagaagctctccctctcctctctgcttcgcacgcctcgccaccttccacgacgagctcctacagtcctacctagacgtaagccggcgccgccatggtgatctcggtgcccgcggcccggcgctccacctccgtacgcgacgccgtgctgggcggcggcgggcggcagctgtaccagcccctccgctgcgccttctacgacggcctggccgccgcgctgtccgagtccgaggagccctccgactcggacgccgccgcccgcgtccccgctggctgcaagcggcaggcggcgaggaacgtgctgatcctgatgagcgacaccggcggcggccaccgcgcctccgccgaggccctgcgcgacgccttccgcatcgagttcggcgacgcctacaaggtgttcgtgacggatctggggaaggagtacggcgggtggccgctgaacgacatggagcggtcgtacaagttcatgatccggcacgcgcggctctggaaggtggcgttccacggcacctccccgagatgggtgcacggcgtgtacctcgccgcgcttgcctacttgtacgccaacgaggtggtggctgggatcacgaagtacgagccggacatgatcatcagcgtgcacccgctgatgcagcacatcccgctatgggtgctcaagtggcagcagagcctgcgccagcaccaccccaaggcggtggtgcccttcgtcaccgtcgtcaccgacctcaacacctgccacccgacatggttccaccacggcgtgacgaggtgctactgcccctcggccgaggtggcgagccgggccctgctccggggcctcagcccgtcccaggtccgcgtcttcgggctgcccatccggccctccttctgccgcgccgtgctcgacaaggatgaggtgaggaaagagctggggctggaccctcagctgcccgctgttctgctgatgggaggcggcgaggggatcggcccggtggaggagaccgcgagggcgctcggcgaggagctctacgaccgccggagacggcgccgggtgggacaggtcgtggtcgtgtgcggcaggaaccgggcgctgcggtccaccctgcagtctctcagatggaaggtccctgtcaagatcagagggttcgagacacagatggagaagtggatggccgcctgcgactgcatcatcacaaaagctggtcctggtaccatcgcagaggcactcatacgagggcttcctatcatcctgaacgacttcatccctggacaggaagtcgggaacgtcccatatgtcgtggacaacggtgccggcgtgttctccaaggacccaggggaggccgcgagacaggtcgcccgctggttcagcagcagcagcacagacggggacgagctcaggagatactcgcgtaacgcgctgaggctagcgcagcccgaggcggtgttccacatcgtcagggacatccacaagcagctccagcgacagcctgccgcggtcacccggatcccctcccgctcgctgacctcgtccttcccgtaccatatgtgaaatcaagaatgctactgcagttacgttttctgctgcatgttggataatattatgcttgggacttgatgtatgcctaaccttttgaagaacctgtatattatattatattgtatataagaattgctctctgttctgttcatgagtgatttttgtgtatt

SEQ ID NO: 94174 - DNA, 327 bp, Zea Mays
atgccatcatctcctatgattcgtcccctcgctcaacctgcatcctgtcataccctatctcgtaccgagtcccagattcacggtggctgtgtggtagtcggtaacgctgaatatggacctgggcgacatcaagtgcgaggtgttctgcaaccaggtgctccgcacacggagaacttcttggccctctgcactagcggctactacgacgacactgtgttccaccgcaacatcaagggcttcatggtagcacactatgcaggggccaacagcggacccaacgccaacggcagccggttcttcatcacctacgccaagcaaccgttctga

SEQ ID NO: 94175 - DNA, 1849 bp, Zea Mays
ggtgcgggcagatcgtgccatcattcctcggtactccctcccgcgaccagcacagtgacgcacctcgcagtcgcagagacacagctttggcaacgaggtaaagtcgcctcgccgccgggcagctgcagctgcatgcacgtgccccattctagctcagaatgctagcggacgcgaggacaaaaccgtcaatgcatgccacacccacactgccaccagcccaccagtgccactgccaccctctctactataatctctttcagaagctcgtcaccactcaccgagcactgtcgtccactccccgcgtcccgcccaagcaaaaaagcaaagcctgcaatggcatctgcagccaccgccgtggcgctcgtggttgttgccgccctggcctcgctgacgcagctggccgcgtcggagtgctcggcggcggaccgcgacgcgctgctttcgatccgcgcggcgctgtcggaggaggagcggcagctgggcgtgttctcgacgtgggcggcgggcacggactgctgcgccgggtggtacggcgtggcctgcgacccgaccacggggcgcgtcgcggacctgtccctccgcggggaggccgacgacgcggtgatggcgcccgcggggcggcccgcgtcgggggtcatgtccgggtacgtctccgacgctgtgtgccgcctggaccgcctctcgacgctggtgctggcggactggaagcggatctcggggcccatcccggcctgcgtcgccacgtcgctcccgtacctccgcgtcctggagctcccggggaaccgcctcacgggcgccgtcccgccgctgggcggcgggcagtcgcgcctcgccgtgctcaacctcgccggcaaccagctgtccggcggcatcccggcgtcgctcacgtcgctcaccgagctcaagcacctcgacctcgccggcaaccggctcagcgggcgcgtgccgccggacctcggccggctccggatgctcagccgcgcgctgctggcgcgcaaccggctgtcgggccccatcccggcgtcggtggcgtcgctgccccggctcgccgacctcgacctctccgagaaccagctgacgggcgcgatccccgagggtctgggtgccggccccgggaatagcggcgtgctcacgacgctgtacctcggcgggaaccggctgtcgggcggcgtcccggcgagcctgcttcggagcggcgggctcgggatgctcaacctcagccggaacgcgctgggcggcggcgtccccgacgcgttcacgccgcgctcctacttcatgctgctggacctatcgcggaaccggctcacgggcggcgtgccgcggtcgctggcctcggcggcgtacgtgggccacctggacctcagccacaaccggctgtgcggcaccatccccgccggcccgccgttcgaccgcctcggcgccgagtcgttcgtcggcaacagctgcctctgcggtggcccgctcggcaagtgcacgtgacacccctagcccgcccatacgcgggaagcatgtagacatattcgtgcggcttggttaacatgacatgcatcatgatgatttcgcggtgctgcatgtgcctgtctttttctttctttctttttatttatcttcttttatttactttttaaaaatgctagtggtttgtccatgtgtctgaacgaatggaagcaaaaattaagctcgtgtgtggataatgctcagccatgtcgtgtccgtgatgtgtcgttagagtcgccgtcacgttcacccatcccgagtctatcaggcccttcgcttccgggccacgcttggggtttgtccatgtgtctgaacgaatgaaagcaaaaaaaaaaaagtgtggttaatgctc

SEQ ID NO: 94176 - DNA, 1192 bp, Zea Mays
atgccgaccatcattgtctcggtggacctggaatgcagccgctgtcatgccaagatcgagaatgtgctcaacaggatccaagaaagtcaacctttgagcaggtataagcctggggactggattgagggagtcggaggcgcaaaggctggacattttgtcttgcctgaggtcaccacattgctcctggtgggccctagaggttctgtcaagagcacacttgtaaaccgaattactagggtctttgacaaggatgatgatccttttgcaccagatcgagcacaggtgtcatgcaattcacaatcaaatggtacaatgtttcttcgcgagtatccaattccaaggaattcaagtgccgtatgtatttacgatacacgtggctggtcaaacgacctagagaaaaatttcaaaatgctgcatcagtggatgacaaaaggaataagccatggggagacaacaatgtgggatgatgatgaaggcaataagatagggaacatgaaaccattggggcggcaatacagttttcttcgttacaaaatctggaaggtcaatttcgtgatatttgttgttgatggtgttgctgtcctcgagtcaatggatgacagcaataaaggatacactgagatacttcgtcaaacttttatgtatccgttcttgtcgattggagatgataaacctgttgttgttgtcacacatggtgatagactgtcgatacagcaacgtgttcacgttcaagctgagttagcagagctactagatattcctgtccagcaaatttatgatatactaggatccaatgatgaccaaactgatatggctgtactggatatgctacattattgtgtccgacatgcagagcagaacctccatgttaagttaaactactatttggaggtgcttgggcgtgaaactctcaataaaatggcagagaaattgatgggcttagatgcagtcattgaagtcgccattattttcctatgcatcctggacctgctacttcgattttccgataaattagtgcagccgtagctacgttctgcacttgggttgtaactaagaaaacatcatggtgactacttgtcctcctcagcacaattaaaaggcagtttcaggctatgcacaaaattataatgtttgtttaattgttttgtcttgacagtaagatttatacagtttaattgtcagtatttcttgg

SEQ ID NO: 94177 - DNA, 310 bp, Zea Mays
accttaaaattggaagatgctccaaacgccacaggaggcgcagaaggcgggacggagacggccgcgctgcaagactagataaaatcctccgccttccttgagtggcggggactggggaagagtggcggccgggtgaaagcaggaatgcttggggcgaggcaagcgggattttgcttggaagccggggcaatggcgacaccgcgacagggagcggcgtggtgggaacgagatggagacggagatggaattacagcgagggaaggggaaggggagatcgaggaaggtttctgcctcgtctcggtcggaggat

SEQ ID NO: 94178 - DNA, 1316 bp, Zea Mays
aacagatggaggccggcctgcgcgcgctaggccaccgctacttcggcggcggcggcggtggcctcggtgggttcgcggccgcgcgtgccacccggctccggcgccagcgccagcgccgcatggccgccttctgctcccgtgagtggcaagggattcccccacttcccccctccacttcctaccgctccggcgtgtctgtgtatctgacgtccctccccacgctcgcaaacgtctctgcagtcgctgttaatggagatgggaatggcgccgcgggtggccccgtggggagcggcgtcgaggtggcgcgcgccaggaggatgctccatgtcgtgctcgtctcgccgctgataccaggaaatacagggtccattgcaaggacatgtgcagcatctgcagttggcctgcatcttgtcgggccattaggctataaggtagacgacacgaagttgaagcgcgcgggattggattattggccatacgttgttgtcaagattcatgactcttgggaccacttctgtgattatttcatgaaacaggaaggagataaaaggctgttggcgttcaccaaaagaggcacacacatccattcagtaagtagccgctgcttcttcaagtaggactgtagtatatcctcgccgtcgccacaatgaaaactgtcgctgatttctcctacaggccaggggactggctagtcttcggttccgaaacaaaagggttgcctcagcaagccctcgaggattgctgcagagaaggcctaggcggcgggaccctccggattcccatggtggagacctacgtccggtgcctgaacctctccgtcagcgtcggagtcgcgctgtacgaagccgctagacagctgaactatgaacagcttcagtaccagcctgatgagctcccagaggaggcgcaggagcttttcccggcagaggacatttatgcgtgaaaacctctgcccgagaacaattacacgttacacgcattgatcacctcatttttgtgtgtgtgtgtgtgtactgtttgccgtgacacatgattgagctggagggaccacgcactgcacgattctgttgcgaattcaattccaggccgagtccttgtccagacggtgttgacatgctcattcaaaatggtgtacctgatctgcttggaagaatcgttttagtgccatgtataatttcgcagtcagaactcagaaggtgattagagtatgctgcgatggggtctcgttctgacttcttttttgtgtgtgtactggttactgaaccataagctttgttaactgcaactggacgctgcgtcctgttgcttctctgtca

SEQ ID NO: 94179 - DNA, 300 bp, Zea Mays
ggcatatggagagcagcagcagcacagatgtagcaaaagtgtttacagcaaaaaaaaaaaaagaaacagcactgtacaattcattcgttcttcctcctcggtcccatgactcgattctttcttccttcctcccagtcgcttgaatacttgatgatgccacactgctcgatccagcagtccagcgagcctcgatcgctccggcgctgtacatgctgctcgcgcgcatgcactgcagacgatggcggtgttcctctctatctcggtctcagtcaggtctctgtgtactggagcgtgctacgc

SEQ ID NO: 94180 - DNA, 3285 bp, Zea Mays
acgggtttgcagctgacgctctccatcctcgttcttctcgctccgttcctctttccctcctcccctccgtcttggttcttcacacctggttcttctgtctcccgttgtctctatcgtctgctccggtgaacccgcatcgttcctattccttgtgctgcttccgtcgtcggctccagtaaatcactttgttcgccagctcgagatcgtggacggcttgctaaaatcaggtttgttttcattgggtttccatttctggaagtgattaaggcgaagtaaatcttctttcctcgaaacgtatacactttggtgcatctgtggaaatctgatttgttgggtttctgatctatttggctctttgcattttttaaatcccctcctacaaatcctgctacctccccgtctttttttgtttgtttggaaaatttgtttcgtatcttccctcctcgtttttttgcttcagttcgaaatcgatttggtgggtttctgatggcaaccctcgccaccgcctcatgggtacgtgccgagccgccttatctgttcgctcaccactttacattggttcttgcgcctgcgatttcggtgtcgtaggatcatgcttgtgcggatgtgatggtcgctgtggcttcgcgtcggtgggcggtgggatttgggctgggattctcgcgccttgtctctagggtttgggtttggtgcttcctcagtgcggaattggggattataattcctttaggtttgattttatctcgggtaactgcgggataatagcctagtagggaaatcgtggggattcttaaggattattaagtttctgatttatctctgccttatttagctcgtctgttgtggtggcttttccttcttgctgatgctgattatgcttccggttatgagccacaaaacaatattgatcggcaacctgtagttttgcctcagttcatcgcttgctgtctctgttaaatgaccaagaataaagtttagtacttcacacattaggcatccagtaaaacggtatcataattccaaaggtcagtaacgcaaacaaacaccttctaaatcttttccgtttgctgcagcagccatgagattctccttgatctgtttgcgacatttattcctctcttgaacaatatcttgactattccctccagtgaacagcgagacatatttctcattcttagggaagaactacaaatgagttgagatatagaagctttagctcaggattcaagcaggtacagataaaaaatggttgattagaacctccaatctaatgcaaagagaatgatacatcacagaaaacaaagttgtaatgatacttatatgtcatatcatcatgggcagggcagtaatgtaggaagcttactctaacatattcaagatcttctcgcaattttgacagattattgttgacaccatcaccatttgaacgttgttgcttctcgagtcgccttatcatcctctcaatcttccgtctctctttgtattttgaataccaacatcaagaagatggtaagtacattccatacatgcatagaaaagaaacttaaaatgaaaaggaaagtataacagaccaaagaactttatctttctatctctaaattgtaatgtccgctggacaacaagttgattctgaagctcttgttgcctcttcagttcttccagtttcttctcttgagcaaccctaatctcatccggaaggtcctgaaaattaaacatggagcagtaactaaacaacatggctagatgaaaagggggctatactccattgatgtaatcagaaaataaaatggaagcatatgtgctattcttttatacatgtaggttgctcacataaagtggccttgattttaaataacacaaccatggtaagcttatacccccctcccgctgtagaattgaattacacaaccagttgccacttatgcataggggtggtaatgggctctagattttacattataaaatttaaggatcgaatcgcgttaggaccatgctctattcctttttttaactaaaatttattaagggccctaactgaaaaataaaattttggatcgtggtccattaccacccttatgcctacttgactctttccaatataagatgaagattctgtcggaaagcaattatatttagttgatgcatagaaagagacatgaacatatccattctacactgttctaaaacaaggtcaattaggcttcctcacttcccctctgacaagaacaaattccctttcaccatttttcgaccaatcagtttgagcagcatagttaaaatttcagtatgttagtatttcaatcaatacttgatacttaatgcagtgcagtaatccagctacaccatgaactttatcccactacatgatgaaatttatctttgcagttaccataaacatgagagcattctcagtgacaaatagagcattttctattctctctatattaacaaaccatggaagacaatcctcagtaccatcttccctacttacctaccccgaacaacatcttatcacaagatgacgtacttggccttacaaccacgcaccagcgacatcattttccaaattatccacttctagcagccaaacaaacatggtatggaacttcttctttactattatttgcaactttttaaaaacatgttatatgactacaacctaatgaagttcatttgctaggcccgacgattgctagcatatcccggtgtgccacagaatacagaggcggatgaacactacacagatcaacttaacaagaaggagctatcctcaccatcgaaaatgatgaagcacacccaagttgacaaagtcctagattctataattccagaaaaatgaagcttgttacatcctcatgacatgcatgaaggaatttgcttttgcgtatctgtggagggcttcgtcacttttgaatgaaaaaacatctatgtacatataaatcacttggtgaagcctttctcaggcatgtgtgttgatgcaacctctgggaaacaaatgctatcagctgctgacatatgctacttcaatactgcttgatatgtattgcactctcagttccgtctactgttggtccaaactgcatctgtgtatatacagacgagttgtattaaactttctaaatctgtgtatactaatgcaacctcttgaaaacagttgttagcccttgacacgtatgctattttaatgctacttaatatgtattgcaatttggttttcctgtacagaactgctacaattcacgttccaatattaatcggaagctactgcagcctagcaaaatttcc

SEQ ID NO: 94181 - DNA, 1044 bp, Zea Mays
acgggtttgcagctgacgctctccatcctcgttcttctcgctccgttcctctttccctcctcccctccgtcttggttcttcacacctggttcttctgtctcccgttgtctctatcgtctgctccggtgaacccgcatcgttcctattccttgtgctgcttccgtcgtcggctccagtaaatcactttgttcgccagctcgagatcgtggacggcttgctaaaatcagttaccataaacatgagagcattctcagtgacaaatagagcattttctattctctctatattaacaaaccatggaagacaatcctcagtaccatcttccctacttacctaccccgaacaacatcttatcacaagatgacgtacttggccttacaaccacgcaccagcgacatcattttccaaattatccacttctagcagccaaacaaacatggcccgacgattgctagcatatcccggtgtgccacagaatacagaggcggatgaacactacacagatcaacttaacaagaaggagctatcctcaccatcgaaaatgatgaagcacacccaagttgacaaagtcctagattctataattccagaaaaatgaagcttgttacatcctcatgacatgcatgaaggaatttgcttttgcgtatctgtggagggcttcgtcacttttgaatgaaaaaacatctatgtacatataaatcacttggtgaagcctttctcaggcatgtgtgttgatgcaacctctgggaaacaaatgctatcagctgctgacatatgctacttcaatactgcttgatatgtattgcactctcagttccgtctactgttggtccaaactgcatctgtgtatatacagacgagttgtattaaactttctaaatctgtgtatactaatgcaacctcttgaaaacagttgttagcccttgacacgtatgctattttaatgctacttaatatgtattgcaatttggttttcctgtacagaactgctacaattcacgttccaatattaatcggaagctactgcagcctagcaaaatttcc

SEQ ID NO: 94182 - DNA, 1350 bp, Zea Mays
acgggtttgcagctgacgctctccatcctcgttcttctcgctccgttcctctttccctcctcccctccgtcttggttcttcacacctggttcttctgtctcccgttgtctctatcgtctgctccggtgaacccgcatcgttcctattccttgtgctgcttccgtcgtcggctccagtaaatcactttgttcgccagctcgagatcgtggacggcttgctaaaatcagttaccataaacatgagagcattctcagtgacaaatagagcattttctattctctctatattaacaaaccatggaagacaatcctcagtaccatcttccctacttacctaccccgaacaacatcttatcacaagatgacgtacttggccttacaaccacgcaccagcgacatcattttccaaattatccacttctagcagccaaacaaacatggtatggaacttcttctttactattatttgcaactttttaaaaacatgttatatgactacaacctaatgaagttcatttgctaggcccgacgattgctagcatatcccggtgtgccacagaatacagaggcggatgaacactacacagatcaacttaacaagaaggagctatcctcaccatcgaaaatgtaagtattcgagtattataaaaaaagtaggataaacaacagatacattttaattttaccactaaaacttatgtccaggatgaagcacacccaagttgacaaagtcctagattctataattccagaaaaatgaagcttgttacatcctcatgacatgcatgaaggtataatactatatatactcctttgtgatacaaaacatattaccccccccccacattatctttcactcgccttagtacccattaaacagcaacaaataattaggcaaacattgttagcacaactaatcctatcttcctctttatgtaaaggaatttgcttttgcgtatctgtggagggcttcgtcacttttgaatgaaaaaacatctatgtacatataaatcacttggtgaagcctttctcaggcatgtgtgttgatgcaacctctgggaaacaaatgctatcagctgctgacatatgctacttcaatactgcttgatatgtattgcactctcagttccgtctactgttggtccaaactgcatctgtgtatatacagacgagttgtattaaactttctaaatctgtgtatactaatgcaacctcttgaaaacagttgttagcccttgacacgtatgctattttaatgctacttaatatgtattgcaatttggttttcctgtacagaactgctacaattcacgttccaatattaatcggaagctactgcagcctagcaaaa

SEQ ID NO: 94183 - DNA, 1809 bp, Zea Mays
atggccgcggacgccaccgcctccgcctcctcctcgtccgccgcatacctcccgacctcgcgcctggacatccaggccgccgtcgccaaggccgccgagctgcgcgcgctccacgccgcgctcctccagggcggcagcagcagcggcggcgccgccgccgccgcgtccaatgccggggcctacgccagcgctagccggagccccgccgtcatccgcctgccgccggccgcgtcgccggcgccggcccccctggccacggccgccgaggactaccccgtgtttgcgccgacttatgatgaagagcacttgggtggaacgaactacattcgccaagataacaggagcctgtccgagaactggagcggcatcggtttggaccatgatcatgatggcctagaagacgaggtggcgttctcggatttcgacaaccgcaacaccttctcttcgtcgaacagcgagctccgtttctcttcgtcaaatgagcacctgcggaacagaaaggcgtgcagaaaccacccgtcgctccttccgcccgccctctctgccgacagtttgcttaggtcagtcagcaggatgacggactcgactgaatttaaggccgttacgacgtgcaatacctgcaagcccgcaacgatcagtagggacgacaccgaagctgctgatgccaggtccttgaagaacctcaacagcaccgcgccgctgtcaaactcccggacaaggcgcaatgggccacacattctctcctggctcttaccgaagtcaaagaggaagccaaaaccagatgtgtccccaaacaccgtcgaatgcgagaacatgtcgcagcttctgaaggactggggtgtgttctcactggattccctgaggaaagaggtcgttgaggccaatgagcacagggacgccgcgctccaagaggtatcagagatgaaactatcactaggagagctgactgccaagctagtgagcctggaagcatactgttcggaattgaagaaggctctaaagcaagcgacgagcgcgaagaacatgcagtctcactcaaagagatcggctaggccagttagcgggagcagagacagcttcttgcccgtcagtcacgaagttatggtggaagggttcttgcagatagtatcggaggctcgtctctccataaaacagttctgcaaggtattgatacagcaagtcgaagatactgacaacgggctatcagataagctaaatctgctcctacgaccgtaccagatcacgctgagtgacaagcacccgaagctagtgctgtaccacctcgaagctctgatgaaccaagcgatgtaccaggacttcgagaactgcacgttccagaagaacgggtcgcccaggtgcctggacccgaagcaggagcagcaggagagcttcgcctcgttcgtcgcgctgcgcaacctgagctggaacgaggtcctgaagaagggcaccaagcaccactgcgaggacctgggccgcttctgcgaccagaagatgagctgcgtcgtgtccatcctgaactggtcgtggccgtgggccgagcagctgctgcagtgcttcttcgtggcgtccaagtgtgtctggctgctccacctactggccttctccttcgtcccgccgctgaccatcctacgggtcgaggaggaccgggcgttcgaccagacgtacatggaggacgtgctgctggacaagcagcggtcacggaatggtccgccgccgtcgtcgtcgcaggtgaaactcatggtgacgcctgggttctatgtccaggacaggctgctcaaatgcagggtgctctgcaggtacagcggctag

SEQ ID NO: 94184 - DNA, 4491 bp, Zea Mays
atggcgggcgtgtgcgggagcccgttctgctccagggaagcttcagctccagctccagcgtcatgtggacgatgggacgaactactcaactcctccacctgcgcgaacaacatcctggcgaccggcgccgctgcgctgctcgccgtcgtcctcgcgctgcagctgctcgtcagggtcgcaaggaacggactacgacacgcgcccgtcgtcgcgctcagctcgccgctgcagcgggccgccgtggcggccaacgcctgcctgggcctggcctacctgggcctcgcggcgtggatgctggggacggacctgacccagcgcgcctccgtctacctcccacaccggtggctggtgagcctggcccaggggctctgcctgctcctcgccggcttcgccttcagcgtcagggcgcagctgctcggagcggcgttcctccgggtctgggcggctctgctggccgcgtacgccgcgttcgtttgctgcacctcggtcgtgcacatggtcgcagacaaggtgctggccgtgaagacgtgcttggatgttctgtccctgcctggtgcgctgctgctccttgtgtacggcattcggcacgccagggaagaagaagaaggagatggtaacggaggaaccgaaagttctttgtataagcctctgaacgccgaggctcacgacgacggtgcggccgactcgcgtgtcaccccgtttgctaaagccggggttttcagcatcatgacgttctggtggctgaaccccatgatgaagaagggttacgagaagcctctcgaggagaaagacatgccgctcctaggcccctcggaccgagcgtacagccagtacctgatgttcttggacaacctgaacaggaagaagcagctgcaggcacacggcaacccgtcggtcttctggaccatcgtctcttctcacaagagcgcgatcttggtctcgggtctcttcgcgttgctcaaagtgctcacgctgtctgcaggcccagtgcttctgaaagccttcatcaatgtctcgcttgggaaaggttccttcaagtacgagggctttgttctggccgcggcaatgttcgctatcaagtgctgtgagtctctgtcccagaggcagtggtactttcgcacccggaggctagggctccaggtgaggtcgctcctgtcggccgccatctacaagaagcagcagaagctgtcgggctcttcgaagctgaagcattcctctggagagatcataaactacgtcaccgtcgacgcctaccggatcggcgagttcccgtactggttccaccagacgtggacgacaagcgtccagctctgcatcgctctggggatcctgtacaatgcggttggtcttgccatgattgcatcgctggtcgtcatcgttctcactgtgatctgcaacgctcctctgtccaagctgcagcacaagtttcagactaggcttatggaagcacagggcgtgaggctgaaggcgatgtcggagtccttgatccacatgaaggtcttaaaactctatgcgtgggagacgcatttcaagaaggtcattgaggggttgagggagattgagatcaagtggctgtcggcgttcaaccttaggaaatccttcaatggtttcgtgttctggacatcaccggttctggtctcggctgcaaccttcctcacatgctatcttctgaaaatccctcttgatgcaagcaatgttttcacgtttgtggccactctgcgccttgttcaagacccaattaggcagatgccggatgtgattggagtcgttatacaggctaaagttgctttcactaggataacgaagtttcttgatgcgcctgagctgagtggacaggccaggaagaaatactgtgtgggagatgaatatcgtatagtgatgaactcttgcagtttttcatgggatgagaacccgtcaaaaccaactctgaagaatataaacttggtggtcaaggctggggagaaggttgcaatatgtggcgaggtaggatcaggaaagtcaacactattggctgcagttcttggagaggttcctaaaacagaaggcatgatccaaatttgtgggaaaacagcatatgtttctcaaaatgcatggatccaaacaggaacggtgcaagacaatattctctttggatcttcaatggacaggcaaaggtaccaagaaacgcttgagaggtgttctttagtaaaagaccttgaaatgcttccatatggagaccatactcaaatcggggagaggggcgtaaatcttagcggtggccagaagcagcgtgttcagcttgctcgtgcattataccaaaatgcagacatttatcttctcgatgaccctttcagcgctgttgatgcccacacagcaactagtctttttaacgaatatgtcatgggagctctgtcagataagactgtccttttggtgacccatcaagtcgattttttgcctgtatttgattctgttctgttaatgtcagatggtgaaattattcgtgctgcaccttatcaagatttattggcacattgtcaagaatttcagaacctcgtaaatgcccataaagacactattggtgtttcagatcttaacagagtcagatcccatagaacaaatgaaaacaagggatcgattgatattcatggaagcttatacaaagagtctttgaagccatcaccagcagatcagctgatcaagacagaggaaagagaaatgggtgacactggtctcaagccttatatcctttacttgcgccagaataaaggcttcttcaatggctctatgggtattctttgccatgtgattttcgtatgtggccaaatagcacagaattcatggatggctgctaatgtccagaatcctgatgttggtacacttaagttgatttctgtgtacattgcaattggattcatcacagtgttcttcttgctgtttagatcgatagcacttgttgttcttgggatccaaacatcaagatctttattttcccagttactcaactcattgttccgtgcgccaatgtccttttttgattctacccctcttggaaggatacttagccgggtaaggatacttaaacaaattgttcatatccctgagatatattgggtggtatcttcagatttgagcattgttgatcttgatgttccatttggattgatgcttgctcttggtgccagcataaatgcatatagcaatctgggggtgttggctgttgttacatggcaagttctgttcgtctctgtgccgatgatggttttggcactcaggttgcagaagtactatttagcctcagctaaggaactgatgaggatcaatggcactaccaaatcagctctggctaatcacttgggagagtcggttgcagggtctataacaataagggctttcgaggaagaagatcgtttctttgagaaaaattcggaacttgttgacaagaatgctgcttcatatttctataattttgcagcgactgaatggctgattcaacgcctggaaacaatgagtgctgcagttctttctttttctgccttcatcatggctctcctccctgcaggaacttttagctctggctttataggaatggcgttgtcttatggtctgtccctgaacaattcctttgttttctctatccaaaaccagtgccagctatcaaaccagataatctctgtggaaagggtgaaccagtacatggacataccaagtgaagcagcagaggtcattgaagaaaatcgaccatcaccaaactggccccaagttggtagggtggagcttagagatctgaagatcagatacagggaagatgctccccttgtactgcatggaatcacatgcacttttgaaggcggagataagattggtatagtcggccggacaggaagtggaaagacgactttaatcggtgcattgtttcgtcttgttgagccaactggggggaaaataattattgactctgtagatatcaccacaattggcttacatgaccttcgttcacgtttgggtatcattccacaagatccgacactctttcagggaaccataagatataatctagatcctcttgagcaattttcggatcaacagatatgggaggttcttgacaaatgtcagcttcttgaagctgtccaggagaaggaacagggattggactcacttgttgtggaggatggctcgaactggagcatgggtcagaggcagctcttctgtttgggacgtgcactgctaagaagatgccgtgtcttagtcctcgacgaggccactgcatctatagacaatgctaccgatgcgatccttcagaaaacaatcaggacagagttcagagactgcactgtcatcactgtcgctcaccgtatacccactgtcatggactgcagtatggtacttgcactgagcgacgggaaactggtggagtatgacaagcctacgaagctcatggaaaccgaagggtctctcttccgtgacctcgtcaaagagtactggtcgtacgcatcgaatgggaatatctag

SEQ ID NO: 94185 - DNA, 2087 bp, Zea Mays
acctaccagccaaaccaagcaagcagggaatccccacaaggcagcagatggaagcgaaaggtggcggtggcgcggcgtggcgcgggcgcgggcgcggctagctaggccggctcgtgtgcgtgcgcgaggagacagccacagccatacagggatgctgcctgcttcgtgaccgtgctggtggtggtgggctgcagcctgcagctcgtatcacacgcccacagtgcaggaaggagggagtggaagaagagagaggaagttgtttttaaaggcaacagcgagtcccgctgctgtccctctccttcgccacctccctccctcactctcttccctccctctcggaggaggagagagaagagagggagccagtccagctccagccagccggacgcccggaccaacaccaccccgcctccccctccccccgccccaccggcccgccctctcgcgctgccgtacccacggccccacgcacgttcacaagtctcgtcgccgccgcaatggagtccggcggtggcggggacgaccagctgcacggcctcaagttcggcaagaagatctacttcgaggacgccgccggctccagcagcggcagcagcagcggcggtggcagcgcgcccgcgcctccagcgacgcagcagccgtcgccgccggccgcttcgcctagggccccggccggcggcggcaggaggggcagggccgcggccggcggcgcgggcccctcgacggcgcccgcgcccgcgcgctgccaggtcgacggctgcaacgttgacctcaccgacgtcaagcccgcctactactgccgccacaaggtgtgcaaaatgcactccaaggagccccgcgtcctcgtcaacggcctcgagcagcgcttctgccagcagtgcagcaggttccaccagctgcctgaattcgaccagctaaagaagagctgccgcaaacgcctcgcaggccacaacgagcgccggaggaggccgccgcctggaccccttgcgtcacgatacggccgtcacgctgcgtcgctcggcggtaaccaaaagctggtttttaccctgtgatgtcgtctcggcgaccaaagttcccgtcttttttttgtaaccgctaatgttcatgtgcttggtccagaagagcccggcaggctcagaagcttcatgctggatttctcgtacccgagggtctcaagcgccatgaggggtgggtttccggcggtgaggcccggtggtgaaagggtgcctggcggtatccagtggcaagcgggcttggatcctcgtcaccaccaaggcgcggtcgcgggatacggcgcccactatgggagcgagggtggtagctcgtcgtcggcgaggccgccggtgttccctggcccggagctgcccccaggtggatgccttgcaggagtccccgcggactccagctgtgctctctctcttctgtcaactcagccatgggatgctgcccacagccacagccacagccacgctgcgccaacagcgggtttcgacggcggcagccctgtggcgccctccctcatggcggcgagtagctacatcgcgccgagcccctggaccgagaccgactcctggggccacgaaggcgggcggagcgtgcctcagctgccacctgacgacgtccccctcggcgaggtgcactccggctcgagcagccaccacggccagttctcaggtgagctcgagctcgccctgcagggaaacaggccagcgccagggtcggcggcaccgccagcgccgcgcaataatcagggctccgcgggcacgttcgaccaggctggcaacacgatggactggtcgctctaggccgggggccgaaataaagcgcagcagatcctagccgcgcagggagatggaggaggctgaaagtctgatgctgcacgctgcttgcttagcttagagcatccagcatgataagagtgatgaactgatgcggtgtcaggagactagtttattctgtgcttcaccatgaactcgtctgtcgcggcgtctatgtagacagacggcacacgtccgtggttcgaagttaccagtatgcttgtcggggactttgctcgcgatgcattaatctcattgttcaccatccag

SEQ ID NO: 94186 - DNA, 1709 bp, Zea Mays
acctaccagccaaaccaagcaagcagggaatccccacaaggcagcagatggaagcgaaaggtggcggtggcgcggcgtggcgcgggcgcgggcgcggctagctaggccggctcgtgtgcgtgcgcgaggagacagccacagccatacagggatgctgcctgcttcgtgaccgtgctggtggtggtgggctgcagcctgcagctcgtatcacacgcccacagtgcaggaaggagggagtggaagaagagagaggaagttgtttttaaaggcaacagcgagtcccgctgctgtccctctccttcgccacctccctccctcactctcttccctccctctcggaggaggagagagaagagagggagccagtccagctccagccagccggacgcccggaccaacaccaccccgcctccccctccccccgccccaccggcccgccctctcgcgctgccgtacccacggccccacgcacgttcacaagtctcgtcgccgccgcaatggagtccggcggtggcggggacgaccagctgcacggcctcaagttcggcaagaagatctacttcgaggacgccgccggctccagcagcggcagcagcagcggcggtggcagcgcgcccgcgcctccagcgacgcagcagccgtcgccgccggccgcttcgcctagggccccggccggcggcggcaggaggggcagggccgcggccggcggcgcgggcccctcgacggcgcccgcgcccgcgcgctgccaggtcgacggctgcaacgttgacctcaccgacgtcaagcccgcctactactgccgccacaaggtgtgcaaaatgcactccaaggagccccgcgtcctcgtcaacggcctcgagcagcgcttctgccagcagtgcagcaggttccaccagctgcctgaattcgaccagctaaagaagagctgccgcaaacgcctcgcaggccacaacgagcgccggaggaggccgccgcctggaccccttgcgtcacgatacggccgtcacgctgcgtcgctcggcgaagagcccggcaggctcagaagcttcatgctggatttctcgtacccgagggtctcaagcgccatgaggggtgggtttccggcggtgaggcccggtggtgaaagggtgcctggcggtatccagtggcaagcgggcttggatcctcgtcaccaccaaggcgcggtcgcgggatacggcgcccactatgggagcgagggtggtagctcgtcgtcggcgaggccgccggtgttccctggcccggagctgcccccaggtggatgccttgcaggagtccccgcggactccagctgtgctctctctcttctgtcaactcagccatgggatgctgcccacagccacagccacagccacgctgcgccaacagcgggtttcgacggcggcagccctgtggcgccctccctcatggcggcgagtagctacatcgcgccgagcccctggaccgagaccgactcctggggccacgaaggcgggcggagcgtgcctcagctgccacctgacgacgtccccctcggcgaggtgcactccggctcgagcagccaccacggccagttctcaggtgagctcgagctcgccctgcagggaaacaggccagcgccagggtcggcggcaccgccagcgccgcgcaataatcagggctccgcgggcacgttcgaccaggctggcaacacgatggactggtcgctctag

SEQ ID NO: 94187 - DNA, 1706 bp, Zea Mays
acctaccagccaaaccaagcaagcagggaatccccacaaggcagcagatggaagcgaaaggtggcggtggcgcggcgtggcgcgggcgcgggcgcggctagctaggccggctcgtgtgcgtgcgcgaggagacagccacagccatacagggatgctgcctgcttcgtgaccgtgctggtggtggtgggctgcagcctgcagctcgtatcacacgcccacagtgcaggaaggagggagtggaagaagagagaggaagttgtttttaaaggcaacagcgagtcccgctgctgtccctctccttcgccacctccctccctcactctcttccctccctctcggaggaggagagagaagagagggagccagtccagctccagccagccggacgcccggaccaacaccaccccgcctccccctccccccgccccaccggcccgccctctcgcgctgccgtacccacggccccacgcacgttcacaagtctcgtcgccgccgcaatggagtccggcggtggcggggacgaccagctgcacggcctcaagttcggcaagaagatctacttcgaggacgccgccggctccagcagcggcagcagcagcggcggtggcagcgcgcccgcgcctccagcgacgcagcagccgtcgccgccggccgcttcgcctagggccccggccggcggcggcaggaggggcagggccgcggccggcggcgcgggcccctcgacggcgcccgcgcccgcgcgctgccaggtcgacggctgcaacgttgacctcaccgacgtcaagcccgcctactactgccgccacaaggtgtgcaaaatgcactccaaggagccccgcgtcctcgtcaacggcctcgagcagcgcttctgccagcagtgcagcaggttccaccagctgcctgaattcgaccagctaaagaagagctgccgcaaacgcctcgcaggccacaacgagcgccggaggaggccgccgcctggaccccttgcgtcacgatacggccgtcacgctgcgtcgctcggcgagcccggcaggctcagaagcttcatgctggatttctcgtacccgagggtctcaagcgccatgaggggtgggtttccggcggtgaggcccggtggtgaaagggtgcctggcggtatccagtggcaagcgggcttggatcctcgtcaccaccaaggcgcggtcgcgggatacggcgcccactatgggagcgagggtggtagctcgtcgtcggcgaggccgccggtgttccctggcccggagctgcccccaggtggatgccttgcaggagtccccgcggactccagctgtgctctctctcttctgtcaactcagccatgggatgctgcccacagccacagccacagccacgctgcgccaacagcgggtttcgacggcggcagccctgtggcgccctccctcatggcggcgagtagctacatcgcgccgagcccctggaccgagaccgactcctggggccacgaaggcgggcggagcgtgcctcagctgccacctgacgacgtccccctcggcgaggtgcactccggctcgagcagccaccacggccagttctcaggtgagctcgagctcgccctgcagggaaacaggccagcgccagggtcggcggcaccgccagcgccgcgcaataatcagggctccgcgggcacgttcgaccaggctggcaacacgatggactggtcgctctag

SEQ ID NO: 94188 - DNA, 188 bp, Zea Mays
gcctatcatgtcggaatggaattctttccattaaagaaagtagaataaatatacaaaaagaaatacacaaccttgaaatcagaaagagttcccagcttatagtaaaggctataatagttctagttttctttctcattagggaaggcgggctcgcaagcctagccttatttttagcggccgggagctaa

SEQ ID NO: 94189 - DNA, 807 bp, Zea Mays
gctaacttactacaaccaaaggagcctctcggaagttctgtgcattcgtgggatttcgtttggtcaactgtgtcatgttcggcgatttagcgtgatccagcagctaacatgtttaattatgaattgtatcgagggatgtctgatttgtatttgttcacaagatagctacttttgataaagcagctggtttccaggtaacgtgttctcctgccaatttgcttacacactattctattctacattgagcttaacagtcagacttttgacaggcacttatccaccccagctgctcttgaaggttaccacagctcttagtctgaggttttatattcaaccgttgcttagctaagactccacaaagctctgctgaaaagataaaagccttcaccttgtcatcgagtcaaagctaacctaagccaatcgaggtcgaaggaggtagcttcggggtgatgcgctgtggcttactatgcaagagacatggatacatgcaggagacgaagataaaggttacggaagacttgatctgcaagatgtatagatgggaaagtacaatattactgtcgtaatgtatgtagcggtcatgtatatggtttgtggacatgtttgtaatttcatacaaagttatatcccacgattctaaatagaggaataatgccatgcatagacacacactttcgagcctagatcacagaaccactcagtcttcgaagataccttcgagctcccgcttgtgaagttgaatgtatacttgtaatcatttggtatcttgtaaggagtaaaataaatatgagtttgcacattcagatg

SEQ ID NO: 94190 - DNA, 1579 bp, Zea Mays
aaatagaaagttaaaaataaatagtttctcgtagaaattctaagtcggacaacaaacaagcaggagagaagaatcagtgatctgtgctgtgagtacctgacctcttccagacagcctctgaaatccccttcggcccttcctgctccagcgggagcgcaccagcaatgtcgtcggcggggccaccgccgccgctgccgccgtggagcaggctggaggggcaggtggtgctggtgacgggcgcttcctccggcatcggacgcgacttctgcctcgacctggcgcgcgccggctgccgcgtcgtcgccgccgcccgccgcgccgatcgtctccgctcgctctgcgacgagatcaacgcctccgctgcctcccgagccccccgcgcggtggctgtggaggtcgacgtcgccgccggtggttcggccctggaggcggcggtgcagaaggcctgggacgcctttggccgtatcgacgccttggtcaacaacgccggcatacgaggtgcagtgcattctccattagattggcccgaggatgagtgggacagaatcatcaagacgaaccttaccggatcatggctcgtggccaaacatgtctgtcgacgcatgcgtgatgccaagctgaagggttcagtggttaacatcacctctattgctggccttaaccgtgggcatctgcctggctccacgggatacgcatcctcaaaggctgctgtgcattatgccaccaagattatggctttggaattgggcgcggatcgcatcagagtgaactcgattgcacctggactcttcaaatcagagataactgctcctctgtttcaaaagaggtggttgagcaccgttgcttcaaagatagtgccgcttaaggagcatggcgctactgatcctgcattgacgtcgctggtccgttttctgatccatgaagcatcgtcgtatgtgactggcaacatcttcattgtagactcagatctgctacgttgcaggcctggcggagacgcacaggtcctcaacccgtcctgtctgtctcttctgcagctattcgaggctgacgtttacagtgtgctagatggatctacaaacaagactcataaaagtgttaccggaaaaaggttagcttcatgctaggcaatctgtctagactattgttcccacatcatggcgacacttttacatgcatgccatggcaacaaactttacatgggtctcacacatcaccttccaagaaggttgccaagaaactttttagagatgaagacaaaggagacgatgatgttgttggttccgcagacgctgatgctgagtaacgtgctactggacacgagcactaccagctgtgaaggttcgcttttgggaactgtaccagtccgtctaggttactcttagaatttgtccccctgctgtgtaggatctatggtttcatgcttgtaagatatgggcagcgctatgctgcgtggttggctgcaggatgtctttttgtgtttttagggtagtaatgaactatgctatgcgtgcaatcctgcaaggaccatactcatgtacatcgcgagtatgtagtctagggctgaacaaatcagagaggc

SEQ ID NO: 94191 - DNA, 1286 bp, Zea Mays
aaatagaaagttaaaaataaatagtttctcgtagaaattctaagtcggacaacaaacaagcaggagagaagaatcagtgatctgtgctgtgagtacctgacctcttccagacagcctctgaaatccccttcggcccttcctgctccagcgggagcgcaccagcaatgtcgtcggcggggccaccgccgccgctgccgccgtggagcaggctggaggggcaggtggtgctggtgacgggcgcttcctccggcatcggacgcgacttctgcctcgacctggcgcgcgccggctgccgcgtcgtcgccgccgcccgccgcgccgatcgtctccgctcgctctgcgacgagatcaacgcctccgctgcctcccgagccccccgcgcggtggctgtggaggtcgacgtcgccgccggtggttcggccctggaggcggcggtgcagaaggcctgggacgcctttggccgtatcgacgccttggtcaacaacgccggcatacgaggtgcagtgcattctccattagattggcccgaggatgagtgggacagaatcatcaagacgaaccttaccggatcatggctcgtggccaaacatgtctgtcgacgcatgcgtgatgccaagctgaagggttcagtggttaacatcacctctattgctggccttaaccgtgggcatctgcctggctccacgggatacgcatcctcaaaggctgctgtgcattatgccaccaagattatggctttggaattgggcgcggatcgcatcagagtgaactcgattgcacctggactcttcaaatcagagataactgctcctctgtttcaaaagaggtggttgagcaccgttgcttcaaagatagtgccgcttaaggagcatggcgctactgatcctgcattgacgtcgctggtccgttttctgatccatgaagcatcgtcgtatgtgactggcaacatcttcattgtagactcaggtgccaccatacctggtgttccgatattctcatccctgtaattcccccccttaaggtttagttcattgtaccttagtttcatatggttgcataaagcagacagttaaagactccatggaggaagcactgctggctgtatagttcattcccgacaatattccatcatttttgctgtccactattgttttaatgtattttctccagagacgcgtagtttggtacttgtatagaatgacaatctttaagatactcctttattgtctaatctttcaaaacaccaatcaggatgaataaattgcctaaaagtgtcatttaagcac

SEQ ID NO: 94192 - DNA, 2498 bp, Zea Mays
gaaaaaagggaccagagggccggaagcccggaaccaaaacctagacgaaccacacaggcagtcaggcacagcgcgggccggggagatagataggcagacaggcaggcaggggggcgacggcacggggcggggctagccaaccagaccaacccaaaccctagctcaccgctcgttccattccaatccatggaggtggcgctatgagccgccgccgggacggcgggacgtggagctggtgcggccggggaagacgagtcgaggatgacggccagatcggacgatcccggcgtctcgccagggacgtcggcggcggctggcggcgagatctggggcacgtgggaggagctcctcctggcgtgtgccgtacggaagcacggtaccgccagctgggactccgtggccatggagatgctgtcccgctgccctcccgccgcggccgacagcctcacgcccgctgggtgccgcctgcggtatcgcctgctccaccgccggttcaccgccgccgccgccgtaaacggtgacgaggagcccgacgcggcctccgccgactgctgcgtggaggagctccgcaagctgcgcgtcgccgagctccgccgcgaggtcgagagatacgacctctcgatcgggtcattgcaatctagagtggaaaggcttaaagaggagagagcgaggagcatctccggcgaggccaatccagtaccggcggtgaaggaggacggcgaggaggagccggcggaggggaggaaagaatctctggaggaggagggcgacgatgccggcggcggggaggaggatcgtgtctccggcggcgagtccgggcggtcgtgcaaggagtccaactcgtcagatctgaagcggccgcggccagcgcgagacgccggggacggcgacgcggcggcgaggagggaggacgagggggcaggagacgccgcccgcgagtcgtcggctgtgaagcgcgagcaggtctccggtgagtcggtggttgggtccaaggacacggtggcggcggctgacacggagaaggagagcagcgacgtgcagagctcggccagcccgtcccgtcgccgcgagcgggagatcggcgccggcgaggacgcggatgtggcctcagcgccgccgccgccagcgcccgcagcggcggtcctccccgctgcggaggccgaggcgttgcgcgcgttcctcgaggtggtgcgaaccagcaagccgggctccgtgttcgagcgccggctcgagagccaggatattttttcttttccactttgtcggttctttcgctgctccactgaccgctgggcccaaaaatgccgctcgcaggacgacgcgaaatacaggtgcaccatcaggcgccacgtggacctggagacggtgaggtccaggctggacggtgggtccggcagctacgcctcggcgaccgagttctaccgcgacctgctcctgctgtgcgccaacgcgctggtcttctacccgcgcggctcgcccgagcgttccgccgcggcgcggacgcgcgcgctcgtcgccaagcacatgtccaaggaccagccggggccctcggggaaggctgtcgcggggccggcggcgtccaagaaggccaaggcggaggccgacgttgggtcgctgctggagaagacggcgcccatcatcgtgtgccggaagcggagctctatcgccaaggccgccgcggcggccaccgccaaagaggagagatcggagaaggcggagtccgacaaggagggcgagaagcagcaggaggcggtgggcaagaggaaggcggcggccgccgccaaggacagggcggcgtggggcccgagaacgaacaagacccgcggcgggcctgctgtccggaaggcgtcggctcagagccacaagggggcgtcggcggcggcggacaacggctcggacagcgacgcaccgcccgaggaggccaagaagcagcctgccgctgacaagaaaggtggtggtggcggcggtgtcgccaagaagcgcaacgccgtcaacttcctcaaccggatgaagcaaggtggctcggcgccgtcgacggagcgggtgtcgctactggagacgctgaagctctcggccgcggcggagcagaagaaggccgggaaaggcgagggcaaggagcccgcgggcgggtccggttccaagaaggccacgccggggaggaggaacgttggcaggccaccgaaacgcgcggctgcccctccatccccgccaccgtccaagagggcaaagggcggcggcggcggcgggaaacgcgggggcaggaagtgaagccaagtgggatggagtgggaagcattaggaagctgtaggcccagtctcagaccgtcccagctcaaccgtgtgtaaatgacgtagggttgtaggagcgttcggtccgagcttttgtaccgtatgccagtggtgtaggggtggtactgttttttgggaggaaaacaggatgagttgacctgcgctcgcgggactgcattgatgaagagatggattgtggaagacgattcg

SEQ ID NO: 94193 - DNA, 105 bp, Zea Mays
tttcttactattatttgtaggttattaagtgtactacaacttttatatttggcccaagtcatgatcataaggttttcatgaccttttgatcctacttacatctag

SEQ ID NO: 94194 - DNA, 558 bp, Zea Mays
acattagagcgcagggaggatcttgctgaccgggacaacgctccacgaactatagtgatcttgctgatcgggaggatcttgctgaccggcgtagcaccaaccattctgcagcgagcaagttgtctctatggctggagatggttggtgcgacgccgacgcagaagaggaggcggaggtgagcacgcccggatctagcgtgaggtcggcgttcgtcgtcacgtcgggcgagaaagaggtggtggagatggacgcgtccagctccgacgttgtctcggcactcgtcgccatggcgagctggagcgtgtcgtgctgggcaccagtgtgctgtcgggtgaccgcaaagaaggagcgagaagcgtcagaatgtgaagtttcaaatggaactctcgagaagactcttctcgtccatttttttccttttttaatcgtcactgatgcagcgacagacaataatcgttcatttgtgatcgaacggcacagagaaaaaatactgacgtggaccgtctagctaggctgttttgcgttcgcgcttaatatatagaaagaatgaccgctcca

SEQ ID NO: 94195 - DNA, 1597 bp, Zea Mays
agtgcctctggtctcaaaaataatgtgcaaaaatccaatgtctaccccatacagtgttcagaagaaactctcttggaagtccaaagtctgctacggtgtgagatcgcagcttttccttgcaagtacttgggacttcccctatccttgcacaagctgtccaagcaacatttccagccgtatgttgataaatttgctgaccaacttcctaattggaaagctgatttgatgaccagagcaggcaggagaatactagtgcaacatgtactcacaggtatgactgtgtatctggcaatggcaattgatataccccactgggcagttgatgctatagataaaataagaaagggctttctttggagaggaagaaaagaagctaaagggggacactgtttggtggcttggggcaaggtgtgttgcccacttcagctgggtggactgggtatctctagtctaccggaacttggatgggccctccggatgcgatggctgtggctacaaaaaaccgactctagaagaccttggacagggcttcctattcaggttccaagtaaagccagagcgttcttcagtaaagtccttgtctcgatggtaggtaatggacatagtaccctcttctggtccgataactggttgcagggtaaaagcatctcgatcattgcccctagcctattttctataatcccaaagaagatagcaaaaattagaacggttcatgaggccttgttaaacaacagatggatttatgatattagaggtggtcttactgttggagttctggcagattactttaagctctgggactgtctctctggttttgagctgcaccctctcattgaagacagacacatctttagtatagcccgagatggaaaatattcagcgaaggcagcttacaagggtctcttcctgggatcctgtgcatttggacactataagagggtttggaaaacttgggctccatcaaaatgtcgtttcttcctctggctggtggcccataacaggtgctggactgctgacagattagcaaaaagggggctcaatcatcctagcagttgtccattgtgtgatcaagaacctgaaactattaatcacctgctggtctcatgtgtgtttgcaaggattttctggtataatctgctcagaaagttcggattggataacttggctccccagccgggcctgacttccttcctggaatggtgggagatagcttctgaaacagttcagggcatggtcaagaaaggtctgagttcgctgatctctttaggggcctggacgatctggaatcaccgtaacagatgtgtgtttgatggacagactcccagtctcccctctatccttcggcaggctgatgatgaaagaagactttgggaattagctggggccaagggtctctccttcttggcagcttctttgacaaatggttgaaccctactgtttctattttagtagttttctgagtctggcttccttggactctttcacttatgtgcggtactggcctccgtaaggagttaaatgttgtaatcctggtctactatagaccttttttcctcttcttaatatattttaaggcgcagttcccctgcgctttcca

SEQ ID NO: 94196 - DNA, 1605 bp, Zea Mays
cagctctcaaggtcatggtcttatggaggacaggaggagcatggtggtgctacctagcaagagctccccactataaagcgcccccacacaccataccacagctcagagcttcttctcatcatctgatcgatctcaccacgtgcctgcgtagcaagccactctgtatgcaccatcaccaccaggaccaggccatgggcgacgcgctgtgggacctgctcggggaggagatggcagcggcgggcggggagcacgggctgcccccggggtttcggttccaccccaccgacgaggagctggtcaccttctacctcgccgccaaggtgttcaacggcgcctgctgcggcatcgacatcgccgaggtggacctcaaccggtgcgagccgtgggagctccccgacgcggcgcgcatgggggagcgcgagtggtacttcttcagcctccgcgaccgcaagtaccccacgggcctccgtaccaaccgcgccaccggcgccggatactggaaggccaccgggaaggaccgcgaggtgctcaacgccgccaccggcgcgctcctcggcatgaagaagacgctcgtcttctacaagggccgggcgccgcgcggcgagaagaccaagtgggtcctgcacgagtaccgcctcgacggcgacttcgccgccgctcgccgcccctgcaaggaggaatgggtcatctgcaggatactgcacaaggcaggcgaccagtatagcaagctgatgatggtgaagagcccctactacctgcccatggcgatggacccttccagcttctgcttccaggaggacccaaccgggcatcccctcccgaaccctagcggctgcacccccttccaccacggccacccccaccatagcatgcagccgccgcctccattgccgccgagcaaccatgctggcaaggccgtcttcaccggagcagcagcagcctgctgcatgcaacaagagccggcagacggcagcaacagcgccgtgctgcccatgccgccgttccctcccttcacccccatcgtcgccggcaagccggcggccccggcgccgccgccccaggttgtcaacgccggtccacaggagccaccgccacctacctggctggaggcctacctgcagcacactggtgggatcctttatgagatgggtccaactgcagcgcccaggggcgcgtgatccggaccgtcggttccttagggttaccccctacgtacgtactgaaacactgatgatccatcgatttacctggtctgtaatgtgcggtgaagcttagtatttccaagtgacatatttcgacaagcacttgtagttattaaaaaagagttatcttgtattcggtggcatcattagtcgtcgttgttatgaaatcatgtgtgctcataacatgcatgaatgcatgcatttggatcatcgatcagagcagtcctgagcttgtacgtgctacgtactgtgctcatgcatccatccacatgcaaagtggtgcttgctaaaatgtactatccaaatgtctgtttgtttagcatgcatgcaatgatatatctatcggaacttgtttcctttctagtttactgtttgtttcggattaatgtcagatgttcggact

SEQ ID NO: 94197 - DNA, 1801 bp, Zea Mays
tctccatcttttaacctttccgttccatacatatctctctctatttctctgggacaaaggaacaaagagcgagcgagagagagagagagagcagctctcaaggtcatggtcttatggaggacaggaggagcatggtggtgctacctagcaagagctccccactataaagcgcccccacacaccataccacagctcagagcttcttctcatcatctggtagaaagaaagagtgagagtgaggttggcaagggtatagggttcttggtcgatcaaatacctttcccctcttggattctcatcttcctgcttcgttctcaccagatcgatctcaccacgtgcctgcgtagcaagccactctgtatgcaccatcaccaccaggaccaggccatgggcgacgcgctgtgggacctgctcggggaggagatggcagcggcgggcggggagcacgggctgcccccggggtttcggttccaccccaccgacgaggagctggtcaccttctacctcgccgccaaggtgttcaacggcgcctgctgcggcatcgacatcgccgaggtggacctcaaccggtgcgagccgtgggagctccccgacgcggcgcgcatgggggagcgcgagtggtacttcttcagcctccgcgaccgcaagtaccccacgggcctccgtaccaaccgcgccaccggcgccggatactggaaggccaccgggaaggaccgcgaggtgctcaacgccgccaccggcgcgctcctcggcatgaagaagacgctcgtcttctacaagggccgggcgccgcgcggcgagaagaccaagtgggtcctgcacgagtaccgcctcgacggcgacttcgccgccgctcgccgcccctgcaaggaggaatgggtcatctgcaggatactgcacaaggcaggcgaccagtatagcaagctgatgatggtgaagagcccctactacctgcccatggcgatggacccttccagcttctgcttccaggaggacccaaccgggcatcccctcccgaaccctagcggctgcacccccttccaccacggccacccccaccatagcatgcagccgccgcctccattgccgccgagcaaccatgctggcaaggccgtcttcaccggagcagcagcagcctgctgcatgcaacaagagccggcagacggcagcaacagcgccgtgctgcccatgccgccgttccctcccttcacccccatcgtcgccggcaagccggcggccccggcgccgccgccccaggttgtcaacgccggtccacaggagccaccgccacctacctggctggaggcctacctgcagcacactggtgggatcctttatgagatgggtccaactgcagcgcccaggggcgcgtgatccggaccgtcggttccttagggttaccccctacgtacgtactgaaacactgatgatccatcgatttacctggtctgtaatgtgcggtgaagcttagtatttccaagtgacatatttcgacaagcacttgtagttattaaaaaagagttatcttgtattcggtggcatcattagtcgtcgttgttatgaaatcatgtgtgctcataacatgcatgaatgcatgcatttggatcatcgatcagagcagtcctgagcttgtacgtgctacgtactgtgctcatgcatccatccacatgcaaagtggtgcttgctaaaatgtactatccaaatgtctgtttgtttagcatgcatgcaatgatatatctatcggaacttgtttcctttctagtttactgtttgtttcggattaatgtcagatgttcggact

SEQ ID NO: 94198 - DNA, 468 bp, Zea Mays
gatgaggcggtcattggcctcggtgctggcaatcacccagtcgctgcgccagttttcccacctcgcaccgccaaaggtggggatgtagactacggtcggatctgtcctcgtctagaagtagtaggcaccgatgtggtccctagtcttcccgaacttgaccagcacgaagaagtagcggaagagggaagtgcagggggccacacctacgaacatcttgcagaggtggacgaagattgctgcctggaggatggagtggggtgtgaggtgttgaagctgaagcccaaactcctccaggcgcagcaggaagaagggcgaaatcggcagcgccaacccgcaagagatgtaggaggtgaacaacacgaactcctcggcggcgagatcgccaagggggggggggggcagcgccggcacggattcttctggcgagccctggcgcactccacccaagcaggccacgcaccagattaa

SEQ ID NO: 94199 - DNA, 3071 bp, Zea Mays
tctacctacgtgaccccaagcgccgagcccgctgatcaatccatttcccatttccccatcccgagaccagggccaggcacgcaccaggaaccacccacggcggccaccgcccccgcccacccgcgcgatcggtccgccccctgcgcattgcggcagacctacctacctcggtgagccgtgcccgtgggcgaaccacccctcccaatcccacctcctccccaccggaccggcaattcggcggtgtccgagccgccccgtccgtccaccccgcgctgttggatcgggccaccgccgccgagaaaaaaaaagctgcctttttatctccttcggcccggcgggcgcgccgagctgtgatccggcgccgcacacctgggctctggtggttccggttcttatccggaaagggggggcggcatccgaggcggggcgccacgggcgccacgtgacgagcggttggcgatggcgacgacgggcgcgggaaagcgcagcggcgaggcccgcgcgccgaggcttacataaggaggatcccgactgcccgtaccgtaccgtcgcgtgggaagggaccgaggcgcggagatctgggctgttcctgagccgccgggatggggaccgcgctcgacgcggcggccttcgggtcggtggacggcgtggtgggcgagatcatgcggctgcaccgcgccctgccggcgcgcccggcgccggaggaggcggaggccgccgaggcgctggtgcgcgccgccgaccgcgaggagcgggcgcgcctcgacgccgccgcgcgcttgcgcaggccgcccgccgtgcccgacgagctcttcggcgtcgccctcgagatgcaccgcgcgctcgccgccttccactgccgcgagcagaagcgcgacgccgcgcgcctcctcgagctcgacgcgctccacggcctcttcgacgacctcatccagcgcgcgtcgcagtgcgtgccgtccagctccggctccagctccacccgcgccgcgccccgcgtcgccgctgcgaccaccgctgccgcctcgtcttccttcgcagccgcgtcgtcatcggcggtggccgctgacagcggcgctcaccgctactcgtcgatggaacctaatgggttcagcgcgccgaggatggtgaccggcatggggcgcgtctccatggacgacagctacgtcaagaaggccaaggccgcagtgtgggacgacagggttgtggcgtcgagctcccatatgccgcgaggagcagtttctgcaaactccgtggcgactcctgtggacggcggctatggagatgacaaccagaaattgaccctcattaagctagctagcatgattgaagtggctgcaaagaaaggcgctcgcgatctcaacctgcaaggcaaactcatgaaccagatcgagtggctccctgattcaattggaaagctcactggacttgtcacccttgacatttcggagaatcggatcttggccttgccggaagcaattgggatgctttcttctttggccaagcttgaccttcacgctaacagaattgctcagcttcccgagtcgattggggatctttccaacctgatatatctcgaccttaggggcaatcagcttgcatcattgccggccagtcttggtaggctggtgaagcttgaggagcttgatgtgagtgcaaaccatcttacctcactccccgactcaataggaagccttacacgcctgaagaagttgatcgccgagacaaacgaccttgatgagctgccatacactatcggcaattgtgtgtcactggtggaactgcgggtaggatacaaccacctcaaggccctcccggaggccgtcggaaagctagagtctctggaggtcctctctgtgcgatacaacactattaggggccttccaacaacaatggcatctctcacaaagctgaaggaggttgatgcaagttttaatgagctcgagtctattcccgagaacttctgcttcgtcacttctcttatcaaactaaacgtcgggaataatttcgctgacctgcaatccctgcctcgttccattggcaaccttgagatgctggaagagttggatataagcaacaatcagattagggtgcttcctgattcttttggaaacctgcagcgtctccgtgtgctccgcgcagaagagaaccctctccaagtgccaccaagagatgtagctttaaagggagctcaggccgctgttcaatacatggctgaatatgttgccaagaaagccacaaggtcacaaccgatgaagacaaagaagacctgggctcagttctgctttttctcccggcctaacaaaagaaagcacgaccgaatagacaccgcgtcgtgattcactgtgagactgatgaacattaagctgctgtttcctcaactctacacttctgaagagaactatcgggtgcatcgccttcgatcgctaccattgtgttgtatgggtcaacaagatgtgatgcccagaagcttttccttggacaatgctgcagcctgcagcttctaacctgtagaaccaagatggtcaggtttcaccgaacctactcactcttgtttccaccaggccaactcaactctgaatgaccgctggaagagtccaagtcttacttcagcttaagaatctagaagtggtttagtctctcggcctttttcgtatgatcgagagcagctgagaagagaactggaagattgctgaagttcggtttgccctgcagtgcaacttgtcaatattatacgtaatatacatgcatccggtgaaactaagaccttggttattactaggatttgctttcagagatcatttttatttctctatatttgagcgtatgttctttgaaacttctaagttagaactaaaatcctgcaagataccagatgtgctggattgaaaacgactgcagtcgaatcctttttgtgtggcttaatatttatttagtgcattctgagaagtttctgttgtaactagtgtactagaatctttctgaagagattcataaaacacagtattttgcatgtttttctctgataaattgtaacgtgggctattacaagcagctactcggagcatttcagg

SEQ ID NO: 94200 - DNA, 612 bp, Zea Mays
gttcccggtgccgtccaccgaccaccggtgacacggcgcccatagcaagagttcaggaggagcgcggagccgttgctggtggtagcggtgtccgtgaggcgcggcgagatgtctgtgcggataaaggcggtggtggacaggttcgtgatggagctcaaggaggcactggacgcggacatccaggaccgcgtcatgaaggagcgggagatgcagacctacatcgcggagcgcgagcgcgaggtcgccgagagggaggctgcgtggaaggccgagctctcccgccgcgaggtagtgcagtgggctgtgaaatcaacatttgtctgggaccccgcgcggtttgacatgttcgttttcggtttccggcaggctgagatcgcgaggcaggaggcgaggctgaaggtggagagggagaacctggagaaagagaagagcgtcctcatggggacggcttcgagccaggatagccaagacggagcgctggagatcaccgtcagcggcgagaagtacaggtgcctccggttctcgaaggcgaagaagtgagaggttgaaccaggacgacacagtcactcagggtcaggggggggtagtggtacaccgaaatctcagtttgga

SEQ ID NO: 94201 - DNA, 534 bp, Zea Mays
gttcccggtgccgtccaccgaccaccggtgacacggcgcccatagcaagagttcaggaggagcgcggagccgttgctggtggtagcggtgtccgtgaggcgcggcgagatgtctgtgcggataaaggcggtggtggacaggttcgtgatggagctcaaggaggcactggacgcggacatccaggaccgcgtcatgaaggagcgggagatgcagacctacatcgcggagcgcgagcgcgaggtcgccgagagggaggctgcgtggaaggccgagctctcccgccgcgaggctgagatcgcgaggcaggaggcgaggctgaaggtggagagggagaacctggagaaagagaagagcgtcctcatggggacggcttcgagccaggatagccaagacggagcgctggagatcaccgtcagcggcgagaagtacaggtgcctccggttctcgaaggcgaagaagtgagaggttgaaccaggacgacacagtcactcagggtcaggggggggtagtggtacaccgaaatctcagtttgga

SEQ ID NO: 94202 - DNA, 2012 bp, Zea Mays
gcgcctccctcgcgggttctgctgtaatacgtgtgatgaactccttgttcaaacgcctccctcgcaagcgcgttgccgccactcgccggagcagccgccgcgtccacgcgcaaccgcgcccgcacccttccctcactacgttctcccgcctctgcgtagaggggccgctcccagccgcgctcgcgctgctctccgagctcgccgcggcggggctccgcgcggaccccgtctccctcacccgcctcgtcaagctctgcgtgcgccacggcacggcagaccacggccggctcattcaccgccacgtcgaggcgcacgggccgctgccccacgacggcgccggcggcctctttgtctccaactcgctcgcctcgatgtacgccaagttcggcctgctcgacgacgcgctcaggatgttcgacggaatgccggtgaggaacgtcgtcacctggacgaccgtcgtcgcggcgctggcgagcgcggacgggaggaagcaggaggcgctcaggttcctcgtggccatgcggagggacggggtggcgcccaacgcctacacgttctcgagcgtcctcggcgcgtgcaccacgccggggatgctcacggcggtgcacgcgagcaccgtcaaggcagggctggactcggacgtgttcgtgcggagctcgttgatcgacgcatacgtgaagctcggggacttggacggcgggaggcgtgtgtttgacgagatggtgaccagagatttggtcgtttggaactcgatcatcgctggttttgcgcagagcggagatggggtcggtgcgatcgagctgttcatgaggatgaaggatgccggattctcgtctaaccagggcaccttgaccagcgtcctgcgggcgtgcacggggatggtcatgcttgaagcggggaggcaggtgcatgcccatgtgctcaagtatgacagggacttgatcctgcacaatgcgctcctagacatgtactgcaagtgcgggagcttggaggatgcggatgccttgttccacaggatgccacagagggatgtgatctcatggagcaccatggtatctggtttggcgcagaatgggaaaagcgtggaggcattgagggtttttgacctgatgaaatctcaaggtgtggcaccgaaccacgtaacgatggttggagtactctttgcctgcagccatgctggtctggtggaagatggctggcactactttaggtccatgaagaggctctttggcattcaacctgagagagagcaccacaactgcatggtcgatctccttggccgagctgggaagctcgatgaagccgtggaattcatccatggtatgagcctcgagccagattcagtcatctggagaacgctcctaggagcttgcaggatgcataaaaacgccagtcttgcagcatacgcagccagagaaatacttaaactggagcctgacgaccaaggcgctcgtgtgctgttgtcgaatacatatgcagatctgcggcagtggacagatgctgagaagccatggaaagcgatgagggaccgaggcatgaggaaagagccagggcgaagctggatcgagctggagaaacgtgtccatgtgttcatcgctggggacctatcacacccgtgctccgacaccataattcaggagctgaaccggttgatcggaaggatcaagtctcttggttatgttccccagacagaatttgtgctgcaggacctcccgaccgagcagaaagaagacctgctgaagtatcacagcgagaagatggcgatagtgtttgggacgatgcatgcggtggatgggaagcctatcaggatcatgaagaacctgaggatctgtggcgactgccacgcgttcgcgaagcttgtctccaagagcgaaggcagggtgatcgtcatcagggaccctgttcggttccaccatttccaggatggagcttgctcatgtggtgactactggtagccaggtactgatgttgttctgtttccagattggtttcacttatgggtgacaatggga

SEQ ID NO: 94203 - DNA, 1938 bp, Zea Mays
accaccctgcattcccatccagccgtcgccactcgccgccgctaacccagccccgtctcatcgccatttgaaccaggaatcttacgcggaaccgccccgcttccatggcgacggcatccactacgctgctcctctcccttgccttcctcgccttcgcctgggcggcgtcgccgtcgccgtcgccggatgcggaggcgatctcccggttccaggagtacctccgcatcgacacggcgcagccggcgccagactacgccgcggccgtggccttcctccggaaacaggccgccgatgctggactcgaggcgcgcacgcttgagctcgtcgccgggaagcccctgctgctgctgcggtggcccggtcggcggccgtcgctcccctccatactcctcaactcccacactgacgtggtgccgtcggagccgaacaagtgggaccacccgcccttttccgccgccctcgatgagccatccggtcgcatctacgcgcgaggctcccaggacatgaagtgtgtggggatgcagtaccttgaagccattcgccgtctccgttctgcaggatttgttccagatcgaaatatctatataacatttgttcctgacgaggagattggtgggcatggcggtgttgaaccatttgtttcatccaaggagttcaaagatatgaacgtggcattagtccttgatgaagggcttgcctctccaggggaggagtaccgtgtgttctatgcagagcgtagcccttggtggcttactataaaagcaacaggcgcaccagggcacggtgcgaagttgtatgatggtagtgcaatggagaatttgatgaagagcgtggaggctattaggagattcaggacatcacagtttgatctagtgaaatctggagagaaggctgaaggagatgttgtatcggtgaattttgcgtacctgaaggctggcacacctacaccaacgggttttgtcatgaatcttcaaccatctgaagcagaggtaggtcttgacatccggatccctcctagtgcccatgtggaagcactggagaggcgccttgttgaagaatgggcaccaccttcacgcaacctgaccttcgagtttaaacagaagatgtctgtcctggacaactttgggaagccagccatgacagcagcagacagcacaaacccatggtggacgttgctcgaagaagctgtgaagagcgctgacggcaaactcggcaaggcggagatattcccagcctctactgacgctcgctacttccggaaaatcggattaccagcatttggcttttcacctatggcgaacaccccgatactgctccatgaccataacgagtttctgagcaaagacgagtacctcaagggaatcgggatatacgagtccatcatcagggcactggccactcatgaagatggcggcaaagatgacgaatccagggcagagctgtgagcctgtgactgaggagaaccttgaaccttacctcgcttttgccgcagaccaaatggagcactggaagtcatgtttcggcattatgcagctgcctgtgcttctgctgcggcgtcggagcgatagaaccacaaacatcatctttgtacattctcgcaagagggcttatgcgcttaataattgatgaaattgagatatgtagttcgtctgcgcagttcagggctcacccagttcctacttgatgctgctttggtattggttgttgtatcaaaacttatattcacgtcgcttcgtgcttcattgcttttgtgcctttgttttcatttcatatggtagcatgacagtcgattatgcacaaaatcctcggaggggctcgtttagaaactcattcttttgtgatgctctttcatttactaaggtgagcaatcccaaagatatcattgaatctatctatactattatataggaattatataggaggtgtttggtttctaat

SEQ ID NO: 94204 - DNA, 614 bp, Zea Mays
aattacaattgccttagattctgtcagtttctccttttgtagtgtgaagtacctctctctgctatgctgctaccagcaatagctggagtgcttgtttgaattgttcattgccacggttgtgatttggtacaatatttcttacccctccatagtccatagacatatttggcaaaacttgccatgtgtgtggtgagcaaattgttacaccttaggcttgttttggcaaagaatcgtggcgatgaaagaaaggtaaccaaacatggcacacccaatttaatttgttttccatactatgtacatattttttttacaatctataagtcactatgttgtaattataagaattagtttcatgcaattctacttatttggtgactgaattaattctggaacaggcaattgcacaagtaagaatagtgtactcttttgtcggagagagcaaagcgctcaattcatattctgaagcaatctagaacacactgaagcttggttacaaagctgggatggccaaaggtcttggaattggatgtacttatgggatagcttgcatgtcatgggcattggtattttggtatgctggggtcttcatcaggaatgggtagactgatggtgga

SEQ ID NO: 94205 - DNA, 1685 bp, Zea Mays
ctaccttttcttggaccttttaccatttctttggcccatttcttttatctcccatttccgccagttcgcaatccctaatcctgatctcacttaagcgctcgtgagctctctccagtggctaaagattgcagatttgagttatagtccaagaaacgggtggtggtccgccatggaggtgaggtccgagcaagggctgatggcggggagggatctattcggtatgccaaagagcccgccggcgccggtttccgggccgccggcgtccgccgccatgcagagcgtgcgcatggcgtacacctcggacggcaccgctgtgttcgctccgatgagatcctcggccgcgacgccgtcttaccagccgcagggtgcagcccacggcgctagcatgtccgcggcgacaatcattggaggcaatggcgcggcagctgcgccgagcatgggggagccggtgcccaagaagaagcgcgggcgaccaaggaagtatgggcccgacgggtccatggcgctggcattggtgcctgtgtcggcggctacggggtcgccgacgacagggcagggttcttctgggccgttctcaccggctgggtcaaatctgacgaactctctgttggtagcctcgccggacgggttcaagaagcggggccggcctaagggttctaccaacaagccgcgcatggatgctgctggatcgtcaggagctggatttacacctcatgttatcacagttcaagctggggaggacgtgtcatcaaagatcatgtcgttttctcagcacggaccgcgtgcagtctgtgttctctcagcaaacggtgccatatcaaatgtgacgcttcgtcagactgctacatcaggcggaactgtaacatatgagggtcggttcgagatactgtcactgtcggggtcattcctcttggtggaggatggtggtcaacgcagtcgaactggagggctcagtgtgtcgttggctggtcccgacggtcgtgtgctgggcggtggagttgcagggctcctcgtagcagcttcgccagttcagatagtactgggaagtttcaattctggaggcaaaaaagaggcaaaaaagcatgctccttcaggacccacaccagcgccactgaaggtcgctcctccgacaacaaccaggatgggacccaacagcagcagccctccttcaagaggaggtacattgagcgagtcatccggtggcgccggaagcccaccaccgccgctgcatcaaggcatggctgctagcagtagcaacgaccagccgccgttcctgtccagcatcatgccatggaaatgatcctcttatgtagtagtataagtcagaagctttgagtagggaggtaaatttgtagctctactgtaggtttaaacctgaattcctgtgctacttaggtgtattgagctgtaacggatgtgatcatttgagagctaccaagtgttgtttagttaaatgttttaccaaggcatgtcgatctgagccagaagattcttgctatgaatttgttgtttgcgcttgacctttttttctgctgtagagaaggttgtggagccaaaggttctgcacaagaatacgttgaaagcatttggcatccttgatggcatgccgaaccattgaaggttccgtgacagacagatggcgtggctaagtttgtttatcatttgtaaaaaaagcaaacaaaaaa

SEQ ID NO: 94206 - DNA, 1732 bp, Zea Mays
attttgcttaccctcttcgacttattgttcttttctctttattccgcaactgttgggtccgaaattatggtgatctgttcggtatccccccctgcgaaatccggacaaaagttcgcaatccctaatcctgatctcacttaagcgctcgtgagctctctccagtggctaaagattgcagatttgagttatagtccaagaaacgggtggtggtccgccatggaggtgaggtccgagcaagggctgatggcggggagggatctattcggtatgccaaagagcccgccggcgccggtttccgggccgccggcgtccgccgccatgcagagcgtgcgcatggcgtacacctcggacggcaccgctgtgttcgctccgatgagatcctcggccgcgacgccgtcttaccagccgcagggtgcagcccacggcgctagcatgtccgcggcgacaatcattggaggcaatggcgcggcagctgcgccgagcatgggggagccggtgcccaagaagaagcgcgggcgaccaaggaagtatgggcccgacgggtccatggcgctggcattggtgcctgtgtcggcggctacggggtcgccgacgacagggcagggttcttctgggccgttctcaccggctgggtcaaatctgacgaactctctgttggtagcctcgccggacgggttcaagaagcggggccggcctaagggttctaccaacaagccgcgcatggatgctgctggatcgtcaggagctggatttacacctcatgttatcacagttcaagctggggaggacgtgtcatcaaagatcatgtcgttttctcagcacggaccgcgtgcagtctgtgttctctcagcaaacggtgccatatcaaatgtgacgcttcgtcagactgctacatcaggcggaactgtaacatatgagggtcggttcgagatactgtcactgtcggggtcattcctcttggtggaggatggtggtcaacgcagtcgaactggagggctcagtgtgtcgttggctggtcccgacggtcgtgtgctgggcggtggagttgcagggctcctcgtagcagcttcgccagttcagatagtactgggaagtttcaattctggaggcaaaaaagaggcaaaaaagcatgctccttcaggacccacaccagcgccactgaaggtcgctcctccgacaacaaccaggatgggacccaacagcagcagccctccttcaagaggaggtacattgagcgagtcatccggtggcgccggaagcccaccaccgccgctgcatcaaggcatggctgctagcagtagcaacgaccagccgccgttcctgtccagcatcatgccatggaaatgatcctcttatgtagtagtataagtcagaagctttgagtagggaggtaaatttgtagctctactgtaggtttaaacctgaattcctgtgctacttaggtgtattgagctgtaacggatgtgatcatttgagagctaccaagtgttgtttagttaaatgttttaccaaggcatgtcgatctgagccagaagattcttgctatgaatttgttgtttgcgcttgacctttttttctgctgtagagaaggttgtggagccaaaggttctgcacaagaatacgttgaaagcatttggcatccttgatggcatgccgaaccattgaaggttccgtgacagacagatggcgtggctaagtttgtttatcatttgtaaaaaaagcaaacaaaaaa

SEQ ID NO: 94207 - DNA, 1882 bp, Zea Mays
aattttggcgtgctttacttacctgctttttattttttcctttttccgcgacagaatcttttttgttaattgcgaaaacgaaagagcccgtgtgaaccggagaggtgaggaaaagaggaaaagggagacataaattggaggccattatcaagaaaccatgagttctaggttagctgaaatctcccttattgtaatctgttcatctcctggcgtgagtctgtggcgctagtgtgatgccttctcctagctcatggcttccggttcgcaatccctaatcctgatctcacttaagcgctcgtgagctctctccagtggctaaagattgcagatttgagttatagtccaagaaacgggtggtggtccgccatggaggtgaggtccgagcaagggctgatggcggggagggatctattcggtatgccaaagagcccgccggcgccggtttccgggccgccggcgtccgccgccatgcagagcgtgcgcatggcgtacacctcggacggcaccgctgtgttcgctccgatgagatcctcggccgcgacgccgtcttaccagccgcagggtgcagcccacggcgctagcatgtccgcggcgacaatcattggaggcaatggcgcggcagctgcgccgagcatgggggagccggtgcccaagaagaagcgcgggcgaccaaggaagtatgggcccgacgggtccatggcgctggcattggtgcctgtgtcggcggctacggggtcgccgacgacagggcagggttcttctgggccgttctcaccggctgggtcaaatctgacgaactctctgttggtagcctcgccggacgggttcaagaagcggggccggcctaagggttctaccaacaagccgcgcatggatgctgctggatcgtcaggagctggatttacacctcatgttatcacagttcaagctggggaggacgtgtcatcaaagatcatgtcgttttctcagcacggaccgcgtgcagtctgtgttctctcagcaaacggtgccatatcaaatgtgacgcttcgtcagactgctacatcaggcggaactgtaacatatgagggtcggttcgagatactgtcactgtcggggtcattcctcttggtggaggatggtggtcaacgcagtcgaactggagggctcagtgtgtcgttggctggtcccgacggtcgtgtgctgggcggtggagttgcagggctcctcgtagcagcttcgccagttcagatagtactgggaagtttcaattctggaggcaaaaaagaggcaaaaaagcatgctccttcaggacccacaccagcgccactgaaggtcgctcctccgacaacaaccaggatgggacccaacagcagcagccctccttcaagaggaggtacattgagcgagtcatccggtggcgccggaagcccaccaccgccgctgcatcaaggcatggctgctagcagtagcaacgaccagccgccgttcctgtccagcatcatgccatggaaatgatcctcttatgtagtagtataagtcagaagctttgagtagggaggtaaatttgtagctctactgtaggtttaaacctgaattcctgtgctacttaggtgtattgagctgtaacggatgtgatcatttgagagctaccaagtgttgtttagttaaatgttttaccaaggcatgtcgatctgagccagaagattcttgctatgaatttgttgtttgcgcttgacctttttttctgctgtagagaaggttgtggagccaaaggttctgcacaagaatacgttgaaagcatttggcatccttgatggcatgccgaaccattgaaggttccgtgacagacagatggcgtggctaagtttgtttatcatttgtaaaaaaagcaaacaaaaaa

SEQ ID NO: 94208 - DNA, 2264 bp, Zea Mays
atctacttctcttcccttcttatctgctacagcaattttggcgtgctttacttacctgctttttattttttcctttttccgcgacagaatcttttttgttaattgcgaaaacgaaagagcccgtgtgaaccggagaggtgaggaaaagaggaaaagggagacataaattggaggccattatcaagaaaccatgagttctaggttagctgaaatctcccttattgtaatctgttcatctcctggcgtgagtctgtggcgctagtgtgatgccttctcctagctcatggcttccggtctggaattttgcttaccctcttcgacttattgttcttttctctttattccgcaactgttgggtccgaaattatggtgatctgttcggtatccccccctgcgaaatccggacaaaagtggggatctgcagcttctgtgctttattggctttaaacctaccttttcttggaccttttaccatttctttggcccatttcttttatctcccatttccgccagtaatttgcttttcttttcgtttctacttatttccaccttccatttcttcgagaaattttcatgtaccgtaaaactgtgtgcttgtcgcgtgaaagatctcgtacttagcggtttatgggtttttcgcaggttcgcaatccctaatcctgatctcacttaagcgctcgtgagctctctccagtggctaaagattgcagatttgagttatagtccaagaaacgggtggtggtccgccatggaggtgaggtccgagcaagggctgatggcggggagggatctattcggtatgccaaagagcccgccggcgccggtttccgggccgccggcgtccgccgccatgcagagcgtgcgcatggcgtacacctcggacggcaccgctgtgttcgctccgatgagatcctcggccgcgacgccgtcttaccagccgcagggtgcagcccacggcgctagcatgtccgcggcgacaatcattggaggcaatggcgcggcagctgcgccgagcatgggggagccggtgcccaagaagaagcgcgggcgaccaaggaagtatgggcccgacgggtccatggcgctggcattggtgcctgtgtcggcggctacggggtcgccgacgacagggcagggttcttctgggccgttctcaccggctgggtcaaatctgacgaactctctgttggtagcctcgccggacgggttcaagaagcggggccggcctaagggttctaccaacaagccgcgcatggatgctgctggatcgtcaggagctggatttacacctcatgttatcacagttcaagctggggaggacgtgtcatcaaagatcatgtcgttttctcagcacggaccgcgtgcagtctgtgttctctcagcaaacggtgccatatcaaatgtgacgcttcgtcagactgctacatcaggcggaactgtaacatatgagggtcggttcgagatactgtcactgtcggggtcattcctcttggtggaggatggtggtcaacgcagtcgaactggagggctcagtgtgtcgttggctggtcccgacggtcgtgtgctgggcggtggagttgcagggctcctcgtagcagcttcgccagttcagatagtactgggaagtttcaattctggaggcaaaaaagaggcaaaaaagcatgctccttcaggacccacaccagcgccactgaaggtcgctcctccgacaacaaccaggatgggacccaacagcagcagccctccttcaagaggaggtacattgagcgagtcatccggtggcgccggaagcccaccaccgccgctgcatcaaggcatggctgctagcagtagcaacgaccagccgccgttcctgtccagcatcatgccatggaaatgatcctcttatgtagtagtataagtcagaagctttgagtagggaggtaaatttgtagctctactgtaggtttaaacctgaattcctgtgctacttaggtgtattgagctgtaacggatgtgatcatttgagagctaccaagtgttgtttagttaaatgttttaccaaggcatgtcgatctgagccagaagattcttgctatgaatttgttgtttgcgcttgacctttttttctgctgtagagaaggttgtggagccaaaggttctgcacaagaatacgttgaaagcatttggcatccttgatggcatgccgaaccattgaaggttccgtgacagacagatggcgtggctaagtttgtttatcatttgtaaaaaaagcaaacaaaaaa

SEQ ID NO: 94209 - DNA, 1823 bp, Zea Mays
atctacttctcttcccttcttatctgctacagcaattttggcgtgctttacttacctgctttttattttttcctttttccgcgacagaatcttttttgttaattgcgaaaacgaaagagcccgtgtgaaccggagaggtgaggaaaagaggaaaagggagacataaattggaggccattatcaagaaaccatgagttctaggttcgcaatccctaatcctgatctcacttaagcgctcgtgagctctctccagtggctaaagattgcagatttgagttatagtccaagaaacgggtggtggtccgccatggaggtgaggtccgagcaagggctgatggcggggagggatctattcggtatgccaaagagcccgccggcgccggtttccgggccgccggcgtccgccgccatgcagagcgtgcgcatggcgtacacctcggacggcaccgctgtgttcgctccgatgagatcctcggccgcgacgccgtcttaccagccgcagggtgcagcccacggcgctagcatgtccgcggcgacaatcattggaggcaatggcgcggcagctgcgccgagcatgggggagccggtgcccaagaagaagcgcgggcgaccaaggaagtatgggcccgacgggtccatggcgctggcattggtgcctgtgtcggcggctacggggtcgccgacgacagggcagggttcttctgggccgttctcaccggctgggtcaaatctgacgaactctctgttggtagcctcgccggacgggttcaagaagcggggccggcctaagggttctaccaacaagccgcgcatggatgctgctggatcgtcaggagctggatttacacctcatgttatcacagttcaagctggggaggacgtgtcatcaaagatcatgtcgttttctcagcacggaccgcgtgcagtctgtgttctctcagcaaacggtgccatatcaaatgtgacgcttcgtcagactgctacatcaggcggaactgtaacatatgagggtcggttcgagatactgtcactgtcggggtcattcctcttggtggaggatggtggtcaacgcagtcgaactggagggctcagtgtgtcgttggctggtcccgacggtcgtgtgctgggcggtggagttgcagggctcctcgtagcagcttcgccagttcagatagtactgggaagtttcaattctggaggcaaaaaagaggcaaaaaagcatgctccttcaggacccacaccagcgccactgaaggtcgctcctccgacaacaaccaggatgggacccaacagcagcagccctccttcaagaggaggtacattgagcgagtcatccggtggcgccggaagcccaccaccgccgctgcatcaaggcatggctgctagcagtagcaacgaccagccgccgttcctgtccagcatcatgccatggaaatgatcctcttatgtagtagtataagtcagaagctttgagtagggaggtaaatttgtagctctactgtaggtttaaacctgaattcctgtgctacttaggtgtattgagctgtaacggatgtgatcatttgagagctaccaagtgttgtttagttaaatgttttaccaaggcatgtcgatctgagccagaagattcttgctatgaatttgttgtttgcgcttgacctttttttctgctgtagagaaggttgtggagccaaaggttctgcacaagaatacgttgaaagcatttggcatccttgatggcatgccgaaccattgaaggttccgtgacagacagatggcgtggctaagtttgtttatcatttgtaaaaaaagcaaacaaaaaa

SEQ ID NO: 94210 - DNA, 1357 bp, Zea Mays
atctacttctcttcccttcttatctgctacagcaattttggcgtgctttacttacctgctttttattttttcctttttccgcgacagaatcttttttgttaattgcgaaaacgaaagagcccgtgtgaaccggagaggtgaggaaaagaggaaaagggagacataaattggaggccattatcaagaaaccatgagttctagtccaagaaacgggtggtggtccgccatggaggtgaggtccgagcaagggctgatggcggggagggatctattcggtatgccaaagagcccgccggcgccggtttccgggccgccggcgtccgccgccatgcagagcgtgcgcatggcgtacacctcggacggcaccgctgtgttcgctccgatgagatcctcggccgcgacgccgtcttaccagccgcagggtgcagcccacggcgctagcatgtccgcggcgacaatcattggaggcaatggcgcggcagctgcgccgagcatgggggagccggtgcccaagaagaagcgcgggcgaccaaggaagtatgggcccgacgggtccatggcgctggcattggtgcctgtgtcggcggctacggggtcgccgacgacagggcagggttcttctgggccgttctcaccggctgggtcaaatctgacgaactctctgttggtagcctcgccggacgggttcaagaagcggggccggcctaagggttctaccaacaagccgcgcatggatgctgctggatcgtcaggagctggatttacacctcatgttatcacagttcaagctggggaggacgtgtcatcaaagatcatgtcgttttctcagcacggaccgcgtgcagtctgtgttctctcagcaaacggtgccatatcaaatgtgacgcttcgtcagactgctacatcaggcggaactgtaacatatgagggtcggttcgagatactgtcactgtcggggtcattcctcttggtggaggatggtggtcaacgcagtcgaactggagggctcagtgtgtcgttggctggtcccgacggtcgtgtgctgggcggtggagttgcagggctcctcgtagcagcttcgccagttcagatagtactgggaagtttcaattctggaggcaaaaaagaggcaaaaaagcatgctccttcaggacccacaccagcgccactgaaggtcgctcctccgacaacaaccaggatgggacccaacagcagcagccctccttcaagaggaggtacattgagcgagtcatccggtggcgccggaagcccaccaccgccgctgcatcaaggcatggctgctagcagtagcaacgaccagccgccgttcctgtccagcatcatgccatggaaatga

SEQ ID NO: 94211 - DNA, 702 bp, Zea Mays
atgacatcgcatctttcatgtcagcctgaacgatccaacagccttctctatctgaggcctgtacttctccgagtcatcgtcgtcgatgtactggcccgtcacagtgtagaggcggttgtaccagccgttgaaggccatcccgatggccgagacgatgtggcgccgtcgctcgccggggttctgcagcgtgtactccaggtagtacaggccgtagtaccgtttgccgccctggagtcgatgagcttggcggcgagccccggcggcctctgccagctcctgtccaggccgttcacctgcgtgtgctctcacttgtctgtcacggcttacgcattggttttggttggtgccaaatcagccagcaatgttcagacagaggcgggcacgtaccagaccctcggcgaaggcatcgacgtcgccgaaggacttgaggctggtgaagtccggcccgatcccggtgatggcgacgctgacattggagtcggtggcggcctgctcggggtagaacgccgtgacagacttgatgccgctggcctcgccggcgccgaccagccagccttgcggaacttgaatgctgaacttgttggcctcatcctcgtacgtagtgaagccctcctgcgactcggcggtggcctcgtccgccagagcgccggcaggggcgagcagcggcggcgtcgcggcggagaagacgatgccgagcaataa

SEQ ID NO: 94212 - DNA, 600 bp, Zea Mays
atgacatcgcatctttcatgtcagcctgaacgatccaacagccttctctatctgaggcctgtacttctccgagtcatcgtcgtcgatgtactggcccgtcacagtgtagaggcggttgtaccagccgttgaaggccatcccgatggccgagacgatgtggcgccgtcgctcgccggggttctgcagcgtgtactccaggtagtacaggccgtttgccgccctggagtcgatgagcttggcggcgagccccggcggcctctgccagctcctgtccaggccgttcaccagaccctcggcgaaggcatcgacgtcgccgaaggacttgaggctggtgaagtccggcccgatcccggtgatggcgacgctgactgtggagtcggtggcggcctgctcggggtagaacgccgtgacagacttgatgccgctggcctcgccggcgccgaccagccagccttgcggaacttgaatgctgaacttgttggcctcatcctcgtacgtagtgaagccctcctgcgactcggcggtggcctcgtccgccagagcgccggcaggggcgagcagcggcggcgtcgcggcggagaagacgatgccgagcaataa

SEQ ID NO: 94213 - DNA, 1550 bp, Zea Mays
gccaactctccacctgcccaaccgagtcaccaaaaaggggtgacacactagccatactgggtacttcaatgtgcacaatataaactagctgggatcaaatacaggagcacctcgagtctgagagaatggctaacactgctaagggtaaggtctgtgtcactggggcgtctggtttcatcgcctcctggctcgtcaagcggcttcttgagtctgggtaccatgtcctgggtacagtcagagacccagggaatggcaagaaagtagggcacctctggggcctggaaggcgcaaaggaaaggctgcagctcgtgagagctgatctcttggaggaagggagcttcgacgacgctgtgatggcttgcgagggcgtcttccacaccgcatcgcccgtcgtcaccggatctaattccaaggaggagatgcttgattcagcaataaacggcacgatgaacgtgctacgctcgtgcaagaagaacccatcgctcaagagggttgtcctgacatcctcgtcgtcgacagtgaggatcaaggacgaagccgacctgccccctaacgtgctgctggacgaatcgtcgtggagctccatcgagttctgcgaaagtctccagatatggtacgccgtcgcaaagatcctcgccgagaaggcagcctgggagttcgccggagagcacaggatcgacctcgtcaccgttcttccgaccttcgttgtcggacctactctgtctcctgagctcggccccaccgcttctgatgtcctcggcctgttccaaggagagacggggaagttcacgacgtacgggaggatggggtacgtccacatcgacgacgtggcgaggtgccacatgctggcgtacgaggccgcgggcgcccgagggaggtacatctgcagcgcggcggtgctggactgcggcgacctcgccgccctgctcgcgcggcggttcccagcgtaccccgtcccgaggagcctgccccgcgcctacggcgagcagtcgtacggcttcgacacgtccaaggcccgcgcgctggggctggcggaattcaagggcgtcgaggagatgttcgacgacgccgtcgcctcgttcataggccatggccatctccccgccgccgaggaacgccggcacgcgtagcctcttggtctgaaactacatgaatgaacgtatcatgtactaattaaattatttaatacttttaactagcatctaatcatgccgtttagtctttatcagtgtgttttatttttatagttatattatatttaatacttttaactagcatttaattatctgatgtgatggactaaaatttagtcggttagaaccaaaccgaccctaaatcttgtcgtaaccagtagaaagattatcccatggatcgtacgggtctatttggcctttggtggtctaagctagttgaaatactcgtctgctcgtttgaattcttttatgagcggagttgacatctcagctcggtttattaataagccagctcgcaagctaaacgagctatcacatttcagcaaaatagaaatatatgtgtatcatttacgtagc

SEQ ID NO: 94214 - DNA, 1418 bp, Zea Mays
gtacttcaatgtgcacaatataaactagctgggatcaaatacaggagcacctcgagtctgagagaatggctaacactgctaagggtaaggtctgtgtcactggggcgtctggtttcatcgcctcctggctcgtcaagcggcttcttgagtctgggtaccatgtcctgggtacagtcagagacccagggaatggcaagaaagtagggcacctctggggcctggaaggcgcaaaggaaaggctgcagctcgtgagagctgatctcttggaggaagggagcttcgacgacgctgtgatggcttgcgagggcgtcttccacaccgcatcgcccgtcgtcaccggatctaattccaaggaggagatgcttgattcagcaataaacggcacgatgaacgtgctacgctcgtgcaagaagaacccatcgctcaagagggttgtcctgacatcctcgtcgtcgacagtgaggatcaaggacgaagccgacctgccccctaacgtgctgctggacgaatcgtcgtggagctccatcgagttctgcgaaagtctccagatatggtacgccgtcgcaaagatcctcgccgagaaggcagcctgggagttcgccggagagcacaggatcgacctcgtcaccgttcttccgaccttcgttgtcggacctactctgtctcctgagctcggccccaccgcttctgatgtcctcggcctgttccaaggtacgtccgcaaaagtttgtgcaagaccagagccctctcgtcagtctcatagacctttgtctttgttgcaggagagacggggaagttcacgacgtacgggaggatggggtacgtccacatcgacgacgtggcgaggtgccacatgctggcgtacgaggccgcgggcgcccgagggaggtacatctgcagcgcggcggtgctggactgcggcgacctcgccgccctgctcgcgcggcggttcccagcgtaccccgtcccgaggagcctgccccgcgcctacggcgagcagtcgtacggcttcgacacgtccaaggcccgcgcgctggggctggcggaattcaagggcgtcgaggagatgttcgacgacgccgtcgcctcgttcataggccatggccatctccccgccgccgaggaacgccggcacgcgtagcctcttggtctgaaactacatgaatgaacgtatcatgtactaattaaattatttaatacttttaactagcatctaatcatgccgtttagtctttatcagtgtgttttatttttatagttatattatatttaatacttttaactagcatttaattatctgatgtgatggactaaaatttagtcggttagaaccaaaccgaccctaaatcttgtcgtaaccagtagaaagattatcccatggatcgtacgggtctatttggcctttggtggtctaagct

SEQ ID NO: 94215 - DNA, 1230 bp, Zea Mays
catactctttctgcaataacatcatgctcgatggaaaactaaaactgcaggctgttcaaaaggatcgggaagaaaaacttgcagagacactgaaaaaccggctacacatctatgtgcaaggaaataaggcagaattcatccagcatgctgaagcagaggtgtccaaacttagaaatgcagcatatggagttgttatgttgaacactattggctatgtatattcaaggcaagctgcaaaagaacttgcaaagaaagtgatgtttttgggtgttccatttattgccgaatggtttagggacaaaggacattttatcaaatcccaagtaacagctgccacaggtgcaatagctcttatgcagttgcaagataacttgacgaagtatatgagtgctgagggccagtacacagaggaggaacttgaaatgtacatggaaaaccataagaaagtcatggttgattctctgtggaagcttaacgttgctgacatagaagccacattatcccatgtctgtcaaatggtacttcaagacagtagtgccagaaaggaggaattgcgcctccgtgctaaaggcttaaaaactttaggaagaattttccagggggctaaggtcaaccctagcgagggggaaacatcacaaacgaagaatatagacaacatggatggcaatgacggcagctcccctgactcgtccccaaatagagaggcacagttcactcctaatcagcctcctgtcccgagcccgtatgtggaggcgcctcatgttaacggagtctattgtccgttcccgatgccagcagctccgcctggcgcaaggagggatcgaatcccttgagtccagataaaacctgcttgtaaaatgggctctgtttaacattgcctataatactagatcatttgcatgatgaacctggagcagaggggaacacaggagtctgtcaggtgttctctgcacctccctgttattttggtcgcgtatgcttggtagcagccgtgtcttgtgtacaggtgtgttttgctattgttgatcgatgaagctgtaggtgtacatgttatgatgcccattatattattctgttgtcggcctgctgtattttagcataaacagtggatacatttgcatccatgggaaatgaaatgttctagtcattgtttcccatcattcaggagtttggtgttaatggggctaagttttttatgaaacaagtctgctcaggctttcgtacaaatgc

SEQ ID NO: 94216 - DNA, 1796 bp, Zea Mays
ctgaaaaatttagaaaaagtctagacgacgcgcttgtgtgcgtggccggacctgaaaagccggttcctcccccgaccccggcgccccaccgcagccgccggctcccaccgcccggcgcaccccgtcacctctccaccaaccggatacccggacggatccgctcccacctggatcctgatccggggaagtcaaaggggagatcgaagcttgagcagagggagccaaaatggtgaaggacacgcggtactacgacgtgctgggcgtggacccgtccgccaccgagtccgagatcaagaaggcgtactacgtcaaggcgaggctggtccaccccgataagaacccgaatgatccgcaggccgcggagaagttccaggaactaggagaagcataccaagttctcagtgaccctacacagcgccaagcttatgactcacatgggaaagacggcatctcaacggaggggattattgatcctgcaacaatttttgcaattctgtttggtagtgagctttttgaggaatatattggtcaactggcaatggcatcaatggcttcacttgataattttggtgaagatgagcagattgatgcaagaaagctgcaagagagaatgcaggctgttcaaaaggatcgggaagaaaaacttgcagagacactgaaaaaccggctacacatctatgtgcaaggaaataaggcagaattcatccagcatgctgaagcagaggtgtccaaacttagaaatgcagcatatggagttgttatgttgaacactattggctatgtatattcaaggcaagctgcaaaagaacttgcaaagaaagtgatgtttttgggtgttccatttattgccgaatggtttagggacaaaggacattttatcaaatcccaagtaacagctgccacaggtgcaatagctcttatgcagttgcaagataacttgacgaagtatatgagtgctgagggccagtacacagaggaggaacttgaaatgtacatggaaaaccataagaaagtcatggttgattctctgtggaagcttaacgttgctgacatagaagccacattatcccatgtctgtcaaatggtacttcaagacagtagtgccagaaaggaggaattgcgcctccgtgctaaaggcttaaaaactttaggaagaattttccagggggctaaggtcaaccctagcgagggggaaacatcacaaacgaagaatatagacaacatggatggcaatgacggcagctcccctgactcgtccccaaatagagaggcacagttcactcctaatcagcctcctgtcccgagcccgtatgtggaggcgcctcatgttaacggagtctattgtccgttcccgatgccagcagctccgcctggcgcaaggagggatcgaatcccttgagtccagataaaacctgcttgtaaaatgggctctgtttaacattgcctataatactagatcatttgcatgatgaacctggagcagaggggaacacaggagtctgtcaggtgttctctgcacctccctgttattttggtcgcgtatgcttggtagcagccgtgtcttgtgtacaggtgtgttttgctattgttgatcgatgaagctgtaggtgtacatgttatgatgcccattatattattctgttgtcggcctgctgtattttagcataaacagtggatacatttgcatccatgggaaatgaaatgttctagtcattgtttcccatcattcaggagtttggtgttaatggggctaagttttttatgaaacaagtctgctcaggctttcgtacaaatgc

SEQ ID NO: 94217 - DNA, 942 bp, Zea Mays
aaaaatttagaaaaagtctagacgacgcgcttgtgtgcgtggccggacctgaaaagccggttcctcccccgaccccggcgccccaccgcagccgccggctcccaccgcccggcgcaccccgtcacctctccaccaaccggatacccggacggatccgctcccacctggatcctgatccggggaagtcaaaggggagatcgaagcttgagcagagggagccaaaatggtgaaggacacgcggtactacgacgtgctgggcgtggacccgtccgccaccgagtccgagatcaagaaggcgtactacgtcaaggcgaggctggtccaccccgataagaacccgaatgatccgcaggccgcggagaagttccaggaactaggagaagcataccaagttctcagtgaccctacacagcgccaagcttatgactcacatgggaaagacggcatctcaacggaggggattattgatcctgcaacaatttttgcaattctgtttggtagtgagctttttgaggaatatattggtcaactggcaatggcatcaatggcttcacttgataattttggtgaagatgagcagattgatgcaagaaagctgcaagagagaatgcaggctgttcaaaaggatcgggaagaaaaacttgcagagacactgaaaaaccggctacacatctatgtgcaaggaaataaggcagaattcatccagcatgctgaagcagaggtgtccaaacttagaaatgcaggttttagccattactaatcagcccttctgtccctcgatgctaaatatgttttttcttttgattctatgttgtctgtgttcttagttggcatatggtgttgaataagtttttcttgtctcttttatttattatatggttcaatatatagttaaatatcttgacaagtattactgcattatatgtcactcttaaaactgct

SEQ ID NO: 94218 - DNA, 230 bp, Zea Mays
gaaaatcatattatcaacacacatgctacacaaatcggaaatatttaagcaagcatgttatctttggaacggtattggggctcgtcctggccatgtttcgattctttcaaagtatttcacagggccgacaccatcaaaaccttctatcaagatccctttgttgtctgaaatataaagcttcatcccatctgtgcgacaaatttaggtgttataccagtctctagcactta

SEQ ID NO: 94219 - DNA, 97 bp, Zea Mays
gtttacctcattgatgaaacaccattcactgatagatgtgtgcctccatagagactgtgttgcttcaaaagaaagtcataccatttgaatcataaag

SEQ ID NO: 94220 - DNA, 609 bp, Zea Mays
atgtgcaaggacaagagtgccctgttgctggaggcgatcagcagcggggcggcggagcggaaggcgagggcgaggaggcagaagctgtcgtcgtggaccggcgtgaggttccggcactggggcaagtgggcggcggagatccgcgtgccgcgcacccgtgagaagctgtggatcggcaccttcgagagcgccaggcaggcggcgctcgcctacgacgccgccgtcttctgcttctacggcgagcgcgcgcccaaggcgcgcaagcccaacttccccgccatgccgcgccccgaggtcgacgagggctcgcgcctccacctcagcgtcgccgaggtgaaggtgatcgctgagaggcacgctcgcgacgtcgacgccctcctcccgccgatggcggacccggacagcgcagctgcaactgatgacgatctggtgatggcgccgccgccggtggctgtggctgtggacgctccttctgacggcgcaggtggacctgacctcgatcagatgctcagcgcttttgacatcgacgccttcggggctgaactcgattccatgacgttccttgtgtccgacgacgaatattatgccgccgagcccgcctgtgcttaa

SEQ ID NO: 94221 - DNA, 711 bp, Zea Mays
atggcgcgggcgccgaggagcagccgggcggcgaggaggcgggcgcaggaccggctccgccgcggcagcgcgcacgcggcgctccgcatcccgggcacccgcgccaggctgtggatcggcgggttcgagcaggcgctgcaagcggcgctcgcctacgacgccgcgatcttctatttgtacggcgcactccgcctgcccagcccgcgcaggttcaacttcccggcggcgccgcgcccggacatacccgaggacgtgcgcgccatgctctcccgggacgacatcaaggtcatagcgaagagccacgcacgctccttggccaggttctttctcggtccacagcctgccgtcagccctgcagccacttcaccaccaccaccaccagctcctgctgctgccggcgaagcaactgctactagcgacagtgacagtagcaacgacagcaactactacaagggttaacaagacatcttgaccactgccatgggtgatcgatctttagcatcatcatcatcatgtattcatgtctaactcatcatgtgtttctctgtgtgaagctagccatatgcatgtcaagcgatgaggatctcacaagaagaccagatcgtctgcttatgaaatgaataagttacaagttccaatatgcagtctatcagtgtgtaagatgtatacaacaagatggaagccttgaaatggaaaatgctttatgtgttt

SEQ ID NO: 94222 - DNA, 858 bp, Zea Mays
atgactatgacggcgccgagcagcagcagcggggcagcgacgagggggcgtccccagccccagcagcaccgcggcgggcgttccgttacggcggcggcgggagcccgtcggccgcacaaggacctgggctggacgggcgtgcgggagcggctgtggggcggttgggcggcggagatccgcatcccgcggacccggtccaggctgtgggtcggcaggttccagcacgcgttgcaggcggcgctggcctacgacgccgccatgttctgcttctacggcgagcgcctccccagccagcgcaagttcaacttcccggccgcgccgcgccccgccatccccgaccacctccgcgcgcggctcactgtcgccaacatcaaggccatcgcggcggactacggtcggagctgcgccgccttcttccttgcgccggctcagctgtgccctagtgcaccagctgccgccgccgcatcaacgacgccacctctgatggtggtgccgccagccactgaaagcgccgccgccgccgccgccgccgccagcgctgaagaagcagtcgtctccacaacaactgatcatgtcgtccctgctgctgctagcaacgccgggaaccatgtggatggaggcttcatggaaactgctgactgcctgctctcctgcaacccagatgatttcgtcggggtgttggaggacatggacgacgtggatctctttattggccagcagcacaactgatccatcgatcctgcctgctggctagggtagtagctgctgtgccactgcgtgtgaaactagctagccatgcctgttgttcgatcgatcgactgtatctgtctcaccaatactagatcgtcccgttatatt

SEQ ID NO: 94223 - DNA, 110 bp, Zea Mays
gttccgtctcgcaccgacccatctgggctgggacacgcagcgacaatttactcgtcggtccagggaccccccggggtcgaaacgccgacacaatgcatgcagaattgcag

SEQ ID NO: 94224 - DNA, 879 bp, Zea Mays
ccgtacagtattttggttagaagagatgctccttggtgaaagtgatgtgcatctcactgtgcagtggtagtagactaatcaccctgcatgcttgtcttgattatgactgattcactgacttggtaccattggacttagtttttgccatgtaacattacgaagcttttatcaaagctacgacttctgcatgaatttcaagacagcagtgagcagacggatcttccttgtcctactgctggatcaccgacattgcggatgtcagcgctcagtgaattgcagaacagtctttcaaactgatgcgctaccatttcgtattggaaaacaaggtgaggaattcgcaccaggtgggtatacttgtgtctcgactctcgacagccctgatttggaatcgtttcagtatgtgcctggagtgattcttgtcttattttcattcttctctttttttttctgttgattatgttttctgcttagctttgttcttacacatactatcataatgtaaatttgtcgttccatttcaaaattgtacgggagatgattcttcaaatgctatgcaattaacatgcccttcccttccatattgtgagggcttatatgtttcttgatctgttggctgcggtttgtggtgcccactgttacgattccaatttctcctgacttctcgacaatacaggacaagcggttcggcccagaagtgttttagtactcgagctgcatgcaggcccatttagcacgatctggctatgacttcctacatggcccagaagccgtcgtctactgatcgctccagcttcttcttccttcgtcgccgctgggctggtaacattcattcgcggaccatcctccctcgatcgaagttagcgaggccttgccactgca

SEQ ID NO: 94225 - DNA, 1505 bp, Zea Mays
ctcccacgaattgccaaaacaccaggggaacgctcccccgagccgcgaccccgggcaggtttccccacggacggggcatccgaccgcgacgacctcccgccgccgccgcgacgaatctctggcctcccactaccgccgcgacgtccagctttgttctactccaaggtccagctctggcttgccgtcctccgcccgtactccacgctactggatctctagcttgctcgtacgggatctctgtactccacgctactggcttgagccatggcaaagaatgtttctagggcagcttggaacactgtgtatgagaaaggtctggttgatgtgctccttgaacataaggacaacccaaagttcaaaagtcaaaatggttggactgctgagggatggaacaatatcacaaacaagttcaatgagaggtatcctcttgcccattactccaaacagcaaatgcaagacaaagataaggagcttaaatctcattacaaggcagtaagagattcaaggaaagaaagtggggtgggttggaatgattccctatgtatgatagtggctgagccagaactttgggaaaagctcatccttgctcacccaaaggtagcgaagtaccaaaagaagccatttccattgtactactctttggaagccctccacgaaggtagtgtggccacaggagatttgaatttcacatacactcagcaaatgccacctccttctttcattcctgttcgtcctcttaatgcccctcctggtggccctcttgctgcccctcctagtggccctcttgctacagctttcggttctgctactgctcattcgaacaggagtacctctgaacaaagccactctcccttgcaccccaacacaaacccattctccatggatttccaagaaatatcaaatgaagctcaatcaggacatgtagaaggtggaaatgggagaaagcgcaagcaaagccaaattggagcagccattgaaagttttgtggattttaagaggagcgccacatccaaaacgctcgaaggtattgaagaagtgtctatggaaaagtgtctagacaagttggatagaattgatgggttcacagatgaggatagatcatatgcaatggaggtctttgaatctgcgataaaccgagaggtgtttatgaagtcaaaaaaccacaatgctagattactttggttgaagaggaaaattagtgtgttaagtggaagcaacacatgaagcagatatggagaaggaagctggcatgaaactaaaacgcattaagttgacacgtggtgtgcatgttttagatgtcttattctactgccaaacttcctaatactctatttttatattataatgtctatctgtacgtgtgaatggagataatgatattatgtgatgtgatgatggatggattagcttcgttgaatattacatgatattatgtgatggtgatattaagtggacattgcagtgttgatacatgcttcatatttctggatttttagtgatgtttt

SEQ ID NO: 94226 - DNA, 324 bp, Zea Mays
aaacccaacccaaaacccccacacgagatctgcgcagcaatggcgatgcggcggcacgtcctgctcctcctcaccgccgccttcgcgtccctcctcgtgctcgcggtcgcggaagggggcgaagaggggccccgcggacgtcggctgctcgtcctcctggatgacctggccgtgcggtcgtcgcactcggccttcttcggcttgctccaggcgcgcgggttcgatctcgacttctgcctcgctgacgatcccaagctcttgctccaccgctatggctagtacctctacgacagcctcatgctctttgccccctccaccccacat

SEQ ID NO: 94227 - DNA, 1255 bp, Zea Mays
gtgcttcacactgccttcccgcgcgtgcgccgtgcggtcttcgtctcttcgcgctacctgctggctcccagtggtggtcgtcatgttcgagtcgaccggcgcgcgcctccccgcctgcagcctggctgctgcactgctgcctatatattgtctccgcacctggcggtgctgcgacacgcatccgaccgacaccgtcgacgacgcttgcgatcgagcgttccggtcgagagccagaggggggatatattacttagagagagagaggctagtgtctgcgtgtggtggcgcgcggtcggcggcggccatggcggcgtggaaggacggctacttggacatggtgctcatcccgctcgccgtcctcttccccgccgtgtaccacctctggctgtaccgcgccgtccgccgcagcccgctcagctccaccgtcggcatcagcgccgccgcgcgccgcatctgggtcttctccatgatgaagaacaacgagaagcaggcgatcatcgtagtgcagtcgatcaggaacgtgctaatggcctccacgctggtgggcacgacgtcgatcctcttctgcacgggcgtggcggccgtgctgagcagcacctacgccgtgaagaagccgctcagcgacgccgtcttcggcgcgcacggcgcgcacatgatggcgctcaagtacctgctcatcctcgccgtcttcctcctcgccttcctctgccacagcctggccatctgcacgctcaacacggcctccttcctggtcaacgcgctctcgccgtcgccgcacctgcacctccccggcgtcacggccgaatacgtcgccgacgtcatggagaggggcttcctgctcagcctcgccggcaaccggctcttcttcgccggcgcgcccctcctgctctggatctccgggcccgtgttcccctgcgtatgctccatggccatgatctctgtactctacaacatggacgtggtcgatgacgccgacgatggccggagcagcagcggcggtggagccaatgccgccgtcgtcatggatggcgacagtgacgatcagagcatggaagtcgtctgatgatgaactgatgacgggacaaatgcagaaacgaattggaaaaaaaaaacaagaggcatcggcatggaatatgctgcgctttacatacaataactagtttgtgctcctgcaactgactagtgggttgggtcggtgaatttttttttatcaacccgtgtaaggaaatatatatcgcatttttttatattgaca

SEQ ID NO: 94228 - DNA, 424 bp, Zea Mays
gtgtcacacaattctatcatgttccatttgttattttctccacttattcagggcactactgttagggtggagtatggtgacgatgcaattgcaattgactcgtcaggcgctcatgtgatcagtcacgtgttccctcacacctatgggtagccccttgcacatttcctcaggaagaccgttgtcgtggtcaggtacaacgccttgctaaggtcatatcttaacacccggtggtcaggtacatctttcgtgttcctgtacatgaaaaatcttttgcctcacaaaaaccatctttctcaaagatctaatcccttctgttccaattgcagggttggcaaatggcattgtcttctatggcaggcaatccctaggaggacacaatgttgtttggagactctatgaggctatcaaggcccactaccaaaac

SEQ ID NO: 94229 - DNA, 754 bp, Zea Mays
atggcgtcagagagcgttaggcttacttccactccactcgctgtcgctgggtttattatccacgaaaggagaaggagcggtggagaagaggagaaggtaccgcagccgcacaggcacagctcctgcggcatggcgcagtggagcagcgtggccgcgagcctggaccggtggattgggcttgggcttgggccatgccgctgcggctcaccgccggcaccgtcccgggcggcgatgccacggcgcgggcgtgcgaggaggaacggcggcaaggtcgtcggatgcgcgtccgtcccgcgggagcaggccgagctgccgccgcttgccgtcgacggcaccgaggaagaaggcgtaggcgggtgcggagcgtgcggcggcgcggggtgggtgctctgcgacttctgccagggcaagaagaacaacgtcaagtcggagaccggcagccgggtgtaccgccgctgccccacctgcaaggctgcgggcttcatcctgtgcccaagatgcagggtgtacaagtgcgtcaccttcccagagagcactgaatcgtgagcgtgtcatggtggtcgcacgtgtttgttccaaatccatgtatgagtctgcagaagagatctgtgtgaattactactattatcttctgaagatatttaaaggagaattattatattctgaccgtgtttacagtagaacacctgtctgtgcacgtatacagttttaatttcacacgcagagatgctcgctcttccttcagacatgcttg

SEQ ID NO: 94230 - DNA, 375 bp, Zea Mays
atgatttgtcttcgccatgtacatgttctgttgctggtgcaaatttgcaaaatgatagatgccaacagaccttgtgtctctagttccatcccatggatagttggcaacaagagcccccccatgcaagctagcagaagtcgtgaagtgttcttgctttacccaattcataatggctctagtttcaggctgtctgtagtcaatatcgttgttaacggggaagaacttcaatttcggctagtgtcaattgaatggttggtcaggaaaatccctgttgagatcaatattgtttgcattaccatgccatctaagagcaaacccatcagggttcattgtcggaagtatatgaaggtgcatgttctcaacaatgagagttgc

SEQ ID NO: 94231 - DNA, 357 bp, Zea Mays
atggggaatgggggagcgatgttggaggcggggatcggggctcccagctcctgcgcggctagggaaatagaaaggggaggcgaggatcgcgagcaggactgggacgggggcactccctcgccatgtgcgcgaggatggcagaggcgcaggctggacgggggcagggtcggcgtctctaggggtcgtggacttccattgaaggcgtgggcggtaggaatggcggtatggggggcacttacagcaacgacgccatggatggaagggttcctgggaaggcggcatcgcggtggcaatggagggagcgcggatcgcgtgggtaatggagggagcgtggatcgcgggggggaattgcagtaa

SEQ ID NO: 94232 - DNA, 247 bp, Zea Mays
caagatgttttttgctgcattcagaactaaatcactaaataataccagcctaccatcaagaatgaattcaaatatctatgctgtaagaaaataaatcataaaaaggtccattcagcctagaaaaaaaatcatacctggaactatgccatcagtgagtggagcgtccagcgaggtctcaatcgtcacattgtggacctttacattactgcagtacaccagatgtatgctctaggctggtggatttaag

SEQ ID NO: 94233 - DNA, 3447 bp, Zea Mays
atggcggataaggccaaggtggttggtgcccatggagaaagggatgatgtttttttgtggggagagcttcagcacgatgactgcagatcaggtgaccaactaggaggtgtcaaattgctgagtctaatggctactgagagtgctttccgattgattggtgggacgggggctagggactggagtaagggatttggtgcatttggctcttcagcaggtgccttatcaggggaagacttgggatttgtggataatgacactggggtttatgggggctggaacaaatctgttccaaatcgtagtggaagcgcaccgcctagcatggaaggatctcttgctgctcttggccatctcattgatcagcagagtgggagctttgaagctagtttgacaaccttggataacataactgacagttccaaatctgaggagcaactacgtgctgatccagcatattttgagtattatggctccaaggtgaatctgaatccaaggctccctccgccacttatttcaagggagagtcgccgattaatgaaccgtgttggcaaggctaaagagtggaggatggtctcccaagataacagcagcaaaggctcaatatacgttcctcgatctatgttgtcaactcacaaagaagaacctgaggatgataaatctccaagattggattcaagttcagtggaggatgcccagattgtctccagtgcatccaactttcagagccaggattttatgctgccttacttgcttgaacttgaagagaggtttcaacagagtgttgcttcttcgcctgatagttcatcttctaatccttcaaatagcaacactggtgattctatgcctgtatattctgacataaatttgttaaagagtttgtcatttgatgctttgaagcaatcggatttgaactcttggacaccaaaaggcccactgaaaagtaatgttaacaatgacctttcatcgccacccctttccagttcatcatatcctggtagcaaaactggtacgcaaacttttgagcaagaaaaggctgctgctgacaccaaacatggaaatgttgtgcttggcagtggcgcagctgttactgaagttgataatgtggactccattatgaagaatttgaagttaagtttggatgtccatacatcctcacctgccaagcagaggtggcaggacaatgtcttgcagcagtatggttcctttttaccagcccaaggtgatcctattcaattgactactcaaggaccccatcctcctcatgtaccttttgttgataacttgtctcatgctcagctcaagttgcctgacatccaccaaaatttaccacaacctagtatgacaacacctttctatacaccaaattcttttgggaacccttattatcagaatttgcaccctgctaatgcttttccaacctcaattggaactgggggttatgctgtaagtggttctattttgccaccgtttatggctggctatgctccccaaggtcctcttgctacacctcttgacagttctatgactccaagctttagtggcaggccatctggatttcttccagcagggaatcttacagggggaacagattttatgcagtcatgtaaagtatacggacaatttgagcctggtatgcagccatccattcccgatccgaacttcattcatttctttcagcatccctctttatttcagtatactggaggaaatcaatacaatacaatgggtccaagatttactgttgttgggaatttagctgaaagctttgattcacaaaacacgatacctcaagctgcatctgcatatccatctgatcagaggcttccactgccaataactggctttcctaattctcctacagccagaagaggagggactgttccaaattatcaaggcatttcatcctacattggagtgccaatgacttatcctactagtccagtgtttcagggacaaacattgcctggagtattgcctcctgttaggagaaacgactctgctggatttctgcccccctcaagaaacatcactggtagccctggaattcaagggcagcgagcaagacagaagtttgatgaatcaaagacctgctctttcttagaagagttgaagtccaacagagcgcgcatggttgagctttctgacatcacaggccgtgtagttgaatacagtgctgaccaacatggtagccgattcatccagcagaagttggaaaactgcaccgccgaagagaagacatctgtgtttgccgagattcttcctcatgcttcagcattaatgactgacgtttttgggaattatgtgatccaaaagttttttgaacatggaactcgtgagcagacagagggcaacaacaatttattggtctgtttggtagtgtagtaaaagtgttccctccattatcccttcctctctttgccaaacgggtcggggttctggaaggtagggctaggacatggggacctgatctcagttcggtacagccaatcagataacaccatgagtatctcagttctgctattccagctttctgggagctgcgaatcctatggattaccaagacatgggatctctgtaaacttatttcttcctgtgttgatgttagtttatatttcctaatcaccttttatattcaatcaggcaatgatgaaggaccagtatgctaattacgtggtccagaagatacttgaaacttgcaacgaggatcagcgggagcttctgctcagccgcgtaaaggatcatatgcaagcattgaggaagtacacatacggcaagcacatcgtaagccgagtcgagcagctctgtggcgacggtaagttccatcatccaccagcagttgcaccaagattctccgaagctgttggccacacagccatgaccaatcttcagttgtcaccctttcaggaactgccgagtcaggttcttgaaacgaaccgccgcctaattcttcataggctggagggtgtcctgctcttttgctcattccgtcagtgacgaagaaagcaaaacggatcaagtctaactctggcgcttcagaacagactaacaaagctgtcgtcgaagattgtataggtgtgactctgttcagggatagtcttcaggttctagaacagaagggtagtggtgtgcatcagtgtatctgtttactggataatagtggttggttaggtgtgtgcagaaaaagtttagtgctatgctttgtatgtgatacatattaactatgccttggaatgttcatatgttgtcctgattacgtgtgatatctctcgttcagttcaagttgcgttttctacatggccatgggaccatctgccgatttgatgaaaaaggaaaggttgtgcacctttgtaagcgggcatggagatgagctgcgctattttttttttttacaaaatgtctgctgggattgaactgtctattttataaaaatatcatattttcttttaatgt

SEQ ID NO: 94234 - DNA, 1545 bp, Zea Mays
cccggccacaaagtcacaaacaaacacacagccgccaacccgtcgtgaccagcctcgcaaaccctatcgcctatccctctcgcggtcttgcctcggtctctggcggcggcaccgccgttttacactcctcctccttcgacaacccgtcgcagtagcgtccgtctctggtgtccggctgtccggctctggactcccgacctcgacatcaggatctgcgcctcccgaccggtatgtgggggctctgaagaaggtgcagaaggatctgggcgcgtcggtgttcgagccgctggtgcaggcgtacgccgccgtcgggaagttccctgggatgtggcagcggctgaagatcgagaacgtggaggtcggggaggggacggcccagctgcttgactctatctgcgccgatcaataggctctggaagttatggaacttgaccagaaaatagatctagttcatgagcttgatggtcatattatgcgatgtgtccgtgatcaaaatggaaatcacgttatacagaagtgcattgagtgtgtccccacagaacatattggttttgtagtgtctgcttttcagggacaagttactagcctttcaatgcatccatatggctgccgtgtaattcagagaatcttggagcactgcggtggtaactcacaaggccagtgcataatagacgagatattacagtgggtgtgcatccttgcgcaggatcagtatggcaactatgttacacagcatgttctagaaagaggaaaagctcatgagaggagccaaattattactaaattggccgggcaggttgttaccatgagccaaaataaatatgcatcaaatgtgatagagaagtgttttcaacatggtgatattgcggagcgggatcttctgatcagacggattgtggagcagacagagggcaacaacaatttattggtctgtttggcaatgatgaaggaccagtatgctaattacgtggtccagaagatacttgaaacttgcaacgaggatcagcgggagcttctgctcagccgcgtaaaggatcatatgcaagcattgaggaagtacacatacggcaagcacatcgtaagccgagtcgagcagctctgtggcgacggaactgccgagtcaggttcttgaaacgaaccgccgcctaattcttcataggctggagggtgtcctgctcttttgctcattccgtcagtgacgaagaaagcaaaacggatcaagtctaactctggcgcttcagaacagactaacaaagctgtcgtcgaagattgtataggtgtgactctgttcagggatagtcttcaggttctagaacagaagggtagtggtgtgcatcagtgtatctgtttactggataatagtggttggttaggtgtgtgcagaaaaagtttagtgctatgctttgtatgtgatacatattaactatgccttggaatgttcatatgttgtcctgattacgtgtgatatctctcgttcagttcaagttgcgttttctacatggccatgggaccatctgccgatttgatgaaaaaggaaaggttgtg

SEQ ID NO: 94235 - DNA, 1270 bp, Zea Mays
aggctctaggttctttgaacattttaagttgttcactccaagtgtgaaaccaggtccctatttggacctgaagtgaagcattttaaagttgaaggacccagattctcacttcgagagtttatgaacctagatgagaatctaaggctctggaagttatggaacttgaccagaaaatagatctagttcatgagcttgatggtcatattatgcgatgtgtccgtgatcaaaatggaaatcacgttatacagaagtgcattgagtgtgtccccacagaacatattggttttgtagtgtctgcttttcagggacaagttactagcctttcaatgcatccatatggctgccgtgtaattcagagaatcttggagcactgcggtggtaactcacaaggccagtgcataatagacgagatattacagtgggtgtgcatccttgcgcaggatcagtatggcaactatgttacacagcatgttctagaaagaggaaaagctcatgagaggagccaaattattactaaattggccgggcaggttgttaccatgagccaaaataaatatgcatcaaatgtgatagagaagtgttttcaacatggtgatattgcggagcgggatcttctgatcagacggattgtggagcagacagagggcaacaacaatttattggcaatgatgaaggaccagtatgctaattacgtggtccagaagatacttgaaacttgcaacgaggatcagcgggagcttctgctcagccgcgtaaaggatcatatgcaagcattgaggaagtacacatacggcaagcacatcgtaagccgagtcgagcagctctgtggcgacggaactgccgagtcaggttcttgaaacgaaccgccgcctaattcttcataggctggagggtgtcctgctcttttgctcattccgtcagtgacgaagaaagcaaaacggatcaagtctaactctggcgcttcagaacagactaacaaagctgtcgtcgaagattgtataggtgtgactctgttcagggatagtcttcaggttctagaacagaagggtagtggtgtgcatcagtgtatctgtttactggataatagtggttggttaggtgtgtgcagaaaaagtttagtgctatgctttgtatgtgatacatattaactatgccttggaatgttcatatgttgtcctgattacgtgtgatatctctcgttcagttcaagttgcgttttctacatggccatgggaccatctgccgatttgatgaaaaaggaaaggttgtg

SEQ ID NO: 94236 - DNA, 4375 bp, Zea Mays
atggcggataaggccaaggtggttggtgcccatggagaaagggatgatgtttttttgtggggagagcttcagcacgatgactgcagatcaggtgaccaactaggaggtgtcaaattgctgagtctaatggctactgagagtgctttccgattgattggtgggacgggggctagggactggagtaagggatttggtgcatttggctcttcagcaggtgccttatcaggggaagacttgggatttgtggataatgacactggggtttatgggggctggaacaaatctgttccaaatcgtagtggaagcgcaccgcctagcatggaaggatctcttgctgctcttggccatctcattgatcagcagagtgggagctttgaagctagtttgacaaccttggataacataactgacagttccaaatctgaggagcaactacgtgctgatccagcatattttgagtattatggctccaaggtgaatctgaatccaaggctccctccgccacttatttcaagggagagtcgccgattaatgaaccgtgttggcaaggctaaagagtggaggatggtctcccaagataacagcagcaaaggctcaatatacgttcctcgatctatgttgtcaactcacaaagaagaacctgaggatgataaatctccaagattggattcaagttcagtggaggatgcccagattgtctccagtgcatccaactttcagagccaggattttatgctggagaggtttcaacagagtgttgcttcttcgcctgatagttcatcttctaatccttcaaatagcaacactggtgattctatgcctgtatattctgacataaatttgttaaagagtttgtcatttgatgctttgaagcaatcggatttgaactcttggacaccaaaaggcccactgaaaagtaatgttaacaatgacctttcatcgccacccctttccagttcatcatatcctggtagcaaaactggtacgcaaacttttgagcaagaaaaggctgctgctgacaccaaacatggaaatgttgtgcttggcagtggcgcagctgttactgaagttgataatgtggactccattatgaagaatttgaagttaagtttggatgtccatacatcctcacctgccaagcagaggtggcaggacaatgtcttgcagcagtatggttcctttttaccagcccaaggtgatcctattcaattgactactcaaggaccccatcctcctcatgtaccttttgttgataacttgtctcatgctcagctcaagttgcctgacatccaccaaaatttaccacaacctagtatgacaacacctttctatacaccaaattcttttgggaacccttattatcagaatttgcaccctgctaatgcttttccaacctcaattggaactgggggttatgctgtaagtggttctattttgccaccgtttatggctggctatgctccccaaggtcctcttgctacacctcttgacagttctatgactccaagctttagtggcaggccatctggatttcttccagcagggaatcttacagggggaacagattttatgcagtcatgtaaagtatacggacaatttgagcctggtatgcagccatccattcccgatccgaacttcattcatttctttcagcatccctctttatttcagtatactggaggaaatcaatacaatacaatgggtccaagatttactgttgttgggaatttagctgaaagctttgattcacaaaacacgatacctcaagctgcatctgcatatccatctgatcagaggcttccactgccaataactggctttcctaattctcctacagccagaagaggagggactgttccaaattatcaaggcatttcatcctacattggagtgccaatgacttatcctactagtccagtgtttcagggacaaacattgcctggagtattgcctcctgttaggagaaacgactctgctggatttctgcccccctcaagaaacatcactggtagccctggaattcaagggcagcgagcaagacagaagtttgatgaatcaaagacctgctctttcttagaagagttgaagtccaacagagcgcgcatggttgagctttctgacatcacaggccgtgtagttgaatacagtgctgaccaacatggtagccgattcatccagcagaagttggaaaactgcaccgccgaagagaagacatctgtgtttgccgagattcttcctcatgcttcagcattaatgactgacgtttttgggaattatgtgatccaaaagttttttgaacatggaactcgtgagcaaaggagggatcttgccaccaagcttgttggtcacgttttgcctttgagtcttcagatgtatggctgccgtgtaatccagaagcctcgcaaaccctatcgcctatccctctcgcggtcttgcctcggtctctggcggcggcaccgccgttttacactcctcctccttcgacaacccgtcgcagtagcgtccgtctctggtgtccggctgtccggctctggactcccgacctcgacatcaggatctgcgcctcccgaccggtatgtgggggctctgaagaaggtgcagaaggatctgggcgcgtcggtgttcgagccgctggtgcaggcgtacgccgccgtcgggaagttccctgggatgtggcagcggctgaagatcgagaacgtggaggtcggggaggggacggcccagctgcttgactctatctgcgccgatcaatagcccaagcacgtcctagaggcggcgacagaaatgagttgctggcaagtttgacaaaacaagcagacatggtcttggtggctcagcaggaattaatcacccaaaaaaacagttacaagttgggttcatgcatgtcttacgtcaaggattgtactccccgttaaactgttggttcgggccagtggccggcccggtacgttcaggcccaccgggcgaacgggccggcccggcacgatttatccctgtgcgtgccgggtttgggcatgtcgctaggcacgtgggccagcacgacccggcccgaagcatcaacgggccgtgcctggcccggccctatccgtaccgggccgaaacgggttcggaccgggtccgtgccgggtggcccgtttggacatctataggtccctatttggacctgaagtgaagcattttaaagttgaaggacccagattctcacttcgagagtttatgaacctagatgagaatctaaggctctggaagttatggaacttgaccagaaaatagatctagttcatgagcttgatggtcatattatgcgatgtgtccgtgatcaaaatggaaatcacgttatacagaagtgcattgagtgtgtccccacagaacatattggttttgtagtgtctgcttttcagggacaagttactagcctttcaatgcatccatatggctgccgtgtaattcagagaatcttggagcactgcggtggtaactcacaaggccagtgcataatagacgagatattacagtgggtgtgcatccttgcgcaggatcagtatggcaactatgttacacagcatgttctagaaagaggaaaagctcatgagaggagccaaattattactaaattggccgggcaggttgttaccatgagccaaaataaatatgcatcaaatgtgatagagaagtgttttcaacatggtgatattgcggagcgggatcttctgatcagacggattgtggagcagacagagggcaacaacaatttattggtctgtttggcaatgatgaaggaccagtatgctaattacgtggtccagaagatacttgaaacttgcaacgaggatcagcgggagcttctgctcagccgcgtaaaggatcatatgcaagcattgaggaagtacacatacggcaagcacatcgtaagccgagtcgagcagctctgtggcgacggaactgccgagtcaggttcttgaaacgaaccgccgcctaattcttcataggctggagggtgtcctgctcttttgctcattccgtcagtgacgaagaaagcaaaacggatcaagtctaactctggcgcttcagaacagactaacaaagctgtcgtcgaagattgtataggtgtgactctgttcagggatagtcttcaggttctagaacagaagggtagtggtgtgcatcagtgtatctgtttactggataatagtggttggttaggtgtgtgcagaaaaagtttagtgctatgctttgtatgtgatacatattaactatgccttggaatgttcatatgttgtcctgattacgtgtgatatctctcgttcagttcaagttgcgttttctacatggccatgggaccatctgccgatttgatgaaaaaggaaaggttgtg

SEQ ID NO: 94237 - DNA, 3245 bp, Zea Mays
atggcggataaggccaaggtggttggtgcccatggagaaagggatgatgtttttttgtggggagagcttcagcacgatgactgcagatcaggtgaccaactaggaggtgtcaaattgctgagtctaatggctactgagagtgctttccgattgattggtgggacgggggctagggactggagtaagggatttggtgcatttggctcttcagcaggtgccttatcaggggaagacttgggatttgtggataatgacactggggtttatgggggctggaacaaatctgttccaaatcgtagtggaagcgcaccgcctagcatggaaggatctcttgctgctcttggccatctcattgatcagcagagtgggagctttgaagctagtttgacaaccttggataacataactgacagttccaaatctgaggagcaactacgtgctgatccagcatattttgagtattatggctccaaggtgaatctgaatccaaggctccctccgccacttatttcaagggagagtcgccgattaatgaaccgtgttggcaaggctaaagagtggaggatggtctcccaagataacagcagcaaaggctcaatatacgttcctcgatctatgttgtcaactcacaaagaagaacctgaggatgataaatctccaagattggattcaagttcagtggaggatgcccagattgtctccagtgcatccaactttcagagccaggattttatgctgccttacttgcttgaacttgaagagaggtttcaacagagtgttgcttcttcgcctgatagttcatcttctaatccttcaaatagcaacactggtgattctatgcctgtatattctgacataaatttgttaaagagtttgtcatttgatgctttgaagcaatcggatttgaactcttggacaccaaaaggcccactgaaaagtaatgttaacaatgacctttcatcgccacccctttccagttcatcatatcctggtagcaaaactggtacgcaaacttttgagcaagaaaaggctgctgctgacaccaaacatggaaatgttgtgcttggcagtggcgcagctgttactgaagttgataatgtggactccattatgaagaatttgaagttaagtttggatgtccatacatcctcacctgccaagcagaggtggcaggacaatgtcttgcagcagtatggttcctttttaccagcccaaggtgatcctattcaattgactactcaaggaccccatcctcctcatgtaccttttgttgataacttgtctcatgctcagctcaagttgcctgacatccaccaaaatttaccacaacctagtatgacaacacctttctatacaccaaattcttttgggaacccttattatcagaatttgcaccctgctaatgcttttccaacctcaattggaactgggggttatgctgtaagtggttctattttgccaccgtttatggctggctatgctccccaaggtcctcttgctacacctcttgacagttctatgactccaagctttagtggcaggccatctggatttcttccagcagggaatcttacagggggaacagattttatgcagtcatgtaaagtatacggacaatttgagcctggtatgcagccatccattcccgatccgaacttcattcatttctttcagcatccctctttatttcagtatactggaggaaatcaatacaatacaatgggtccaagatttactgttgttgggaatttagctgaaagctttgattcacaaaacacgatacctcaagctgcatctgcatatccatctgatcagaggcttccactgccaataactggctttcctaattctcctacagccagaagaggagggactgttccaaattatcaaggcatttcatcctacattggagtgccaatgacttatcctactagtccagtgtttcagggacaaacattgcctggagtattgcctcctgttaggagaaacgactctgctggatttctgcccccctcaagaaacatcactggtagccctggaattcaagggcagcgagcaagacagaagtttgatgaatcaaagacctgctctttcttagaagagttgaagtccaacagagcgcgcatggttgagctttctgacatcacaggccgtgtagttgaatacagtgctgaccaacatggtagccgattcatccagcagaagttggaaaactgcaccgccgaagagaagacatctgtgtttgccgagattcttcctcatgcttcagcattaatgactgacgtttttgggaattatgtgatccaaaagttttttgaacatggaactcgtgagcagacagagggcaacaacaatttattggtctgtttggtagtgtagtaaaagtgttccctccattatcccttcctctctttgccaaacgggtcggggttctggaaggtagggctaggacatggggacctgatctcagttcggtacagccaatcagataacaccatgagtatctcagttctgctattccagctttctgggagctgcgaatcctatggattaccaagacatgggatctctgtaaacttatttcttcctgtgttgatgttagtttatatttcctaatcaccttttatattcaatcaggcaatgatgaaggaccagtatgctaattacgtggtccagaagatacttgaaacttgcaacgaggatcagcgggagcttctgctcagccgcgtaaaggatcatatgcaagcattgaggaagtacacatacggcaagcacatcgtaagccgagtcgagcagctctgtggcgacggaactgccgagtcaggttcttgaaacgaaccgccgcctaattcttcataggctggagggtgtcctgctcttttgctcattccgtcagtgacgaagaaagcaaaacggatcaagtctaactctggcgcttcagaacagactaacaaagctgtcgtcgaagattgtataggtgtgactctgttcagggatagtcttcaggttctagaacagaagggtagtggtgtgcatcagtgtatctgtttactggataatagtggttggttaggtgtgtgcagaaaaagtttagtgctatgctttgtatgtgatacatattaactatgccttggaatgttcatatgttgtcctgattacgtgtgatatctctcgttcagttcaagttgcgttttctacatggccatgggaccatctgccgatttgatgaaaaaggaaaggttgtg

SEQ ID NO: 94238 - DNA, 1502 bp, Zea Mays
cccggccacaaagtcacaaacaaacacacagccgccaacccgtcgtgaccagcctcgcaaaccctatcgcctatccctctcgcggtcttgcctcggtctctggcggcggcaccgccgttttacactcctcctccttcgacaacccgtcgcagtagcgtccgtctctggtgtccggctgtccggctctggactcccgacctcgacatcaggatctgcgcctcccgaccggtatgtgggggctctgaagaaggtgcagaaggatctgggcgcgtcggtgttcgagccgctggtgcaggcgtacgccgccgtcgggaagttccctgggatgtggcagcggctgaagatcgagaacgtggaggtcggggaggggacggcccagctgcttgactctatctgcgccgatcaataggctctggaagttatggaacttgaccagaaaatagatctagttcatgagcttgatggtcatattatgcgatgtgtccgtgatcaaaatggaaatcacgttatacagaagtgcattgagtgtgtccccacagaacatattggttttgtagtgtctgcttttcagggacaagttactagcctttcaatgcatccatatggctgccgtgtaattcagagaatcttggagcactgcggtggtaactcacaaggccagtgcataatagacgagatattacagtgggtgtgcatccttgcgcaggatcagtatggcaactatgttacacagcatgttctagaaagaggaaaagctcatgagaggagccaaattattactaaattggccgggcaggttgttaccatgagccaaaataaatatgcatcaaatgtgatagagaagtgttttcaacatggtgatattgcggagcgggatcttctgatcagacggattgtggagcagacagagggcaacaacaatttattggcaatgatgaaggaccagtatgctaattacgtggtccagaagatacttgaaacttgcaacgaggatcagcgggagcttctgctcagccgcgtaaaggatcatatgcaagcattgaggaagtacacatacggcaagcacatcgtaagccgagtcgagcagctctgtggcgacgttgtcaccctttcaggaactgccgagtcaggttcttgaaacgaaccgccgcctaattcttcataggctggagggtgtcctgctcttttgctcattccgtcagtgacgaagaaagcaaaacggatcaagtctaactctggcgcttcagaacagactaacaaagctgtcgtcgaagattgtataggtgtgactctgttcagggatagtcttcaggttctagaacagaagggtagtggtgtgcatcagtgtatctgtttactggataatagtggttggttaggtgtgtgcagaaaaagtttagtgctatgctttgtatgtgatacatattaactatgccttggaatgttcatatgttgtcctgattacgtgtgatatctctcgttcagttcaagttgcgttttct

SEQ ID NO: 94239 - DNA, 4077 bp, Zea Mays
atggcggataaggccaaggtggttggtgcccatggagaaagggatgatgtttttttgtggggagagcttcagcacgatgactgcagatcaggtgaccaactaggaggtgtcaaattgctgagtctaatggctactgagagtgctttccgattgattggtgggacgggggctagggactggagtaagggatttggtgcatttggctcttcagcaggtgccttatcaggggaagacttgggatttgtggataatgacactggggtttatgggggctggaacaaatctgttccaaatcgtagtggaagcgcaccgcctagcatggaaggatctcttgctgctcttggccatctcattgatcagcagagtgggagctttgaagctagtttgacaaccttggataacataactgacagttccaaatctgaggagcaactacgtgctgatccagcatattttgagtattatggctccaaggtgaatctgaatccaaggctccctccgccacttatttcaagggagagtcgccgattaatgaaccgtgttggcaaggctaaagagtggaggatggtctcccaagataacagcagcaaaggctcaatatacgttcctcgatctatgttgtcaactcacaaagaagaacctgaggatgataaatctccaagattggattcaagttcagtggaggatgcccagattgtctccagtgcatccaactttcagagccaggattttatgctggagaggtttcaacagagtgttgcttcttcgcctgatagttcatcttctaatccttcaaatagcaacactggtgattctatgcctgtatattctgacataaatttgttaaagagtttgtcatttgatgctttgaagcaatcggatttgaactcttggacaccaaaaggcccactgaaaagtaatgttaacaatgacctttcatcgccacccctttccagttcatcatatcctggtagcaaaactggtacgcaaacttttgagcaagaaaaggctgctgctgacaccaaacatggaaatgttgtgcttggcagtggcgcagctgttactgaagttgataatgtggactccattatgaagaatttgaagttaagtttggatgtccatacatcctcacctgccaagcagaggtggcaggacaatgtcttgcagcagtatggttcctttttaccagcccaaggtgatcctattcaattgactactcaaggaccccatcctcctcatgtaccttttgttgataacttgtctcatgctcagctcaagttgcctgacatccaccaaaatttaccacaacctagtatgacaacacctttctatacaccaaattcttttgggaacccttattatcagaatttgcaccctgctaatgcttttccaacctcaattggaactgggggttatgctgtaagtggttctattttgccaccgtttatggctggctatgctccccaaggtcctcttgctacacctcttgacagttctatgactccaagctttagtggcaggccatctggatttcttccagcagggaatcttacagggggaacagattttatgcagtcatgtaaagtatacggacaatttgagcctggtatgcagccatccattcccgatccgaacttcattcatttctttcagcatccctctttatttcagtatactggaggaaatcaatacaatacaatgggtccaagatttactgttgttgggaatttagctgaaagctttgattcacaaaacacgatacctcaagctgcatctgcatatccatctgatcagaggcttccactgccaataactggctttcctaattctcctacagccagaagaggagggactgttccaaattatcaaggcatttcatcctacattggagtgccaatgacttatcctactagtccagtgtttcagggacaaacattgcctggagtattgcctcctgttaggagaaacgactctgctggatttctgcccccctcaagaaacatcactggtagccctggaattcaagggcagcgagcaagacagaagtttgatgaatcaaagacctgctctttcttagaagagttgaagtccaacagagcgcgcatggttgagctttctgacatcacaggccgtgtagttgaatacagtgctgaccaacatggtagccgattcatccagcagaagttggaaaactgcaccgccgaagagaagacatctgtgtttgccgagattcttcctcatgcttcagcattaatgactgacgtttttgggaattatgtgatccaaaagttttttgaacatggaactcgtgagcaaaggagggatcttgccaccaagcttgttggtcacgttttgcctttgagtcttcagatgtatggctgccgtgtaatccagaagcctcgcaaaccctatcgcctatccctctcgcggtcttgcctcggtctctggcggcggcaccgccgttttacactcctcctccttcgacaacccgtcgcagtagcgtccgtctctggtgtccggctgtccggctctggactcccgacctcgacatcaggatctgcgcctcccgaccggtatgtgggggctctgaagaaggtgcagaaggatctgggcgcgtcggtgttcgagccgctggtgcaggcgtacgccgccgtcgggaagttccctgggatgtggcagcggctgaagatcgagaacgtggaggtcggggaggggacggcccagctgcttgactctatctgcgccgatcaataggctctggaagttatggaacttgaccagaaaatagatctagttcatgagcttgatggtcatattatgcgatgtgtccgtgatcaaaatggaaatcacgttatacagaagtgcattgagtgtgtccccacagaacatattggttttgtagtgtctgcttttcagggacaagttactagcctttcaatgcatccatatggctgccgtgtaattcagagaatcttggagcactgcggtggtaactcacaaggccagtgcataatagacgagatattacagtgggtgtgcatccttgcgcaggatcagtatggcaactatgttacacagcatgttctagaaagaggaaaagctcatgagaggagccaaattattactaaattggccgggcaggttgttaccatgagccaaaataaatatgcatcaaatgtgatagagaagtgttttcaacatggtgatattgcggagcgggatcttctgatcagacggattgtggagcagacagagggcaacaacaatttattggtctgtttggtagtgtagtaaaagtgttccctccattatcccttcctctctttgccaaacgggtcggggttctggaaggtagggctaggacatggggacctgatctcagttcggtacagccaatcagataacaccatgagtatctcagttctgctattccagctttctgggagctgcgaatcctatggattaccaagacatgggatctctgtaaacttatttcttcctgtgttgatgttagtttatatttcctaatcaccttttatattcaatcaggcaatgatgaaggaccagtatgctaattacgtggtccagaagatacttgaaacttgcaacgaggatcagcgggagcttctgctcagccgcgtaaaggatcatatgcaagcattgaggaagtacacatacggcaagcacatcgtaagccgagtcgagcagctctgtggcgacggaactgccgagtcaggttcttgaaacgaaccgccgcctaattcttcataggctggagggtgtcctgctcttttgctcattccgtcagtgacgaagaaagcaaaacggatcaagtctaactctggcgcttcagaacagactaacaaagctgtcgtcgaagattgtataggtgtgactctgttcagggatagtcttcaggttctagaacagaagggtagtggtgtgcatcagtgtatctgtttactggataatagtggttggttaggtgtgtgcagaaaaagtttagtgctatgctttgtatgtgatacatattaactatgccttggaatgttcatatgttgtcctgattacgtgtga

SEQ ID NO: 94240 - DNA, 3428 bp, Zea Mays
atggcggataaggccaaggtggttggtgcccatggagaaagggatgatgtttttttgtggggagagcttcagcacgatgactgcagatcaggtgaccaactaggaggtgtcaaattgctgagtctaatggctactgagagtgctttccgattgattggtgggacgggggctagggactggagtaagggatttggtgcatttggctcttcagcaggtgccttatcaggggaagacttgggatttgtggataatgacactggggtttatgggggctggaacaaatctgttccaaatcgtagtggaagcgcaccgcctagcatggaaggatctcttgctgctcttggccatctcattgatcagcagagtgggagctttgaagctagtttgacaaccttggataacataactgacagttccaaatctgaggagcaactacgtgctgatccagcatattttgagtattatggctccaaggtgaatctgaatccaaggctccctccgccacttatttcaagggagagtcgccgattaatgaaccgtgttggcaaggctaaagagtggaggatggtctcccaagataacagcagcaaaggctcaatatacgttcctcgatctatgttgtcaactcacaaagaagaacctgaggatgataaatctccaagattggattcaagttcagtggaggatgcccagattgtctccagtgcatccaactttcagagccaggattttatgctggagaggtttcaacagagtgttgcttcttcgcctgatagttcatcttctaatccttcaaatagcaacactggtgattctatgcctgtatattctgacataaatttgttaaagagtttgtcatttgatgctttgaagcaatcggatttgaactcttggacaccaaaaggcccactgaaaagtaatgttaacaatgacctttcatcgccacccctttccagttcatcatatcctggtagcaaaactggtacgcaaacttttgagcaagaaaaggctgctgctgacaccaaacatggaaatgttgtgcttggcagtggcgcagctgttactgaagttgataatgtggactccattatgaagaatttgaagttaagtttggatgtccatacatcctcacctgccaagcagaggtggcaggacaatgtcttgcagcagtatggttcctttttaccagcccaaggtgatcctattcaattgactactcaaggaccccatcctcctcatgtaccttttgttgataacttgtctcatgctcagctcaagttgcctgacatccaccaaaatttaccacaacctagtatgacaacacctttctatacaccaaattcttttgggaacccttattatcagaatttgcaccctgctaatgcttttccaacctcaattggaactgggggttatgctgtaagtggttctattttgccaccgtttatggctggctatgctccccaaggtcctcttgctacacctcttgacagttctatgactccaagctttagtggcaggccatctggatttcttccagcagggaatcttacagggggaacagattttatgcagtcatgtaaagtatacggacaatttgagcctggtatgcagccatccattcccgatccgaacttcattcatttctttcagcatccctctttatttcagtatactggaggaaatcaatacaatacaatgggtccaagatttactgttgttgggaatttagctgaaagctttgattcacaaaacacgatacctcaagctgcatctgcatatccatctgatcagaggcttccactgccaataactggctttcctaattctcctacagccagaagaggagggactgttccaaattatcaaggcatttcatcctacattggagtgccaatgacttatcctactagtccagtgtttcagggacaaacattgcctggagtattgcctcctgttaggagaaacgactctgctggatttctgcccccctcaagaaacatcactggtagccctggaattcaagggcagcgagcaagacagaagtttgatgaatcaaagacctgctctttcttagaagagttgaagtccaacagagcgcgcatggttgagctttctgacatcacaggccgtgtagttgaatacagtgctgaccaacatggtagccgattcatccagcagaagttggaaaactgcaccgccgaagagaagacatctgtgtttgccgagattcttcctcatgcttcagcattaatgactgacgtttttgggaattatgtgatccaaaagttttttgaacatggaactcgtgagcaaaggagggatcttgccaccaagcttgttggtcacgttttgcctttgagtcttcagatgtatggctgccgtgtaatccagaaggctctggaagttatggaacttgaccagaaaatagatctagttcatgagcttgatggtcatattatgcgatgtgtccgtgatcaaaatggaaatcacgttatacagaagtgcattgagtgtgtccccacagaacatattggttttgtagtgtctgcttttcagggacaagttactagcctttcaatgcatccatatggctgccgtgtaattcagagaatcttggagcactgcggtggtaactcacaaggccagtgcataatagacgagatattacagtgggtgtgcatccttgcgcaggatcagtatggcaactatgttacacagcatgttctagaaagaggaaaagctcatgagaggagccaaattattactaaattggccgggcaggttgttaccatgagccaaaataaatatgcatcaaatgtgatagagaagtgttttcaacatggtgatattgcggagcgggatcttctgatcagacggattgtggagcagacagagggcaacaacaatttattggcaatgatgaaggaccagtatgctaattacgtggtccagaagatacttgaaacttgcaacgaggatcagcgggagcttctgctcagccgcgtaaaggatcatatgcaagcattgaggaagtacacatacggcaagcacatcgtaagccgagtcgagcagctctgtggcgacggaactgccgagtcaggttcttgaaacgaaccgccgcctaattcttcataggctggagggtgtcctgctcttttgctcattccgtcagtgacgaagaaagcaaaacggatcaagtctaactctggcgcttcagaacagactaacaaagctgtcgtcgaagattgtataggtgtgactctgttcagggatagtcttcaggttctagaacagaagggtagtggtgtgcatcagtgtatctgtttactggataatagtggttggttaggtgtgtgcagaaaaagtttagtgctatgctttgtatgtgatacatattaactatgccttggaatgttcatatgttg

SEQ ID NO: 94241 - DNA, 1128 bp, Zea Mays
ccataatcaagactaaatgcatccagttaagagtgtgcccaacttctgttacttgaagattactattgacgtcgtttaagttttcagctaatgtaagatgaacaacttgtgatctgaaggaatgtgctttcttaatagctgagcgtacagtataccttagacattagcgttttacactgaaaatttgataagcaatatcaagggaaaataacagcctataatcttacatactcagaactggaactgaccttgtgttatgcatgcaggctatcgcggatgtggcgcgccatggctgaacgccacaaagctcagaagcgcaccatcgaggacgccaaacttctcttcctccagcaccacccctcggccgccacggctatctcccttggtccgctggaggccgcaactccccctccggctgccttggcactggaatccgagatccaggcctggcgaggagccctagagacatggctgtttgcgcagcgcgcctacgcgcgcgcgctggccgcgtgggcgcgacgatgcctcggcatcggcagcgcggcgcggcccagccacccgctgccgccggcgttcctagtgtgcatggaatgtgggcgcgcggctgacacggccaccgaggcacgagtgatagacgggttggacttcttcgtggctggtgtcgggtcggtgtgctcaggcgcggccaccgggatggagggcatggctgggcgggtgctgtgtgctggcatggcggcggtcactgacgccatggcggagttcgcggcggcgtctgcggacagctacgacgcggctgtcacagctgtgatcgccgcggcgcgtgcgccggagcgcgggaaggagaacggcatggggcaactgcaacgctaggaaaatgctgcggcagttgatttgttggagtggctcaccttgtggtaacgatgagtaggagatgaaattaagcatgcagttaaatgtgtagtcttgtgattggtaagaatgctattactccctccgtttctttttatttgtcgctggatagtgcaaaattacactatccagcgacaaataaaaagaaacggagggagtacaaggctatctatgcttgctactgattgattataggttcagcgtctgtggtattatccc

SEQ ID NO: 94242 - DNA, 1254 bp, Zea Mays
ctccttcagctccctgcgcgccgcgtgagctcgccgtgccggagctccactgcatcgccccagctccctctgcttcccagctcggccgctcctccctgctgcacatcgcgtccggccgagctcgcctccgacctctgcttgtcctgctgctgctcgcccatggcagccgattcctctatgcgcgcgctccctgtttccccgtccaaagctctatggtgtccggctccttgcgcgccctgccgagcgccctcccggcttcctgctcgccgagctcggcttcgagttcctatctcccatgccgcggcactccactgtgcgctgctcgccgagctcgccctgcgctcggattccaccttcctgcgtgcgtgcctgtatgtgcgcgccgtgctcctactgcgcgtagctgtgtctactccttcctcgccttagtccctgcgcgcgtcgagctttcgtgtcgagctctcgcgccgtcgaatcgtctgcttgctgtctgcgccgtcgaagttccctcgccgtgtgctctgacatcggctgctgccgattccgccataaagttcgcgagcgctccttgcttggctcgtttcgccgtgggcaatttttccacgtttcaaatctgtgctacttggtcgcgtttggtcgtcgagctgttgaacccgtcatctctggcttgatccccacctcaccagcttaccccagacttcaatagaaggtcgtcgtcgttcgtgcatcccaagaaaactcaagaatcgggtgaagacgaagttagcagcgcgattttccccaagcgctcgacaaattgcctggatcgaaaaatcattaccaacctcgcggattcgagtccaatattgaaatggtgagctaatttgctattttattgactggtttgatggatgaattgataggtgtgtacgtcgcgatgaatatcctgcttgtagctaagcacgtatttatataacgcttgtaggaatacggggctacaggtagcatggcaattgtgtccacgattgcgaagtcgtcgtgctgcgtagctaagtttagcattaacgacataggttatgtgagaagattaaattggtgattcgtatccgatgaatgatcaaattaataatgggagggttaggtttaaatatttattatgcgaggaatatatagataaacctatgtgaggtatgatgagttagtaacgcgaaagtaggttaaattatatgattaagtcaatgatattcccttttagtagttatatttcttggttaa

SEQ ID NO: 94243 - DNA, 3247 bp, Zea Mays
accaggagccaagtcatccaccccctcccccgacgaggcaggcagggacagggcaccacgccattctcgcgcgaggagagggcacaggaaagaaaaagaaaaaaatcacctccttcaacctctccccctcctccaccgaaatcatcctccagaatctcccgatctttactccgcccaaagatcctatacacgcgcggctatttgtagcgtctgccctgccctgcccggcctcgtggaaaggcgctccgctcttggctctccccacctgcgggcgggggctgttggttcgggggggaggcagtcaaatccgcctgcggctgaatcgggggagagggcccgcatggcggaggaggacaggcagcggcggtggcggcggcggcggttcgcgaacctgcgcagcgtccggtggcggatcgatctcggcatcctgccggcgtcgcccggggcctccgtcgacgagctccgccgcgccgccgcggattcgcggaggaggtatgttagtttgaggcgccgccttatggtagacccgcatcttccaaaggaggaggacagatcatccaaccttgttgttgacaacccgctctctcagaacccagatagcagctggggccgcttctttagaggggctgagttggagaagacagttgaccaagacctgtctcgattatatccagaagatggtagttactttcaaacgcctagttgccaggccatgctcaggagaatactgttgatgtggtgccttcagcacccagagtgtggatatcgccaaggaatgcacgaactactagctcctctagtgtatgttcttcaagttgacattgataaactatctcaagtaaggaagctccatgaggattgcttcaatgatgattttgatggagtggctttcccagatacagatatgcttttcagttataaacctagaaaggactcaaactggcattccagggctgacaatggcgatgattctgaaagcgcttccagagttaacactcttgatgagcttgacctggatacgaaggaaataatttcacttagtgatgcatatggagccgagggtgaactaggcattgtattgtctgaaaggttcatggaacatgatgcttattcaatgtttgatggtttgatggacggaggtagtggagtggtctgcatggcagagtttttctctacatccaaggttggatctagctcaagtctagcacctgtcattgaagcctcagcatctttatttcatttgctttccattgttgagccatctcttcatagccatttcattgagctggatgtagaaccgcagtatttcgctcttcgttggctgcgagtcttgtttggacgagagttctgcctcgacgatcttttagttgtatgggatgaagtttttgcttgctccaatgatatgctacttagagaaaatgaagaatgcaactttaagatattgtgctcatctagaggggcattcatcgcagccatggcggtctctatgattcttcaccttagatcatctctactagccactgaaatcaatacgttatgtcttcagaggttattgaattttccaaacaacgttgatgtgcataagttaattgagaaagctaaatctctacagtctactgctattgatgcgaatacattatccccatctcttttatcaaagaaggatagctgtgattatgatagagtttatagtaatcttgctacttcaactcctccaaggactccgttgcatccattagctgagagttactgggaagagcagtggagaaacctgcataatgacggaactgctcttaaggagagtgataataagggtctttcttataagagatcattaaagcaatctttgagtcagaggcttggtttatctaggacagagtcagatccttctccagttaaggtagtcagtgtgaataatgacgcgaggaattcagtgagacggtgtcttctaaactcttattcagataaagtagtacaatccaatgaagttattggaaaatttgagcaagataaatttcctatcgtgtcgattcacaaggagactattttgagttctgaaaggtcttcacagctaaagctaaaggcggctagtgagaatttaacagtaagtccaccaccaagtgtggcgaagttcaatccacttatagattcaccggtgaagcctgctgacgagagttcagcgaaaaggacagaagattgttccagtggtgaaaattctccagtgttttatacagctagggctggtaatgaacatgagaattgtcatgataatgattccgagaagagcagtattacttcaaattcatgcgccggtgatgattatagagacgaagtcttgccagacgagtcgtccagctgtaactgcgaggataaaaccgtctcagaagcaatagagtctggagcaaatgtaggtcaaactagacccttggagaaaaccatggtacctaatgaaagaaagccatttattaacaagctgcagtggctgttgaggtttggcagaccatcagctgaaggcaatgtggtggagaagggcagtggtcaggcatcatcggatggtaaacatgacgcggttcctccctgcccttcacctgctgatgcgagttcagataactcttgcagcggcataaatttggcttatggcgataataagaaggtgatgggcacgctgaagaatatcgggcagaacatgctcgaaaacatccaggtgatcgaaacggcgttccagcaggaccgcgcgcagcccagcgccatggagaacttgtcgaacaacatcctgggaggcaaagggcaggtcaccgcgatggctgccctgacagagctccgcaagatcagcaacctgctgcgcgagatgtgacccatccaaggcgtgtgcaggctcctcctcccccattctcaccccccccccccccccccccccacaaatcattagctcctcagaatcagataagcaaggcctccgtagttgaagcccaggcacctagccaccccccaaaccccccttgtatatatagaccccattcgattattccattgagcctctgctcggcaggtatgctaaggctctcgttctttttctttctttcttgtaactaaggattggtcagctgctgtcaactgagttgcgggaggtgagggagtaaaaaactctcttgtctcctgcgttaggagcaactttttgatggaacaattttggacgcgaaaatgtctctcgaggttcagtaaataaatggaataagctatgtcgaaa

SEQ ID NO: 94244 - DNA, 1256 bp, Zea Mays
cccgagccgctgcggcggcggcggcggtggcggtccttgcgaggggagagacctctgaggcgcgggcgcggtggaaaccctatcgcgagaccgcggcttccagaggaagcctgcttcgcccggcttttggtttcatgtgacgcgcgcggcttctgtgcgaagcgcggccgtgagaagctgcccagaatctgggcgtttggccgtggcttctgcttctggcggccagaagccgcccagaatcttaaccaaacaggcaccatgtcgtctttctccgctatataggcgcacacacccaaagacacaaaaaccctagcctccaccccatccggcagcagccaaaccctacataggcgccgccgcaggcggcccccccgcatcgtcgccaaagatgcagatctttgtgaagactctgacggggaagaccatcactttggaggtggagtcctcggacaccatcgacaatgtgaaggccaagatccaggacaaggagggcatccccccggaccagcagcggctcatcttcgccggcaagcagctcgaggacggtcgcaccctcgccgactacaacatccagaaggagtccacactccacctggtgctccgcctccgcggcggcgccaagaagcgtaagaagaagacgtacaccaagcccaagaagatcaaacacaagcacaagaaggttaagctctccgtgctgcagttctataaggtggacgacaccactagcaaggtgacccgcctccgcaaggagtgccccaacacagagtgcggcgcgggcgtcttcatggccaaccacttcgaccgccactactgcggcaagtgcggcctcacctatgtctacaaccagaaggcgtaattgcttgccccgatttgctttatccgcctaccctatcgaacatccagctgttggttactcgaattgtatctcatgtagatctgtctgaggttgaaacttaaatggagcagtagtatctgtcatattggtacccctgttactgaattgatgtgatgctgagtttaattttgttttcatatctatccttacaggccattgcactctttgcccgtttcaccatgattttttgattcataggtcgattatagtagtattgcgtaattggattgatttatgtttgcttgattattttagttgccactaatgtcttgagataggtaaccattatacttggtatgctacgtacttgttgatgtaattttgatgtggatttattaacgagtaactaataaaataataa

SEQ ID NO: 94245 - DNA, 657 bp, Zea Mays
gggccaacaccaccaaacaccaacagcaacaccaacaacggcggagctgccaaagaaagcaaaccagaggagagaagagaggaggggttggctggctggccctggccgtcgtccgccggtagctcgtggtcgctcgctcgctccatcattcctccctctccgccggcgtgcccgcccgcccacatgggcgtgtccgcctcggagtccgccgtggtctgggccgaggtcagcgccgcgatcctgaacaaggactgggaggcggccaggcaggcgaagcggcgggtggaggagacggcgaggcggctcgccaaggagaggaacgagcggggggaggtgtggactcccagccacttctcgctgtggcagaacaagcacggcgactgggagtgctggccgctggaggactccgtgccgccggctcctattgtcgtcccctctcctttgtgactccaagtccactagcagcagatctttgttcactgataacatacgacgaacgaacgtgaacgtcgaatacatctttcttctagcttcgtcgccttgagaatgctgttatgcatgcatattagccacggtttctaatgacagatcggcggcaaatgagcactcagtgaaggaaacaaagtgggctctcagaccaagagaaacaaaaacaat

SEQ ID NO: 94246 - DNA, 1826 bp, Zea Mays
gtcgtccgcactgccggccaccgtgacccgcggcggtccatgcgccgtcgttggtcggagtaaatgagattcccggacgtcaccttgcgactcgcgtgtggcctcgggatcgctagcttcgcttcgcttttaacatttcttaggagaaaaggaaagaggttccgtttacacaagaaccggcgtatgcgtgtgcgtgtgctccgttggctctcggcggcggcacctttccgtcgccgtcgccatggccacacgctccacagacaaagtactgcatacgtatggtccgcgtatacacactctcggaaaaggaggctacctacctaccacccgtatacttgtacttgtacatacacgttgcagcacacacaaaaggagtttccaacatttcttatctggggcaggcgggcggtccccgtccccgtcgcgtagccgtttcccctccgcctttcgtcggtcgtcgcccggcctcgggagacggagtcagagggcgaggcggaggcggcgcgcgcggccgtgctgacgccgccgctgtcgctgggggccggcgggctcgcgggggagctccgcccggccaacctcggccagcgggtgctcagcctgttccgcaacgtccgcccgggctccgacctctcccacttccagctgccggcgacgttcaacctgcccaagtcgcagctgcagctgtacggcgaggccgtgtactgcggcggcgaggacatgctggcgcggtgcgcgcgcggcgccgacagcctgcagcgcatgtgcgccgtggtggcgtggagcatctccaccacgcggccccccatcttcggcttcgcgccctacaacccggtgctcggggagacgcaccacgtctccacgtccgccggcctcaacgtgctcctggagcaggtctcgcaccggccgcccgtgacggcgctgcacgcgacgcacgcgcgtggggaggtggagctggtgtggtgccagagccccgcgccgcggttccacggcgccagcgtggaggccgcggtgcggggcgcgcgggagctgcggctgccgcgccacgccgagacgtacgccgtcgggtgcccgggcctcgtgatccgcctgctgccgtcgccgggctgcgagtgggccggcgacgtccgcgtctcctgcgccgagtccgggctcgaggccacgctcagctaccgccgcagccgccgctccttcctcggcctcggcggcggcgacgcgcgctgcgtcaggggcagggtcttccgctccgccgcgcccgacgacacgctgtgcgaggtggacgggttctgggaccgccaggtctcgctcagggacgtcgccaccggcgaggtctccgtgctctacgacgcacggcaaaccatcgctgacctggccacgcccgtcgtgcaagacagaaagggcgtgtccgcctcggagtccgccgtggtctgggccgaggtcagcgccgcgatcctgaacaaggactgggaggcggccaggcaggcgaagcggcgggtggaggagacggcgaggcggctcgccaaggagaggaacgagcggggggaggtgtggactcccagccacttctcgctgtggcagaacaagcacggcgactgggagtgctggccgctggaggactccgtgccgccggctcctattgtcgtcccctctcctttgtgactccaagtccactagcagcagatctttgttcactgataacatacgacgaacgaacgtgaacgtcgaatacatctttcttctagcttcgtcgccttgagaatgctgttatgcatgcatattagccacggtttctaatgacagatcggcggcaaatgagcactcagtgaagg

SEQ ID NO: 94247 - DNA, 2269 bp, Zea Mays
gggccaacaccaccaaacaccaacagcaacaccaacaacggcggagctgccaaagaaagcaaaccagaggagagaagagaggaggggttggctggctggccctggccgtcgtccgccggtagctcgtggtcgctcgctcgctccatcattcctccctctccgccggcgtgcccgcccgcccacatggtacgtacgcgcgttcccccgcccgcctgcttgccttgccttgccttgtcgtccgcactgccggccaccgtgacccgcggcggtccatgcgccgtcgttggtcggagtaaatgagattcccggacgtcaccttgcgactcgcgtgtggcctcgggatcgctagcttcgcttcgcttttaacatttcttaggagaaaaggaaagaggttccgtttacacaagaaccggcgtatgcgtgtgcgtgtgctccgttggctctcggcggcggcacctttccgtcgccgtcgccatggccacacgctccacagacaaagtactgcatacgtatggtccgcgtatacacactctcggaaaaggaggctacctacctaccacccgtatacttgtacttgtacatacacgttgcagcacacacaaaaggagtttccaacatttcttatctggggcaggcgggcggtccccgtccccgtcgcgtagccgtttcccctccgcctttcgtcggtcgtcgcccggcctcgggaggtccgagatttgtttcttcgttcattaattatagtagagggaaaacctttggcgcgcacgcacgcgctgccaaatctgacgcccgcctccacttggccagtgccagcgtctcgatcggcggagcgcctgcattccaatctcgttcggaaaaacaaaataacaaacgctgttgactgtcgtatctgatcctgatcacctgatgtgacgcagacggagtcagagggcgaggcggaggcggcgcgcgcggccgtgctgacgccgccgctgtcgctgggggccggcgggctcgcgggggagctccgcccggccaacctcggccagcgggtgctcagcctgttccgcaacgtccgcccgggctccgacctctcccacttccagctgccggcgacgttcaacctgcccaagtcgcagctgcagctgtacggcgaggccgtgtactgcggcggcgaggacatgctggcgcggtgcgcgcgcggcgccgacagcctgcagcgcatgtgcgccgtggtggcgtggagcatctccaccacgcggccccccatcttcggcttcgcgccctacaacccggtgctcggggagacgcaccacgtctccacgtccgccggcctcaacgtgctcctggagcaggtctcgcaccggccgcccgtgacggcgctgcacgcgacgcacgcgcgtggggaggtggagctggtgtggtgccagagccccgcgccgcggttccacggcgccagcgtggaggccgcggtgcggggcgcgcgggagctgcggctgccgcgccacgccgagacgtacgccgtcgggtgcccgggcctcgtgatccgcctgctgccgtcgccgggctgcgagtgggccggcgacgtccgcgtctcctgcgccgagtccgggctcgaggccacgctcagctaccgccgcagccgccgctccttcctcggcctcggcggcggcgacgcgcgctgcgtcaggggcagggtcttccgctccgccgcgcccgacgacacgctgtgcgaggtggacgggttctgggaccgccaggtctcgctcagggacgtcgccaccggcgaggtctccgtgctctacgacgcacggcaaaccatcgctgacctggccacgcccgtcgtgcaagacagaaagggcgtgtccgcctcggagtccgccgtggtctgggccgaggtcagcgccgcgatcctgaacaaggactgggaggcggccaggcaggcgaagcggcgggtggaggagacggcgaggcggctcgccaaggagaggaacgagcggggggaggtgtggactcccagccacttctcgctgtggcagaacaagcacggcgactgggagtgctggccgctggaggactccgtgccgccggctcctattgtcgtcccctctcctttgtgactccaagtccactagcagcagatctttgttcactgataacatacgacgaacgaacgtgaacgtcgaatacatctttcttctagcttcgtcgccttgagaatgctgttatgcatgcatattagccacggtttctaatgacagatcggcggcaaatgagcactcagtgaagg

SEQ ID NO: 94248 - DNA, 1538 bp, Zea Mays
gggccaacaccaccaaacaccaacagcaacaccaacaacggcggagctgccaaagaaagcaaaccagaggagagaagagaggaggggttggctggctggccctggccgtcgtccgccggtagctcgtggtcgctcgctcgctccatcattcctccctctccgccggcgtgcccgcccgcccacatgacggagtcagagggcgaggcggaggcggcgcgcgcggccgtgctgacgccgccgctgtcgctgggggccggcgggctcgcgggggagctccgcccggccaacctcggccagcgggtgctcagcctgttccgcaacgtccgcccgggctccgacctctcccacttccagctgccggcgacgttcaacctgcccaagtcgcagctgcagctgtacggcgaggccgtgtactgcggcggcgaggacatgctggcgcggtgcgcgcgcggcgccgacagcctgcagcgcatgtgcgccgtggtggcgtggagcatctccaccacgcggccccccatcttcggcttcgcgccctacaacccggtgctcggggagacgcaccacgtctccacgtccgccggcctcaacgtgctcctggagcaggtctcgcaccggccgcccgtgacggcgctgcacgcgacgcacgcgcgtggggaggtggagctggtgtggtgccagagccccgcgccgcggttccacggcgccagcgtggaggccgcggtgcggggcgcgcgggagctgcggctgccgcgccacgccgagacgtacgccgtcgggtgcccgggcctcgtgatccgcctgctgccgtcgccgggctgcgagtgggccggcgacgtccgcgtctcctgcgccgagtccgggctcgaggccacgctcagctaccgccgcagccgccgctccttcctcggcctcggcggcggcgacgcgcgctgcgtcaggggcagggtcttccgctccgccgcgcccgacgacacgctgtgcgaggtggacgggttctgggaccgccaggtctcgctcagggacgtcgccaccggcgaggtctccgtgctctacgacgcacggcaaaccatcgctgacctggccacgcccgtcgtgcaagacagaaagggcgtgtccgcctcggagtccgccgtggtctgggccgaggtcagcgccgcgatcctgaacaaggactgggaggcggccaggcaggcgaagcggcgggtggaggagacggcgaggcggctcgccaaggagaggaacgagcggggggaggtgtggactcccagccacttctcgctgtggcagaacaagcacggcgactgggagtgctggccgctggaggactccgtgccgccggctcctattgtcgtcccctctcctttgtgactccaagtccactagcagcagatctttgttcactgataacatacgacgaacgaacgtgaacgtcgaatacatctttcttctagcttcgtcgccttgagaatgctgttatgcatgcatattagccacggtttctaatgacagatcggcggcaaatgagcactcagtgaagg

SEQ ID NO: 94249 - DNA, 529 bp, Zea Mays
gggccaacaccaccaaacaccaacagcaacaccaacaacggcggagctgccaaagaaagcaaaccagaggagagaagagaggaggggttggctggctggccctggccgtcgtccgccggtagctcgtggtcgctcgctcgctccatcattcctccctctccgccggcgtgcccgcccgcccacatgacggagtcagagggcgaggcggaggcggcgcgcgcggccgtgctgacgccgccgctgtcgctgggggccggcgggctcgcgggggagctccgcccggccaacctcggccagcgggtgctcagcctgttccgcaacgtccgcccgggctccgacctctcccacttccaggtacctgcgttgcgttgcgttgcgtgcgtgcgagcgccactgcccactgcccaccaccagcttacgctgactcttgtgtggctcaactcaaccatctggaacgacacagctgccggcgacgttcaacctgcccaagtcgcagctgcagctgtacggcgaggccgtgtactgcggc

SEQ ID NO: 94250 - DNA, 113 bp, Zea Mays
atttaaatttccaaattctaaatttgaattcgaaccagagtttcaaaattcatacctcaattcaaatatgcacatacaaaaatccaacatggtgcaggtataatttatattaa

SEQ ID NO: 94251 - DNA, 1382 bp, Zea Mays
catccacttgcacatatgcgaccatgatcaatttccaacctatgacactaatctcaacagcttcaaaaactgccacatcattcaaatcgacgtgcaagaatagtgtcaacaaacccatcacatgttttactgcatttctgctcacagctataagccacatatagttctcagatggggacaacaaagcccatgcagataaaattgtgaaaagctattacatatgccatgtaccaccaaaatatgctagcttcacatgaaaaatggacatcataatactttaaatatacacaagttaaaagctattgatggcacatgagcacagtcactccaggaagctcaggtcattgatggtgttgaagtgattccagagctaaacagaagaactaggatagcccagatatccgtaacgtgatgaaatctcatttgcagtgccgcacaccccaggacacaacctctctgattcccacagctagacctatctgaaatagcaatttctgataagcaatgctcagctccaaactaaactcctgattccgtcacacactttatcgtcatgttccttcccatgcaaagttctcaaacaggttgaacaaatccacacgaagaaaagtgtggatgggtattacagttgtgagttgtgacacatcatcaacagatatgctatcatagggcttcggatgtacagatcatcaataacgcattcagtcaaatagtaagcacagtcactgcaggaggtcaggtcattgagaaattgacagtgctaaacatattcagaagctaaatccttaatgtgatgaactgcaggtcacaatatctattatctgatctacacatatagaccaagccaaaaacagcgatgtccggttaccaccatacagttccagtgacagcaacaagtagagcatatagcaagctccgatctgctgcgatcaaccatatacatgcatacagcaagctaaactccataacaccgcggccactcacctcctgtcgtcctgttcgtgccctccgccgccgactgggccgagccggcgccggtcgaagccgccaccgccctcctccctacgcttcttgtgcgggccgggtggcgggggcccgggcggcggcggcgggagcactggcgaggctcggccccgcttgcggtctccgcggccgacggtgggaggaggaggcgacgcgtcggcggcctcggccatggctggggggccggcgagatccttgctagggcaccctacagtctgccgcgcgcccgcctcggtatggaaggatctctcgtctcggaacgtgtcgggtagggctgggatttgggatgggggagaaatcaatcggacggaaacgaagcgccggggtccgggagacgtgcgattggactatggagggag

SEQ ID NO: 94252 - DNA, 1071 bp, Zea Mays
atgtccacggcggtggcgcggccggcgcacggcggattccggcggtcggggagcggcaagccggatccggacgaggcggacaggatgatgcggagcgccaacgggtacttggtccaagaagaggaggaggaagagcatggcgatgaggcggcggcgaggagagaggatgaggacgaggaagacgaggaggcggaggcggtgtcggaggcctcgtcgatcggggcggcgtcgtccgacagctcctcctccatcggggagaactccgcgtccgacaaggaggaagaggaggaggaggatgaggttgagagtaaggcgcaggggcttggcatgatggggctggccacgctcgaatccttggatgatgccctgccctccaagcggggcctgtccagcttctacgcgggcaagtccaagtcgttcacgagcctggcggaggccgcggcggcggcggccgccagggagatcgccaagccggagaacccgttcaacaagcggcggcgcgtgctgcaggcgtggtcgcggcggcgggcgtcgtgcagcgcgctggccgccgcgtacctgccgccgctgctggccccggaccacgccgtggtggaggaggacgacgaggagggcgcggacgacgaggaggaggacgaggaggatgaggagcatggtgacggcggcgggctcaggggcaggaggaggccgcccacgttcccgtccccgcggctgagcgtgcacgtcgccgccgccggccagatggcgcggaacgggtcgtttcggtccccgaggtccttctccatgacggatctccacagcgccgccggctacgagtagccccggcgggcgggcggacaggattagagagagtgctgatgtgttgttctaggtgcttgttttactggtgatgtcgccactggtgctgccattaattactgctatatgatcatcattatgaatcaagatacatactgtacgtacgtagctgtagtactccagtcagtccagagagataagaagaaactgcgttcttgtgcatgcttgccatcgtgtcagcctgcctggtaatgcgatgctaccaatggcggg

SEQ ID NO: 94253 - DNA, 732 bp, Zea Mays
gctttatactttactatccatgataggtaccagactgagaataggattgatcttacttttaggttccatcaaaccttattggtgttgttttagcaagccaactgggaaaagaacaggccctcgttgcgcttttaagtcaattggtgatcctggaggccctcgtggcgcgctaccggcgacggctgatgggggatacgacgacatcgtccccctcgacccctcctccatccccgacgcggcggcgccagcctgcagttattcacctgttcagggtgttcagctgcttacattattggagcacttgtttcatgatgtaccagggcgagaagatctgcctcaacatgcacttctagctgttgtgggtcaagaactgtccgaggtgcagcctcacgcacacgttgtgccttggcctcacgcagtggctggcgtaggaggcccgattctggtggacttgggcatggagaaacacaactgcacaatgatgatgaggtggctccgaccaaggcttctgcctctactgctcctgatttgtatggtaaaccaagaacctgcgatttttacaaccacaatcctcgattatactacatggaaagctagatgagtgaccaaatattgaaaaggttgaggctgctacgaccaaatattgaaaaagacgaggttgtacaagagatgaggtgccaaacaaaactgctaaactatgtgaccaagctgtgcagaggatggccccaagat

SEQ ID NO: 94254 - DNA, 84 bp, Zea Mays
agttaccccaatataatgtccatgcccttaagagtacacaataacactcctagacatttctgcatgttgtccctatcttctctt

SEQ ID NO: 94255 - DNA, 821 bp, Zea Mays
acctcgagttaccgtatgcgatgctgtgagctgtcgtgccgaggttcttgtggatgatatataactcaaagagaagagttgcaccgaagggcagcggtggcatcgacagctttggttggtcttcattcgtgaagcgaagtgtcctcgagtcgctctacgtgacgaatgatggatggttcgtcgttgtgggagcagtcaaggttgtgcaggaggaggatcccctcgacttgccaccctccaacatcgggagccatctcggcctcctgctggactccacggccggttccgacgttacgttcgttgtcgacggcgagaggttcgctgcccaccgggccatgctcgccgcccgctcgccggtcttcaaggcgcagctcttgggctccatggcggacgccaccatgtcgtccataccattgcatggaatcagcgcagcgacgttcagagctatgctccgcttcatgtacaccgatgcttgtcctgaagaagccgatgactccgactccgactcctccccgggtgagatgtttcacgacttgctcgccgctgccgaccgcttcgacttggatcgcttgaagcttctctgcgctaggaagctgtggaacaatgtctctgaggatacagttgctgatacgctgatctgtgccgaaacatataactgcccgcagctgaaaaggaagtgccttggtttcttcggcgaggggaaggacttcaagacaaaggctgtgttaacggatggttttgctcggctggcaatggaattcccatggattcttgatgagctgagggagaaggctggagcatagaggtcagtcaggtcagca

SEQ ID NO: 94256 - DNA, 1888 bp, Zea Mays
cctgcgcccaagctccagctccgatccgtaacccaaacaaacgacaccttgggcttggagcctactgtgccaccggcccgcccacgagaccccgcggccatgtccatcccgcggctcctcctcctcgccgtcctcgccgccgccgctgcgtgcgcgcccgcgcacgccgccggcgccggcgcctgcgcggcggagaagttctcgggcaaccgcgcgttcgcggcgtgcgccgacctggcccgcctgggcgcgtcgctgcactggtcctacgacgccgcggcggcgtccctgtccgtggcgttcctggcggccccgccttccgcgggcggctgggtcgcctggggcctcaaccccagggcgcagagcatggacggcacgcaggcgctggtcgccgtccccagctccggcggcggcggcgcgtacgaggtgcagacctacagcatctccgggacctcgctcggcgccccgggcccgctctccgcctaccggacgtcgggcctcgccgccgaggtcggcggcgacggccgcgtccgcgtgttcgcgaccctcgtgctccccaacggcacgggcgccgaggtcaaccacgtctggcaggtcgggccctactccggcgggatccagatacacgacaccaagggcgacaacatgaacgccaaggggacgctcaaccttctaaccggcgccactgccgccgccagcggagggggcagcatcatcaggaagaaaaatgtgagttggtcggtccccactccccagacccccacccttcgtctgttcgcgttattaacaaggcattccttcgtttcttcgattctgaccccatcagggcagttcttcgatacagccaagacaatcagctggcatattttattccacaagatataaaccctctcgctctaacagtagtgtgccagccatgtgacctgtgacaaactgatgaagaagtctccgttcccattaagaatgccattgttgtcatctagctaccatctgttaaccaccggtttcgctctgggcgtacactgtccagtatttttctggtctcttatcaaaccatccgttcttcctgtagactcatgggatcctgaatgcggtgagctgggggcttctgctgcccatgggagccatcttcgcgagatacctcaagacgttcaggtcggctgacccggcgtggttctacctgcacgtcgcttgccagctgctcgggtacggcgtcggggtgtccggctgggcgaccggcatccatctcggaaacctgtccaaggggatcacctactcgctccacaggaacatcgggatcacagtcttcgctctcggcactctgcagatcttcgcgctcttcctgaggccgaagaaggaccacaagtaccgggtgtactggaacgcctaccaccactcggtcggctacaccgtcatcgtgctgggcgtcgtcaacatcttcaagggcatggccatcctcgacgtggagcagaggtggaagacgggctacatcgccgccatctccgtcctcggcgccgtcgccgtggccctggaggccgtcacgtggggcgtcgttctgaggcggaggaaggaggaaagcaagagctacaacggcacctctaacggcggccgcttgccgctgtctatgtagctcgtcgccatgtatctccatcatctggagaggcagcaaacagccgtgcgactggctggcgctggcgcgcttctttcccatcgtgttttcgttacacatacatgcatgctaatctagaccggtagtagttcacatagtacttcgttacatgtatacagtttacttcaagatttagagagagagagagagagagagagagagagagagctgattatgatgacgtgcacctttacagacgatgatgttcctgtacattta

SEQ ID NO: 94257 - DNA, 1669 bp, Zea Mays
gcctcttcagcgccctgcgcccaagctccagctccgatccgtaacccaaacaaacgacaccttgggcttggagcctactgtgccaccggcccgcccacgagaccccgcggccatgtccatcccgcggctcctcctcctcgccgtcctcgccgccgccgctgcgtgcgcgcccgcgcacgccgccggcgccggcgcctgcgcggcggagaagttctcgggcaaccgcgcgttcgcggcgtgcgccgacctggcccgcctgggcgcgtcgctgcactggtcctacgacgccgcggcggcgtccctgtccgtggcgttcctggcggccccgccttccgcgggcggctgggtcgcctggggcctcaaccccagggcgcagagcatggacggcacgcaggcgctggtcgccgtccccagctccggcggcggcggcgcgtacgaggtgcagacctacagcatctccgggacctcgctcggcgccccgggcccgctctccgcctaccggacgtcgggcctcgccgccgaggtcggcggcgacggccgcgtccgcgtgttcgcgaccctcgtgctccccaacggcacgggcgccgaggtcaaccacgtctggcaggtcgggccctactccggcgggatccagatacacgacaccaagggcgacaacatgaacgccaaggggacgctcaaccttctaaccggcgccactgccgccgccagcggagggggcagcatcatcaggaagaaaaatactcatgggatcctgaatgcggtgagctgggggcttctgctgcccatgggagccatcttcgcgagatacctcaagacgttcaggtcggctgacccggcgtggttctacctgcacgtcgcttgccagctgctcgggtacggcgtcggggtgtccggctgggcgaccggcatccatctcggaaacctgtccaaggggatcacctactcgctccacaggaacatcgggatcacagtcttcgctctcggcactctgcaggtacttcataactcacacgcttcactgttttcacccagctggtgcatggaaactccgacgcccgccccccgctgatcttcttcttcttcttcttcttccaccgttcgctagatcttcgcgctcttcctgaggccgaagaaggaccacaagtaccgggtgtactggaacgcctaccaccactcggtcggctacaccgtcatcgtgctgggcgtcgtcaacatcttcaagggcatggccatcctcgacgtggagcagaggtggaagacgggctacatcgccgccatctccgtcctcggcgccgtcgccgtggccctggaggccgtcacgtggggcgtcgttctgaggcggaggaaggaggaaagcaagagctacaacggcacctctaacggcggccgcttgccgctgtctatgtagctcgtcgccatgtatctccatcatctggagaggcagcaaacagccgtgcgactggctggcgctggcgcgcttctttcccatcgtgttttcgttacacatacatgcatgctaatctagaccggtagtagttcacatagtacttcgttacatgtatacagtttacttcaagatttagagagagagagagagagagagagagagagagagctgattatgatgacgtgcacctttacagacgatgatgttcctgtacattta

SEQ ID NO: 94258 - DNA, 1569 bp, Zea Mays
cacccgcaccagcctcttcagcgccctgcgcccaagctccagctccgatccgtaacccaaacaaacgacaccttgggcttggagcctactgtgccaccggcccgcccacgagaccccgcggccatgtccatcccgcggctcctcctcctcgccgtcctcgccgccgccgctgcgtgcgcgcccgcgcacgccgccggcgccggcgcctgcgcggcggagaagttctcgggcaaccgcgcgttcgcggcgtgcgccgacctggcccgcctgggcgcgtcgctgcactggtcctacgacgccgcggcggcgtccctgtccgtggcgttcctggcggccccgccttccgcgggcggctgggtcgcctggggcctcaaccccagggcgcagagcatggacggcacgcaggcgctggtcgccgtccccagctccggcggcggcggcgcgtacgaggtgcagacctacagcatctccgggacctcgctcggcgccccgggcccgctctccgcctaccggacgtcgggcctcgccgccgaggtcggcggcgacggccgcgtccgcgtgttcgcgaccctcgtgctccccaacggcacgggcgccgaggtcaaccacgtctggcaggtcgggccctactccggcgggatccagatacacgacaccaagggcgacaacatgaacgccaaggggacgctcaaccttctaaccggcgccactgccgccgccagcggagggggcagcatcatcaggaagaaaaatactcatgggatcctgaatgcggtgagctgggggcttctgctgcccatgggagccatcttcgcgagatacctcaagacgttcaggtcggctgacccggcgtggttctacctgcacgtcgcttgccagctgctcgggtacggcgtcggggtgtccggctgggcgaccggcatccatctcggaaacctgtccaaggggatcacctactcgctccacaggaacatcgggatcacagtcttcgctctcggcactctgcagatcttcgcgctcttcctgaggccgaagaaggaccacaagtaccgggtgtactggaacgcctaccaccactcggtcggctacaccgtcatcgtgctgggcgtcgtcaacatcttcaagggcatggccatcctcgacgtggagcagaggtggaagacgggctacatcgccgccatctccgtcctcggcgccgtcgccgtggccctggaggccgtcacgtggggcgtcgttctgaggcggaggaaggaggaaagcaagagctacaacggcacctctaacggcggccgcttgccgctgtctatgtagctcgtcgccatgtatctccatcatctggagaggcagcaaacagccgtgcgactggctggcgctggcgcgcttctttcccatcgtgttttcgttacacatacatgcatgctaatctagaccggtagtagttcacatagtacttcgttacatgtatacagtttacttcaagatttagagagagagagagagagagagagagagagagagctgattatgatgacgtgcacctttacagacgatgatgttcctgtacattta

SEQ ID NO: 94259 - DNA, 1577 bp, Zea Mays
cacccgcaccagcctcttcagcgccctgcgcccaagctccagctccgatccgtaacccaaacaaacgacaccttgggcttggagcctactgtgccaccggcccgcccacgagaccccgcggccatgtccatcccgcggctcctcctcctcgccgtcctcgccgccgccgctgcgtgcgcgcccgcgcacgccgccggcgccggcgcctgcgcggcggagaagttctcgggcaaccgcgcgttcgcggcgtgcgccgacctggcccgcctgggcgcgtcgctgcactggtcctacgacgccgcggcggcgtccctgtccgtggcgttcctggcggccccgccttccgcgggcggctgggtcgcctggggcctcaaccccagggcgcagagcatggacggcacgcaggcgctggtcgccgtccccagctccggcggcggcggcgcgtacgaggtgcagacctacagcatctccgggacctcgctcggcgccccgggcccgctctccgcctaccggacgtcgggcctcgccgccgaggtcggcggcgacggccgcgtccgcgtgttcgcgaccctcgtgctccccaacggcacgggcgccgaggtcaaccacgtctggcaggtcgggccctactccggcgggatccagatacacgacaccaagggcgacaacatgaacgccaaggggacgctcaaccttctaaccggcgccactgccgccgccagcggagggggcagcatcatcaggaagaaaaatgtgagttgactcatgggatcctgaatgcggtgagctgggggcttctgctgcccatgggagccatcttcgcgagatacctcaagacgttcaggtcggctgacccggcgtggttctacctgcacgtcgcttgccagctgctcgggtacggcgtcggggtgtccggctgggcgaccggcatccatctcggaaacctgtccaaggggatcacctactcgctccacaggaacatcgggatcacagtcttcgctctcggcactctgcagatcttcgcgctcttcctgaggccgaagaaggaccacaagtaccgggtgtactggaacgcctaccaccactcggtcggctacaccgtcatcgtgctgggcgtcgtcaacatcttcaagggcatggccatcctcgacgtggagcagaggtggaagacgggctacatcgccgccatctccgtcctcggcgccgtcgccgtggccctggaggccgtcacgtggggcgtcgttctgaggcggaggaaggaggaaagcaagagctacaacggcacctctaacggcggccgcttgccgctgtctatgtagctcgtcgccatgtatctccatcatctggagaggcagcaaacagccgtgcgactggctggcgctggcgcgcttctttcccatcgtgttttcgttacacatacatgcatgctaatctagaccggtagtagttcacatagtacttcgttacatgtatacagtttacttcaagatttagagagagagagagagagagagagagagagagagctgattatgatgacgtgcacctttacagacgatgatgttcctgtacattta

SEQ ID NO: 94260 - DNA, 971 bp, Zea Mays
atggccacgggccacgctgctcctgggatccgccgccgccttgccgcgtcccggtttcgcggctacagcgccgttcgcgtcccaatggagacgtcgccagatcaccctgattacacgattaatggagaggagaaacttttctttggacaagtgaaattgctattccagttcatcccactattaaagttgtctatagtgcacacccaacagctgatgtatttatcaactttgcatccttccgaagaaatgctgtcgagaagggagaaggcaacaaacttcaaaccagactatgatattgatatccatatgaaggtcctagctatgagtgtgcaagaatccagtattcttacaggctacaaaatgaaggttcgcactattaaagtggaaaagaggatcaatgagattgtgaaccgcttgaataagacaaaggtggaacggaaacctgatttaaaggctgaaagagaggctattagtgctgctgaaaaggcagaaagaaaggcacagcttagggacaagaaacgtagggaagagatggagaggcttgacaaagagaagcaggctgatatcaggagctacaagggtctaatggtccaagagaagatgacttccaacaagcaaatcgcttctggcagcaagaccctgcaggaacttgaagaagacttcatgtgaggggtggacattataaatgccatgctgaagatttccttgaactgcttctgtcgaagacagaaggggtaccacaggcttgtgagatactggatctaaatgactcatgggcaggccatggtctgttattatctcctcttgctgttgtggtctatgtaaaccttgtttacttgctgaaaaaacaacggttcatgctccgtgtgttcaaataatattgtagtgttaagtaactgctccgtgttgatgatttgctggtgtttcgtgattgctgcagacatagaaatcgtatatagttcaaatgattt

SEQ ID NO: 94261 - DNA, 651 bp, Zea Mays
atgggggacgagccggacggggaggcggaggagtacctcttcaaggtggtgatcatcggcgacagcgcggtggggaagagcaacctgctgtcccgctacgcgcgcaacgagttcaacccccactccaaggccaccatcggggtggagttccagacgcagagcatggccatcgaaggcaaggaggtcaaggcccagatctgggacaccgccggccaggagcgcttccgcgccgtcacctccgcctactaccgcggcgccttcggcgcgctcctcgtctatgacattacccgccgctccaccttcgacaacgtcggccgctggctccaggagctcaacacacattcggacacgacggtggccaagatgctggtgggcaacaagtgcgacctgggcgacatccgccaggtgcccgtggaggaaggcaaggcgctggccgaggccgagggcctcttcttcatggagacgtcggccctggacgccaccaacgtgaggacggccttcgagatcgtgatcagggagatctacagcaacgtgagccgcaaggtcctgaactcggactcgtacaaggccgagctgtccctcaacagggtgagcatcgacggcgactcaaaagacgagcagaagcaggggagccggttcgggtgctgctag

SEQ ID NO: 94262 - DNA, 428 bp, Zea Mays
actctgtcactagggttcaattcattgagcgcacccgacgcgccatggtgggaggtggctagcaccactatcgaggattcccatccaccgtgctatcattgcgcccagtcgggtgcctttgtcgacgcgtcgctgacccttcttggcctggaggagggagaacagagaatgggtgaccgtcacatataggacatggtaatcatatgactggattggagtcttctcccctgcaaattttaggagggagaacagagaatgggtgaccgtcacatataggacatggtaatcatatgactggattggagtcttctcccctgcaaattttagcaacaaaaatataagggtgcagaacctagtgcaatatatcttttcaaggagatgcattgcagcaagaagaaaggttttagcgaaaatgttcagaaagctat

SEQ ID NO: 94263 - DNA, 808 bp, Zea Mays
cagtttaatttaaggcaaacacctggggtgttacaagttgcactggcgcttccctttcgtcttcctttacagatccacacatatacacataaatccacacctagccaaaatagtgctagaagagaatttaatggaacaaagcagaaccgtggatcttaccggcgcgaacgacgacacagagaaactgcgtcgcgaggagctcattagtattccattttgatgaatagatggtgcgcgagtcacaacgggaaggagctcgacgcgtcaaagcaggcgaaggcatggtcgacgacgttattgtacatgacgcggagacgtatgacgacgaaatggatagtactgttgagcaagctggaggccaggcggggccaggaagcagagcactagcgcagggcgccaggacggagcagataccgcgacggccggagttggcactagcgacaagggcggatgcaggggcacaacagacggcaccaccaacgagcgcgcagcgaggcacgcagtagcgacgatagtcggactggcaacagggcgttggcgagttcagcggacgcgaccatagacgcgagctagcgcgacacgcagggctgagacgttgtgacgagctcgggacgagttcgtcgcgcttgacagccagaggcaggagacgacggcttgggaagaccttgcgagcgagagactggggccgacggcggtaggcacatgagccagggagaactcgcacggcgaggctcaaggaagaagaagcagggtcgagcagggagcaccagggaacagcggcgtcacgcgcagaacgagagcccgacca

SEQ ID NO: 94264 - DNA, 3432 bp, Zea Mays
atggagagcgcccacaagagcggaggcggaagcgcgcccggagcgggagccggaggggagggcgtcctgtgccacgcgtgcgggtaccagtacccgaacgggcacccgagcgccaagcagcggcgcgcgcaccggaagcactgcggcaagccggcgtccgccgcggcggcggcggagggctccggggagcacgaggccagcgagctgcttctaggtaccgtgggttccgtgcctccgtggtggtgtactggactggtgtgtggctgtgtatgtccaagctgggctcttgtcctgacgcgtgctctcgtggctggcgtggcgtcccaggtgaggtcggagccggcgcggcggaatgcggcggcggttcgcctggatctgcgcacgagcacggggacgcggcggagggaggggacagcgcaggtgcatgttcgttatgaatctcctcccccttctctgaatctcttaatcctgctgttcttcgtttccttttgttcgtttctgaagccgggaaatgtcgtcgatccttcaggtaatggtgctgggcatcgagtcgttggagacacatctgctgaagattgcctcatcagtggcagtagcgttctttctgaaatcacatctgagtccagcaggactgatgatggtactctgactacagtggctacacagtactctgaaaaaggatcatctactgaggatggggatccatctgatccagcagttggttctgaacagatccaggacgttcctacgtctgttgttccagcagagcctgaagaccgtgctaaattcagttctgaaatctctgaatctgaaatacagaacccgagtattgtgcgtccggaatcagacgcagctggaggtggaacttctgaactgacggatgatgtagccagacagcaggatgaggttgccgtgactggggaagatgctgtgttcgacgccatagatggaagcaaatctagtgaaaggaattctgtgcaaggtgatgagcttaatctctcctgtcaagatatactacaaacggagactggtggggggcacagtagcactgtagtggaggaagattcaggtagcaaggatcctactgcaagtgacggccaagaaatcctgatcgaagaaactgaaccaaatcagcagagcaagcatgcgttaactggctcatttgagaaagtccctgacattgagtctgttgggtcttctgctgagaaatctgtcggtacaggtgatgacttgcttcaatctggtaaaggtgcttgccactcagaaataccagtcgatatcatagctcagctgcaacttgaccctacctctggaacggcagatcatccggcaatctccaaaggggcagacaattttgaaggacaacattatcatacaacagatgaaagcatcggagcaataccaagtacatttgaacctgctgttggtgccaaagttgtatcagttgatgtcactgctgaccttacagaggatgtttgttcgtctgacataacaatagatgacggcatgcaggaaaatgtgacaagtggtactattgtaccatctcaagttgatatactggattcgagtccttccgctacagcacatgaagtcaacattgtcggtagcataaacgatgatgacgaaaagagtcaggatggaaaaagcagtgcagatcttgcttcatacgaggtaaaagagatggttgtcaaggataactttgaagaaaagcagcagaccaaagaggtcattgtagatcccactccacatgaagccaacaactttcccagtaccgataatcacgaggaaaatgagcagaacaaagaaattgttgcagacaccacttcacacaagataagtgctgtacaaagcatgggtagtactgaagaaaaggaacatattgaagatttcattgcgaaactggcttctgaagagatcatttttacaagtaacagagatattgtcgagcagcaggatgagactgatatgaaaacaaactatgaaatagacagggcacgcaacttagaagctactgaagaaattgctgctggtggtgagagtaacacgggaaccatcacagatgttgttgaagacaaattccctaatgaagaaattactttaggcactatctctcttaacatggcagacagcagcgttaaggaggaaaagatgcatgacgaagaagtgaacgaggatctagattctcgtgatgatattatggtacatggtcctgataatgtcaaagagaagatgtgtgaggagaccatgtcaggtcccaccttagacaagttcagtttgcctacatctactgacagtcctgaagagggtaataaggacgaaagcacgcgtgcagaccctatgtcgcacgagaccaatgtggcgcaaaccagcgatggtgctgatgaagagaagaagatcagggagcttgctgttgaccctacttccagcattggtaccatgggcaacataggcaacgctgaagacaagaagccgagtgaagaaactacaacagatcctagacctgttgagaacaccacaacacaaggcacagaggacgcgacagatcctaaacctgttgagaacaccacaccacaaggcacagaagacgcggatagcagcaagcagaatgaaaacactgcgagcgtaggtggcgttgaaggcaagaagcagggtgaagaaactacagcggatcctagatccgtcgaaaacaccacagttgaaggcaagaagcagggtgaagaaactacagcggatcctagatccgtcgaaaacaccacagcacagggcacagaggatgcagaaagcagcaagcagaatgagaacacaaatgtcatggaagaagaaagggtgacggtggaagatacaacctcaagggagatcagcgccatagaaagcacagatgacctgaagggcaaggctaccaacgagaacgaagagatagccgacaaggaaatggtcaccgactcagacaagaaccatgtctcgctgaaggtcctcctcgcggacaagaacgtggaagcgaaagagaaggagaagaaggcgactagcgccaaggaccgggtgctgtcgttcaggcgccgggtatccaaggacaacgtgtcgccgccggtgaagccaggctcgccaaccaaagacaaagatggctcagggcagcaggactggaactccccggccaggttgcccgtcgagaagaaacccaaggggaggaaacagcaatgggtaccgtttatttgctgctcgtcggtacagtaatccgtttgccagcatcagcttggggcatccattgttgtgtttgtacttgtacgctgatggtagtagattgagtaggaccttcgttccaggattggaccttggcagctttgctactctacttggattgtgaacccggctctgccgtttttgtatgttataaatatctgccttgatggaggggaggagggtatgccccaaact

SEQ ID NO: 94265 - DNA, 1748 bp, Zea Mays
gatccagtataacaacttaagaaacaaatacaagccctacaagcaacaacggcgggtcggcggccgctgccatgacgccgtcctccacatgccacgccgtcgccgtcctcctcttgctcgccgccgccaccctagcctgccatttcagtgtcttcgtcgtagccaccgatgtcgaatgtcattgccacggcgcgaaggggtgccgcggcctcggcatcaactacggcacggtggccgacgacctgccctcggcgtcgcgctccgtgcagctcctccgcgcggcgggcgcgagcgccgtgaagatctacgacgccaacgcggacatcctgcgcgcgctggccgggacgggtgtgccggtctcgatcatggtgccgaactctgccatcccgtcgctggcctcctcccgcgccgccgcggaggcctgggtggccgccaacctcgcgccgcacatcccggcgacgcgggtggcgcacctgctagtgggcaacgaggtgctttccaaccgcgccatcgcggcgtccacgtggcgcggcgtcgtgccggcgatggcgaacctccgccgcgccctccgcgcgcgcgggctccgcggggtcaagctcgggacgacgctcgccatggacgcgctgtcggcgtcgtacccgccgtccgccggcgcgttccgcggcgacatcgccgaggacgtggtcttgccgctgctccggttcctgaacgccacccggtcctactacttcgtcgacgcgtacccgtacttcgcgtgggcgggcaaccgggacgccatctccctcgactacgcgctcttccagggcgcggcgggctcgcgctacgtggacccgggcaacgggctcacctacaccaacctgctcgaccagatgctcgacgcggtcgtcgcagccatgggcaggctcgggtacgggaacgtgaggctggcggtctcggagaccgggtggccgagcggcggcgacgcgggcgaggccggggccaacgtgcgcaacgccgccacgtacaaccggaacctcgcgttgcggatgtccaatagccccggcacgccggctcggccaggggccgaggtgccagtgttcctcttctcgctctacaacgaggaccgtaagcccgggccgggcagcgagcgccactgggggctctactacccgaacgggagcatggtgtacgagctggacctcaccggccgacggtcgtcgtacccgccgctgccgtccgcggacagcgcgccggcgtggtgcgtgcttgccagcggcggcggcaaggcggcgaacgagacggctgtgtcggccgcggtggcgtacgcgtgccagcatgggagcaggacgtgcgccgccatccagcccggcggcgcgtgccacgagccggacgcgctggacgcgcacgcgagctacgcgttcaacgcctactggcagcagttcaggagtgccggcggcacctgcttcttcgatgggctcgcggagaccaccaccgaggatccaagccatggattatgcaagttcgccaggtctctcgactagacgacgacgcgggggtgggggaggtcatcgcccctcgtccggcacattggatgaagggagtaataaacaatcatgtgctacagcctaggtttcatttgcataactcgaggtataggcaagcctagggagggacactacgaaatgatcaaaccaaacagctttatggaccattaagtgatttgttcatcattttgctaaacctctatcccacaaagtcttcaaatcaaa

SEQ ID NO: 94266 - DNA, 1662 bp, Zea Mays
tgcgtgctgcgtgtgagcagcttgctataggaatctgagggaggaggcgctgggcggtgcccgggcgttggataggagaggtcaagattcaagaacgacgacacgccgaagtagcagagggatccgttggcctcccgtacccagcccccttctaccccttcgtcgacggctgggattgcggcggcgcccttgtcttcgccggcgacgagcatcgccagggacttccgattggggggggcgattgcggagatgggctgatcagaactgcgacaaggtccggttttctcctccaaattgtggtctctggaggtggatttgctttttccgtagccgcagatggacgacgacgatggcagcctgggcattcggaattggggcttctacgacaccatgaagggcaacctaggcctgcagctcatgtcgtccatgccacctgaccgggacacgaagccactgctcccgagagctggtttcttgcagcagcatgggcatcacaatgcatcgcaccagctccatgcacagcagtcgcaacattatcgtgattccacttgcggtggaggagcctctggtggcatgcccaccgagcagcactctatccacatggacttctcacgcaatgaagcttggctgcacccatcgcaccaccaccaacatccccatgaccagaaggtccttcattctcgccctaccgtaccagctgggcatgttgggcatccaggccatggtagccatcctgtgcatggtgggcatatcgtgcatcaccatcctactggctatgggtcaatatcagatgcacaacatactctccagatgatgcaaccacagcttgagtcacagcttcaggagcctcctccatgcaagggagacgaagcgccacctccgccaattgaggatcactctgtggttagtaccgggccacctgtgaaaaagaggcagcgaggccagcagcagagtcggcagcctaagtcaccaaagcctaagaagcctaagaaggttgctgttctgccagagggtggggcacttaatgggcatgcaccccgtaggaggggccctaagaaggctgtggggatggtgattaacggtattgagttggaccttgccaacttaccaacaccagtgtgctcatgcactggaactccccagcaatgctatcggtggggtgcaggtggctggcagtctgcatgctgcacgactgctatttcaacgtatccactgccaatgagcacaaagcgccgtggcgcacgtattgctggaaggaagatgagccaaggcgcattcaaaaaggtgcttgagaagcttgctggtgaagggtacaaccttgttaatccaattgacttgaagacattttgggctaagcatggcacaaataagtttgtaacgatcaggtcatgttgtattttcttgtcaagtgctagttgccatgtagcatttcttcagaaagagtgtgtgcagaataaagaagttatcctggagctaggactatttcttagtgatgtggttgtgtcaagaatggttgaaaggtgtcttttccaaaaacattttacaacatgtgttcaggtgttgaaatctggttatgacttacgaagcgaagcagatttccagcagtgtgacaaatggatccatgatgcagtgtttgagaacttaaaattaattcggttctaa

SEQ ID NO: 94267 - DNA, 1806 bp, Zea Mays
tgcgtgctgcgtgtgagcagcttgctataggaatctgagggaggaggcgctgggcggtgcccgggcgttggataggagaggtcaagattcaagaacgacgacacgccgaagtagcagagggatccgttggcctcccgtacccagcccccttctaccccttcgtcgacggctgggattgcggcggcgcccttgtcttcgccggcgacgagcatcgccagggacttccgattggggggggcgattgcggagatgggctgatcagaactgcgacaaggtccggttttctcctccaaattgtggtctctggaggtggatttgctttttccgtagccgcagatggacgacgacgatggcagcctgggcattcggaattggggcttctacgacaccatgaagggcaacctaggcctgcagctcatgtcgtccatgccacctgaccgggacacgaagccactgctcccgagagctggtttcttgcagcagcatgggcatcacaatgcatcgcaccagctccatgcacagcagtcgcaacattatcgtgattccacttgcggtggaggagcctctggtggcatgcccaccgagcagcactctatccacatggacttctcacgcaatgaagcttggctgcacccatcgcaccaccaccaacatccccatgaccagaaggtccttcattctcgccctaccgtaccagctgggcatgttgggcatccaggccatggtagccatcctgtgcatggtgggcatatcgtgcatcaccatcctactggctatgggtcaatatcagatgcacaacatactctccagatgatgcaaccacagcttgagtcacagcttcaggagcctcctccatgcaagggagacgaagcgccacctccgccaattgaggatcactctgtggttagtaccgggccacctgtgaaaaagaggcagcgaggccagcagcagagtcggcagcctaagtcaccaaagcctaagaagcctaagaaggttgctgttctgccagagggtggggcacttaatgggcatgcaccccgtaggaggggccctaagaaggctgtggggatggtgattaacggtattgagttggaccttgccaacttaccaacaccagtgtgctcatgcactggaactccccagcaatgctatcggtggggtgcaggtggctggcagtctgcatgctgcacgactgctatttcaacgtatccactgccaatgagcacaaagcgccgtggcgcacgtattgctggaaggaagatgagccaaggcgcattcaaaaaggtgcttgagaagcttgctggtgaagggtacaaccttgttaatccaattgacttgaagacattttgggctaagcatggcacaaataagtttgtaacgatcaggtaatgagaaaggcttgctatgtttgccactttgtaggttgtagtgctgcagttaggcctgatttattgcttgtatgtctatgtgccaatctgcagacatttgtaggagtagtttgtagccatgtttagtttcatccacttaattgtcatgcctatctcgactctcgagcttcagatattgacccgactgaagtctttgtatccttcactttgcaaattgtactgtatccataacagtctctaatttaggacgtgaggttcgatgtgttagttaaatatgcgtggaactaagcattatgtggaggttttctctggtggaggacatttgccagcacctttttgacaaggcgataactgtgaattttgtgtatggcttatattccaagtcatttttgtatgaagtactcatattacatatcca

SEQ ID NO: 94268 - DNA, 1012 bp, Zea Mays
gcctttcttcttcacggcagcaacaaccatcagggagccgtgctcctcccatggcgcctcctctccttcccttcctcgagcaagccagcagcaggcgcctctccccttcaggcatggcagcggcttcttctcctcccctctattctcctgggcgtgtgcagtagctccatggctgccgagctcttatccatggcgcggctcccctgttcccctgcgtctccctcctctccggcttccctcgcgcagcggcagcaagcatggagcttggctcctctcccctgcgccctacctttttccatagaaagcagcaggagctccacctcccatggcgcccttttttttcagccgtgcagctccctactccatgccgatgccccttctcttcccctgctcgttctccctcgcgcaacagcagccgggtcttcttcctcccctgctgtccacggcgcgcagcaaacagggagctcagctccatctcccctcacggcaggacacagcagcagctcgccccgcctctcctcgcagacgcagccctctcccatggcgcgctgcagcagatgccgtggagcattccctccatgcattgcgactcggtttccttcctgcgtgtgtgctgctgcgcctgcgccattgatgcttgctgggtgctcgacaaaatgtgcagcagccccgacggctccgcgcgctgtcggcttgctgttttattgcgcagtgagcagcacgccgtgatgcccgtcggtggtttgctgtttttgcgcagccccgccgccgtcgtcgttcgccccggtgagaccgcgacgctcctttctcgattccgcatcgacgttatttttctatgattaatcatgaatgtgtgctgctttgttttgttttgtggaggagaggaaccccgtgtttggcgtggagaagaaggcaagccgctcgtcgatgtttgtagcgatgcacaaatcggaatcaccgtcattcttgcaaacgtcgattgggtttgtttatggtgagccgatgcatgtcg

SEQ ID NO: 94269 - DNA, 1611 bp, Zea Mays
gcccgccctagctgtcatcgctcatcacgctatcagtctcactctcactcgctctccacttcacatcaccgcatcagcagcagaggaggaggacgggatgccggccggggtggtggacgcggccgccaagggcgtcaggccggagcggcgcgcggcgggcgccaagaagcagctcgtgtcggcgtcctcgcacctgctcttccgcgccaccgtgctcgccacgatcgcgctcgtcgtcctcttcgccgcgcactacccgtccctgctctcccgctcctacatcctctccgccgcggcgtacggacggggcgccgcgtcgtgggagcgggaggtgcgtcgcagcgcggcgccgcggcgggacggggcgctgtccgtgctggtcacgggcgcggcgggcttcgtgggcctgcactgctcgctggcgctcagcgcgcgcggcgacggcgtcgtcggcctcgacaacttcaacgcctactacgacccgtccctgaagcgcgcgcggcagcggctgctggcgtcgcgcggcgtgctggtgctggacggcgacgtcaacgacgcggcgctgctggagcggctcctcgccgcggcgcgcatcacgcacgtgctgcacctggccgcgcaggcgggcgtgcgccacgcgctgcgcgcgccgcaggcgtacgtggccgccaacgtggccggcctcgtcgcgctgctcgaggccgcggccaggcacgccgacccgcagccggcgctcgtgtgggcgtcctcgtcgtccgtgtacgggctcaacgacgacgcgcccttctccgaggaccaccgcacggaccggcccgcgtcgctgtacgccgccaccaagaaggccggcgaggccatcgcgcacgcgtacaaccacatctacgggctctccatcaccggcctccgcttcttcaccgtctacgggccgtggggccgccccgacatggcctacttctccttcgcccgcagcatcgtcgccggcgagcccgtcacgcttttccgcgccgccgacggcgccgtcgcgcgccgcgacttcacctacgtcgacgacgtcgtcaggggctgcctcggcgcgctcgacacggccggcaagagcacgggctctaggtccggcaagaagcgcggcccggccccgctccgcgtgtacaacctcggcaacacctcgcccgtgcccgtcacccacatgctcgccatcctcgagaagctcctcggcaggaaggcgcgcaagcgcgtcgtcacgatgccgagcaacggcgacgtgcccttcacgcacgccaatgtcagccacgccgcccgcgacctcggctaccgccccgccacctcgctcgaggccggcctccgccatttcgtcgactggttcgtgcggtactacaaggtcgacgtcgggggcggcagtgccgacgccggcaagaccgccaagaggaaatccatgcccacgtccgcagcatcgtgaggagccgcgccgcgcagcgtgttccccggccgtccaccattcaattcaagtgtgcattcgattgtccttggagctagtctagctagcagtgtcccgtaactggcttccttcatggttcaaatcattctgctcaaattgttactttttttttgggtcagata

SEQ ID NO: 94270 - DNA, 1224 bp, Zea Mays
cttggcgttattagtcctgccggccggcctggaggggaggatcgatcagcaaggccaatagccaatagccaggagccagtcgccagccagccagccagccgcataaatccatccatctcctccatcttgctctccctctccctgcaggccggcagccgctggaggcacagacgacaaggcatcggccccggatcgagcccgacccctcttctcgtctcgtctcgtctctgcgctgggaacgccggctgccatggctcagcagaagaacgcgcacgtgcccaagttcggcaactgggacagcgacggcaacgtgccgtacacgctcttcttcgagaacgcgcgcaagggcaagggagccggagccgccggcggcaggatgatcaaccccaacgaccccgccgagaacccggaggccttctccgtggccgcgccgtcgccgccgccgggccgccacgagcgccgccccagcgacgcgccgccgccgccgatgtcgcccaacccctactacgccgccgggtcgccgtaccaccgccacgccgccggcgagccgccaaggagggccgccgggtacagcgtcgaccagtcgccggcgcacccctacagctccgagagcgccgggtacggcctcgtcgccagctccgtcgaccgctcccgcgccaagggcgcctcgcgcggcaacgagacgccgacgaggggctcggcggtgcccaagttcggcgactgggacgccaacccggcgtcggcggacggctacacgcacatcttcaacaaggtgagggaggagaagcagacgacccaggcggggaagccagcggcgtacggcaaggacggcatgcgtaccaacggccccaagcagcacgacgacgacggctacgtctcatcgaaattctcgtgctttgggtggtgcaagtagagagcgattgcctgatgaatggtgacgatggatggatggatgcagacgctggttcctctgggtctggggatgtaagtctggagaacgaggggcatgaaacgatctccatgatctttcctgtggtagattttcacttcaatttatgaagtgagacatagagttgctgtcatgttagaagtaagcattccattgttgcgttggttcttccgtattgaattgaatttacagtacatgtatcatgtatgtacgattgtacgcaggattggactctgaactccgaggtgaatatatgtgtgtttgtttggtgtcca

SEQ ID NO: 94271 - DNA, 838 bp, Zea Mays
aaaaaaatattgcaaggctaaacactcgggttaattgctatgtctgggtaattagtttttttgtttaagtttcatttagtctatatgtttgatttttccccttgcctatagaccagcctaggtattcatcactggtgaaaaaaagaatatcagtgttgatggtaaaaaaagtatggatgcttaaaagtcttgctcatttcttggtaggttggatgtggctccaccagctctgcctccctacttcctgtactgctgcggctactgctacatcatctatcgtgcctgtttttctaggaatcttaatgccatcatgctggcattttgttcaactcattagctggttacagtgacaaggaaccaccattttgatgcaaaggagcagatgcgacaggatcacaagtaggaggagcggtgacgatgctgtagcgagagacacgggtgctgaggtcgttgtgctgcggtggtggcaggacaggaaggaaacaaaaaagcaggagccagggctgttcaacaacgtgaccgagtcgctgaggcgaggaagagtaaggtaaaggcactcgtcgacgcctttgagactgacagagcgtcatctcgctgcaggaaaccagcaagcctgctgctgctccagctatggaagtaggtgtcatgccatgagtgcttcttgacctgcagtgtgcatgatcacctttcttggaattttggatttttttggttgttagtgaccgtaaaagtggcgcttattgaggtttgctcgttcccatgtaaactgaattttctcatgggagtttccatacttttgtagtgctagaaaaaaggaaagtctgtacaggttttgtgt

SEQ ID NO: 94272 - DNA, 113 bp, Zea Mays
tctgatgaatgatagggctagtctttttcttctgtaaatctggtgtcacccaatcgtactactgtgtatacagtacttactgctttattggaaaccccggttcttcctttttt

SEQ ID NO: 94273 - DNA, 1065 bp, Zea Mays
gcactacaaaaccttccaaattccatctgcaaagcgccgagccgcgcacccaacccgcccgaacggacggaaagcagccaggcaggcgttgacacgcagaaaccccgcaaaacccagccatttcctccctccctccctcccgcacgccagaccagatccagacgaaacgagacggagccctcgcacgcctccccaggcgcgccctcacttattactagtccacacaagcgtgccggtgctggccgccgcatcggttccccccttccagcgtctctcggtctcgggtccgtgcgtcggggcgggataggaaggatggaggggcgcgtgctgcggcgcagcgtgacgctggcggaccagctcgccgcggttgcgccggcgccggcgccgctgccgccgcccggggccgccgggtcctgcaacctccgcgacctgctgaagctccgagacgaggacgacctggcgtcggccgggcgccgggccgccgtcacgctcgcctccgccatggccgccgagaggcaggtccaggtcccggcggcgtccccgtccccgtccccgtcgccgtcgtcccccgccgccgcgacgcgcaccctcctcgacataatccgcgacgaccagcctcccgccgccggggccggggacccgctcgtccgccgcgccgtgtcgctaccacccccgaccacggcctccccgccggcgccggcgcccgccgccgaggccgcccctcccccgtctccgccccctgcggcggcggatgagcacgagcaggagcaggagcaggagcagagggtctccctgatggcgctcctggagcagacggaccggcagtggagcgccgtcccaggcgccgcggcgcaggcagaagaagatgaggactcggcggcggctgcggcgggcaggggcgtggtcgccgggtgctgctgcgtgtgcatggcccgggccaagggcgccgccttcatcccctgcggccacaccttctgccgcggctgcgcccgcgagctcctgggcgggcgcggccgctgcccgctctgcaacgccgccatcgtcgacgtgctcgacatcttctga

SEQ ID NO: 94274 - DNA, 3449 bp, Zea Mays
atgggggaggaggcggagggaagcccgcggaaaaaagctccccgcctggacgacgctgctcggactacggctcctgtggcgtcggcaccgagtccgacgcggaagacgccgccggagggggaggagacggagggaaacccgcggaacaaatctccccgcccggacgacgctgctcggactacggttcctgtggcgtcggcaccgagtccgacgcggaagacgccgccgaatggggaggaagcggagggaagcccgcggaagaaatctccccgcctggacgacgctgctcggactacggttcctgtggcgtcggcaccgagtccgacgcggaagacgccgccgaatggggaggagacggggggaagcccgcggaagaaatctccgcggcccgcggaggctctgcctgtggctatggttcctgtggaagcggcagtgggggccagcgatgagaagctgtgcaagtgcaaccacgccatcactgacagtgatatctgggaactggttcattcgctaacgaccaaggatgcgtggatttgctgtgcttgtcggcgcaaagacgagaagagggacctcttgatctgcgtgggatgctacagccatctctgctgtggggttgggtcaattgcttacccgtttgggcactctcgatcacacgccctgaagaagaagcactggtttgctgttctgtacagtgatccagaaagaggatactgcttcaagtgtaacgctgaggtgccaatgctgcgcaaatgtggagaagacggcaacgagggtggtcttgaactgatccgcgatattgtcagtcagttgccggatcaaccatctgttgattttccttcgcccgggaacacgccaccgaaggggaaggagacggagcggctggacgacgcggctcggactacggttcctgtggcgtcggcaccgagaccaacggtgcagacgccgccgaagggggaggaggcgggcttccggaacaaagctccgcggctggacgacgcggctctgattaccgttcctgtggcgtcggcaccgacactgacggggaagacgccgccgaagggggaggaggcacagggaagcccgcggaacaaagcttcgcggctggacgacgcggctctggctacaccgagaccgacggggacggcgccgccgaagggggaggaggcggagggaagcccgcggaacaaatctccgctgctgcaggacaaacggccctcggaggctctgcctgtggctaaggttgagtccaccgatgagaagcggtgcaagtgcaatcacgtcatcgatgttcttgatatccatggattggttggatcgctaacgaccaaggacgcatggatttgctgtgattgtcggagcgaagacgagaagttgatcttcaaagccaggcccgagaagagcgacctcttgatctgcgtgagatgctaccgccatctctgctgcggggttgggtcaattgcttacccatttgggcactctcgagcacacgccctgaagaaggagcactggtttgctgttctgtacagtgatccagaaagacgatactgcttcaagtgtaacgctgaggtgccaatgccggtcaaatctggagaagacggcaacgaggttgatattgaagtgatccgcgatattgtccgtcagttgccgtctcacccgtcatctgttgtcataagtccagtcataagtcaaaccgagccggaggtcatcaatccaggagaggaggaagtagcagaaagcgccccatctgggtttgttgtggctgtggatcctgcagatagatggccttgctatgagtccaaatcatctgatgcgcaaggctatgctatcaaagggataccaaatctcggaaacacatgctacctgagtgcagtattgcagtgcctgtttgtgcttggtaagctgcgagaaaggatgttaacactggatggtccaaaaagtctcattaccgaggtactcgaggagctttttttggaggcaagtgctgcaggaggcgtccttaatccgattaaacttttgaattgtttaaatctgcgtgatccttcgggatttcaaattggaactatggaagacagccacgacttgcttacggccttgcgcgctatttggaatgaaagcgacaagaataataacaagcaaagtgatgcacctacaatgatggattcgatttttaggtttgagatggctcggacactgtcctgcaaaaaatgtggtcattcgtctgctgctgttcgctatcctttcgaggacctgttattgggtttcccatcaaaggggcatccaaccaaaagtgctgcattaccacaaacaaattttactgaagtgcagcgtatcagtcaaagcaaggatgctgtacagagtcctttgcagattcaggatgggaagcctgttgattcagagacagcagattcaatatttattgaagacttgatattgcagttttgtgatgatcatcagatgcaatggcgctgtccaaattgtgccaaggatcatgaggagccaagtgccagtgaaagtaaaaatggtgagcagatggtgggaagcggcaaagaagacacaacagttgttggggaccagattgaacaatcagacaggaaagcaaggcacagtaaagaatctgaatgtcacggaggtaatctttcagctgcaaaacagactgagctgttgggaaccaaccaaactgcagatgacagcaaacaacttatgatgcatccggagaacgtgaaggaatcagagcagaaagatgatggtggagataatattatgattcatcgttttgccacgcttccacctgtattaactcttcagcttaagagaaccagccaccacatagttgggagcaaaataagtgaccatgtgagatttatggagtaccttgatgtagagcgattcatggaccccagctgtgccgacaaaggtagcaccctctttcgtctagctgctgttgtagtgcacattggcatgggatccttgaagtccggacactacattgcgtacgttagagcaagaaagcttggatgtcagcaagaggaggcctcatggttttgtgcagacgacagtcagatcagacgagtcactattgaacaagttctcaacagtcaggcctatattcttttctatgagaggatggaagaccaggacgtttctggcatgacacgtcagaactgaagaatgcagtgatagaacaagcagatgagtgagataagcagaccttctctctcgaccgcaaggatctagtctagtcagtgttcatagtaagacaggctcttgaccaagctcatttttgtcgctgggcttgaaacttactctgtaactttgtaccaaatcggaggttctttctgatcttgtcaactcagctgatctggtctttccgttgcttcgcatttgaggatgaaactgtgaatagaatagtggtgagatcggtgatacgggctttgtaaagtttctgtcgg

SEQ ID NO: 94275 - DNA, 1299 bp, Zea Mays
ctcttttccgttcctttttaactcctcggccatcccgagcgcacgcgggtcgcccggctggctgcccccgctgctctcctctcctccgagatcccggcaccgtcctgtcccgccgcgccgacagctccccgcccagactgctgcacgcgcggatctagcgtcgccttccgctccgctgcgatgcatatacgcgccgtcgccgccgccgccgcacttgtcctcctcctcgccctctccgtccccgcccccgtctccgccgccgaccaggatgctaatggcgctgccgggaatggcactggcgtcggcgccgaccgcctggaccgccgcaccaagatgttcctccaccacacggtgcgcggggccgcggccggggcgcacgacacggggctggggctcctcgacgccttcttcgccagcctgtccatgatcgtcgtcagcgagattggcgatgagacgttcatcatcgcggcgctgatggcgatgcggcaccccaagtcgacggtgctctcgggcgcactgtcggcgcttgtagttatgacggtgctgtctactggactaggcaggattgttccgaatttgatatcgaggaagcacactaacagcgcggcgacagtcctctatgcattttttgggctacggctcctgtacatcgcttggaggtcagattccaaggcatcacagaagaaggaaatagaagaggtagaggaaaagctggaagcaggccaagggaagtcaacatttcgacgtgttttctcgagattctgcactcctattttcctggagtcatttgtgttgaccttcttggcggagtggggcgaccgaagtcagatagctacaatagcgctggcgacccacaagaacgcggtcggagtcgctacgggagcgaccttggggcacaccatctgcacgtcgatcgcggtggtgggcggcagcatgctggcctccaagatatctcagggcacggtcgccaccgtcggaggcctcctcttccttgggttctctctttcgtcgtatttctacccgccattgtagtaccaccctgtcatgcgagccccctatttgtttcttggccagcttcctcattgatccagtgacccttgtcctgcggcattttttttcctgtactagtaaagcatacatggatatgtgtagtaggtagggatatatacgatcattgccaatgtataccatacaagtcatgtcatggattcaaaaacagacggaagagctttttgtcacgaattcaaaaacagacggaagagcctttgtcacgaattcaaaaatgtaacctgtatatac

SEQ ID NO: 94276 - DNA, 1477 bp, Zea Mays
ctcttttccgttcctttttaactcctcggccatcccgagcgcacgcgggtcgcccggctggctgcccccgctgctctcctctcctccgagatcccggcaccgtcctgtcccgccgcgccgacagctccccgcccagactgctgcacgcgcggatctagcgtcgccttccgctccgctgcgatgcatatacgcgccgtcgccgccgccgccgcacttgtcctcctcctcgccctctccgtccccgcccccgtctccgccgccgaccaggatgctaatggcgctgccgggaatggcactggcgtcggcgccgaccgcctggaccgccgcaccaagatgttcctccaccacacggtgcgcggggccgcggccggggcgcacgacacggggctggggctcctcgacgccttcttcgccagcctgtccatgatcgtcgtcagcgagattggcgatgagacgttcatcatcgcggcgctgatggcgatgcggcaccccaagtcgacggtgctctcgggcgcactgtcggcgcttgtagttatgacggtgctgtctactggactaggcaggattgttccgaatttgatatcgaggaagcacactaacagcgcggcgacagtcctctatgcattttttgggctacggctcctgtacatcgcttggaggtcagattccaaggcatcacagaagaaggaaatagaagaggtagaggaaaagctggaagcaggccaagggaagtcaacatttcgacgtgttttctcgagattctgcactcctattttcctggaggcttctgactttgtgatggattgtgagatcttgtgctatcatttgccttctttccgaggatgtagaatcctttctgacactgcatgtttctgttaacactagcttcctgtatgatgctgcagcagtgccaagtgtatccctcgctttctgtatgacgtatttgactttcgatttccagtcatttgtgttgaccttcttggcggagtggggcgaccgaagtcagatagctacaatagcgctggcgacccacaagaacgcggtcggagtcgctacgggagcgaccttggggcacaccatctgcacgtcgatcgcggtggtgggcggcagcatgctggcctccaagatatctcagggcacggtcgccaccgtcggaggcctcctcttccttgggttctctctttcgtcgtatttctacccgccattgtagtaccaccctgtcatgcgagccccctatttgtttcttggccagcttcctcattgatccagtgacccttgtcctgcggcattttttttcctgtactagtaaagcatacatggatatgtgtagtaggtagggatatatacgatcattgccaatgtataccatacaagtcatgtcatggattcaaaaacagacggaagagctttttgtcacgaattcaaaaacagacggaagagcctttgtcacgaattcaaaaatgtaacctgtatatac

SEQ ID NO: 94277 - DNA, 1469 bp, Zea Mays
gaggaggctgtatcagaggggaaggtttttctgggtagatgtcacaatggaaacatcggtggtgctttatcagcagggtagatatattatacaattggaaattcgtgactgaaaatgtttgcacccctattatgtagagacttggtgtaatgacacgtgggtccacctgcgttcatgaattgtttgtgttttggcagaaaccactagttttatgcattgatgtgatgcggccatccacataatttgattcaaagacctagctattaccttgaagtgattattgagaaaccagcctacatcatagaacctatagtagcttactgaaagcctgtggcggagcacccgctatggtcaactatggctagagccatacctaaaaatcatgtttggtgtagtggtaagttcatactgcttgcgattaacaggttctaggttcaagtcctactacgtggttctacgtgttgcatcatgtttttctctttttttgtcctttttcagtcatgcctcattattattttgtcctctgccactgctgaaagcaaatattctcctccacacaaatcaggaaatttcagtgttattgaatgtccggtaggtggtaggatccatttcttcagaacaggtagaatgtagtatttttgtccacggtaggacttcctggcatatgagttatgttcttttagtacaagacagcacttggaatgtagatataatcgtcatgtttattttcatggtttggtcacccagattattcggttttgaggcctagctattggcctattacattggcatggctcagtaggaaatcgtgttcttatgtgattttgttacctcaatacggaggaatgcagtatgattttgcaggttgttttatctggtattttgggattcatgccttacacctattgttggatgaattttgctgcagatgtcacagcctcaatacaatcagctatttgtcaagaagcctgatctagataacccctggccttagggagtacagaactacatatgtgtataagttgtagcctactagcctggtcttttctttgagttgtgttgcaagtactctttgaagccctgttatcaggagcatgttttatgattagttagaggattctcttcggtgacgatgaatatatttagctagtcattttaatattggtatgtgtgatactgaggctaatgccggcagttatcgttcacgctgtttatgtgttgtgaagtccaatgagctcggcgagatgatcatatgatataagtgcagttctaagtggcatccagtgtttgtaatagttgacagataatgcttgctggaagacaaggtcactgcggtatgacttcagaggttatttccagattacagatttttgtgctttttcatgacagactctgtagttgaaaaatcacgtgaatgtgattccttcgggcacggtaagaactggagctgttttgccgtgtctttgtaa

SEQ ID NO: 94278 - DNA, 902 bp, Zea Mays
acagtttggcgatcgcggatcgggaccttccctcagccacaggccgacagcccacgccgtcgaacggccggggatccggtacctccgctccgcccccgactccctctcgccggacggctgcagatccggtcaggccgatccgtctcggacccggtggtagcagtggaggaatccgctgccggtccatcgatcgggagagatgcggcagcagcggggcggggtcggggccgggaggagggaggatgacccggtgctcctcacgagagccgtcaacagggcgttccgcttcgtccgcctcgccgagttcgagatcttcttcgtcctcttcttcctcatcgccttctttctcttcaaggacctcatgtcacagcctcaatacaatcagctatttgtcaagaagcctgatctagataacccctggccttagggagtacagaactacatatgtgtataagttgtagcctactagcctggtcttttctttgagttgtgttgcaagtactctttgaagccctgttatcaggagcatgttttatgattagttagaggattctcttcggtgacgatgaatatatttagctagtcattttaatattggtatgtgtgatactgaggctaatgccggcagttatcgttcacgctgtttatgtgttgtgaagtccaatgagctcggcgagatgatcatatgatataagtgcagttctaagtggcatccagtgtttgtaatagttgacagataatgcttgctggaagacaaggtcactgcggtatgacttcagaggttatttccagattacagatttttgtgctttttcatgacagactctgtagttgaaaaatcacgtgaatgtgattccttcgggcacggtaagaactggagctgttttgccgtgtctttgtaa

SEQ ID NO: 94279 - DNA, 997 bp, Zea Mays
acagtttggcgatcgcggatcgggaccttccctcagccacaggccgacagcccacgccgtcgaacggccggggatccggtacctccgctccgcccccgactccctctcgccggacggctgcagatccggtcaggccgatccgtctcggacccggtggtagcagtggaggaatccgctgccggtccatcgatcgggagagatgcggcagcagcggggcggggtcggggccgggaggagggaggatgacccggtgctcctcacgagagccgtcaacagggcgttccgcttcgtccgcctcgccgagttcgagatcttcttcgtcctcttcttcctcatcgccttctttctcttcaaggacctcattataatctgtaggagagaagaacgctgcacggtgggagaaggagacgcttgtacgtgcgatttgaagataactgtacgtccgatttgggaaagatgtcacagcctcaatacaatcagctatttgtcaagaagcctgatctagataacccctggccttagggagtacagaactacatatgtgtataagttgtagcctactagcctggtcttttctttgagttgtgttgcaagtactctttgaagccctgttatcaggagcatgttttatgattagttagaggattctcttcggtgacgatgaatatatttagctagtcattttaatattggtatgtgtgatactgaggctaatgccggcagttatcgttcacgctgtttatgtgttgtgaagtccaatgagctcggcgagatgatcatatgatataagtgcagttctaagtggcatccagtgtttgtaatagttgacagataatgcttgctggaagacaaggtcactgcggtatgacttcagaggttatttccagattacagatttttgtgctttttcatgacagactctgtagttgaaaaatcacgtgaatgtgattccttcgggcacggtaagaactggagctgttttgccgtgtctttgtaa

SEQ ID NO: 94280 - DNA, 1188 bp, Zea Mays
atggcccacatcgtcttcctccgcacggccgccgccgacctcaccgccgggaagccgccgctgcggggcgtccctgcctcggcgccgctctccgcggcggccgcggcgatcccggcgtcgcaggaggccgacgtggccgtctggcgcgacggcgcctcgcccctggcgccagccgcggccaccgtgatcggcctgctcagctccctcgacgtcgtcgcgttcctcgcctcccacctcggcgacgctgccgcggcgatgaggacgcccgccggcgacgtggtggcgcacgagccgacgctcgtgcgggaggtcgagccccacacgaggttgatcgagatagtggagctgatgaagcaaggcgcaaggcgggtcctggtgcgcaagaacatcacagaagcgtgcaccgtcgtggacaagaggccgttcgcgccattctacaaggccgtgctgaagatcaccgggacgccgaggttgtcagcctcggagaaggccgtgggccgccagtcgccgccgtcgatctccacgacgacggcgttcggctgcgacaggtactgctgcctgacgcgggaagacatcgtccgcttcctgatcaactgcctcggcgcgctggcaccgaccccgctgcagtccatctcctcgctcggcgccgtcaaccgcggctacgcccacgtggaggcctcgtcgccggccatcgagtcctcctggagggtccccgccgagccgcgcgccgtcgccgtcgtgcagaccaaccgcgacggctcgcacaaggtcctggccgacgtgtccgcgcacaggctgtggcgccgcgactacgcggccgccgcggactccatggcgagcctgtcgtccctcaactttgccgcgggggtcaacgggcacggcgtggcggcgccggatgaggatggcgacgcgcatgtcgccgcgccgtcgacgtcgaggctccacggcgggaaggctgcgttcgagtccagcctcgtcgaccagatgatgatggcgagccatggcgggaatgcggcgctgaggtgcaggagcaccagctcgctcgctgccgtcatggcgcagatgctgtcgtaccggaccacgcacatctgggtaactgacggcgaggatgacgtcttggttggcgttgttggttatatggagatcttcaatgcggtcaccaggggtgttgctctgcctccagcttga

SEQ ID NO: 94281 - DNA, 1082 bp, Zea Mays
cacccggctttgtcctttaaaacccggtgtgacagtagcatacatgggcttctgagacacttgggccgtgcatatttcagcccgttcttttagctagcccatcagcccatttagagcgcgttagcactagggtttcaccagctcttaaggccgccgccgcctcggtgcctcctcgcttcgaagtgttcgtgcgaaggcgaccctccctccttcgctccttccgcgccgcctcccggccgtcgccgccatggtgaagtactcgcaggagccgggcaaccctaccaagtcggctaaggccatgggcagggatctgagggtccacttcaagaacacaagggagacagcctttgcgcttcgcaagttgtctttgaccaaggctaagcgataccttgaggatgttattgctcacaagcaggcaattcccttccggagatactgtgggggtgttggtcgcaccgcgcaagctaagtcgcgccactccaatgggcagggccgctggcccgttaaatcagccaggttcatcctggatttgctgaagaatgctgagagtaacgctgatgtgaaaggcttggatgtggacaacctctatgtttcacacatccaggtgaatcaagcccagaagcagaggcgccgcacctaccgtgctcacgggcgcatcaatccctacatgtcctcaccttgccacattgagctgatcttgtcagagaaggaagagcctgtgaagaaagaggctgacaacattgtcgcagcaaggaagcagtgaagtatatcagcatgctgatcgaggccattttgtcgaagtattatagccgtagctcttttatgtaccttttcaggcagccttgcctctcgagacgtttccggcaccgatgttttaaatctggattatctatgttctgtactgaactactgtgttggactgtaagttcagctcgtaatacaatagctcttaagatatctgggcacttaatctgcatggactaatttggtttacttagggtctttggttttaagaataagctagtccatcatcttctcactcatcttttttgtttggtttgtggaatgaaatgagtttgatc

SEQ ID NO: 94282 - DNA, 838 bp, Zea Mays
gcttcgaagtgttcgtgcgaaggcgaccctccactcgcaggagccgggcaaccctaccaagtcggctaaggccatgggcagggatctgagggtccacttcaagaacacaagggagacagcctttgcgcttcgcaagttgtctttgaccaaggctaagcgataccttgaggatgttattgctcacaagcaggcaattcccttccggagatactgtgggggtgttggtcgcaccgcgcaagctaagtcgcgccactccaatgggcagggccgctggcccgttaaatcagccaggttcatcctggatttgctgaagaatgctgagagtaacgctgatgtgaaaggcttggatgtggacaacctctatgtttcacacatccaggtgaatcaagcccagaagcagaggcgccgcacctaccgtgctcacgggcgcatcaatccctacatgtcctcaccttgccacattgagctgatcttgtcagagaaggaagagcctgtgaagaaagaggctgacaacattgtcgcagcaaggaagcagtgaagtatatcagcatgctgatcgaggccattttgtcgaagtattatagccgtagctcttttatgtaccttttcaggcagccttgcctctcgagacgtttccggcaccgatgttttaaatctggattatctatgttctgtactgaactactgtgttggactgtaagttcagctcgtaatacaatagctcttaagatatctgggcacttaatctgcatggactaatttggtttacttagggtctttggttttaagaataagctagtccatcatcttctcactcatcttttttgtttggtttgtg

SEQ ID NO: 94283 - DNA, 78 bp, Zea Mays
tttgcatcgcatttgggattattttactattacttttctctattattattaaggtttgatatttacttacacctagta

SEQ ID NO: 94284 - DNA, 101 bp, Zea Mays
cgaaaggacggcaagaggattgccgaatatattaatagaaggagaaaaaaccaaatacagggactactggccagcaaggtaccaactacagccaattcaag

SEQ ID NO: 94285 - DNA, 1050 bp, Zea Mays
ccgaaacgacacctcacctcaccaccgccaccttccagcagccccccaccggtccaccgcgcgtccccatcggcggcggtagggcagaacagaacaccggagatggagcgggagcgcggcgcgtcggcggcgctgtgggggcacgcgcacctcccactgctggcgcgcgccgggtccaaggagtcggtcgagtacatcctgcaggcgctctggcgcacgcgccgcacgggcctcgacgccgccgaccgcaccgtcgcccgcgacgccctccagctctcctccgacgccgagctcgaccctctgctggtgtgcctgaggatactgatcagacggtgcgtcaacgaggacttcgccaaggacgacatccccaagctcttccccgaggaggtgccccccgagctgcagaagctgctcaccttgctgctgcagaagttccagccggagtggcaggcggatgccgccaaggatcaggaagccgcgctgcattccagcgcggcagagtgccaatcgaaccaaaatggagacacgtcagagcaccgagatgctgctaatgcagagcttcagaacggtgcagcacctgttaagggttctctagaatcaggacagaaagaagtgaagaagtctccgttagctaaggattctttggacaaaatgctgaaggacttgttctcaaccagggaccaaatggcaactgatggcaggaacaccggtcacgaactcacgatggggtagctggcagcacttagggcctgtatggctaatccattgctcatcagtaatttggcatatcaatgcttcgttgttttccttcgatctagatcactgacacccacgtcgcacggcagctgcattccgttgttgttagcgagaatgttaatgctaactacttcctccgttcttttttatttatcgtggtttagtttatttttatttgttgcggtttagttcattcaaaaatgaactagagagctacaaatatttgaaccgaggtagtatatcattgcctactgaaattgccattcccacggctgaaggggatatatatgttca

SEQ ID NO: 94286 - DNA, 1164 bp, Zea Mays
ccgaaacgacacctcacctcaccaccgccaccttccagcagccccccaccggtccaccgcgcgtccccatcggcggcggtagggcagaacagaacaccggagatggagcgggagcgcggcgcgtcggcggcgctgtgggggcacgcgcacctcccactgctggcgcgcgccgggtccaaggagtcggtcgagtacatcctgcaggcgctctggcgcacgcgccgcacgggcctcgacgccgccgaccgcaccgtcgcccgcgacgccctccagctctcctccgacgccgagctcgaccctgtcagtacccctatttccagcttttcttcgttgcttccttccttccttcctgcgccgtcgctcgcgtcgcgggcgggcgggcgttgcaggtccagaccgctcagtacccaactggtgctgcagctgctggtgtgcctgaggatactgatcagacggtgcgtcaacgaggacttcgccaaggacgacatccccaagctcttccccgaggaggtgccccccgagctgcagaagctgctcaccttgctgctgcagaagttccagccggagtggcaggcggatgccgccaaggatcaggaagccgcgctgcattccagcgcggcagagtgccaatcgaaccaaaatggagacacgtcagagcaccgagatgctgctaatgcagagcttcagaacggtgcagcacctgttaagggttctctagaatcaggacagaaagaagtgaagaagtctccgttagctaaggattctttggacaaaatgctgaaggacttgttctcaaccagggaccaaatggcaactgatggcaggaacaccggtcacgaactcacgatggggtagctggcagcacttagggcctgtatggctaatccattgctcatcagtaatttggcatatcaatgcttcgttgttttccttcgatctagatcactgacacccacgtcgcacggcagctgcattccgttgttgttagcgagaatgttaatgctaactacttcctccgttcttttttatttatcgtggtttagtttatttttatttgttgcggtttagttcattcaaaaatgaactagagagctacaaatatttgaaccgaggtagtatatcattgcctactgaaattgccattcccacggctgaaggggatat

SEQ ID NO: 94287 - DNA, 599 bp, Zea Mays
ccctaaataaggatgtttcacgaagcagagacatgcgatttttttctgcctttacattgctttagccatggtagtgagatgcctactgcagaatacacaagtcaactgccaggtcatgttgacgagggtgatcatggggtaaatgccacacaatggctgcataatgaacctgtacttgtcactataagtggtgatggcagtgttggaatgtgggatgctacactaggtcaaccttatgtcagacatatcatcgctcatactcgatgtgctaatgcggttactgtagcccctaacgacaaatacctctgcacaagaggaagtgatcagaaagttgttttatatcatgatagaagtgggcgtacacatcttaattggtgtctttcacaccctctgcaaggaaatggttgatatgctgccagaaatcgtagaattgttctgctaacatgctggggagttctctgagtcaggcagctgaacttttgcagaaacttggctgctccagatggatgtggagccaggactcgtattgaagcctctgcttgatggacggctgaagcttgtgttgggccttaacattattgaattctcatgcctcttta

SEQ ID NO: 94288 - DNA, 645 bp, Zea Mays
atgtccaccacgtccaccgtcgatggcgtcgccgccgcgttcagctcgatgccgacgccggcgttcagccagatggtgagtatgaagctcaaccatgagaactaccttctctgggtggcacaagtcctcccatatctgcggagccaaggcttgagcggccacatcgatggatcgctcccggcgccaaggcagactgtcgccgtcgaccctgcagaaggctccggcggacggacgatcgccatcaaccccgagttcacgagctggcactctgttcctaatgctactaatgatgtttcccatgatagcaatcctttggcaggtggcattcttaatcaatctgaagaagaggggcaagaatcagagtctgaagcacattcaggctcactgcagcaagaaactccagaacctgagcagattcagggtgaagttgagagaaatcaacaagagcaagaggttcagcatcacatgagaacaagattaaaagacaacattgtcaaaaccaagaaactcactgatggtacagtcagcattgagaaaacattttgtcgttactgggaccttgccaacacagacattgatctcaatatcgaggcgcgagactcgagggacaactataatacacaggttaagcatataaatagttga

SEQ ID NO: 94289 - DNA, 534 bp, Zea Mays
atggaccaatggggtagcgaaacgcgtcctgacaatttgttccgatcctcttatggttacgacccgcctgccgtccgctgccacacagcagcggagttagtgactacgcaatcggtcgagctcgtcgtgaggctcttccgctcttggtcggtggtgctgtttcgcgtcctgggaaaaatggatgcggaggcggcgagaaggaagcaggtggcgcctccgcaggagaagaggaagcgcggccggctggagctgcggcggatccaggaccggacgagccggcaggtgcgcttctccaagcgccggagcgggctgttcaagaaggcccacgagctctccgtgctgtgcgacgccgaggtcgcgatggtcgtcttctcccccgccggccgcctctatcactacgcctccctaggcaccagcattgagaaaacattttgtcgttactgggaccttgccaacacagacattgatctcaatatcgaggcgcgagactcgagggacaactataatacacaggttaagcatataaatagttga

SEQ ID NO: 94290 - DNA, 1720 bp, Zea Mays
ggcagagccaaaaacttttggcagcccaggcgattcttattatgcaagaaatttatataggaaaaatgcagcgtttttatccaacaggaataaaatttgcctttgacagctcgtggaggagcctggctgcccgccactttgctggggtggtcgggtggtggcgattcaagtgtaaaatttctgttcgtctctgtggctttaagttccattccatggcagagtcactggttcttgcaattatttttgcagtgctgcagttctgctgagctagggttagacatgcatatttccttttttatgattcgtagactagctgatcaatttttttgccttttttccttggagtcttgaactcccactccagaaatcctttagcatgcagtgaatttgaagtactagtgtttgtatctgcggtccggaggtctttcttaaacatctgtgtaccgtgttctgccattgtctcctgaagcagttagaaatgaattcattgcctctgcggaaacaaataaacttcatttccagcatgaaacttttaaacatttgcccatgtatgttttagaaagtttaatatttgcatgccttctatattattttgtatattttttccatattattcattttgcaagttaagtttcaaacttacgagtacttagaaggttaatgccacagttgtatgattgtatctcttaatggaagatctgttaatttattaatgtttgcgtgtataacatgtgcatgatgtcttttgtgtacagtttatcttaaattgaactatataaagatttggtttgatacttctgtatctttgatcataaactcctatgttggaggccatagacagaactatcaacttaccctacttctcgcatggctaacgttatagatgctagtaaggttctggtgtgcagcttggggttttaaacactagattagtatttgtcctgttcgaaactataattttcatttcgttaggacaattctttgaccattctttgaccgtcaattactctgttagcatgtcatttatgtgatacaaaatgatactcagagtcatgagtaattattttttagtattatgaatctaataacatcaattttgtattaacaaaatctgtactggtaaagaagctgttggtcaaaggcttgtaatagtttgtgtaatgattgaatttcgatagcaacccctccttatccaattcatggtttgtagaaatgtaaattgcttgtagtgcattgttttttacgcacagagcgcacatcttgcctcactttgattctttatgttcctactccagcacaagtattctgcgttcccatgatgtgatactcttgtctctgtaggcattccatttgctgccggccgctgggtccttcttcgtgcagaatgacatgttccgcctgaactatggctaaagacacccgatactcttgtgatgaaggaattgattaagggtttcatgttgaaacgatgaatacttaatgttgccgctactctggtctcttttgtatcttctttgttggctgcttcactgtattacaagaaattgctagacttggattatttcagttgttttgaatcatgtactggttgcaccatttctttgtggaatgtgaattgaaacggtcgtagctacttgatacgcattttgttacaacagcaggcattcgagtttctggtgcttgtacctggagctgttggaaattttcggttcttctgcag

SEQ ID NO: 94291 - DNA, 806 bp, Zea Mays
cagggccaaatttccctgtgctcctctccatccaggtctcctcttgctcataccgcaacgctctatctctttcgccgagctcctcgaaaccctaggagcgtgcttgaccggcggcggcgaggtgatggcgatggaccctgacgcggtagcgaaggccttcgtggagcattactaccgaacgttcgacaccaaccgcgcggcgctggttgggctgtaccaggagacctccatgctcaccttcgagggccagaagttccagggcccctccgccattgccggcaagctcggatctctccctttccaggcctgcgagcatcagatcgtcaccgtagactgccagccatcgggtccccagggaggcatgctcgtcttcgtctccggttccatacgcaccggccccgaggagcaccccatcaagttctcccaggcattccatttgctgccggccgctgggtccttcttcgtgcagaatgacatgttccgcctgaactatggctaaagacacccgatactcttgtgatgaaggaattgattaagggtttcatgttgaaacgatgaatacttaatgttgccgctactctggtctcttttgtatcttctttgttggctgcttcactgtattacaagaaattgctagacttggattatttcagttgttttgaatcatgtactggttgcaccatttctttgtggaatgtgaattgaaacggtcgtagctacttgatacgcattttgttacaacagcaggcattcgagtttctggtgcttgtacctggagctgttggaaattttcggttcttctgcag

SEQ ID NO: 94292 - DNA, 1076 bp, Zea Mays
atggcagagcggcgacggaaggtcgacggcggcaagatgggcgtggcggtcttcggggcgcggtgcaccctgcggtatgagatggacctgcagttcttcaacatccctggcaacagcaagatgctgtccctacgtggcagaaggaccagtgttgatattggtaaatcatgcgcaaatgggtgtgctggaatgatggagaacaatagggaacataaaattgctcttgttgctactggattagctactggaatcgcttcagcctgctggattggaccccgttgtgttcttccgatgatcaatcagtcaatcacaaattcaaaccatacaaatcaactcaatatccagcatgcttctggaagtgtgttcaaggggtggagtgaggagaagatatattttgctcccacttacaactactcttgcaactcagattcttatgctggagagactgccacatcaaagaaaaagaggagaaccccagcctggtgtgatagaatactatggcatggagatggtattgcacagttgtcctacttccggggggaatctcaattctctgaccatcgtcctgtttgtgggacatttactgttgaggttaaaaggctagatggctaatcaaagcggcgcccatcaaacaccaacattagaatcggtgctgaagagttgttgccgccaagagacaagcataactaaggtgatctagatggatgaaattgtcgacaaggccattagcatcatgcaggttacctcaaagcatctcatgtatatccgcaaggagaagctgcactcagggaaggcattgagtgcaatagaggtgaaggaactatgcgaagcccttgaagcgattgctgaagatttggaccaagattcactcttgtgccagagtttggtgtagtcctcgattataaactgtgtactatgttaatgtaatgacatagtttgtatgatacagatcgtagtgatgttgtttgaagctatttgtatgaacttttcctactatcttgtatgaattatgatgtctgatgtagtttgtatgaactatgtcatattatgttgaaggaagctattgcatgccctta

SEQ ID NO: 94293 - DNA, 967 bp, Zea Mays
atggcagagcggcgacggaaggtcgacggcggcaagatgggcgtggcggtcttcggggcgcggtgcaccctgcggtatgagatggacctgcagttcttcaacatccctggcaacagcaagatgctgtccctacgtggcagaaggaccagtgttgatattggtaaatcatgcgcaaatgggtgtgctggaatgatggagaacaatagggaacataaaattgctcttgttgctactggattagctactggaatcgcttcagcctgctggattggaccccgttgtgttcttccgatgatcaatcagtcaatcacaaattcaaaccatacaaatcaactcaatatccagcatgcttctggaagtgtgttcaaggggtggagtgaggagaagatatattttgctcccacttacaactactcttgcaactcagattcttatgctggagagactgccacatcaaagaaaaagaggagaaccccagcctggtgtgatagaatactatggcatggagatggtattgcacagttgtcctacttccggggggaatctcaattctctgaccatcgtcctgtttgtgggacatttactgttgagatggatgaaattgtcgacaaggccattagcatcatgcaggttacctcaaagcatctcatgtatatccgcaaggagaagctgcactcagggaaggcattgagtgcaatagaggtgaaggaactatgcgaagcccttgaagcgattgctgaagatttggaccaagattcactcttgtgccagagtttggtgtagtcctcgattataaactgtgtactatgttaatgtaatgacatagtttgtatgatacagatcgtagtgatgttgtttgaagctatttgtatgaacttttcctactatcttgtatgaattatgatgtctgatgtagtttgtatgaactatgtcatattatgttgaaggaagctattgcatgccctta

SEQ ID NO: 94294 - DNA, 267 bp, Zea Mays
gaaggtactcaggcacaaacttttgcatcctcatgtaggcatcacatagattgggtcatagattcaggagcatcaaagcatgtgactggcatgtccacccctttcaaaacatacattccttatacacattctgagtcagttcaaattgctgatggtacatctcaacaaatccgtggtataggatctgttgcgtgtacaccatctcttcgcttgtcatcagttctgcatgttccatcttttccagtcaatctcctttctgtaagttca

SEQ ID NO: 94295 - DNA, 1770 bp, Zea Mays
gtccccccggcatccccgctgcccgcgaccataggccgctccgctccaccccgccgcgactttcgtcccagctccgccgcatctctcctcctccacctctaccccgccgctcgggccagctagcaggcatccactgcgccgcaaccgcgcgcagccagcagccagccagccatggagaagcgacggcgaggcagcggcggcgtgccgtccttggcggtggcggtgctggcggcgctcctggcggcggcctcgatgccgtcgccgccccgcgtggcggccgcgctgtcgccggactactacaaggacagctgcccgggcctggagtcgatcgtgcggtacgaggtggcgaggaagaagaacgagacggtggtcaccatcccggcgacgctccgcctcgtcttccacgactgcatggtcgggggctgcgacgccgccgtcctgatcgcgtccaagaacaacgacgccgagaaggacgcgccggacaacgagtcgctcgccggcgacggcttcgacaccatcaaccgggtcaaggcggccgtcgagaagaggtgccccggcgtggtgtcctgcgccgacatcatcgcgctcgccgccagagacgtcgtctacctggcggatggcccctactggcgcgtcgagctcggccgtctggacgggctcgattccagggccagcgacgtcaaggggaagctgccggacccggacatgcacgtcaaggacctcacgccggtgttccagcggaacggcttcacggaggtggacatggtcgcgctctccggcgcgcacaccgtcggcttcgcgcactgcagccgcttcaccgacaggctctacagctacggcggcgcgcggacggacccgtcgttcaaccccgcctacgcgtaccagctcaagcaggcgtgccccatagacgtcggccccaccatcgccgtcaacatggaccccgtcagccccatcaggttcgacaacgcctactacgccaacctccaggacgggctggggctcttcacctccgaccaggtgctctacgccgacgaggcgaccaggcccatcgtcgacatgttcgccgccagccagaaggacttcttcgatgctttcgtcgccgccatgctcaagctggggaggctaggggtgaagacggggaaggacggagagatcagaagagtctgcactgccttcaaccattagtagaggcctctcctgcgtgcagcagcgtttgtaatccagattatctcaagctcatgctgtttggagttcgatcgagatgcgtatactgagattgatgattgatcatttttctttttcttctttttttgttgcatacacttgccaaagcttgaaggtgttctttctcctctgtttgtttcttccttttttttcttttcttctttaataacctttttaccttacttttttttgggtgcaatttttgtacagactgaagagtgtaataccatgaacaacttgaagatttttaattgaaaaaggttaatctgactatatgcacggccaatataataaagaaaaggttactttggctcgggctcggttttgtctaagtgcaatgctgccacatgatcttatttttaattttcttctgaaataatgatcatctgcagaataattgaggtcgataaaactgcaattccaaaagagaagtggatgttgttgattaattggttggccagtttgaagaactttggcacatgaaagagaagagaacaagatatcagagcatgtttattgagtaaaccatatgccgcgtgattggac

SEQ ID NO: 94296 - DNA, 1947 bp, Zea Mays
cgcctgcctctttgcttcccagccagttcctctcctccattggcttggctcaatcgcgagccctgtgctgctcttctgaatcgtgctgaaaagaaagaaaaggaaatggggcttgccaaaagctactgcacgggccgctacagggcaagggcaggcagtgtttgtttagctggccggccggggacgcaagcgaacaacagctcgagagccccgcgtggtcgtcggttgcgcgcatgtgacgacgcggcttttcacccgcccttccggattatcaaatgccagccgagcagcggcagcggcagcggcgtgccctgccttctcgtcagaaaccacgccccccgaatcccgagcgcgtcgacccgccgaaaaccatctgtttgccgggttctgaaaatcgtcgcagttgctttggcagccagatctcaatcatgtttcaccaactcacttgcagctgtggactgtggtttggtttcggtttttcagactggttgtatgcagctcgacagctggttccatcttgcatgcatggtgccaagaatatgaccaagatgctgcttgctgcctctgcctctctctctcacacacacagctgctagtggcatcctgacaagcaagcagctggcatcttcttcttagtccagtctttttctctcacccttttcttttaatcttttttttttctggtgacgcgtgacaagcaagcagctggcatcttgaaatcgttatcgcagctattacattgcttttgtaataattcctactaagacaatagaaaagaatagaaaaagaaacaagtaaataatgtgccctgccgttccccccacctccacccacctcaaccgcagggctgcgacgccgccgtcctgatcgcgtccaagaacaacgacgccgagaaggacgcgccggacaacgagtcgctcgccggcgacggcttcgacaccatcaaccgggtcaaggcggccgtcgagaagaggtgccccggcgtggtgtcctgcgccgacatcatcgcgctcgccgccagagacgtcgtctacctggcggatggcccctactggcgcgtcgagctcggccgtctggacgggctcgattccagggccagcgacgtcaaggggaagctgccggacccggacatgcacgtcaaggacctcacgccggtgttccagcggaacggcttcacggaggtggacatggtcgcgctctccggcgcgcacaccgtcggcttcgcgcactgcagccgcttcaccgacaggctctacagctacggcggcgcgcggacggacccgtcgttcaaccccgcctacgcgtaccagctcaagcaggcgtgccccatagacgtcggccccaccatcgccgtcaacatggaccccgtcagccccatcaggttcgacaacgcctactacgccaacctccaggacgggctggggctcttcacctccgaccaggtgctctacgccgacgaggcgaccaggcccatcgtcgacatgttcgccgccagccagaaggacttcttcgatgctttcgtcgccgccatgctcaagctggggaggctaggggtgaagacggggaaggacggagagatcagaagagtctgcactgccttcaaccattagtagaggcctctcctgcgtgcagcagcgtttgtaatccagattatctcaagctcatgctgtttggagttcgatcgagatgcgtatactgagattgatgattgatcatttttctttttcttctttttttgttgcatacacttgccaaagcttgaaggtgttctttctcctctgtttgtttcttccttttttttcttttcttctttaataacctttttaccttacttttttttgggtgcaatttttgtacagactgaagagtgtaataccatgaacaacttgaagatttttaattgaaaaaggttaatctgactatatgcacggccaatataataaagaa

SEQ ID NO: 94297 - DNA, 597 bp, Zea Mays
acccccgtccccccggcatccccgctgcccgcgaccataggccgctccgctccaccccgccgcgactttcgtcccagctccgccgcatctctcctcctccacctctaccccgccgctcgggccagctagcaggcatccactgcgccgcaaccgcgcgcagccagcagccagccagccatggagaagcgacggcgaggcagcggcggcgtgccgtccttggcggtggcggtgctggcggcgctcctggcggcggcctcgatgccgtcgccgccccgcgtggcggccgcgctgtcgccggactactacaaggacagctgcccgggcctggagtcgatcgtgcggtacgaggtggcgaggaagaagaacgagacggtggtcaccatcccggcgacgctccgcctcgtcttccacgactgcatggtcggggtgagcgaaatcctccccctccccctcggtcgagcttattactcctgtcctcctcttcctaatttgcttccaccgcaccgcaccgcactcgtccgtggctcgtgcagtcctttgcttgctccgagatgcgcaattccaacgctcttattgatctactgctaccgcatttga

SEQ ID NO: 94298 - DNA, 1424 bp, Zea Mays
tatacgtggtgcgtgcgacggcgacacgtaccgggaacgaattactctcccccctcctcaattcaatgccgtcatccaactctcaccggccccggcttcaatgcgcgcccgccgccccgcccagcctataaacgccgcccgccccatttccctgctcctcctcctctatcttcgcatctggcacgagcagccaagcaaataaaagtagagcggcgagcgacgaccggcctgggccactctttcggccgagcgtagccagcaggtcgtcgtcgtcgtcgtcgtcgcagcacccggccggctagcatggccacgaggaggcagtggtggtggtggtgcctgctgctgctggcggcgtggtgctgcgccgcggccgcgcagtcgccgccggcggcggacccgctgcagagcaagtgccagggggacttcgggaagctgacggactgcatggactacgcgacggggcacgcggcgtcgccctcgtccacctgctgcggcgacgccggcgacacggagaaggcgcgccccgagtgcctctgctacatcatccagcagacgcacacggggcgcaaccaggtgcagtcgctcggactgcgcttcgaccgactcatggcgctccccgccgcctgcaacctccccaactccaacgtctcgctctgcatcaccctgctgaacctgaagccgggctctgcggactacgccctcttcgccaacgcctccaagatcacgccgtcagccggcggcaaccctgcgagcgacagcgccgcgggcagcggcgtcaagctccgggctggggtcagcggcggcgtcgcgctcgccgtggtctccgcgatcgcctcgtcactcttctgatggaccgacctcctctcaaaggagcagcggcggtttttttttaccctcctgtggattcgttctcgtgctgcgttccgctagcccatgtctactctgtactatctcataaaaaaaaatagatccagctgagacgttgttccctccctctttccctgtaccgtgtttcatggtgacttgtgacaatggatggtttctccttgtgcgtcgccatttacaagcttttttgtttgtttgtttgtttgtttgttctggatgaacggagtttcagcgcagtaaacaattcaaataacctagttgttgtgttttccgttttagcccgttttatttgaagtctgaaattcgcagcatcagctatccgtagagcgagaagcaaatgttttccgtaccagtgtaaaaccttgccgaccaaatccttttttttgttcttcatggaagtgatcagcgcgccacaatgatcggttccatgaaaaatggagctcgttggccggtctgcatcatcaagtctggacaggcgccgacgcctgctggattcagctcggctctgcttgcagtcgcggaccaaaaaaaaaaaaaaa

SEQ ID NO: 94299 - DNA, 1192 bp, Zea Mays
tatacgtggtgcgtgcgacggcgacacgtaccgggaacgaattactctcccccctcctcaattcaatgccgtcatccaactctcaccggccccggcttcaatgcgcgcccgccgccccgcccagcctataaacgccgcccgccccatttccctgctcctcctcctctatcttcgcatctggcacgagcagccaagcaaataaaagtagagcggcgagcgacgaccggcctgggccactctttcggccgagcgtagccagcaggtcgtcgtcgtcgtcgtcgtcgcagcacccggccggctagcatggccacgaggaggcagtggtggtggtggtgcctgctgctgctggcggcgtggtgctgcgccgcggccgcgcagtcgccgccggcggcggacccgctgcagagcaagtgccagggggacttcgggaagctgacggactgcatggactacgcgacggggcacgcggcgtcgccctcgtccacctgctgcggcgacgccggcgacacggagaaggcgcgccccgagtgcctctgctacatcatccagcagacgcacacggggcgcaaccaggtgcagtcgctcggactgcgcttcgaccgactcatggcgctccccgccgcctgcaacctccccaactccaacgtctcgctctgcatcaccctgctgaacctgaagccgggctctgcggactacgccctcttcgccaacgcctccaagagtgagtgctctcagctctctcaagtgaacccttcgtatcatcgccagttcgccacccatccagtaacccactggccactgcactgcactcaactaactggcaaccgccgtcaccgttctgttttctcctgcagtcacgccgtcagccggcggcaaccctgcgagcgacagcgccgcgggcagcggcgtcaagctccgggctggggtcagcggcggcgtcgcgctcgccgtggtctccgcgatcgcctcgtcactcttctgatggaccgacctcctctcaaaggagcagcggcggtttttttttaccctcctgtggattcgttctcgtgctgcgttccgctagcccatgtctactctgtactatctcataaaaaaaaatagatccagctgagacgttgttccctccctctttccctgtaccgtgtttcatggtgacttgtgacaatggatggtttctccttgtgcgtcgcca

SEQ ID NO: 94300 - DNA, 1584 bp, Zea Mays
ctggacgccttctacatttgggcctgtataatgcggtggtaggcccaacgtttaggccgcaggcctggttgccaaagccagagacggagacggagaggggcctagagcccatctcgcgtcgaacaatgggaaagaactccttccttcacagttcacgcggacggatatctcgtctcggtcagttcgcttcgtgagttatctttatctcctctcgatcgatcgcttcctccatcgaggcggtaaagcgccgcccagatcgccggaagcaagcggcgacctcaccagctccgagcagcagcaggtacgagtctatactccacttcctctccgtctcaccccgactggcgatttcttgcatagggcttgcggccccggtcagatcttgctccggcactcgctgccagcctgatcggagcctggagtcgcagggtgggagcggactccattcaacggaatcttcccctatggtggctgctgctgtgcgttaccggccagccgcgtgcccagtttactcccgtccgggaggctcgtggaaccattagtcgttttctggcagcggcatggaggggctgagctggagaacggtgtgttgtttatcggtgctctgtgccgtgctgttcttgcgcccggccgagggcatccgcttcgtgatcgatagggaagagtgcttctcgcataacgtggaatacgagggggatactgtccatgtatccttcgtcgtcatcaaggctgacaccccgtggcattacagcgaggagggcgtcgatcttgtggttaaggatcctaatggcgctcaagtccgtgattcccgagataagactagtgacaagtttgagttcatagttcagaagagaggcgtccatcgcttctgcttcacgaacaaatccccatatcacgaaacgatagacttcgatgttcatgttggccatttttcatatttcgagcagcatgccaaagatgagcattttgcaccactttttgagcaaataggcaagttggatgaggcactttacaatattcagttcgaacagcactggctagaggcccagactgaccgtcaagcaatattgaacgagaacatgagcaggagggcagtccataaggcgctcttcgagtcagcggcgctgatcgccgccagcgtcatccaagtctacctcctgcgccggctcttcgagcgcaagctggggacgtctcgggtttaaggcaacagtagccaacttgcccttcgcagccaccatgatcacaccgacataaccgttacgaattcgaatggttgctagatcagctaaataccacatgtttgtggacttcagttacatgtaatattttttttgtgattccacagatgagaactcttcaaagtttaaaccgtcgatttagccttcattctgcctcagcattttatcgccttgtttctgtagtagcaaccagtaacaacaaggttgcctgtagtctgtacaagatagtagaggtttttttttctgtgctggttgtacgacacaactgtgaatgacttgccgtagacggatactatactgtacgctcgatgcgcccattgttttcagagaataaatggctgtgcag

SEQ ID NO: 94301 - DNA, 1364 bp, Zea Mays
ctggacgccttctacatttgggcctgtataatgcggtggtaggcccaacgtttaggccgcaggcctggttgccaaagccagagacggagacggagaggggcctagagcccatctcgcgtcgaacaatgggaaagaactccttccttcacagttcacgcggacggatatctcgtctcggtcagttcgcttcgtgagttatctttatctcctctcgatcgatcgcttcctccatcgaggcggtaaagcgccgcccagatcgccggaagcaagcggcgacctcaccagctccgagcagcagcagggaggctcgtggaaccattagtcgttttctggcagcggcatggaggggctgagctggagaacggtgtgttgtttatcggtgctctgtgccgtgctgttcttgcgcccggccgagggcatccgcttcgtgatcgatagggaagagtgcttctcgcataacgtggaatacgagggggatactgtccatgtatccttcgtcgtcatcaaggctgacaccccgtggcattacagcgaggagggcgtcgatcttgtggttaaggatcctaatggcgctcaagtccgtgattcccgagataagactagtgacaagtttgagttcatagttcagaagagaggcgtccatcgcttctgcttcacgaacaaatccccatatcacgaaacgatagacttcgatgttcatgttggccatttttcatatttcgagcagcatgccaaagatgagcattttgcaccactttttgagcaaataggcaagttggatgaggcactttacaatattcagttcgaacagcactggctagaggcccagactgaccgtcaagcaatattgaacgagaacatgagcaggagggcagtccataaggcgctcttcgagtcagcggcgctgatcgccgccagcgtcatccaagtctacctcctgcgccggctcttcgagcgcaagctggggacgtctcgggtttaaggcaacagtagccaacttgcccttcgcagccaccatgatcacaccgacataaccgttacgaattcgaatggttgctagatcagctaaataccacatgtttgtggacttcagttacatgtaatattttttttgtgattccacagatgagaactcttcaaagtttaaaccgtcgatttagccttcattctgcctcagcattttatcgccttgtttctgtagtagcaaccagtaacaacaaggttgcctgtagtctgtacaagatagtagaggtttttttttctgtgctggttgtacgacacaactgtgaatgacttgccgtagacggatactatactgtacgctcgatgcgcccattgttttcagagaataaatggctgtgcag

SEQ ID NO: 94302 - DNA, 1638 bp, Zea Mays
ctggacgccttctacatttgggcctgtataatgcggtggtaggcccaacgtttaggccgcaggcctggttgccaaagccagagacggagacggagaggggcctagagcccatctcgcgtcgaacaatgggaaagaactccttccttcacagttcacgcggacggatatctcgtctcggtcagttcgcttcgtgagttatctttatctcctctcgatcgatcgcttcctccatcgaggcggtaaagcgccgcccagatcgccggaagcaagcggcgacctcaccagctccgagcagcagcaggtacgagtctatactccacttcctctccgtctcaccccgactggcgatttcttgcatagggcttgcggccccggtcagatcttgctccggcactcgctgccagcctgatcggagcctggagtcgcagggtgggagcggactccattcaacggaatcttcccctatggtggctgctgctgtgcgttaccggccagccgcgtgcccagtttactcccgtccggtctatcccgttcctcagccgattccgcccacccgaaccgtgaccacctgatcttttcctatgcccatgctgatcgtttggggattcgtctctgcagggaggctcgtggaaccattagtcgttttctggcagcggcatggaggggctgagctggagaacggtgtgttgtttatcggtgctctgtgccgtgctgttcttgcgcccggccgagggcatccgcttcgtgatcgatagggaagagtgcttctcgcataacgtggaatacgagggggatactgtccatgtatccttcgtcgtcatcaaggctgacaccccgtggcattacagcgaggagggcgtcgatcttgtggttaaggatcctaatggcgctcaagtccgtgattcccgagataagactagtgacaagtttgagttcatagttcagaagagaggcgtccatcgcttctgcttcacgaacaaatccccatatcacgaaacgatagacttcgatgttcatgttggccatttttcatatttcgagcagcatgccaaagatgagcattttgcaccactttttgagcaaataggcaagttggatgaggcactttacaatattcagttcgaacagcactggctagaggcccagactgaccgtcaagcaatattgaacgagaacatgagcaggagggcagtccataaggcgctcttcgagtcagcggcgctgatcgccgccagcgtcatccaagtctacctcctgcgccggctcttcgagcgcaagctggggacgtctcgggtttaaggcaacagtagccaacttgcccttcgcagccaccatgatcacaccgacataaccgttacgaattcgaatggttgctagatcagctaaataccacatgtttgtggacttcagttacatgtaatattttttttgtgattccacagatgagaactcttcaaagtttaaaccgtcgatttagccttcattctgcctcagcattttatcgccttgtttctgtagtagcaaccagtaacaacaaggttgcctgtagtctgtacaagatagtagaggtttttttttctgtgctggttgtacgacacaactgtgaatgacttgccgtagacggatactatactgtac

SEQ ID NO: 94303 - DNA, 1877 bp, Zea Mays
cgtggcgcggaaagacgctcctataaaaccgccgctcagtttcaaagctctcgtcgccgccaccactctcccagcctctcttactctccgccgtcgccctgctcgcccgaagcagccgccggcaaaatggccccgaagagaggcggtagggcgccggtccccgccaagaagaaggcggtggtgacgaacccgctcttcgagaagaggccgaagcagtttgggatcggcggcgcccttccgcccaagaaggacctccaccgcttcgtcaagtggcccaaggtcgtgcgcatccagcgccagcgccgcatcctcaagcagcgcctcaaggtgcccccggcgctcaaccagttcacacgtaccctcgacaagaaccttgcaacaaacttgttcaagatgcttcttaagtaccgccccgaggacaaagctgccaagaaggagaggctcttgaagagggcccaggctgaaaacgaggggaaaactgttgagtcaaagaaaccaattgttgtgaagtacggccttaaccatgtgacttacctcatcgagcagagcaaggcccagctggttgtcatagctcatgatgttgatccgatcgagctggtcgtgtggctcccggccctttgcaggaaaatggaggttccatactgcattgtcaagggaaaagcacgccttggatcgatcgttcacaagaagactgcatctgttctttgcttgaccaccgtcaagaacgaggacaagcttgagttcagcaaaatcctggaggctatcaaggctaacttcaacgacaagtttgatgaggtcaggaagaagtggggtggtggtatcatgggctccaaatcacaggcgaaaaccaaggccagggaaaagctgcttgccaaggaagctgcccagcggatgacctaagtcttgtcctgttaaattaaaattttcgtgtacttgcgatcgtgtgcaatcacggtggttgtcagatctagtttttgagagttttgcttcagggagagacaccgagtcaccgaccatgacagaaagacatcatgtaagaattcaaagttttggttctgtaccatctagttcatgtgaatcatcttctatgatggctatgatgtttatgcgcatagctatttcagaattaaatgtcattttatcatgtattgccgcctgcaatttgcatgatttgacttcctacagtacgaacgaatgtacctgaaggttttcctccaagctgatgaaatggccagatttctgctgcactgtacctgctgtaatgtaatgagatttatgcacttgtaacggtatgatatttaccatgcgactgatatgatatttacaatgctgcttcactatttcctaacctacgtgagattttatatatgtacaaggcccagggctttattatgttcttcgattacggtttacgagtaggatctgatgagtctcaggccctggaacgagctcttgagcaggctgccaaggacggacaccgcgccgccctcggcctcgtgcttgacgggcgcgtcgtggccgccgcgcttcaccctcagcacggcgtgcccgagctgctcccccaccgcgtccatggtcctgccgtcgacggggttgccgtacgcgtccgacacgtagaacgtgtcctcggccttgccgtccctggtcgtgatcgccgcccggatgatggagaggctgttctcccggaacacgcgcgtgatctccgacagcagccccaccctgtcctccgtccacacctctagctccagcccctgctcagtcgtgaacagcaacgatgttactagcaagaggccatgctggtgggtcgacgaacgagggagatcatacatacgttggacgcgcgcctctcgacggcggcctctaggcaccggacgagg

SEQ ID NO: 94304 - DNA, 798 bp, Zea Mays
ttgttttttttttttttggtttttatcgccccgaagagaggcggtagggcgccggtccccgccaagaagaaggcggtggtgacgaacccgctcttcgagaagaggccgaagcagtttgggatcggcggcgcccttccgcccaagaaggacctccaccgcttcgtcaagtggcccaaggtcgtgcgcatccagcgccagcgccgcatcctcaagcagcgcctcaaggtgcccccggcgctcaaccagttcacacgtaccctcgacaagaaccttgcaacaaacttgttcaagatgcttcttaagtaccgccccgaggacaaagctgccaagaaggagaggctcttgaagagggcccaggctgaaaacgaggggaaaactgttgagtcaaagaaaccaattgttgtgaagtacggccttaaccatgtgacttacctcatcgagcagagcaaggcccagctggttgtcatagctcatgatgttgatccgatcgagctggtcgtgtggctcccggccctttgcaggaaaatggaggttccatactgcattgtcaagggaaaagcacgccttggatcgatcgttcacaagaagactgcatctgttctttgcttgaccaccgtcaagaacgaggacaagcttgagttcagcaaaatcctggaggctatcaaggctaacttcaacgacaagtttgatgaggtcaggaagaagtggggtggtggtatcatgggctccaaatcacaggcgaaaaccaaggccagggaaaagctgcttgccaaggaagctgcccagcggatgacctaa

SEQ ID NO: 94305 - DNA, 825 bp, Zea Mays
gtcgccgccaccactctcccagcctctcttactctccgccgtcgccctgctcgcccgaagcagccgccggcaaaatggccccgaagagaggcggtagggcgccggtccccgccaagaagaaggcggtggtgacgaacccgctcttcgagaagaggccgaagcagtttgggatcggcggcgcccttccgcccaagaaggacctccaccgcttcgtcaagtggcccaaggtcgtgcgcatccagcgccagcgccgcatcctcaagcagcgcctcaaggtgcccccggcgctcaaccagttcacacgtaccctcgacaagaaccttggtacgatcctcgttccgttcattgctcattgctgtagttggctagtacgtagtagagccaaggatcgaagaaaggtttctaccacaccttctcgacatgttaatagcatcaaccatggaatagtactgccaaagattcggtttggcaatttcgaacatggccatagtctactcccgatagttggagtttatatttcacagatgggtaggtgaatctttgtgatgctatctacccaagtacccacaaattaaccttgcttcaaattatgtatgctcacttgccatggtgcaatctatactaatatagtctcacttcttggcaatatgcttggtatagtattgtaaatatacactttttaaaatatagtatatggatagaccttcgggtctatcatgtcttagccagaattaaaatttcaagctatatggtacttttactttattttgcttttcttaaattggaagaggcaataaaaggagacttgaaaggatgtaatatacc

SEQ ID NO: 94306 - DNA, 789 bp, Zea Mays
acttgtacaaacactttccaactgaatccgagatcaaatctaacttttaatggtgaatctaggataaccagattgtactaaacttagttccaataagattttttttgaaagcagaacttcaatttaatcgaacccagaactacatctgaaaccccaaatgaacacaaaccactgtaaatctgcgcctccaataattacataaatttatttcctgttgttgttttatttttactttgtacaaacacttcccaactgaacctcagatcaaatctaacttttaatggtgaatctaggataaccagattgtactaaacttagttccaataagatattttttgaaagcagaacttcaatttaatcaaaccccgaactacatctgaaatccaaatgaacacaaaccactgtaaatctgcgcctccaataattacataaattttatttgctgctgttttttattttacttgtacaaacacttcccaacggaaccccagatcaaatctaacttttaatggtgaatctaggataaccagattgtgctaaacttagttccaataagtttttttaaagcagaaattcaatttaatcgaacccaggacgacatctgaaatccaaatgaacacaaaccattgtaaatctgcgcctccaataattacataaatttatgtgctgctgttttttttattttacttgtacaaacacttctcaactgaaccccagatttgcaagtaccagttctaccttgacatgctgaacaagggctgtcgtggtggtatgtctgcctaaactaag

SEQ ID NO: 94307 - DNA, 2015 bp, Zea Mays
gagacgggagacgacaagcgcgcacgtcccaaagccaaactcccagagcgaggaggtggaggacggacgggaggaggagaggagagagcccaccacccgcgaccgcgaccgcgacctaacccggagacctccctaggctagctcccctcccagaccccaggctctcccacccacctttcccctctccctccctcctccccgtcccacgccgccgcacccccgcctggctgcttgggtggcaatcggccgtagaggaggagggtgtaggagcttgatccgggccacctgccccctgcgccgtcgggatgtacgtgccgccgccgcccaccggcggcgccggcgagcagcctagggtttaccaggtctggcggggaagcaacgaattcttcttgcagggaagattcatatttgggcctgatgtgagatctgtgtttctcactatgttcctcatcatcgcaccagtggttgtcttctgtgtgttcgtcgcaaggcatctcataaatgatttccccgatagctggggaatctcagtgatggtagtagtggttgtcttcactgtttatgatttgacgctgcttctttgtacctctggtagagatcctggtataatacctcggaatactcatcctcctgaacctgaatccattgatgggatcaatgatacaggtgttcagactccacaacaatttcgtttgcctcgcacaaaggaagttgttgtaaatgggatcagtgtacgggtaaaatactgtgatacttgcatgttgtaccgaccacctcgatgctcacactgttccatttgcaataactgtgtggaacggtttgatcatcactgtccatgggtcggccagtgcataggactgcgtaattatcggttcttctatatgtttgtatcctcgacaacattgctctgcctgtatgtatttgccttctgttgggtgtatgtgatcaagattagagcagctgagcacttgtcaatttggaaggccttgttgaagacaccagcatcaattgttctgattatctactgttttctttgtgtatggtttgtgggtggtttatctgtcttccatttgtacctgatgggcactaaccagacaacatacgagaatttcaggtatcgctatgaccggcgcgataatccatataacagaggtactctgaacaattttctagagatattctgcaccgctatccccccttcgaagaacaatttccgggcaagggtgacagtagagcaagggctgcagcaaacacgctcacagtctaggggtttcatgagccccagcatgggcaagccaaccatcggagagcttgagatgggcaggaagccagtagtaccttgggacgagccaaggacggcagctgatatcagggacttggaagcagggttcgggggcatgtttgacgagaaagagggcagagtagcccacgcatccccagatctgagcagagatctcccagcagagtttgtggaagggcgaactggcatgcactcgaggcagtcaagttgggttcagagaggaggcgatgcgagtgaagcgtcggcgctgcaaatggctactgtccataccgccgaagatagcaaccatgtcccctggagtggcacacgttagcctgacaaaaaggcgggggaaaaaaaaaaggagaggaactacggtgtgtttcggttgtgtctcgaggtgggtgctggtggcgatgtcgtctcgaagtgaactgccatgtgtttattaccacgtgtgccagggcaaggccctggatcattttgtaatccgaaacacaagcttgctgctgtagtctcatctcatgcctggtagatcaccagatccctgctgtggttgttttttttttgtttttggtttggcttgttttgttttgcttgtttgtctgtttgggtgtgtgtttcaacaaaatgaagtagccgacgagcctaagctcccgacaggtctggataatgtatatgtatataactatattattagcaggttgcgacgaatgctgtgcttggtttgccacaa

SEQ ID NO: 94308 - DNA, 950 bp, Zea Mays
ataaggataaaaaaaagattgtcccaatactttactagccggcggcggccgcatcccaattcccacatccccttctgcaatcaaaaaccgagctagggttttagggggagacagagaagcagagggaggctccatggacaaccccgagatgcagcgattcattcaggtgagaaccggttcttcccgctcgtgaatcgtgatgcgttattggcgagggcacgctgctgctgctatcacaaagagcagcagaaggcgatgatgaacgagatggtcggcaagctaacgagcgcgtgctgggacaaatgcatcaccagcgctcccgggagcaagttcagctccggggaatcaacctgcctgaccaactgcgctcagaggttcctcgacatgagcgtgctgattgccaaacgcttcgagatgcagtgaggcgtcgtcactcgaagctgttgcctggtcaatcgccctaagcttttcctttgatttgaggttccattgaggactttcggacgattcaacacagagtttagtgttttttttatgtcttacccactgccctgtttaggcaacgtgttaaagtgtgtttgagcctattgaaattggatttgtacacctcctgctcttaaacaagatctctcatggcatacctgtcagcatcctaggtacttcgatttcagtttggtgagctcggatatcaggcgaaggagatctatgagatgtaagatatagtttcgcccactggtactattttccattgccagataaaattgtcatcgtcaaggaataaacagtggagaccattctcctcgacgggtgcgactttgagcacgggctcgtcgtcatggagttgtacatgctgattatttgcccctagaatgacaatcatttcctaccattaccatcaacatagtataccgagtgtagtagccacgagtagactaaaagaaaaatataaa

SEQ ID NO: 94309 - DNA, 879 bp, Zea Mays
ataaggataaaaaaaagattgtcccaatactttactagccggcggcggccgcatcccaattcccacatccccttctgcaatcaaaaaccgagctagggttttagggggagacagagaagcagagggaggctccatggacaaccccgagatgcagcgattcattcagaaagagcagcagaaggcgatgatgaacgagatggtcggcaagctaacgagcgcgtgctgggacaaatgcatcaccagcgctcccgggagcaagttcagctccggggaatcaacctgcctgaccaactgcgctcagaggttcctcgacatgagcgtgctgattgccaaacgcttcgagatgcagtgaggcgtcgtcactcgaagctgttgcctggtcaatcgccctaagcttttcctttgatttgaggttccattgaggactttcggacgattcaacacagagtttagtgttttttttatgtcttacccactgccctgtttaggcaacgtgttaaagtgtgtttgagcctattgaaattggatttgtacacctcctgctcttaaacaagatctctcatggcatacctgtcagcatcctaggtacttcgatttcagtttggtgagctcggatatcaggcgaaggagatctatgagatgtaagatatagtttcgcccactggtactattttccattgccagataaaattgtcatcgtcaaggaataaacagtggagaccattctcctcgacgggtgcgactttgagcacgggctcgtcgtcatggagttgtacatgctgattatttgcccctagaatgacaatcatttcctaccattaccatcaacatagtataccgagtgtagtagccacgagtagactaaaagaaaaatataaa

SEQ ID NO: 94310 - DNA, 180 bp, Zea Mays
atggctagggtaggggtgagcgccagggaggagaggctgggagtggcggctggcaagatgcagagatggagagaggagcagagaagatggggcggcgtcaagctgctggaaccagggcaagcacagctagggctgatggcggccatgggagagacgccgagagagggccagagaggatga

SEQ ID NO: 94311 - DNA, 1720 bp, Zea Mays
taacacagagcccaacgcatatatgcagcaacgactgcgctgttacgcatggattcaggttccttccttcctcctcgcttcatgaagagatattacaaagacactaattaaggacacgtacgacgacgacctctgcatataatgcaggttacaaatttgacaatatacatatatattgggcttctgaaacctcaagtacagtagaagctgctgacgcgagtagtaggtacgtagtaattaatttgctgttaactaataatccggccggtagtagggcgtcatgcttctctcactaattaaattacactgcattacattacacgtacagagtgcaaaagaaagaaagagataaagaaaagaaaaactagttaacaacaaataatgttgggtcggaggagaagtgcgtgtggatgggttgttcccccttatccgtaactcagcttgatcacatcctctcttcgagatcgaggtcgaggccggccgcacacgtacggcatgcacagcacagctgcgcgcgcgacgagctggtggcggtatacatatacgtacgtacgttcttgactgcatgttgtggccagccggcacgtacggtcggttctgctagctagctagctaagctagctgctgacctcgtccaggtccgagctcgacgcatccgtgacgcagctgctgctagcggacggcggcggcgacgcttctcgctgcctcctcctcggcctgttgccgcccttctggaagacgcggcagacgacccactctccttgcgcctgagccaggctgcagccctgcgtggatatataagatgaccaagaccagtgaccagcgtcaacgacaagcgaaacaaaagcgcggggcacagttggtctgtcagtggatcggagcatcttgctattgtgcaagctgaagctgaagggagagactatactgtagactctgtagtctggtgtgtagcggtctactagctgcaggaggccggcgctgccgatcagagagcagctacagctactactaccacagtgagtgacgaattaagcaaagcgatgtgtactgtgcggatcaattcaatagtcgatgtgtttacttcaactccatccgatcgatgaccagcgggtactgctcgtgcacgcaggtactgtgcggcggcatgcggcagatgcatgcagtagtatttgcaggctaatcaaggcgtcgtcgtcgtcgtcgtcagaattaaagtgccagcggttcaggcgctgctgcttcggttgattggttgttggttggccatggacctacctctacggtgtggtgtggtggtggggcgagggacaagcagagagagatcacggcggaatccggccggccgggcggccggtccatctgagctgcaagcagcagtacttactggttaagtacagctaccactcggtgtcggcataaatttgcaaccaccagggcatatatatgtgcgatgtgattcattatccgtcaccgtacgtacccaaaccagttttcttcatctttttttttccctggacaccgacaacgagctttctttttcgggttcttgaaataaacccattaaccaagcatgatttttcttcttttctttaacaagataaaagtctcatacaggagcacatacatagcttaattaacatcagcaggtttgctcattcattagtggaccaagtttattagggctaattgaaattaatataatggagagagagagagagag

SEQ ID NO: 94312 - DNA, 2479 bp, Zea Mays
gaggccatggtgcactgcgtttcatcagaccgccagcagtcgccagcccagcaaggcagagcagcgagcggctatgggaagagaggcgccggcgatggcggtagcgctgctggcggcgctggtcgcttccgcggccatgttcatgttggcggggaccgcgagcgcgtccccggcggaggggatccagccgctgtccaagatcgccgtccacagggccaccgtcgaaatgcagccgtcggcgtacgtgcgggcgacaccgtcgctcctcggcgagcagggagaagacaccgagtgggtgacggtgaagttcggctggaaagaaccgtccgaggacgactggatcggcgtcttctctccgtctgaattcaactcgtcggctacatgtccgaacccatggccagcagaagaaccctatctctgcacagcacccatcaagtatcagttcgccaactactctgcgaactacatctactggggcaagggcagcatccggctgcagctcatcaaccagcgctccgacttctccttcgccctcttcaccggcggcctcagcaacccgaggttgatcgcggtgtcggagcccatatcgttcaagaaccccaaggcgcccgtgttcccgcgcctggcgcagggcacgtcccacgacgagatgacggtgacgtggaccagcggctacgccatcgatgaggcgtacccgttcgtggagtggggcgccctggtcgccggcggcgtccggcacaccgcgcgcgcgcccgccgggacgctcaccttcaaccgcggcagcatgtgcggcgagccggcgcgcaccgtcgggtggagggaccccgggttcatccacaccgccttcctcagggacctctggcccaacaaggagtaccactaccggatcgggcacgagctccccgacgggtcggtggtgtggggcaagccctactcgttccgggcgccgccgtcgccggggcagccgtctctgcagcgcgtgatcgtgttcggcgacatggggaaggcggagcgggacgggtcgaacgagtacgcggcgtaccagcccgggtcgctcaacaccacggacgcgctgatcgcggacctggacaactacgacatcgtgttccacatcggggacatgccctacgccaacggctacatctcgcagtgggaccagttcacggcgcaggtggcgcccatcaccgcccgcaagccctacatggtgggcagcggcaaccacgagcgggactggcccgacacggcggcgttctgggacgtgatggactcgggcggcgagtgcggcgtccccgccgagacctactactactaccccgccgagaaccgggccaacttctggtacaaggtggactacggcatgttccgcttctgcgtgggcgactcggagcacgactggcgcgtcggcacgccgcagtacgacttcatcgagcactgcctgtccacggtggaccgcaagcaccagccgtggctcatcttcgccacgcaccgcgtgctgggctactcctccaacgcctggtacgccggcgaagggtccttcgaggagcccgagggccgcgagaacctgcagcgcctgtggcagaagtaccgcgtcgacatcgccttcttcggccacgtccacaactacgagcggacctgccccatgtaccagagccagtgcatgaccagcgagaagacccactactcagggaccatgaacggcaccatcttcgtcgtcgccggcggcggcggctgccacctgtccagctacaccacggccatccccaagtggagcatctaccgcgactacgacttcggcttcgtcaagctcacggccttcaaccactcgtcgctgctgttcgagtacaagaagagcagcgacagcaaggtctacgactccttcaccatcgacagggactaccgcgacgtgctcagatgcgtgcacgacagctgcttccccaccacgctcgccacctagttaataaaactaccacttattggtagaataatgtgccccgtcgaggcacactgtactgtagctgtattcatgatagcgcacgtacgcagggagtggtgttgctgtgctctgctccctcgatctgtgtattaaatatcactagctagcccgtgcattaccacttattctcagttggtgccgtagggcttttgtgtgctggtgtggtttaatttccagataaggctatattcggtttcctggaatataatttaagacttgttcggttagctttcaatctatgtggattgagtaggattggatgaatttgaatcttaaacaagtcaaacttattcttaattgttttccaattacatccaatccatgtatattgtgaataaccgaacaaggactaagatgaaattttccaccaaggaatgagtgatccccatgctgtcatttaatcccgttgagggtacaatcctgtcatgaaataatccctatgccaaaatcctgtttggttaagcccatggctgaaaatgctaaaag

SEQ ID NO: 94313 - DNA, 414 bp, Zea Mays
gaggccatggtgcactgcgtttcatcagaccgccagcagtcgccagcccagcaaggcagagcagcgagcggctatgggaagagaggcgccggcgatggcggtagcgctgctggcggcgctggtcgcttccgcggccatgttcatgttggcggggaccgcgagcgcgtccccggcggaggggatccagccgctgtccaagatcgccgtccacagggccaccgtcgaaatgcagccgtcggcgtacgtgcgggcgacaccgtcgctcctcggcgagcaggtactatacgcggtgcccgtacgcacacaccatgcccgcgccgcgctctcgataagctacagcaactaagctagctgtttctttgttctttcgttcgttttcagtcatcagctcgatctgtttgccattagcccatt

SEQ ID NO: 94314 - DNA, 1592 bp, Zea Mays
ctttagaatacccatttgattcattaggagcatctaatgtggcctttctatcaaaatcacatatcaatgggtacgaaagcacccttctgctagagcttcccgcaggaagcccatccaaatcacaggcactaactcctccagaatgtggagggcaagaaatagaggtgcgcagtgctgttggcgcatcatcctcgactgttgaaggttggggtaaacccatcgcagcctagtctgggatagcacctaagatgtactgattcaagcacctttgaagtccttcagaatccgtatttgagccccaccgaacaccaaaccgatgtccaagaatcatctaccgaactcaatcaatataggaagcgtggaacgacgctccggacgcctccggagaaaggacatcatcatctttgcgctgctaccgcggcaactggagatgaagcacagcttggaccccgagcaagcaaccagaaacctaggatgaaccatgcccatcagagtcctgcagaagcaaatcgacgggcattacatacttcaccactcagctgggctcagttaatgctattgcttgccatgagctagcatcacttcattcagttcataaaaggaatatgtcagcttgttgaacttgtaccgggtacctcagaaatagtaagtgaagtgagcagccaagccaactatcgttgcatcaataatcaccaccaaacaaatagatcatgaaatacagagactactgctgctacacataaatcaaggtaactaaaaacaaacaaaattgaagatgaaccccaaaaaatcaaaatcgcattcggactggcgaaccccagctcggattgaaggagggacttcttcacaggcaggctgctataagcgcaagaaagggaaaagcacagattttggacgaacacgaagaacagctttgctatctttattgtcgatcggaataagcaagaccaagctaccgcagaacaacaagtaactgagcagagcccagcacgacaagagcaattgcagaactccaaaccaagatcacttcacttggacatcaatcagggggacgccacacgccagcctacctgacagaccaagcagagaaaccaaccgcatggccgccgaacggaaccgggtcttcgccgatgggactgcctcgatccgatggctagaaaaactcggccaggaagtcggcgcgcaacccagccgattcctgcttgccttgccttcccctcagcttattccccttcccgtccctccttgtcccctctccttgcgctctgctccacctcccccctatcttctcaaatggtggctatataattgtgcaacaggacacgggtcgctaattgagagattcctacggtgggagacgctggattagtagcgctggtagcatctggtagtttccaatccggcggaaggctggtttggtttggcaggcttgtgtctctgttgttcgacgcccatggataaacagcttgttcgctgcggcttgctgcggctgcaatccggctgcggctgcggcttctacagtatttttctctctatggattgcagctgcagcagtccaaacagctgcaacagtgtcggcttgtagccagccg

SEQ ID NO: 94315 - DNA, 2164 bp, Zea Mays
tctgcggcgcgtggtgagtcggtccccgcctccgcctcgttgctgcttattgcgaagtcgcgagcaagcgaacgctcgcctctcgccatttttactcgtcggctggtccggccccagcgattcggtttggtgcgcctcgtggtccacgtgcgcgggctttgtgctctctcttccctctgtgtgtgtgtcagttcgtcgggtaggttggtggcggcgtgagagatgaagagctgcggcgggggaggagcggacgggcagcagtgcccgtgcgactactgcggggaggcggcggcggctctgcactgccgcgcggacgccgcgcgcctctgcgtcgcgtgcgaccgccacgtgcacgccgccaacgcgctttcgcggaagcacgtgcgggcgccgctctgcgcagggtgcgccgcgcgcccggccgccgcgcgcgtctccctcggcgccgacccggcgttcctctgcgcggactgctgcgagggctgcgccgccgcttccgcggcgcgcgtgtcggttgagggcttctcggggtgcccctcggcggccgagctcgccgcgtcatgggggctcgacctccgccgcgcggccgtggccgtgggcgacgacggcgacggcggcgacgacgacgaccccttcctctcggtgctcgactactccgtgctgggggtgggggtggccgacacggacctgcgcgacctctacgtgccgtgcgacccaccgcgggtgcccgtccccgacgccggcgcgcgcccgctcaggggcgaggcgctgtgcgaccagctcgcggagatggcgcggcgcgacgaggcggacacgtcccacgcgcacccgcactcggatctgagcccgcgcacgcctcgccgcacctccgcggcttccagcggacgcctgccgtcgggcaagatggcgccccccgcggcgctgccggtgccggctcatcctcctcccgccgcgccgcaggaggtgcctctgccgtacacgtccctgctcatgatggcgtccgccaactgcagcgacctcattggcggcggcgaccgggtgggtgataccgacgaacaactgctctgggactgcgctgcgccctcggtgccgcccacccagatatgggacttcaatttaggacggtcaaggcatcacgatgagaaatctgctcttgaagttggatacggttctaaccatggcggctttatgattaagagttacagtgacatgcttaaggacatttcttcggggacaacgaaagatctggaagatatttatgactcaagatactgctcaaccgccgaagatatcatgtcctctaatatctgtcagttgtcatcgaaaaatgtgagcaccgggagcaacaaacggaaggtgaggtcatgtgctgcgtcgacgatggatggaccaacgacctccgggaaccacaaccacgtacccgcttcagcttcaggtccaggagcagcgctcaccagggagatctccttcggggatcagacggtgtccgcccccgcggccgagaccgagaggcctgccgccgtgaggatcgacagcgagacgcttgcgcagaacagggacagcgccatgcagcggtacagggagaagaagaagaaccgcaggcacggatccatgagctgatcttgatgacccttacctacctagcttgcctgctgcgacttgtgcggtattaagaataggctgttacatgttgtgtcccatcatatcgttcgtgtccgcaggtacgagaagcacatccggtacgagtcgaggaagctgcgggcggacacgaggaagcgggtgaaagggcggttcgtcaagtcgaccgaagcactcaacgccgccagatacaacggatgaggcagccatatatatatatatatatgcatggcctgcgggcggatgagtttgctgcgcgcctgcgttattacgtgcggtagttacctcacggagaggtaggtactgctacctggaggtgctacgtatgtatggcgcggccggaatcgctacgcacgcggcccaagtttaattttgcgttgaagctatagcgatcgtggccattgttgggcagtcaactccagagattgcacggtactgcttgtttgtaacagacgaccctccctttccccttttttctctgttgttgccgtcatccccaccagaacagaaagtatgtagcttacct

SEQ ID NO: 94316 - DNA, 887 bp, Zea Mays
cgtttaagtagtaaactttgagaaggaacaaatgtgcttttttttggacaggttactggaaaggccctgattctggatgagattatcaactatgtgcagtccctgcagaaccaagttgagttcctttccatgaggattgcctccatgagcccagtgctatatgggttcggactggatagtgatggcctccatgaccacgcacaaaagatgggagtcatgttccaggaagcccttgcaatggcaggtccagtgctgagccaagccagcccagcagctccatctgaagccatcatggacaccaccacaccttactcactgcatggccatggccagggttccatctctttttcccaggacaatggcagcagcacttacctgatgcagcatcagcaagcagcgggggagccaacaaggcagcaggagctgctcagccagttggtgttcaacaacatgtgctctttccagtaggggtggggagcatttgggtgagaggaagcgaggaatggaccccacattgacaataggaaggaaataatgctgcgagatttggtaggagcatgcacgtaccagatgagtttgagatgttggatctagtccatccccttgtctggatttggagagagcagtagcaagtagatcgagcctgctgtttgtttacacattttgagagactttgtagtatttgtaactcctttattgggcattgtccatgaggattttctcagcggctgcaccttccatctcaccgtgttgttgtagttcttgagcaatcggttgttagtacatacgagagctattttgttctttgccaaacagtgattgactgttccatccattcagtcttgtctagctccaagcatctgcaaatcgctacgttgttttcttta

SEQ ID NO: 94317 - DNA, 1526 bp, Zea Mays
accagtgagtagtagccaaccttggtctccacttcctgctgccaagtgccaacgcgagtccgtccctcttctcctccgcatccaaagaaaccagaccacaagacatcgagagaacaaacagttgcggccttgctggcacggggatagatcttctccactccaatggcgggcttctcacggccgaacaactcgctcctcctcaagatgcctgcgactttggccagtagccacaccccgaacctctcaagcctcctgttctacgaccagaaccatggccaagctgtaaatgcaaatgcagcagcgatgatggtggaggacgacgcctcacttcagagctcatctgcagtggtcgacacctccccgcagccacagggcagtgctgctgctgcgtctccgatggagaggaagaggaagcctgcagaagacagtgctacactcagctctgctcaatccaaggaggattgcaagcagcagcaggagagcaagagcaggcggggaaagaggccccacaacaaggaggctaatactgaggagaagagcgctactgaagacgaggccaccagggggtacatccatgtgagggcgaggaggggtcaggcaacggacagccacagccttgcagagagggtgaggagagagaggatcagtgagaggatgaggatgctgcaagcactggtccctggttgtgacaaggttactggaaaggccctgattctggatgagattatcaactatgtgcagtccctgcagaaccaagttgagttcctttccatgaggattgcctccatgagcccagtgctatatgggttcggactggatagtgatggcctccatgaccacgcacaaatgggagtcatgttccaggaagcccttgcaatggcaggtccagtgctgagccaagccagcccagcagctccatctgaagccatcatggacaccaccacaccttactcactgcatggccatggccagggttccatctctttttcccaggacaatggcagcagcacttacctgatgcagcatcagcaagcagcgggggagccaacaaggcagcaggagctgctcagccagttggtgttcaacaacatgtgctctttccagtaggggtggggagcatttgggtgagaggaagcgaggaatggaccccacattgacaataggaaggaaataatgctgcgagatttggtaggagcatgcacgtaccagatgagtttgagatgttggatctagtccatccccttgtctggatttggagagagcagtagcaagtagatcgagcctgctgtttgtttacacattttgagagactttgtagtatttgtaactcctttattgggcattgtccatgaggattttctcagcggctgcaccttccatctcaccgtgttgttgtagttcttgagcaatcggttgttagtacatacgagagctattttgttctttgccaaacagtgattgactgttccatccattcagtcttgtctagctccaagcatctgcaaatcgctacgttgttttcttta

SEQ ID NO: 94318 - DNA, 1529 bp, Zea Mays
accagtgagtagtagccaaccttggtctccacttcctgctgccaagtgccaacgcgagtccgtccctcttctcctccgcatccaaagaaaccagaccacaagacatcgagagaacaaacagttgcggccttgctggcacggggatagatcttctccactccaatggcgggcttctcacggccgaacaactcgctcctcctcaagatgcctgcgactttggccagtagccacaccccgaacctctcaagcctcctgttctacgaccagaaccatggccaagctgtaaatgcaaatgcagcagcgatgatggtggaggacgacgcctcacttcagagctcatctgcagtggtcgacacctccccgcagccacagggcagtgctgctgctgcgtctccgatggagaggaagaggaagcctgcagaagacagtgctacactcagctctgctcaatccaaggaggattgcaagcagcagcaggagagcaagagcaggcggggaaagaggccccacaacaaggaggctaatactgaggagaagagcgctactgaagacgaggccaccagggggtacatccatgtgagggcgaggaggggtcaggcaacggacagccacagccttgcagagagggtgaggagagagaggatcagtgagaggatgaggatgctgcaagcactggtccctggttgtgacaaggttactggaaaggccctgattctggatgagattatcaactatgtgcagtccctgcagaaccaagttgagttcctttccatgaggattgcctccatgagcccagtgctatatgggttcggactggatagtgatggcctccatgaccacgcacaaaagatgggagtcatgttccaggaagcccttgcaatggcaggtccagtgctgagccaagccagcccagcagctccatctgaagccatcatggacaccaccacaccttactcactgcatggccatggccagggttccatctctttttcccaggacaatggcagcagcacttacctgatgcagcatcagcaagcagcgggggagccaacaaggcagcaggagctgctcagccagttggtgttcaacaacatgtgctctttccagtaggggtggggagcatttgggtgagaggaagcgaggaatggaccccacattgacaataggaaggaaataatgctgcgagatttggtaggagcatgcacgtaccagatgagtttgagatgttggatctagtccatccccttgtctggatttggagagagcagtagcaagtagatcgagcctgctgtttgtttacacattttgagagactttgtagtatttgtaactcctttattgggcattgtccatgaggattttctcagcggctgcaccttccatctcaccgtgttgttgtagttcttgagcaatcggttgttagtacatacgagagctattttgttctttgccaaacagtgattgactgttccatccattcagtcttgtctagctccaagcatctgcaaatcgctacgttgttttcttta

SEQ ID NO: 94319 - DNA, 1625 bp, Zea Mays
accagtgagtagtagccaaccttggtctccacttcctgctgccaagtgccaacgcgagtccgtccctcttctcctccgcatccaaagaaaccagaccacaagacatcgagagaacaaacagttgcggccttgctggcacggggatagatcttctccactccaatggcgggcttctcacggccgaacaactcgctcctcctcaagatgcctgcgactttggccagtagccacaccccgaacctctcaagcctcctgttctacgaccagaaccatggccaagctgtaaatgcaaatgcagcagcgatgatggtggaggacgacgcctcacttcagagctcatctgcagtggtcgacacctccccgcagccacagggcagtgctgctgctgcgtctccgatggagaggaagaggaagcctgcagaagacagtgctacactcagctctgctcaatccaaggaggattgcaagcagcagcaggagagcaagagcaggcggggaaagaggccccacaacaaggaggctaatactgaggagaagagcgctactgaagacgaggccaccagggggtacatccatgtgagggcgaggaggggtcaggcaacggacagccacagccttgcagagagggtgaggagagagaggatcagtgagaggatgaggatgctgcaagcactggtccctggttgtgacaaggttactggaaaggccctgattctggatgagattatcaactatgtgcagtccctgcagaaccaagttgagttcctttccatgaggattgcctccatgagcccagtgctatatgggttcggactggatagtgatggcctccatgaccacgcacaagtatggaacagcaaaatcatttttttgtcagctaaaaatacggtcaataagctgatgtttaaatgtgaactgtaaaattgcgctgatgtgtttcagaagatgggagtcatgttccaggaagcccttgcaatggcaggtccagtgctgagccaagccagcccagcagctccatctgaagccatcatggacaccaccacaccttactcactgcatggccatggccagggttccatctctttttcccaggacaatggcagcagcacttacctgatgcagcatcagcaagcagcgggggagccaacaaggcagcaggagctgctcagccagttggtgttcaacaacatgtgctctttccagtaggggtggggagcatttgggtgagaggaagcgaggaatggaccccacattgacaataggaaggaaataatgctgcgagatttggtaggagcatgcacgtaccagatgagtttgagatgttggatctagtccatccccttgtctggatttggagagagcagtagcaagtagatcgagcctgctgtttgtttacacattttgagagactttgtagtatttgtaactcctttattgggcattgtccatgaggattttctcagcggctgcaccttccatctcaccgtgttgttgtagttcttgagcaatcggttgttagtacatacgagagctattttgttctttgccaaacagtgattgactgttccatccattcagtcttgtctagctccaagcatctgcaaatcgctacgttgttttcttta

SEQ ID NO: 94320 - DNA, 1438 bp, Zea Mays
tatagctctgtccggtgtcagtagcaatcaccattcatcagcaccccggcagtgccaccccgactccctgcacctgccatggctgccgctctcgtgtctgtgcctcgcatcaagttgggctcgcaggggctggaggtctccgcgcagggcctcggctgcatgggcatgtccgccttctacggcccgccaaaacccgagtctgagatgatcaagcttatccaccacgccgtcgacgccggggtcaccttcctcgacacctccgacgtctacggcccgcacaccaacgaggtcctcctgggcaaggcgctgcaaggcggggtgcgggagaaggtcgagttggccaccaaattcggcgtctccttcgccgatggcaagcgggagatccacggcgacccagcctacgtgcgggcagcgtgcgagggcagcttcaagcggctcggtgttgactgcatcgacctctattaccagcaccgcatcgacaagagggtgcccatcgaggtcacgatcggtgaactcaagaagctagtggaggaaggaaagataaaatacattgggttatccgaagcatctgcatcaacaatccgaagagctcatgcagtccatcctatcaccgcggtacagcttgaatggtcgctatggtctagagatgcagaagaagatataatccccacttgcagagaacttggaattggaatcgtggcttacagtccactaggcagaggtttcttctctagtggagcaaaactagttgactcactatctgagcaggacttccgcaagcatatgcctagatttcagccagagaatctcgacaagaacgctcagatattcgagcgcgtgagcgcgatggcagcacggaaaggatgcacgccatcacagctcgcgttggcctgggttcaccaccaaggaaacgacgtttgccccatacctggcacaacaaaaatcgacaacttcaaccagaacgtgggggcactgtctgtgaagcttacaccggatgagatggctgaactcgagtcgtatgccgcggctggtgaagtcttgggtgaccggtatggcgatcaattggccaacacttggaaggactccgagaccccaccgttatcttcatggaaattttgagtagccagtatctggtattttcaactgcgtcctctgttcgttgacgtatctccgagttgccgggatgcagaagatctccatgtgcactttgcaaaagcatccatatatatgatgttgggagtttatgatgtttggtacagagtgcgtattgtattgcatacttatctcattttgtttttgtgcgtatatgcttaaatgttaaaacctctgacgggatgaccggatgaatagaataaccatgtgtgcattgtatcaagacttcaagagtttctaccatgagtaaaaaaactcgacctgcccagcccccgggcattttaat

SEQ ID NO: 94321 - DNA, 3028 bp, Zea Mays
cgttgttttattgttttgttttgcttaattttcttgccaccatgtcatcatccatgaaaaaatatgtaatgttcaattctttaggattatactgtttctttatcttttttgaacctgcttatattatttgtttctcattatttattactctttccccacataagagtagagttgagctcaatgtcgtcagttcctctactgagcatactgaattttcatcttctttccagggcctgtaatgaccaaatttacaattgccttaagagaaattggaacatacaaggaagtcctgcgctcccaggttgagcacatgttaaatgacagattactgaattttgttgacattgatttgcatgatgtgaaggatgctcataagcgctttgacaaggctagcctctcatatgaccagattcgtgaaaagtacctatcattgaagaaaggtacccgaccggacataacaacagcaattgaagatgagcttcacagtgctagatcttcatttgagcaagctcgtttcaacctggtcacttcactttcccatgtcgaggcaaagaagagatttgaatttttggaggctgttagtgcgacaatggattcacatcttcgttattttaaacaaggatatgaactattgcatcaaatggagccatatattaatcagattcttgcttatgcacagcaatcacgagaaagagcaaacaaggaacaagcttctctcgtagagaggatgcatgagtacaaaaggcagatagaccgggaaagtcggtcttctataaatggtttgaatgattcttataatggtgatcgaatgcagacaattggcagaagttcacataaacagatcgaggcagttatgcagtcaacttcaaaaggcaaggtagagaccatccgtcaaggttatctttcgaaaagatcttcaaacttgagagccgactggaaaagaaggttcttcgtacttgatagtcgaggaatgctgtactactatcgaaaacaaattactcggccacctgctggttgttccatgcaaagaaacgttaacccccctgaacatggttctgggttgttgagcagattgttctcttctcattaccatatacatgatgaaaagtctgtcgcacgtcatactgtaaatttgttgacatcgaccattaaagttgatgctgagcaatcagatttgaggttctgtttcagaattatttcacccacaaagatctacacattgcaggcagagagtgcagtagatcagatggactggattgaaaagataactggtgttattgcctctttactgagctcacaatcgccagaacagtgttttatgtcaagccctaagggcagtggtcatgataggagtaccagtgatggaagctcctttacaagttcagtggaatttgaaccttccgtaatcgatgatttagtactggagaagtactctggaaatgggcagcatgatgtaataagaggcacacatcatcacagaaccagcatgaaacctgaaaaaccaattgacttgcttaggaaagttgatggcaataatatgtgtgctgactgtggtgctttggaacctgattgggcatcattaaaccttggcgcacttctatgcatagagtgttctggggtgcaccgaaatcttggagtgcatatatcaaaggttagatctctgacacttgatgtcagagtttgggagccatcagtaatcaatctctttcagtcattaggcaacatgtttgtcaacaatatttgggaagacatgttgccagatgataattcaagtgctgatggatcagacacatcacagtacctctctgttagcaagcctaaacacaaagatgtattctctgccaaggagaagtttattcatgccaagtatgtagacaaagagtttatacggaagcgtagcatggatgagaatcaattagctgagcagatgtggaatagtgtagctgcaaatgacaagaaaacagcatacagtctcattgtgagatcacgtgccaatgtaaatttagtttacggagagatgccttctagcccatttttgactcttggaaaggcacttcagcaagagcaaccggtttcaccgcctgatggaagtcctaaatttttcgattgcaattcacatgacaagatttctcctcgggagcccctttcccctgctagcacgagttcacgcacagatgacatggaggacggttgcgaaggtctttccttgctccatcttgcatgccgtgttgcagacgttgggatggttgaattacttttgcagtatggtgctagtgtaaatatgaatgattctaggggtcggacaccccttcatcactgcattttgaaaggaagacatcggcatgcaaagcttctcctctccagaggggctgattcacaagccatggatcgagatggtaggacagcattgcagtatgcaatcgatggtggaacaagcgacgaagacattcttgcattgttagaggatcatagtagatgatcttgcaaccacaccttcagtaaattgaggttctcttggtgtggtcaactcaactaagaccttgttcggttagctctcaatccatgtggattgagtgtgattgggtgggttcaaatcccaaacaagtcaaagttcttctaatttttttccaatcctatccaatccatgtataatgggaataaccgaacaagacctaacagggatccagccccgctcggtcctagcttgtcgtgcagacaatccgaattcatggcatgaaagcaacctatgtacatgtcgttctagggcttcagtatcatgatgcgcatgttgtttctttccccgccgtttgcttgtttagcatcagtggtccttatttagtcatctggcaaacggtttggttttgtttgctgcaggtgatgcatagtaagcttgtaaatggagttgcttctcttaattttctagtcatcttttatcatgaagtagatgtggcattctaatgaaagatggttgtacatattgagatgtgctgttgtggcatatatgaaatattggcatggtgtggatggt

SEQ ID NO: 94322 - DNA, 3359 bp, Zea Mays
atttccaccacctcgcaccaggctccactcctctccttcccttccctccccctttcgctcccctcctcgctcgcctcgcttctcgccgagccacccgaccaattcccccgccccccgcgcgcccagatcgccgccattcccttccccgccctgccgcgacgatcccgctgccaccgcaccttctccctcccgtcgtcctcccctccccgcagctggcggtcggtcggtcggacggaggaagccacagccggcggccagagagcgccgcagcgtgcccgcggatgggctggtaggaggcggcggcggcggtgactgtgttagcggcggcggcggcagccatgtatttcgccaaactcgatgactcgcccatgttccggacgcagatacaatcacttgaggagagtgctgaattgctgagagagagatgtttgaagttccataaaggttgccgtaagtatactgaaggactaggggaagcatacgatggagatattgcatttgccagctcacttgaaacatttggaggaggccacaatgatccaatgagtgtcgcttttggtgggcctgtaatgaccaaatttacaattgccttaagagaaattggaacatacaaggaagtcctgcgctcccaggttgagcacatgttaaatgacagattactgaattttgttgacattgatttgcatgatgtgaaggatgctcataagcgctttgacaaggctagcctctcatatgaccagattcgtgaaaagtacctatcattgaagaaaggtacccgaccggacataacaacagcaattgaagatgagcttcacagtgctagatcttcatttgagcaagctcgtttcaacctggtcacttcactttcccatgtcgaggcaaagaagagatttgaatttttggaggctgttagtgcgacaatggattcacatcttcgttattttaaacaaggatatgaactattgcatcaaatggagccatatattaatcagattcttgcttatgcacagcaatcacgagaaagagcaaacaaggaacaagcttctctcgtagagaggatgcatgagtacaaaaggcagatagaccgggaaagtcggtcttctataaatggtttgaatgattcttataatggtgatcgaatgcagacaattggcagaagttcacataaacagatcgaggcagttatgcagtcaacttcaaaaggcaaggtagagaccatccgtcaaggttatctttcgaaaagatcttcaaacttgagagccgactggaaaagaaggttcttcgtacttgatagtcgaggaatgctgtactactatcgaaaacaaattactcggccacctgctggttgttccatgcaaagaaacgttaacccccctgaacatggttctgggttgttgagcagattgttctcttctcattaccatatacatgatgaaaagtctgtcgcacgtcatactgtaaatttgttgacatcgaccattaaagttgatgctgagcaatcagatttgaggttctgtttcagaattatttcacccacaaagatctacacattgcaggcagagagtgcagtagatcagatggactggattgaaaagataactggtgttattgcctctttactgagctcacaatcgccagaacagtgttttatgtcaagccctaagggcagtggtcatgataggagtaccagtgatggaagctcctttacaagttcagtggaatttgaaccttccgtaatcgatgatttagtactggagaagtactctggaaatgggcagcatgatgtaataagaggcacacatcatcacagaaccagcatgaaacctgaaaaaccaattgacttgcttaggaaagttgatggcaataatatgtgtgctgactgtggtgctttggaacctgattgggcatcattaaaccttggcgcacttctatgcatagagtgttctggggtgcaccgaaatcttggagtgcatatatcaaaggttagatctctgacacttgatgtcagagtttgggagccatcagtaatcaatctctttcagtcattaggcaacatgtttgtcaacaatatttgggaagacatgttgccagatgataattcaagtgctgatggatcagacacatcacagtacctctctgttagcaagcctaaacacaaagatgtattctctgccaaggagaagtttattcatgccaagtatgtagacaaagagtttatacggaagcgtagcatggatgagaatcaattagctgagcagatgtggaatagtgtagctgcaaatgacaagaaaacagcatacagtctcattgtgagatcacgtgccaatgtaaatttagtttacggagagatgccttctagcccatttttgactcttggaaaggcacttcagcaagagcaaccggtttcaccgcctgatggaagtcctaaatttttcgattgcaattcacatgacaagatttctcctcgggagcccctttcccctgctagcacgagttcacgcacagatgacatggaggacggttgcgaaggtctttccttgctccatcttgcatgccgtgttgcagacgttgggatggttgaattacttttgcagtatggtgctagtgtaaatatgaatgattctaggggtcggacaccccttcatcactgcattttgaaaggaagacatcggcatgcaaagcttctcctctccagaggggctgattcacaagccatggatcgagatggtaggacagcattgcagtatgcaatcgatggtggaacaagcgacgaagacattcttgcattgttagaggatcatagtagatgatcttgcaaccacaccttcagtaaattgaggttctcttggtgtggtcaactcaactaagaccttgttcggttagctctcaatccatgtggattgagtgtgattgggtgggttcaaatcccaaacaagtcaaagttcttctaatttttttccaatcctatccaatccatgtataatgggaataaccgaacaagacctaacagggatccagccccgctcggtcctagcttgtcgtgcagacaatccgaattcatggcatgaaagcaacctatgtacatgtcgttctagggcttcagtatcatgatgcgcatgttgtttctttccccgccgtttgcttgtttagcatcagtggtccttatttagtcatctggcaaacggtttggttttgtttgctgcaggtgatgcatagtaagcttgtaaatggagttgcttctcttaattttctagtcatcttttatcatgaagtagatgtggcattctaatgaaagatggttgtacatattgagatgtgctgttgtggcatatatgaaatattggcatggtgtggatggt

SEQ ID NO: 94323 - DNA, 693 bp, Zea Mays
aaaatagcaaatttctcgcccctggagaggacgcggtcatggcgtgcccccaggcgccgcacgccgcgggacgaggaggatgggggcggggctggaccctagcccgagcttcggcggctgctcggaccccgtgttggtggagctatccatgggcggggactactaccgcgcctgctgcggcgagcccgactccgatatccccgaggggcccaagctgccctgcgttggggacaaggagcctctttcctcttcagcagccgagtttcagtctggcagccccattttacaagagaaaattaagttgctcggcgaacaatatggtgctttaagacgggcacgtggagatggaaactgcttttatcgaagctttatttatgttttcctacctggaacacatcctagagagacaagacaaagctgaggttgatcacatcatggtaaaaattgaggaatgcaagaaagaagacactcctgtctcttggatatattgagttcacttttgaggatttctttgcggtaagtttgttcagtggttattttttgtgtatttctctgagtcatacgttttctgttagggcggctttccagtttatttgtctacattatctactgtttgtgggtttgtctacttaattgtcacaaccgtttccagatgatttttttgtgtatttgcatagatgaattggtttacaa

SEQ ID NO: 94324 - DNA, 361 bp, Zea Mays
aaaattgttcctcttctttctccacaagttcaacagcatacagaattacaacgaaaacagatgaagagactggaagggagaagaatacagtttgttagagaagagtaacagaatttccaaaactgtcgcccgcttgtcctccaaaccagttaagtacccctttcctcttagctcggctgatggatcatcatactcgaaccttcccgcgtgttgtagctcacagacacacactactgtttcacgtccggcagcacctgaactgcatctctgttatgggatatgacaagagcatttccacttggtctagatactacagcgcagctgactcgcacagaaggccaggtcataacacatcaatgtc

SEQ ID NO: 94325 - DNA, 344 bp, Zea Mays
aaaattgttcctcttctttctccacaagttcaacagcatacagaattacaacgaaaacagatgaagagactggaagggagaagaatacagtttgttagagaagagtaacagaatttccaaaactgtcgcccgcttgtcctccaaaccagttaagtacccctttcctcttagctcggctgatggatcatcatactcgaaccttcccgcgtgttgtagctcacagacacacactactgtttcacgtccggcagcacctgaactgcatctctgttatgggatatgacaagagcatttccacttggtctagatactacagcgcagctgactcgcacagaaggccaggt

SEQ ID NO: 94326 - DNA, 378 bp, Zea Mays
gccgacgccgcggaagtcgaggaccgccccgccggcgccaccccgcccgcgaaggcggcctgcaggtccaagtcgccgccgccgctctgcaggatgcgcgcgtactggccgaggtcggggaacgacgacgacggctcctcgtgacagccaacaggagcagcagcagcgctcggcgtccccggccgatgctggccgcggtagcggggctggaaggcggcagcggtgccgtggcccgcgttagcggggaagttgagtttggccttggcgccccggaagcggagcgcggcgtcgtcgtaggcgcgcgcggcgtcctcggcggtggcgaaggtgccgagccacacgcgcgccgccttcaccgggtcccggatctccgccgcc

SEQ ID NO: 94327 - DNA, 116 bp, Zea Mays
gataatttgtaccatttacgttcttatgcaggcggcaacaacatgttaataaaaaataaaataatagaattaattagaatttttaaaacataaagaaatcagatgagaaaaacaag

SEQ ID NO: 94328 - DNA, 4359 bp, Zea Mays
ccaacatccgcctcagattcccgtccatcgttcgtctccgctgtttcccgtccctcgtcctccgccgaaaccctagcagagctcctcctccgccttccctccggtcgccggagtgcctggtccggtcacgggggtggtttcgaggcctggattggcggagtgtttggaaggaggcaggggcgggacagtaggaatacataaattttctaggttttcagccgccctatgcctgacgcatccacgcgcccacgcctgtctccgcacacacgctgccacgcacaggcaccgctcgtccgctccagctcttgcgtcgcacggacagacacagctccaccctccatagctcctcttgccgctgcttgtgcgccggatcaccgcccccggcctgagtcttcggacagtgcgtccgcggcagagcatctgcggcctgccccctgcgggcggcggcgccagtgcggctcgccccctctggccgtcttggcctgattggaccgagaaccaggaggagggacatggaggggttcgccaagccgtccacgagctcggggtctggggtcacggttagggcctccgtcgccgcggcctccatagaggagaggttcgccgatctgtgcaaggccaagctgggactggacgagagcacgacgaggcaggcaatgcagctcttgaaggagaccaataacattctcaagtccagcatgtcttccttgggcggcggatcgcccgaggagatcgagaggttctggtctgcctgtgttctgtactgtgtgtcaaggctcagtaaagcggggaggtcgaaggaagatggcagtgtctcactttgccagattctgagggcatctaagctgaacattgtggattttttcaaggagatgccacagttctgcataaaggttgcacacattttgactggcctatatggttcagattgggaaaaaaggcttgagttgaaggaactgcaagcgaatgttgtccatttaagcttgctaagcagttactacaaacgtgcataccaggagctattcttgtcaaatgatggcaagagttcagacaattcttcagaatcaaataaccaagaggcttctgattattatcgctttggatggttgctctttttagtcctaagaatccaaacattcagcagattcaaggatcttgtgacatccacgaacgaactggtttctgtgttggctgtacttatcattcatgttcctgtgcgactaaggaatttcgatataaaggattcatcctactttggtaagaagtcagataggggagtcagtcttattgcttctctttgtgaaaaacatcatacctcagaagatgagttgagcaaagcactggagaagacaaatactctcataatggatattctgaaaaagaagccatgcccagctacttcagcatgccaacaggataatttgtctttcatcgatccagaaggcttgacagtttttaaggatttgcttcagggagactcattgaaaccaagtctgataatcctggaaaaggaatatgaaaatgcaattaacacaaaaggtgagctagatgagcgcatgtttgctaatgatgaggacagtttacttggtagtggaagcctttcaggtggagccattaatttaccaggcacaaagagaaagtatgatgttatggcctcacctgcaaaatcaatatcaagcccaaatccaatgtctcctccacgcttttgtctatctcctaaaggaaacggcttttgcaactcaaagatggctcctagcactccagtgagcacagccatgacaactgccaagtggcttcggaatacagtatctccccttccatcaagaccttctggggaactgttgcgcttcttctcggcctgtgacaaggatctaacagatgacattgcacacagagctgggattatacttggagccatattcacgagcagttcttttggtgaacgaatctgtactagtatgcgaagcgcaagtaggatggatgctatctggacagagcaaagaaaaatggaagctcttaagctatattatagggtcctcgaatctatgtgtagggcagagtcacagatcttgagtgggaacaatcttacatcacttttgtctaatgaacgtttccatcggtgtatgattgcatgttctgcggagttagttcttgcaactcacaagactgtcactatgatgttcccagctgtgctggagaagactggcattacagcatttgacttgagtaaagtcatagagggttttgttcggcatgaagatacactcccaagagagttaaagcgccatctgaattctcttgaggaacggcttctggaaagcatggcatgggagaaagggtcatcaatgtacaattccttaatcgttgcgaggccggcactgtctgtagaaataagccggttaggtttactggctgaaccaatgccatcgcttgatgcaattgcagcacatcataacatctcattgggtggcctgccacctcttcccttccagaaacaggagcgtttgcaagacaaagatgaagtcaggtctcccaaaagggcatgcactgagaggagaaacgtgctggtggacagcaattcattgcggtcaccagtgaaggatattattaaaccaaagttaccacctctccaatcagcttttgcaagtccaacaaggccgaatcctgcagcgggaggcgaaacgtgtgcagagacaggaataggcgtgttctttagcaagatatcgaagctcgcagccattagaatcagaagtctctgtgaaagactgcagcttccccagcaagttctggaacgggtgtattcccttgtgcagcaaatccttagccaacagactggccttttcttcaacaggcacattgaccagatcatactatgcagcatatatggagttgccaagatctctcaactggaactttcattcaaggagattattttcggctacaggaaacaacctcagtgcaagccacaagttttccgaagcgtctatgttcattggcccccaagaagccgtaacgggaaaacaggagaagaccacgtcgacatcatcactttctacaacgaagtattcattcctgccgtcaagtccttgttggtggaggtagggcctggcgccagcgccagtccaaagaagaaagaagaggaaaaaggtcctgctgatgtaggtccattcccagaatctccccggctggctcggttcccgaacctccccgacatgtctccaaagaaggtttctgctacccataacgtgtacgtctcaccgctacggtcatcgaagatggacactcttctgtccccgagctccaagagctactacgcgtgcgtcggcgagagcacctacgcgttccagagcccctccaaggacctgaaggctatcaacaaccgcctaaacaggcaagatcatcaaaagagcagttcgctagaggtttgctggtccagtttccaaagcaacagataaactgatgcccagatcgatcacctgcagtgtgtccggcgggaagaaagtcagcggccggctgaacttcgacgtcgtcagcgatctggtcgtggccagtagcctcggcagtgaccgtgacgccaagcctgcggccgatcctgccaagacgacgccggtgaagtgcgagccatctgactcgtgatcgtcgtcgactctgatgaggcccttgttatagattgttatgtttcagatactcgtgagttagtagatggtaactagacgaggaggcccttgtttctgtttgcgtcttttctttttttgacgtgggaaacatctctgcgagcagctctacgttgtgtaaaatatatataaagaaagctgccccgatggctccccttaacccaactcgcgttgtagggagatgacaagcaccatggccatgtaacttcatagaggttttgagagagctgtgtaaatgcaagatggccatgtatcaacagcggatattttgttcgtggccgttttactgtcaggtggcggcggcctgtcagcagcgcgtccctgactggttcgtaaatggacacctgccattactgttcttgtacatgcccatcgcctcgcggtgcaaggattcaaccagagtgccggccgtgccgatgtcaatgttaaaaaaggcgacgacgaactattccgtccgggagaacacgtctccgttggttttttttgacggccgtgccgatgtcaatgttcaaaaaggcgacgacgaactattccgtccgggagaacacgtctccgttgtttttttttgacgaaggggcgaagcctctatttcatgtaatacccactttgtaagaaaagtctaaaaagagaaattatattactttatagctatatgtgttattcatgtttatcgttttacgtgaac

SEQ ID NO: 94329 - DNA, 3853 bp, Zea Mays
ccaacatccgcctcagattcccgtccatcgttcgtctccgctgtttcccgtccctcgtcctccgccgaaaccctagcagagctcctcctccgccttccctccggtcgccggagtgcctggtccggtcacgggggtggtttcgaggcctggattggcggagtgtttggaaggaggcaggggcgggacagtaggaatacataaattttctaggttttcagccgccctatgcctgacgcatccacgcgcccacgcctgtctccgcacacacgctgccacgcacaggcaccgctcgtccgctccagctcttgcgtcgcacggacagacacagctccaccctccatagctcctcttgccgctgcttgtgcgccggatcaccgcccccggcctgagtcttcggacagtgcgtccgcggcagagcatctgcggcctgccccctgcgggcggcggcgccagtgcggctcgccccctctggccgtcttggcctgattggaccgagaaccaggaggagggacatggaggggttcgccaagccgtccacgagctcggggtctggggtcacggttagggcctccgtcgccgcggcctccatagaggagaggttcgccgatctgtgcaaggccaagctgggactggacgagagcacgacgaggcaggcaatgcagctcttgaaggagaccaataacattctcaagtccagcatgtcttccttgggcggcggatcgcccgaggagatcgagaggttctggtctgcctgtgttctgtactgtgtgtcaaggctcagtaaagcggggaggtcgaaggaagatggcagtgtctcactttgccagattctgagggcatctaagctgaacattgtggattttttcaaggagatgccacagttctgcataaaggttgcacacattttgactggcctatatggttcagattgggaaaaaaggcttgagttgaaggaactgcaagcgaatgttgtccatttaagcttgctaagcagttactacaaacgtgcataccaggagctattcttgtcaaatgatggcaagagttcagacaattcttcagaatcaaataaccaagaggcttctgattattatcgctttggatggttgctctttttagtcctaagaatccaaacattcagcagattcaaggatcttgtgacatccacgaacgaactggtttctgtgttggctgtacttatcattcatgttcctgtgcgactaaggaatttcgatataaaggattcatcctactttggtaagaagtcagataggggagtcagtcttattgcttctctttgtgaaaaacatcatacctcagaagatgagttgagcaaagcactggagaagacaaatactctcataatggatattctgaaaaagaagccatgcccagctacttcagcatgccaacaggataatttgtctttcatcgatccagaaggcttgacagtttttaaggatttgcttcagggagactcattgaaaccaagtctgataatcctggaaaaggaatatgaaaatgcaattaacacaaaaggtgagctagatgagcgcatgtttgctaatgatgaggacagtttacttggtagtggaagcctttcaggtggagccattaatttaccaggcacaaagagaaagtatgatgttatggcctcacctgcaaaatcaatatcaagcccaaatccaatgtctcctccacgcttttgtctatctcctaaaggaaacggcttttgcaactcaaagatggctcctagcactccagtgagcacagccatgacaactgccaagtggcttcggaatacagtatctccccttccatcaagaccttctggggaactgttgcgcttcttctcggcctgtgacaaggatctaacagatgacattgcacacagagctgggattatacttggagccatattcacgagcagttcttttggtgaacgaatctgtactagtatgcgaagcgcaagtaggatggatgctatctggacagagcaaagaaaaatggaagctcttaagctatattatagggtcctcgaatctatgtgtagggcagagtcacagatcttgagtgggaacaatcttacatcacttttgtctaatgaacgtttccatcggtgtatgattgcatgttctgcggagttagttcttgcaactcacaagactgtcactatgatgttcccagctgtgctggagaagactggcattacagcatttgacttgagtaaagtcatagagggttttgttcggcatgaagatacactcccaagagagttaaagcgccatctgaattctcttgaggaacggcttctggaaagcatggcatgggagaaagggtcatcaatgtacaattccttaatcgttgcgaggccggcactgtctgtagaaataagccggttaggtttactggctgaaccaatgccatcgcttgatgcaattgcagcacatcataacatctcattgggtggcctgccacctcttcccttccagaaacaggagcgtttgcaagacaaagatgaagtcaggtctcccaaaagggcatgcactgagaggagaaacgtgctggtggacagcaattcattgcggtcaccagtgaaggatattattaaaccaaagttaccacctctccaatcagcttttgcaagtccaacaaggccgaatcctgcagcgggaggcgaaacgtgtgcagagacaggaataggcgtgttctttagcaagatatcgaagctcgcagccattagaatcagaagtctctgtgaaagactgcagcttccccagcaagttctggaacgggtgtattcccttgtgcagcaaatccttagccaacagactggccttttcttcaacaggcacattgaccagatcatactatgcagcatatatggagttgccaagatctctcaactggaactttcattcaaggagattattttcggctacaggaaacaacctcagtgcaagccacaagttttccgaagcgtctatgttcattggcccccaagaagccgtaacgggaaaacaggagaagaccacgtcgacatcatcactttctacaacgaagtattcattcctgccgtcaagtccttgttggtggaggtagggcctggcgccagcgccagtccaaagaagaaagaagaggaaaaaggtcctgctgatggtccattcccagaatctccccggctggctcggttcccgaacctccccgacatgtctccaaagaaggtttctgctacccataacgtgtacgtctcaccgctacggtcatcgaagatggacactcttctgtccccgagctccaagagctactacgcgtgcgtcggcgagagcacctacgcgttccagagcccctccaaggacctgaaggctatcaacaaccgcctaaacagtgtgtccggcgggaagaaagtcagcggccggctgaacttcgacgtcgtcagcgatctggtcgtggccagtagcctcggcagtgaccgtgacgccaagcctgcggccgatcctgccaagacgacgccggtgaagtgcgagccatctgactcgtgatcgtcgtcgactctgatgaggcccttgttatagattgttatgtttcagatactcgtgagttagtagatggtaactagacgaggaggcccttgtttctgtttgcgtcttttctttttttgacgtgggaaacatctctgcgagcagctctacgttgtgtaaaatatatataaagaaagctgccccgatggctccccttaacccaactcgcgttgtagggagatgacaagcaccatggccatgtaacttcatagaggttttgagagagctgtgtaaatgcaagatggccatgtatcaacagcggatattttgtt

SEQ ID NO: 94330 - DNA, 3856 bp, Zea Mays
ccaacatccgcctcagattcccgtccatcgttcgtctccgctgtttcccgtccctcgtcctccgccgaaaccctagcagagctcctcctccgccttccctccggtcgccggagtgcctggtccggtcacgggggtggtttcgaggcctggattggcggagtgtttggaaggaggcaggggcgggacagtaggaatacataaattttctaggttttcagccgccctatgcctgacgcatccacgcgcccacgcctgtctccgcacacacgctgccacgcacaggcaccgctcgtccgctccagctcttgcgtcgcacggacagacacagctccaccctccatagctcctcttgccgctgcttgtgcgccggatcaccgcccccggcctgagtcttcggacagtgcgtccgcggcagagcatctgcggcctgccccctgcgggcggcggcgccagtgcggctcgccccctctggccgtcttggcctgattggaccgagaaccaggaggagggacatggaggggttcgccaagccgtccacgagctcggggtctggggtcacggttagggcctccgtcgccgcggcctccatagaggagaggttcgccgatctgtgcaaggccaagctgggactggacgagagcacgacgaggcaggcaatgcagctcttgaaggagaccaataacattctcaagtccagcatgtcttccttgggcggcggatcgcccgaggagatcgagaggttctggtctgcctgtgttctgtactgtgtgtcaaggctcagtaaagcggggaggtcgaaggaagatggcagtgtctcactttgccagattctgagggcatctaagctgaacattgtggattttttcaaggagatgccacagttctgcataaaggttgcacacattttgactggcctatatggttcagattgggaaaaaaggcttgagttgaaggaactgcaagcgaatgttgtccatttaagcttgctaagcagttactacaaacgtgcataccaggagctattcttgtcaaatgatggcaagagttcagacaattcttcagaatcaaataaccaagaggcttctgattattatcgctttggatggttgctctttttagtcctaagaatccaaacattcagcagattcaaggatcttgtgacatccacgaacgaactggtttctgtgttggctgtacttatcattcatgttcctgtgcgactaaggaatttcgatataaaggattcatcctactttggtaagaagtcagataggggagtcagtcttattgcttctctttgtgaaaaacatcatacctcagaagatgagttgagcaaagcactggagaagacaaatactctcataatggatattctgaaaaagaagccatgcccagctacttcagcatgccaacaggataatttgtctttcatcgatccagaaggcttgacagtttttaaggatttgcttcagggagactcattgaaaccaagtctgataatcctggaaaaggaatatgaaaatgcaattaacacaaaaggtgagctagatgagcgcatgtttgctaatgatgaggacagtttacttggtagtggaagcctttcaggtggagccattaatttaccaggcacaaagagaaagtatgatgttatggcctcacctgcaaaatcaatatcaagcccaaatccaatgtctcctccacgcttttgtctatctcctaaaggaaacggcttttgcaactcaaagatggctcctagcactccagtgagcacagccatgacaactgccaagtggcttcggaatacagtatctccccttccatcaagaccttctggggaactgttgcgcttcttctcggcctgtgacaaggatctaacagatgacattgcacacagagctgggattatacttggagccatattcacgagcagttcttttggtgaacgaatctgtactagtatgcgaagcgcaagtaggatggatgctatctggacagagcaaagaaaaatggaagctcttaagctatattatagggtcctcgaatctatgtgtagggcagagtcacagatcttgagtgggaacaatcttacatcacttttgtctaatgaacgtttccatcggtgtatgattgcatgttctgcggagttagttcttgcaactcacaagactgtcactatgatgttcccagctgtgctggagaagactggcattacagcatttgacttgagtaaagtcatagagggttttgttcggcatgaagatacactcccaagagagttaaagcgccatctgaattctcttgaggaacggcttctggaaagcatggcatgggagaaagggtcatcaatgtacaattccttaatcgttgcgaggccggcactgtctgtagaaataagccggttaggtttactggctgaaccaatgccatcgcttgatgcaattgcagcacatcataacatctcattgggtggcctgccacctcttcccttccagaaacaggagcgtttgcaagacaaagatgaagtcaggtctcccaaaagggcatgcactgagaggagaaacgtgctggtggacagcaattcattgcggtcaccagtgaaggatattattaaaccaaagttaccacctctccaatcagcttttgcaagtccaacaaggccgaatcctgcagcgggaggcgaaacgtgtgcagagacaggaataggcgtgttctttagcaagatatcgaagctcgcagccattagaatcagaagtctctgtgaaagactgcagcttccccagcaagttctggaacgggtgtattcccttgtgcagcaaatccttagccaacagactggccttttcttcaacaggcacattgaccagatcatactatgcagcatatatggagttgccaagatctctcaactggaactttcattcaaggagattattttcggctacaggaaacaacctcagtgcaagccacaagttttccgaagcgtctatgttcattggcccccaagaagccgtaacgggaaaacaggagaagaccacgtcgacatcatcactttctacaacgaagtattcattcctgccgtcaagtccttgttggtggaggtagggcctggcgccagcgccagtccaaagaagaaagaagaggaaaaaggtcctgctgatgtaggtccattcccagaatctccccggctggctcggttcccgaacctccccgacatgtctccaaagaaggtttctgctacccataacgtgtacgtctcaccgctacggtcatcgaagatggacactcttctgtccccgagctccaagagctactacgcgtgcgtcggcgagagcacctacgcgttccagagcccctccaaggacctgaaggctatcaacaaccgcctaaacagtgtgtccggcgggaagaaagtcagcggccggctgaacttcgacgtcgtcagcgatctggtcgtggccagtagcctcggcagtgaccgtgacgccaagcctgcggccgatcctgccaagacgacgccggtgaagtgcgagccatctgactcgtgatcgtcgtcgactctgatgaggcccttgttatagattgttatgtttcagatactcgtgagttagtagatggtaactagacgaggaggcccttgtttctgtttgcgtcttttctttttttgacgtgggaaacatctctgcgagcagctctacgttgtgtaaaatatatataaagaaagctgccccgatggctccccttaacccaactcgcgttgtagggagatgacaagcaccatggccatgtaacttcatagaggttttgagagagctgtgtaaatgcaagatggccatgtatcaacagcggatattttgtt

SEQ ID NO: 94331 - DNA, 255 bp, Zea Mays
atggaggcgggcgggctcggcctgttcgaatggtttccgggctggcaactcgcctgctcagggggcaaggaggaagaggaacagagcagagcagcggagggcggcgtctgtctgagctgggttctggggaaggcaaatcatttcgccattttcagctggagcggcggagtcgcctttctacctgtagcccccctgtcgacctccgccggcaccgctcgcctcgccctttccagctcccggcggttttctaaataa

SEQ ID NO: 94332 - DNA, 336 bp, Zea Mays
atggacgcggaggacgagcgtgacctgttgaagaagatacgggcgctggaggagggccaggccgagctcaagcgacaggtgtccaagctccagcggcgtccggaccgggaccgccgcggcggctcctcctcgtcgtcgcagcccgccgacgccgccaccgagtcctcgccatccagtcgctggggcaggtcgctcacgtcctcgacctccacgggaaggaacccgcggaacgccgagcgtctgaaccgctacacgtcggctgaagccgtcgggcaggacatcacgaggctgatcgtccacgccgacgacagtgttgccatttgcagaggatggtag

SEQ ID NO: 94333 - DNA, 1157 bp, Zea Mays
ggcagttggcaagcagcgagtggggggagacagccaactctctatcctcttcccccctcgtccatccccatcccaccgccttgctctcccctctccacttccagctgtccatggctgcagcagcgtgctcctctgcctcgccgctcctcctcccctcagggccgagacatgcgtcggcctccagggcgtggtttctcggcggcaggagcagggcgctgagatcagaggcgccgtgctgctgcaaggccgccgccgcccgtggaagcgctccgcaatgcgggacggtcggtggtggcagcagcagcacccggagggggctgctaggcgtggccctgggagcctctgccttggggctggccgcgtttgacgccgtcgccgccgggttgccgccggaggagaagcccaagctctgcgacgccgcctgcgaaggcgagctcgaaaatgttggttgagcctccgtgcgtatattatcctttgtttatgcttgttggtgtttttccgttgacgggtgaaaaggattaaaggagtagtgatggcaacaattgataggggctggtttcagaaaattgggcacctgcctgcctggaccagtcagtaaatatttccttcaattctgcaaattttgaggtctcaacgtattcagcaacatacaatttctagagcaatgcgtagctggaatttgactatttgagacacgatcacctccccatacatcagtatggagagacatgccttgttccaaaatgacatatagtgagttaaatgctaaatctgagtgacataatgatatccatccaggtgcctatggtaactacagaatccggactgcagtacaaggatatcaaagtgggcgaagggcctagcccacccgttggtttccaggttgcagcaaattatgttgctatggtgccaactgggcagatattcgacagttcgctggagaaaggtcagccctacatattccgtgttggatcagggcaggtgatcaaggggcttgatgagggaattttgtcgatgaaggttggaggactacgtcggctgtacatacctgggccattagcgttcccctaagggtctttactttctgctcctgggaaggccaagagtacccccaaccagccctgtcgttgtcgacgtcaatttactgtacataccag

SEQ ID NO: 94334 - DNA, 808 bp, Zea Mays
acgcttggcagttggcaagcagcgagtggggggagacagccaactctctatcctcttcccccctcgtccatccccatcccaccgccttgctctcccctctccacttccagctgtccatggctgcagcagcgtgctcctctgcctcgccgctcctcctcccctcagggccgagacatgcgtcggcctccagggcgtggtttctcggcggcaggagcagggcgctgagatcagaggcgccgtgctgctgcaaggccgccgccgcccgtggaagcgctccgcaatgcgggacggtcggtggtggcagcagcagcacccggagggggctgctaggcgtggccctgggagcctctgccttggggctggccgcgtttgacgccgtcgccgccgggttgccgccggaggagaagcccaagctctgcgacgccgcctgcgaaggcgagctcgaaaatgtgcctatggtaactacagaatccggactgcagtacaaggatatcaaagtgggcgaagggcctagcccacccgttggtttccaggttgcagcaaattatgttgctatggtgccaactgggcagatattcgacagttcgctggagaaaggtcagccctacatattccgtgttggatcagggcaggtgatcaaggggcttgatgagggaattttgtcgatgaaggttggaggactacgtcggctgtacatacctgggccattagcgttcccctaagggtctttactttctgctcctgggaaggccaagagtacccccaaccagccctgtcgttgtcgacgtcaatttactgtacataccag

SEQ ID NO: 94335 - DNA, 952 bp, Zea Mays
gtcagaattaaagttgcaaggataatgagatcagaagaactcggcattggtagaaaccaaaccttttcttaataaaaaaaaaactagtttactccttttgttcgagaaacgcttaattgtctgtctgttctgattactgcttggtgaatcatgcgataggattataaacaatagacagtcagcagcaagatcaaaagaaaggaagatgaggtacatcgctgaacttgagcggaaggtacagttcatgcagagagacgccacagcgttggcgacccagctggcattgctgcagagagacacagctgggctgactgtggagaacagcgagctgaagatacgtctgcagagcacagagcaacagatccacctacaagacgctctgaacgaggccctgaaatcggagctgcagcggctgaaggtggcaacggggcagatgggcagccagatgatgggcttcgccggaccgccgcacccgttcggtggagggaaccagcaggccttccaccaccccagccaagcagtgccgccgttcctggcgatgcagcagcagcagcagcacccgcaccatccgctgcaccctctgcagcagacccaggcgctcagcctcaacatgaaaggcccgccagcggctcctcctgctggccagtggcagtggggcggtgatgcgtggtcggagagcagcagcagctgattcggcggcgagctgctgtcgtcttgcaactcggaagaggttgtggatgtatgccatgtccggatgattgaggatacaggatatactgtacgcatgctcggtaaaagaagcgatacatgcaagtatgaagggcgccgcagatatgagtttcgtttcgttctgtgtacctttgcttcagacgcaggatgtgtggatgaaaacgatgctcgaaagaaagaaagaaagaaaaaacccttgttcctgcggtttatatactttgat

SEQ ID NO: 94336 - DNA, 1585 bp, Zea Mays
atgctccattctcatccaaaattgagtcacacgaatccccaagtctgagaaaaagaggccaagaagaaaaaaagggttctttccgatcgtccttctcttctatttggtttggacactgaaatcacagctttcggagctttatgtggaacgacgtatttccgtcaaggcgtttttttaggagattcttgtcggcaagaccatgaacatggataagacgccgatcgcaggcggcggcggcggcggcggcgacgacgacgacgacgccggcaatggcccggagattcaatcctcgtccgacgcggtggcgccttcgccgactcctcacacggagtgcgacatcagcagcatgccggactccccgctgcgcaagcccggccaccggcgcgcgctctcggagatcatcggcctccccgacgacctggacctcggcgcccccggcgccggcgacgcgcccgcgctgtcggacgagaacgaggaggagctcttctccatgttcctcgacgtggataagctgaattcgcggtgcgggtcgtcggagtcggagtcgtcatcgtgcgccatggccggcgggggtcggggagaggcaacggaggcgtctgcggcgcctggggctgagcagctggggcagaggcaccatcacaggcactcgatggacgcctcgagctccatcaacgcagagcatctgtttgggacgacggcgatggagggtgcgtcgccggcggaggtgaaaagggcaatgtccgctgcaaagcttgccgagctagcgctcatcgatccaaagaaggcaaaaaggattataaacaatagacagtcagcagcaagatcaaaagaaaggaagatgaggtacatcgctgaacttgagcggaaggtacagttcatgcagagagacgccacagcgttggcgacccagctggcattgctgcagagagacacagctgggctgactgtggagaacagcgagctgaagatacgtctgcagagcacagagcaacagatccacctacaagacgctctgaacgaggccctgaaatcggagctgcagcggctgaaggtggcaacggggcagatgggcagccagatgatgggcttcgccggaccgccgcacccgttcggtggagggaaccagcaggccttccaccaccccagccaagcagtgccgccgttcctggcgatgcagcagcagcagcagcacccgcaccatccgctgcaccctctgcagcagacccaggcgctcagcctcaacatgaaaggcccgccagcggctcctcctgctggccagtggcagtggggcggtgatgcgtggtcggagagcagcagcagctgattcggcggcgagctgctgtcgtcttgcaactcggaagaggttgtggatgtatgccatgtccggatgattgaggatacaggatatactgtacgcatgctcggtaaaagaagcgatacatgcaagtatgaagggcgccgcagatatgagtttcgtttcgttctgtgtacctttgcttcagacgcaggatgtgtggatgaaaacgatgctcgaaagaaagaaagaaagaaaaaacccttgttcctgcggtttatatactttgat

SEQ ID NO: 94337 - DNA, 2602 bp, Zea Mays
gagcaggaagcggaaagccttccgcgcttttcaaagatcgtaggccgcacgcctgcagcagccgccgactcagggcgagcgttgagaggaggacgaagaagagactgaagaagagcagaccgaagtgaggccggaggaagggatcgggccttgcgggattcggcagtccatcacgaggtaaatgcggcgctaggagctgcagcgatggcgtcgctggtacccggggtcctcctcaagctcctgcagcacatgaacagcgacgtcaaggtcgcgggcgagcaccggtcgtcgctgctccaggtcgtcagcatcgtgcccgcgctcgccgggagcgacctgttcaccaaccaggggttctacctcaaggtgtccgactcgtcgcacgccacctacgtgtcgctgccggacgagcagcacgacctcatcctcagcgacgtcatccagctggggcagttcgtccatgtcgaccgtctcgaggcagccaccccggtgccgatcctcaggggggtcaggccggtcccgggccgccatgcctgcgtcggcagcccggaggatcttgtggtgaccagctcctccacttttcttcttggcagcggcaaggccgcccaagcctcctccaccaatggtagttccaaggatgccggtgccctgtcgctagagaaagagcagggcaggttagagaagatcaatgctcctcccaagagcaacggcacagagagcaagaagccccagctcaccaagtcgaactccaacctctcgaaacaggcgctcaatggcctcctctcggacaagaaggacgtggttagctcgaaggcaaaatcaaccagcgctaggtcgacgccgtcttccccgaccagcgcccattctctgcctgcgtcgttcgataaattctcgagtgacatgaaacagagagtgagaaccaaaggagcagagaaatcgccgccgtcaaggctgtccttgctagaaaaggctgcgtctgtgttgaaggccactacggcagggaggaagtcctccctgggtaactccattagtaacaccttgttgagcttcgaatctgggcccaaggccttgagaagaagctgggaagggaaagcagatgcaaaggacaaaggcaattcggattcaaagcctgccaaagctgaaaagaagtctgaaaatcgaagctcttcgactcccagacgaaaatcattagcagaagagaaaccatcgaataaggatgacagtaagattctgactccacccaggaagagctcagcgagtgctcctgcagacgattccgacaaagttgtgaacaacaagctttcttctcctataaggaggacatcaggggttttaaataacccgaatgtcactaatctagtgaaggttgctgcaagtaacaggaaactgacagatgctagcgcttcgtggacaacgcttcctccatcactcgttaaactagggaaggagcttctgaagtacagggatgcagcacaaatggctgctgttgaagccatgcaagaagcttctgcggcagagagcatcgttcgatgtttaagctcgtacgcggaggtgagctcgtcggcggaggagcagaacccacagcaggctgtcgagcagttcctcgctctgcatggagcaatctctcgagccaccatcgtcaccgagtctctaaccaaggccacgaccacggtctccaccgcgacttcaccagatcaatcagcagccggcgatgcgtcaacagccgacgaggaaaccatggctgtcgcggcggagcgccgccgccgggcagcctcctgggtcggcgccggcctcgccaccgatctctccgccttctccctctacaacctgaaacccgccccagccagtgtcatctccccgctggccgtcgtgctcgtggacgagtcagccaagccggcggcggcgaaggcagtgccgcccgcgaagtcgcggctgtccccggcgaaggggaggttgaaagctggttccgcggccgccgccgccgccgccgccgctgcggcggcggcagcagtgcctccgcctgaatgggagcggggaggcggcgcggaggagcggggcgagcttgcgcggcggctcggggacgaggcacgggcgtggttcctggcgttcgtggagcggttcctggacgcggacgttgcggcggccgcgccgtgggaccgcgaccgcgccgcgaggatgctcccgcagcttaagcgcgtcaacgactggctgagcgagatcgggaagtcggcagagatggcgccgcatccgccaccggaagcggacggcgaagcggcggcacccactgccaacggcggcgcggccagcggcgtgccggaggagacgatagagaggctcaggaagaagatctacgagtacctcctcaccaacgtggactctgctgccgccgtgctcggcggctgcgagatggcgccggcaccggtggcgaacgggaagaaggggtgacgatagtgggccgcgaaggaaggcccaattgggccgttaacttggctgagccaaaacatgggccggtctggatttaaatgtaaaaatgggctggattgagattgcagtggttgttttggtacttttttctggtgttacagaaagtaaaaaaaatata

SEQ ID NO: 94338 - DNA, 2585 bp, Zea Mays
gagcaggaagcggaaagccttccgcgcttttcaaagatcgtaggccgcacgcctgcagcagccgccgactcagggcgagcgttgagaggaggacgaagaagagactgaagaagagcagaccgaagtgaggccggaggaagggatcgggccttgcgggattcggcagtccatcacgaggtaaatgcggcgctaggagctgcagcgatggcgtcgctggtacccggggtcctcctcaagctcctgcagcacatgaacagcgacgtcaaggtcgcgggcgagcaccggtcgtcgctgctccaggtcgtcagcatcgtgcccgcgctcgccgggagcgacctgttcaccaaccaggggttctacctcaaggtgtccgactcgtcgcacgccacctacgtgtcgctgccggacgagcagcacgacctcatcctcagcgacgtcatccagctggggcagttcgtccatgtcgaccgtctcgaggcagccaccccggtgccgatcctcaggggggtcaggccggtcccgggccgccatgcctgcgtcggcagcccggaggatcttgtggtgaccagctcctccacttttcttcttggcagcggcaaggccgcccaagcctcctccaccaatggtagttccaaggatgccggtgccctgtcgctagagaaagagcagggcaggttagagaagatcaatgctcctcccaagagcaacggcacagagagcaagaagccccagctcaccaagtcgaactccaacctctcgaaacaggcgctcaatggcctcctctcggacaagaaggacgtggttagctcgaaggcaaaatcaaccagcgctaggtcgacgccgtcttccccgaccagcgcccattctctgcctgcgtcgttcgataaattctcgagtgacatgaaacagagagtgagaaccaaaggagcagagaaatcgccgccgtcaaggctgtccttgctagaaaaggctgcgtctgtgttgaaggccactacggcagggaggaagtcctccctgggtaactccattagtaacaccttgttgagcttcgaatctgggcccaaggccttgagaagaagctgggaagggaaagcagatgcaaaggacaaaggcaattcggattcaaagcctgccaaagctgaaaagaagtctgaaaatcgaagctcttcgactcccagacgaaaatcattagcagaagagaaaccatcgaataaggatgacagtaagattctgactccacccaggaagagctcagcgagtgctcctgcagacgattccgacaaagttgtgaacaacaagctttcttctcctataaggaggacatcaggggttttaaataacccgaatgtcactaatctagtgaaggttgctgcaagtaacaggaaactgacagatgctagcgcttcgtggacaacgcttcctccatcactcgttaaactagggaagggatgcagcacaaatggctgctgttgaagccatgcaagaagcttctgcggcagagagcatcgttcgatgtttaagctcgtacgcggaggtgagctcgtcggcggaggagcagaacccacagcaggctgtcgagcagttcctcgctctgcatggagcaatctctcgagccaccatcgtcaccgagtctctaaccaaggccacgaccacggtctccaccgcgacttcaccagatcaatcagcagccggcgatgcgtcaacagccgacgaggaaaccatggctgtcgcggcggagcgccgccgccgggcagcctcctgggtcggcgccggcctcgccaccgatctctccgccttctccctctacaacctgaaacccgccccagccagtgtcatctccccgctggccgtcgtgctcgtggacgagtcagccaagccggcggcggcgaaggcagtgccgcccgcgaagtcgcggctgtccccggcgaaggggaggttgaaagctggttccgcggccgccgccgccgccgccgccgctgcggcggcggcagcagtgcctccgcctgaatgggagcggggaggcggcgcggaggagcggggcgagcttgcgcggcggctcggggacgaggcacgggcgtggttcctggcgttcgtggagcggttcctggacgcggacgttgcggcggccgcgccgtgggaccgcgaccgcgccgcgaggatgctcccgcagcttaagcgcgtcaacgactggctgagcgagatcgggaagtcggcagagatggcgccgcatccgccaccggaagcggacggcgaagcggcggcacccactgccaacggcggcgcggccagcggcgtgccggaggagacgatagagaggctcaggaagaagatctacgagtacctcctcaccaacgtggactctgctgccgccgtgctcggcggctgcgagatggcgccggcaccggtggcgaacgggaagaaggggtgacgatagtgggccgcgaaggaaggcccaattgggccgttaacttggctgagccaaaacatgggccggtctggatttaaatgtaaaaatgggctggattgagattgcagtggttgttttggtacttttttctggtgttacagaaagtaaaaaaaatata

SEQ ID NO: 94339 - DNA, 1508 bp, Zea Mays
gagaagcaccacgcctcccaggctcccagcgcgcacgcaccagggtccaggagaggaggacaccgtcgcctcctggttggttcatctcgtcagtcgtcaccgcctcctgcagccaaccggcggggattcctgtcctggatgcgacaaggccagcaggagagaccctccccctctccttcttctccctgagcaggaagcggaaagccttccgcgcttttcaaagatcgtaggccgcacgcctgcagcagccgccgactcagggcgagcgttgagaggaggacgaagaagagactgaagaagagcagaccgaagtgaggccggaggaagggatcgggccttgcgggattcggcagtccatcacgaggtaaatgcggcgctaggagctgcagcgatggcgtcgctggtacccggggtcctcctcaagctcctgcagcacatgaacagcgacgtcaaggtcgcgggcgagcaccggtcgtcgctgctccaggtcgtcagcatcgtgcccgcgctcgccgggagcgacctgttcaccaaccaggggttctacctcaaggtgtccgactcgtcgcacgccacctacgtgtcgctgccggacgagcagcacgacctcatcctcagcgacgtcatccagctggggcagttcgtccatgtcgaccgtctcgaggcagccaccccggtgccgatcctcaggggggtcaggccggtcccgggccgccatgcctgcgtcggcagcccggaggatcttgtggtgaccagctcctccacttttcttcttggcagcggcaaggccgcccaagcctcctccaccaatggtagttccaaggatgccggtgccctgtcgctagagaaagagcagggcaggttagagaagatcaatgctcctcccaagagcaacggcacagagagcaagaagccccagctcaccaagtcgaactccaacctctcgaaacaggcgctcaatggcctcctctcggacaagaaggacgtggttagctcgaaggcaaaatcaaccagcgctaggtcgacgccgtcttccccgaccagcgcccattctctgcctgcgtcgttcgataaattctcgagtgacatgaaacagagagtgagaaccaaaggagcagagaaatcgccgccgtcaaggctgtccttgctagaaaaggctgcgtctgtgttgaaggccactacggcagggaggaagtcctccctgggtaactccattagtaacaccttgttgagcttcgaatctgggcccaaggccttgagaagaagctgggaagggaaagcagatgcaaaggacaaaggcaattcggattcaaagcctgccaaagctgaaaagaagtctgaaaatcgaagctcttcggtaagtgtcaacaatgccatgtcatatacagcatgggtatataatacttgtgaagttttcatcaatgtaggatcaacaacatcaattctgaacgttttcatcaatatatgatcaagaacctgaccatatgtgtctcttgttaggaacatgt

SEQ ID NO: 94340 - DNA, 108 bp, Zea Mays
ggtcagccggacacgccaaagaagcggtctgctgggctagcccgagttcgagtcgcgacatcaacttcttaagtgaaaaagtcaggggacgtctctctccttggtcga

SEQ ID NO: 94341 - DNA, 1345 bp, Zea Mays
ctttcaccgtggaagagccctcgaccaacaggtccaaccagcagcgagcgaggacctgggcattgttggaatcgcttcctgtctagggtttcacccgcgtgccttatatatcctatcacttcccgcccagccgccatctccgcatttccatcttcccgtgggatcccagccgccgccgcaagaagaagagctcggggacttccaggtgtcgcgagaagatgccgaagcagatccacgagatcaaggatttccttctcaccgcgaggaggaaggatgcccgatcagtgaagatcaagaggagcaaggatgttgtcaagttcaaggtccgctgctccaagtacttgtacaccctctgcgtattcgacgctgagaaggcaaacaagttgaagcaatctctccccccaggcttgagcgtccaggaggtttgattggatacatggcaacgtcgggtcgaacctctagggcatctttatcattagcagagcatgctgtttatgtagttttggaccttaagctattagacatgtcagtgttggatttgtggatcttgaatttttggagaaataccaatttgcctcgttcaaggacgcacctttcagttttttcttatttaactgcatgttccccttcgcaacttagctctgcaaacttactagatttttgtggttttatatgtatcccatgtggataagtagcagaaacatggctaattcgcccatccatcgacatgtcaagatgaactcatattttgggggctgatgctattaaaaattttatcataaactcagtgttcattggcattagaaaatttatgaggaggctatctccagcagtcatcctctattttattcactgtttcaaacttcacttaaacagtgtcatatacagttttgtgtcactgttttacactatccactgaggacagccgcaaatgagaaggatgaagattactgacgcaatttacaaaaaaaacatcatgcgaatcaggtgtcccttttctccctgcttatactaaaagcatactaggtaattgctggtttacacagatctgtttaaagccataaaagataacgatgacaaaaccattccacattcccaaggctaccaaactacctgcctagaaaaagaagcataagaaagaagctaaacaagctagatctttagcaaaagaaccccgatcttcatgaagtgttgtttccctcagaatccgctgatgatcaccatgtcttcaatcctttcgtaggacaacatcttccatctggcctgcacgtccttcgtcttaaacatcttcttccactgtttcaagaatcccacggccttacaaccggacctttctttcaaagag

SEQ ID NO: 94342 - DNA, 1069 bp, Zea Mays
ctttcaccgtggaagagccctcgaccaacaggtccaaccagcagcgagcgaggacctgggcattgttggaatcgcttcctgtctagggtttcacccgcgtgccttatatatcctatcacttcccgcccagccgccatctccgcatttccatcttcccgtgggatcccagccgccgccgcaagaagaagagctcggggacttccaggtgtcgcgagaagatggtcctagtgttgccgacatcgctgacggacccagacaatgttattctgctctggttttgtacaatctctgtccgaagcagatccacgagatcaaggatttccttctcaccgcgaggaggaaggatgcccgatcagtgaagatcaagaggagcaaggatgttgtcaagttcaaggtccgctgctccaagtacttgtacaccctctgcgtattcgacgctgagaaggcaaacaagttgaagcaatctctccccccaggcttgagcgtccaggaggtttgattggatacatggcaacgtcgggtcgaacctctagggcatctttatcattagcagagcatgctgtttatgtagttttggaccttaagctattagacatgtcagtgttggatttgtggatcttgaatttttggagaaataccaatttgcctcgttcaaggacgcacctttcagttttttcttatttaactgcatgttccccttcgcaacttagctctgcaaacttactagatttttgtggttttatatgtatcccatgtggataagtagcagaaacatggctaattcgcccatccatcgacatgtcaagatgaactcatattttgggggctgatgctattaaaaattttatcataaactcagtgttcattggcattagaaaatttatgaggaggctatctccagcagtcatcctctattttattcactgtttcaaacttcacttaaacagtgtcatatacagttttgtgtcactgttttacactatccactgaggacagccgcaaatgagaaggatgaagattactgacgcaatttacaaaaaaaacatcatgcgaatcaggtgtccctttt

SEQ ID NO: 94343 - DNA, 1067 bp, Zea Mays
ctttcaccgtggaagagccctcgaccaacaggtccaaccagcagcgagcgaggacctgggcattgttggaatcgcttcctgtctagggtttcacccgcgtgccttatatatcctatcacttcccgcccagccgccatctccgcatttccatcttcccgtgggatcccagccgccgccgcaagaagaagagctcggggacttccaggtgtcgcgagaagatggtcctagtgttgccgacatcgctgacggacccagacaatgttattctgctctggttttgtacaatctctccgaagcagatccacgagatcaaggatttccttctcaccgcgaggaggaaggatgcccgatcagtgaagatcaagaggagcaaggatgttgtcaagttcaaggtccgctgctccaagtacttgtacaccctctgcgtattcgacgctgagaaggcaaacaagttgaagcaatctctccccccaggcttgagcgtccaggaggtttgattggatacatggcaacgtcgggtcgaacctctagggcatctttatcattagcagagcatgctgtttatgtagttttggaccttaagctattagacatgtcagtgttggatttgtggatcttgaatttttggagaaataccaatttgcctcgttcaaggacgcacctttcagttttttcttatttaactgcatgttccccttcgcaacttagctctgcaaacttactagatttttgtggttttatatgtatcccatgtggataagtagcagaaacatggctaattcgcccatccatcgacatgtcaagatgaactcatattttgggggctgatgctattaaaaattttatcataaactcagtgttcattggcattagaaaatttatgaggaggctatctccagcagtcatcctctattttattcactgtttcaaacttcacttaaacagtgtcatatacagttttgtgtcactgttttacactatccactgaggacagccgcaaatgagaaggatgaagattactgacgcaatttacaaaaaaaacatcatgcgaatcaggtgtccctttt

SEQ ID NO: 94344 - DNA, 2084 bp, Zea Mays
ctttcaccgtggaagagccctcgaccaacaggtccaaccagcagcgagcgaggacctgggcattgttggaatcgcttcctgtctagggtttcacccgcgtgccttatatatcctatcacttcccgcccagccgccatctccgcatttccatcttcccgtgggatcccagccgccgccgcaagaagaagagctcggggacttccaggtgtcgcgagaagatggtaagtatccctcgagtccccttcacttcttctcgattttgttgccggtggattgttactgaaagggattggtcagattaggtcctagtgttgccgacatcgctgacggacccagacaatgttattctgctctggttttgtacaatctctgtgtaagtggctgtcgtggcttcgtattagctgtatcctaggttgaattgctgcgagcatggaaatcttataatgtcagttactgtattctggtgccatccggctctttataattgcacaacgtacgtttggcattgcgctgtttttgtagctacaagaattcgaaatgcactgactgatgtaataacaggttaaattgtaaaaaagacccaccattgtagatccaattgtatataaactaccactttaagttagcatagcatctgtgtggctgtttgttttcgtactagtggtaacgagtttttcttttttgccatcctgctagtattttgtagttaattgtcaagtatcaacctatctctttgctttgtctaatcgtctgtggaataaatctgcagccgaagcagatccacgagatcaaggatttccttctcaccgcgaggaggaaggatgcccgatcagtgaagatcaagaggagcaaggatgttgtcaagttcaaggtccgctgctccaagtacttgtacaccctctgcgtattcgacgctgagaaggcaaacaagttgaagcaatctctccccccaggtaatcacagctttaattgacatattatttatgttctagtataagaacaccattctggcagtattgtgttgaattaccatccacgctgccgacggtctattcagttatctatttttgttggattgatgccgttttctttgtcttaattagccgttaattagccgtcccagtgaagataaaattttcggtccaaagatggtcgaagaatggttttagcttcaagccagctgacacgtcatcttgattaatgggtggcttgtggctaaaactgttttttagaaccatccatgatggccaataatagctatgagatctgagggacttgtatgatcacttcctttatcagcttccactctgaaccattttgttcttgtttgtgtttcctgtttgatcagtctctgtcccattgaagaaaatattatttgaccatagatgaatggttgattagttttagcttcaagcctctgttgtctctactctttggcatataggcttgtggttaaaaccagtcgactcttaagttcattgatgatgggtaatagctatgagatccgagggacaaaattacctgtgtctttttgatctaatcctaattgtgcttgtatctttggtcatctgttttgtgattacagtttgccttccatttgttgtaagccctgcccaacttgatctgtcaaattttgtctgacatttaacgcacgactccactatgaagttctgacttttttgatgcttaattaatgtcgattgttgcaggcttgagcgtccaggaggtttgattggatacatggcaacgtcgggtcgaacctctagggcatctttatcattagcagagcatgctgtttatgtagttttggaccttaagctattagacatgtcagtgttggatttgtggatcttgaatttttggagaaataccaatttgcctcgttcaaggacgcacctttcagttttttcttatttaactgcatgttccccttcgcaacttagctctgcaaacttactagatttttgtggttttatatgtatcccatgtggataagtagcagaaacatggctaattcgcccatccatcgacatgtcaagatgaactcatattttgggggctgatgctattaaaaattttatcat

SEQ ID NO: 94345 - DNA, 518 bp, Zea Mays
caacctatctctttgctttgtctaatcgtctgtggaataaatctgcagccgaagcagatccacgagatcaaggatttccttctcaccgcgaggaggaaggatgcccgatcagtgaagatcaagaggagcaaggatgttgtcaagttcaaggtccgctgctccaagtacttgtacaccctctgcgtattcgacgctgagaaggcaaacaagttgaagcaatctctccccccaggcttgagcgtccaggaggtttgattggatacatggcaacgtcgggtcgaacctctagggcatctttatcattagcagagcatgctgtttatgtagttttggaccttaagctattagacatgtcagtgttggatttgtggatcttgaatttttggagaaataccaatttgcctcgttcaaggacgcacctttcagttttttcttatttaactgcatgttccccttcgcaacttagctctgcaaacttactagatttttgtggttttatatgtatcccatgtggataa

SEQ ID NO: 94346 - DNA, 1562 bp, Zea Mays
tgtatcttggaatcagctcatgaacttatggttattccctgttacttttttgtttttaaaaatcgcaggttgttgaagcgaatgtagctgaacatgtatcttgtgacgaacaacaaaaaatcttaaacgaacaggattcactgtcaaatatgaacaaccatattggaatagttgagcatctagagcaaaataccgaatccaaggatgaaagagctgcatctgataagcaacctgaacctgtatctaggcagcataaacatttgaactttcctccgttcactacccagattcacttgaaaaagagtgcaacagagaatcctaatgttgtaaatcaggttgatataatgaaatcagttgcaggtggttttagttcgcagttacctcgtgcaccaaaggaaccttctctcctagatgagagatctctattggcttgcattgtacgtgcagttcctgctgggactgagggtggaatcaggataagttcaactctgccaaataggcttgggaaaatgttggctccccttcactggcatgactataagaagcaatacgggaagctcgacgattttgtggctagtcatccagagctgtttgtgattgagggagacttcattcaccttcgtgatggagcacagcagattatttctgccactacagctgctgcaaaaatagctgctgcgacagcatcttctgcctcttactcatccttactgccttctgttgccgttactcctgtggcacaaaatactcggcaaaagaggaggcccgcagttgattccagatcatcaaatgcaattccctctggaaacggcttcacagatcaatttaacatcattcagggtgtcagcgacgtaacaatttcaggcaaagtaagaaatatccaagataatggcttcatagatgaagttcgcactgggcagccatccgtgctcacagctgctactgccaacggagcaagacatgacaaatgtgcaaataataccagacatggttatggtggaaaacaacaggggaggaccactgggacgacatacctttccagaagatgaaccaactttcactgggcgatgatgctgttggaattggaaaccatgcgagtggcgatgatgcggttggggaaaccatacgagtgacgatgctttggcttcgaaatgatggtgaagatgacctggattaaagttattctagattcattttttattttgcactattggtcttcacagagcctgtatggttgggggccttgttttggcaaagctgtactgatatatccctaccccaagaatcagaagcctgccaaagttttgcgactatgtacctcgtctgcgcttgtgtattgtggtgcacttgaatgatgcgaatgttatatcgaatccccgtccttgatcgtgatgttcttgaacgttcacctctgggaaattaactcgcatggtgagctgagctcgtgatcggtggcatggtcgatccaaggtcgggtgtcattgttgtatggtcgagctggacatgtaggctctgttactatttaggtaactatttagaccttattccaaaaagttagtaga

SEQ ID NO: 94347 - DNA, 2657 bp, Zea Mays
gatgctcagcacacttatatgatgcattgttctctcagttttttccagcctgtataatgataagacacagggagcaactgcatgagcgggagcaatacattcttgaactagaaatgaaactcaatgacaaggatagagaactaaatgctctgaagattgatcatcaaacggtgtgggcaaatcaagatcttattagagaacagaccaaagagctggcaactgtcagaagggaacgcgacaactctgaagctgaaagagcccaacatcttacacaaattcatgagctccaagaacatctgcgagaaaaagaaagccagttcattgcattagaggaacagcatagggctgctcaagacaacattctttacaaagatgagcagttgagggaagcccatgcttgggtatctcaagttcgagaaatggatgctttgcagtctcaatccctacaagttgagttacgtgagcgcatggagcaatttaatcaatattggattagctcccagcagcagtatgctgaaatgcagcggagtcttctccatacaatacaacaactccagcaagaattaactgaggcaagggaacagtctggtgcacaaaaagatggtccacaagtttctcgggaagggtcagctgaatcatcactagttcaaagcatgggaaacagcgtggcttcaaatggtagtgcaactgcagatgggaaccagcaattgttgaaaaataatggaagcgtggatgtctctgttcaggccaatagtgcctcagctgtacctgttccttcttccctactgggaatcggtggtccggctgcgcatatcgctgcgatgcatgcttttatgattcatcctcaaggcattcctcaacccttagtagcatcacccaactctggtgttcctcaatttggcagttttcagtctcagtctacaattcaaccaaattcacaatggccaaatcagcaggaagtacaaaatgtctcacaaccacaagatgaaacaaactatcagacatcccaatcagaccggactgttttacaacaaggcgctattaatactgatgagttgtcctcaaagccaagccaggatagtcagccagaccatcttaatgcccatgtgaaacaacagcagagccctgcaagtgcacctactgaatcaactcatgaacttactgttgttgaagcgaatgtagctgaacatgtatcttgtgacgaacaacaaaaaatcttaaacgaacaggattcactgtcaaatatgaacaaccatattggaatagttgagcatctagagcaaaataccgaatccaaggatgaaagagctgcatctgataagcaacctgaacctgtatctaggcagcataaacatttgaactttcctccgttcactacccagattcacttgaaaaagagtgcaacagagaatcctaatgttgtaaatcaggttgatataatgaaatcagttgcaggtggttttagttcgcagttacctcgtgcaccaaaggaaccttctctcctagatgagagatctctattggcttgcattgtacgtgcagttcctgctgggactgagggtggaatcaggataagttcaactctgccaaataggcttgggaaaatgttggctccccttcactggcatgactataagaagcaatacgggaagctcgacgattttgtggctagtcatccagagctgtttgtgattgagggagacttcattcaccttcgtgatggagcacagcagattatttctgccactacagctgctgcaaaaatagctgctgcgacagcatcttctgcctcttactcatccttactgccttctgttgccgttactcctgtggcacaaaatactcggcaaaagaggaggcccgcagttgattccagatcatcaaatgcaattccctctggaaacggcttcacagatcaatttaacatcattcagggtgtcagcgacgtaacaatttcaggcaaagtaagaaatatccaagataatggcttcatagatgaagttcgcactgggcagccatccgtgctcacagctgctactgccaacggagcaagacatgacaaatgtgcaaataataccagacatggttatggtggaaaacaacaggggaggaccactgggacgacatacctttccagaagatgaaccaactttcactgggcgatgatgctgttggaattggaaaccatgcgagtggcgatgatgcggttggggaaaccatacgagtgacgatgctttggcttcgaaatgatggtgaagatgacctggattaaagttattctagattcattttttattttgcactattggtcttcacagagcctgtatggttgggggccttgttttggcaaagctgtactgatatatccctaccccaagaatcagaagcctgccaaagttttgcgactatgtacctcgtctgcgcttgtgtattgtggtgcacttgaatgatgcgaatgttatatcgaatccccgtccttgatcgtgatgttcttgaacgttcacctctgggaaattaactcgcatggtgagctgagctcgtgatcggtggcatggtcgatccaaggtcgggtgtcattgttgtatggtcgagctggacatgtaggctctgttactatttaggtaactatttagaccttattccaaaaagttagtaga

SEQ ID NO: 94348 - DNA, 3216 bp, Zea Mays
accacgctccggtcagcctcgcctcctttctccgtctcattcccccaatcccacgccagtcccgcaggaatccccacccaaattcccgtctccccgatcgccgcccttctcggtgcccgtaaaccctacccccggagtcgcccgtgcgctgtcgtgcccgcgttgccaccgtcggtggtccgcggcgcccgtaaccaaaacctaaccgcagcctgcagatcccgattccgcagggaggcgggagaggtgaaggccgcctcgccgcagatggagcccgcgggcgcgcgcaaggagtggcgcgccgtccccggctcctcgctccgctccaatggcgccgaggatgccgcggagcacgggaagctggggcagtcggaggaccgagctatctacgaggaaggggcgggtggactggaggacttctgcgccatcaccattgatgggagcggagggctcagcgaggacatcctgcagcagcgcctgcagagcgttgtgcggcaaagggagcagctgcagcaggtcgagatggagctgcgtgcgcaggccattgcacacccgcagatcattcaggcgcaacaaagcttccaggctacttccaaggaacatgccgcagctgtggccaagatcaagcaggagcaactgcatgagcgggagcaatacattcttgaactagaaatgaaactcaatgacaaggatagagaactaaatgctctgaagattgatcatcaaacggtgtgggcaaatcaagatcttattagagaacagaccaaagagctggcaactgtcagaagggaacgcgacaactctgaagctgaaagagcccaacatcttacacaaattcatgagctccaagaacatctgcgagaaaaagaaagccagttcattgcattagaggaacagcatagggctgctcaagacaacattctttacaaagatgagcagttgagggaagcccatgcttgggtatctcaagttcgagaaatggatgctttgcagtctcaatccctacaagttgagttacgtgagcgcatggagcaatttaatcaatattggattagctcccagcagcagtatgctgaaatgcagcggagtcttctccatacaatacaacaactccagcaagaattaactgaggcaagggaacagtctggtgcacaaaaagatggtccacaagtttctcgggaagggtcagctgaatcatcactagttcaaagcatgggaaacagcgtggcttcaaatggtagtgcaactgcagatgggaaccagcaattgttgaaaaataatggaagcgtggatgtctctgttcaggccaatagtgcctcagctgtacctgttccttcttccctactgggaatcggtggtccggctgcgcatatcgctgcgatgcatgcttttatgattcatcctcaaggcattcctcaacccttagtagcatcacccaactctggtgttcctcaatttggcagttttcagtctcagtctacaattcaaccaaattcacaatggccaaatcagcaggaagtacaaaatgtctcacaaccacaagatgaaacaaactatcagacatcccaatcagaccggactgttttacaacaaggcgctattaatactgatgagttgtcctcaaagccaagccaggatagtcagccagaccatcttaatgcccatgtgaaacaacagcagagccctgcaagtgcacctactgaatcaactcatgaacttactgttgttgaagcgaatgtagctgaacatgtatcttgtgacgaacaacaaaaaatcttaaacgaacaggattcactgtcaaatatgaacaaccatattggaatagttgagcatctagagcaaaataccgaatccaaggatgaaagagctgcatctgataagcaacctgaacctgtatctaggcagcataaacatttgaactttcctccgttcactacccagattcacttgaaaaagagtgcaacagagaatcctaatgttgtaaatcaggttgatataatgaaatcagttgcaggtggttttagttcgcagttacctcgtgcaccaaaggaaccttctctcctagatgagagatctctattggcttgcattgtacgtgcagttcctgctgggactgagggtggaatcaggataagttcaactctgccaaataggcttgggaaaatgttggctccccttcactggcatgactataagaagcaatacgggaagctcgacgattttgtggctagtcatccagagctgtttgtgattgagggagacttcattcaccttcgtgatggagcacagcagattatttctgccactacagctgctgcaaaaatagctgctgcgacagcatcttctgcctcttactcatccttactgccttctgttgccgttactcctgtggcacaaaatactcggcaaaagaggaggcccgcagttgattccagatcatcaaatgcaattccctctggaaacggcttcacagatcaatttaacatcattcagggtgtcagcgacgtaacaatttcaggcaaagtaagaaatatccaagataatggcttcatagatgaagttcgcactgggcagccatccgtgctcacagctgctactgccaacggagcaagacatgacaaatgtgcaaataataccagacatggttatggtggaaaacaacaggggaggaccactgggacgacatacctttccagaagatgaaccaactttcactgggcgatgatgctgttggaattggaaaccatgcgagtggcgatgatgcggttggggaaaccatacgagtgacgatgctttggcttcgaaatgatggtgaagatgacctggattaaagttattctagattcattttttattttgcactattggtcttcacagagcctgtatggttgggggccttgttttggcaaagctgtactgatatatccctaccccaagaatcagaagcctgccaaagttttgcgactatgtacctcgtctgcgcttgtgtattgtggtgcacttgaatgatgcgaatgttatatcgaatccccgtccttgatcgtgatgttcttgaacgttcacctctgggaaattaactcgcatggtgagctgagctcgtgatcggtggcatggtcgatccaaggtcgggtgtcattgttgtatggtcgagctggacatgtaggctctgttactatttaggtaactatttagaccttattccaaaaagttagtaga

SEQ ID NO: 94349 - DNA, 3213 bp, Zea Mays
accacgctccggtcagcctcgcctcctttctccgtctcattcccccaatcccacgccagtcccgcaggaatccccacccaaattcccgtctccccgatcgccgcccttctcggtgcccgtaaaccctacccccggagtcgcccgtgcgctgtcgtgcccgcgttgccaccgtcggtggtccgcggcgcccgtaaccaaaacctaaccgcagcctgcagatcccgattccgcagggaggcgggagaggtgaaggccgcctcgccgcagatggagcccgcgggcgcgcgcaaggagtggcgcgccgtccccggctcctcgctccgctccaatggcgccgaggatgccgcggagcacgggaagctggggcagtcggaggaccgagctatctacgaggaaggggcgggtggactggaggacttctgcgccatcaccattgatgggagcggagggctcagcgaggacatcctgcagcagcgcctgcagagcgttgtgcggcaaagggagcagctgcagcaggtcgagatggagctgcgtgcgcaggccattgcacacccgcagatcattcaggcgcaacaaagcttccaggctacttccaaggaacatgccgcagctgtggccaagatcaaggagcaactgcatgagcgggagcaatacattcttgaactagaaatgaaactcaatgacaaggatagagaactaaatgctctgaagattgatcatcaaacggtgtgggcaaatcaagatcttattagagaacagaccaaagagctggcaactgtcagaagggaacgcgacaactctgaagctgaaagagcccaacatcttacacaaattcatgagctccaagaacatctgcgagaaaaagaaagccagttcattgcattagaggaacagcatagggctgctcaagacaacattctttacaaagatgagcagttgagggaagcccatgcttgggtatctcaagttcgagaaatggatgctttgcagtctcaatccctacaagttgagttacgtgagcgcatggagcaatttaatcaatattggattagctcccagcagcagtatgctgaaatgcagcggagtcttctccatacaatacaacaactccagcaagaattaactgaggcaagggaacagtctggtgcacaaaaagatggtccacaagtttctcgggaagggtcagctgaatcatcactagttcaaagcatgggaaacagcgtggcttcaaatggtagtgcaactgcagatgggaaccagcaattgttgaaaaataatggaagcgtggatgtctctgttcaggccaatagtgcctcagctgtacctgttccttcttccctactgggaatcggtggtccggctgcgcatatcgctgcgatgcatgcttttatgattcatcctcaaggcattcctcaacccttagtagcatcacccaactctggtgttcctcaatttggcagttttcagtctcagtctacaattcaaccaaattcacaatggccaaatcagcaggaagtacaaaatgtctcacaaccacaagatgaaacaaactatcagacatcccaatcagaccggactgttttacaacaaggcgctattaatactgatgagttgtcctcaaagccaagccaggatagtcagccagaccatcttaatgcccatgtgaaacaacagcagagccctgcaagtgcacctactgaatcaactcatgaacttactgttgttgaagcgaatgtagctgaacatgtatcttgtgacgaacaacaaaaaatcttaaacgaacaggattcactgtcaaatatgaacaaccatattggaatagttgagcatctagagcaaaataccgaatccaaggatgaaagagctgcatctgataagcaacctgaacctgtatctaggcagcataaacatttgaactttcctccgttcactacccagattcacttgaaaaagagtgcaacagagaatcctaatgttgtaaatcaggttgatataatgaaatcagttgcaggtggttttagttcgcagttacctcgtgcaccaaaggaaccttctctcctagatgagagatctctattggcttgcattgtacgtgcagttcctgctgggactgagggtggaatcaggataagttcaactctgccaaataggcttgggaaaatgttggctccccttcactggcatgactataagaagcaatacgggaagctcgacgattttgtggctagtcatccagagctgtttgtgattgagggagacttcattcaccttcgtgatggagcacagcagattatttctgccactacagctgctgcaaaaatagctgctgcgacagcatcttctgcctcttactcatccttactgccttctgttgccgttactcctgtggcacaaaatactcggcaaaagaggaggcccgcagttgattccagatcatcaaatgcaattccctctggaaacggcttcacagatcaatttaacatcattcagggtgtcagcgacgtaacaatttcaggcaaagtaagaaatatccaagataatggcttcatagatgaagttcgcactgggcagccatccgtgctcacagctgctactgccaacggagcaagacatgacaaatgtgcaaataataccagacatggttatggtggaaaacaacaggggaggaccactgggacgacatacctttccagaagatgaaccaactttcactgggcgatgatgctgttggaattggaaaccatgcgagtggcgatgatgcggttggggaaaccatacgagtgacgatgctttggcttcgaaatgatggtgaagatgacctggattaaagttattctagattcattttttattttgcactattggtcttcacagagcctgtatggttgggggccttgttttggcaaagctgtactgatatatccctaccccaagaatcagaagcctgccaaagttttgcgactatgtacctcgtctgcgcttgtgtattgtggtgcacttgaatgatgcgaatgttatatcgaatccccgtccttgatcgtgatgttcttgaacgttcacctctgggaaattaactcgcatggtgagctgagctcgtgatcggtggcatggtcgatccaaggtcgggtgtcattgttgtatggtcgagctggacatgtaggctctgttactatttaggtaactatttagaccttattccaaaaagttagtaga

SEQ ID NO: 94350 - DNA, 3290 bp, Zea Mays
accacgctccggtcagcctcgcctcctttctccgtctcattcccccaatcccacgccagtcccgcaggaatccccacccaaattcccgtctccccgatcgccgcccttctcggtgcccgtaaaccctacccccggagtcgcccgtgcgctgtcgtgcccgcgttgccaccgtcggtggtccgcggcgcccgtaaccaaaacctaaccgcagcctgcagatcccgattccgcagggaggcgggagaggtgaaggccgcctcgccgcagatggagcccgcgggcgcgcgcaaggagtggcgcgccgtccccggctcctcgctccgctccaatggcgccgaggatgccgcggagcacgggaagctggggcagtcggaggaccgagctatctacgaggaaggggcgggtggactggaggacttctgcgccatcaccattgatgggagcggagggctcagcgaggacatcctgcagcagcgcctgcagagcgttgtgcggcaaagggagcagctgcagcaggtcgagatggagctgcgtgcgcaggccattgcacacccgcagatcattcaggcgcaacaaagcttccaggctacttccaaggaacatgccgcagctgtggccaagatcaaggagcaactgcatgagcgggagcaatacattcttgaactagaaatgaaactcaatgacaaggatagagaactaaatgctctgaagattgatcatcaaacggtgtgggcaaatcaagatcttattagagaacagaccaaagagctggcaactgtcagaagggaacgcgacaactctgaagctgaaagagcccaacatcttacacaaattcatgagctccaagaacatctgcgagaaaaagaaagccagttcattgcattagaggaacagcatagggctgctcaagacaacattctttacaaagatgagcagttgagggaagcccatgcttgggtatctcaagttcgagaaatggatgctttgcagtctcaatccctacaagttgagttacgtgagcgcatggagcaatttaatcaatattggattagctcccagcagcagtatgctgaaatgcagcggagtcttctccatacaatacaacaactccagcaagaattaactgaggcaagggaacagtctggtgcacaaaaagatggtccacaagtttctcgggaagggtcagctgaatcatcactagttcaaagcatgggaaacagcgtggcttcaaatggtagtgcaactgcagatgggaaccagcaattgttgaaaaataatggaagcgtggatgtctctgttcaggccaatagtgcctcagctgtacctgttccttcttccctactgggaatcggtggtccggctgcgcatatcgctgcgatgcatgcttttatgattcatcctcaaggcattcctcaacccttagtagcatcacccaactctggtgttcctcaatttggcagttttcagtctcagtctacaattcaaccaaattcacaatggccaaatcagcaggaagtacaaaatgtctcacaaccacaagatgaaacaaactatcagacatcccaatcagaccggactgttttacaacaaggcgctattaatactgatgagttgtcctcaaagccaagccaggatagtcagccagaccatcttaatgcccatgtgaaacaacagcagagccctgcaagtgcacctactgaatcaactcatgaacttactgttgttgaagcgaatgtagctgaacatgtatcttgtgacgaacaacaaaaaatcttaaacgaacaggattcactgtcaaatatgaacaaccatattggaatagttgagcatctagagcaaaataccgaatccaaggtttctatggtactgcgtttcttatatagttcttcattccatgagtgtctcacatttacttctctttttaaaaccaggatgaaagagctgcatctgataagcaacctgaacctgtatctaggcagcataaacatttgaactttcctccgttcactacccagattcacttgaaaaagagtgcaacagagaatcctaatgttgtaaatcaggttgatataatgaaatcagttgcaggtggttttagttcgcagttacctcgtgcaccaaaggaaccttctctcctagatgagagatctctattggcttgcattgtacgtgcagttcctgctgggactgagggtggaatcaggataagttcaactctgccaaataggcttgggaaaatgttggctccccttcactggcatgactataagaagcaatacgggaagctcgacgattttgtggctagtcatccagagctgtttgtgattgagggagacttcattcaccttcgtgatggagcacagcagattatttctgccactacagctgctgcaaaaatagctgctgcgacagcatcttctgcctcttactcatccttactgccttctgttgccgttactcctgtggcacaaaatactcggcaaaagaggaggcccgcagttgattccagatcatcaaatgcaattccctctggaaacggcttcacagatcaatttaacatcattcagggtgtcagcgacgtaacaatttcaggcaaagtaagaaatatccaagataatggcttcatagatgaagttcgcactgggcagccatccgtgctcacagctgctactgccaacggagcaagacatgacaaatgtgcaaataataccagacatggttatggtggaaaacaacaggggaggaccactgggacgacatacctttccagaagatgaaccaactttcactgggcgatgatgctgttggaattggaaaccatgcgagtggcgatgatgcggttggggaaaccatacgagtgacgatgctttggcttcgaaatgatggtgaagatgacctggattaaagttattctagattcattttttattttgcactattggtcttcacagagcctgtatggttgggggccttgttttggcaaagctgtactgatatatccctaccccaagaatcagaagcctgccaaagttttgcgactatgtacctcgtctgcgcttgtgtattgtggtgcacttgaatgatgcgaatgttatatcgaatccccgtccttgatcgtgatgttcttgaacgttcacctctgggaaattaactcgcatggtgagctgagctcgtgatcggtggcatggtcgatccaaggtcgggtgtcattgttgtatggtcgagctggacatgtaggctctgttactatttaggtaactatttagaccttattccaaaaagttagtaga

SEQ ID NO: 94351 - DNA, 1233 bp, Zea Mays
aacaaaaacaaggacataccacaaccagtcgtgccatttttagcaaacaacaataaagaaaaatatggaagcctgaccaccagctacacaacagtgcaatggacgagctcgtctgccccgccgcctcatcatgcagctctccctcgcccacctccttcttcgcggccggccacgtaccggagctcgagttcgtgtcctgggatgtcccggaggaatggatggagggcaccgactggttcgatgaacctttggatggcgacgagggctcgcgctcggcgggcaacgacctgtccggcgaaccgccggcgcctgcgccgaagcggcggcgtggccggaagcccgggccccggaccaacggccccactctcagccacgtggaggccgagcggcagcggcgggacaagctcaaccgccgcttctgcgagctcagggccgccgtgcccacggtgtcccggatggacaaggcgtccctcctcgcggacgccgccacctacatcggggagctgcgcgaccgcgtcgagcagctagaggccgaggcgaagcaggcctcggccgctgtcaccaccgcggtggcagcggccagccactcgttcgcccccctgcaggagaagctggggctggaggtgcggatggtggccgggctggacgcggcggcgctgcgcctgacgacgagcgccgcgcgccacgcaccggcgcacctcatgctcgcgctccggtcgctggacctgcaggtccagcacgcgtgcgtatgcagggtgggcggcgtgaccgtgcaggacgccatcgtcgacgttcccgccgggctgcgggacgagcgctgcctccgcgccgcgctgctccagaggctgcagccgagcggctagttagcagcttggtatcctcgtcgccggccggccggaaaagcttgagctgatctactccgtctccgccaaatcaagccagcacacctcgtgtttcgttgccggattgcttggacggcgttctcaggcgtcaaatcaggctggctgcatgttatcttcaacctcattattactggtgtgtccactgatgttgttgtccgcgaatctgccgcgcatctatagtgccagtttcttgtttgttggcgttgttcttatcttctttcttgaggacatatatattatgcatctgctctttctgaactgtacgcgctgtgattattttccccacacgacgagacatccatttgtttcaatgaccttgttcatactgata

SEQ ID NO: 94352 - DNA, 2475 bp, Zea Mays
ctacggggtggagacaatggggtcggtccatggattttccttccttttgccacatttcgaaggttttggtccggctccacatgtcagccaaccagaccacatccccaagcctccccttgctcgagctccctcctaccctctcctcgccggccgagaatccccacctctgcgccgatcatctaccaacgcggcgccggcgccggcgccaccgacgccgacgccgacgccgacgcacggagattcaaatgtccgctgccgcatcctccttgctgcgcccggcgccgaagtggggcggcgcgccgtcgcaccgccggctcgtggaggagcacctggcctcgctcccgcacggcctcccacgcctccgccacgtgcaggagctccacgcgcagctcctcaagcaggggctccaccgggacccgcataccgcgtccaagctcatcgcttcctacgcgctcctccgccgggtccccgcctgccgctgcgtcttctctgccgccgtggcgctcccgaacagcccgttcccctccagcactaccttgctcaccaagacactcctccgcgcctacgcgctcaactcccttccccacgccgcgctcgccgtgttcttggacgtgccgttgcgccagcggggcacattcacctactccttcctcatcaaggcgctcgccgctgcgggcctcacgccagtccgcggggcgcatgcgcacgtcgtcaagctcgggtccgccgaggacaccttcgttggaaatgcgctgatcgacgcctactccaagaaccaggggctatctgacgcgaagaaggtgttcgacgaaatgacgacacgagacgttgtgtcctggaacacggccatggccgcaatggtgcggcaaggggaggtggacgcagcaaggagcatgtttgacgagatgcccgagaaggacacggtgagctggaacacaatgctggatggctatgccaaagctggggaggcagagaaggccttcgagctgttccagcgcatgccggggaggaatgtggtgtcctggtcgactgtggtgtcagcctactgtaagaagggtgacatggagatggcgcgggttatatttgataagatgccggccaagaacttggtgacatggaccataatggtctcagcatgcgctcagaaggggcttgtggaggaagcaggcaggttgtttactgagatgatggatgctgccattgagcttgatgtaattgcagttgtgagtatactggctgcatgtgctgaatctggctcccttgcccttggtaagaggattcaccggcatgtgcgccagaggaagctgagtagatcaaccctggtatgcaatgccctgatggacatgttctgcaagtgtggatgtgttaaccgagccgactacatatttgacactgagattgttgaaaaggatttagtgtcatggaacattataattggagggtttgcaatgcatggcccaggtgaaaaggcgctggaactcttcgcacaaatgaagcagcaaggctttcaccccgatgctgtgacactcatcaatgttctcagcgcttgcacgcacatggggcttgtggaagaaggacggaggttctttgccaacatggagacagactatggcattaagcctcagatagagcattatggttgtatggtcgatcttcttggccgtggagggctcattaaggaggctgttgacatgatcaaaaggatgccctgggagcctaatgaggtcatatgggggtccttgctcagtgcatgccgactgcacaagaatgtggagtatgcagaactggcagtgaacgagctgagcaatttgcagccctcaagtgcagggaactacgctgtcttgtcgaacatctatgcagaggctgggaagtggagcgatatggcgaaggcaagggtgcagatgaaaggaacagggtctcagaaaacagctggttcaagctggatagaacttaatgaggcgttccacgaattcacagttggggacagaaagcacccagagtctgaccagatatctgatatgatagataggctgagttcgcatgttaagtttgttggctgtgttccggttggccatgaactgtttgttcagtgagtgatagacagactacatgagagaggtccggagaagggataaaccgatgtaagtttttccctgcaaatgtggtgcaaatgtggagagactgtttccaacccacgatctggtgactatcactacagcggaccttccttccacatgcttgtgattatactaaaaaagaaatgatggaaatgcccacggcagatctcagagactgtcctttttatgttctcctccagcttccatccatcatgtgaccagtggaaccagctgtgtttgcttacagaagccttaatcgtagtgagattggtacaccttgatgtgcagaatttcagctatatacttaagtaaaaatataaagtcttaaaatgaaatattactgctgctggtttgaggc

SEQ ID NO: 94353 - DNA, 1836 bp, Zea Mays
ctgctctatatttgggtcttctgtttcggtctgctgttggaggcctgcaactggtgtgttacagcccattttcggttcagagcaccgtatagatcgcttgttgaagacagccttacacacgaggtcctgctactatgatcgctgccaatcacttaatacagccagggaaatatgaagaaatcgagcatcagtatggtatgtcttgcccataaaaacatcacacagagctgaggattgcagcagttccattccatccatctctgaagattcaaaaactgaaacaatggcaaacaacacatttccattttctgaatcttaatcattacacattttgcaaaatccccttgaacctactcgtattccttcacataataaacacagttaataagtcactactatttcgtttctttgtactagtaatctatgcacacttttgcaacgggacaggtcgcccctttcttccctgccttttctacatttttgtcaggaagtggttactgtctgaccctaatcgtgtattacttgcagccatcgcatggtaaattggccagcagcggtggcggcttcctacctgcgctggaaattgaggtgcttgatggcgaggaagaagaggaaggcgaagaggccaatgattgcgagatggaggcaggtcaccagctcaaagtagcgatcctgcaggcctaggtacccctccaggaactcacgcaccgtctgcaccccgagccctggcaccaggatctgctccgtccggtctgcgagctgtgagaacatcagcccgtaaactgtccatgccgctggatcggcccagtacacccaccgccaccacacgggcatcagctgcagcaaattactcaactcatcagatgggtgtgtgtgataagtacctctctcgcgatgatgaagccagagaagacgttccagaagatgaagatgaggaacgacagccccatggcgatctcgatgttgggggtcagggccaccgtcatcatcccgtacagagtgtagtacatgaagctcatcaccaggtataggaagaaccagaagaacttggccgcagacagctggaacccaatcatcgggtacacaatcgatgagaagatcagcacttgcaccaacatgtaaggttgatcattgatgtgtgttgttacctgagcgatagcgtatgccatggtggagtacatgcctgccgccttttcacggtagagcacaactctctccattgccaccactggctgtaggatgctgcagttcatgaaacccaggaacaatgctgacccatatacgattccaaatattcctctcctcatctcgtctcctactagggtatcagcacactcagacaggccaagtatctgcatacaatcaactgttactattgtatcatcaagcacattccaatgaccttcaaaatggaaagctcactatatgcaagacatgatggagatcatactggctaacataagcacgcaggatgctgggatccaagtctgtgcgcatgaggagacatgtaccttgacggccggatgaccccgcttacttcgtttatgattctcataggtcttttcctggtaacacacatatggacagacgtcgctaattcctgaaagcaaaataaactcatcatcagaaatctctctctctctctctctctttttccccgaatatgacctaccaactttgcattgtaaaacaaacacatgcatgccatacacttgtattttagctctcgctaaagcacgcagcagcgtaaccgtaacgaggcgcggtatcctttcgattctggactgaactccatgtgttcaattcgaactggcctaaggttgtctgcagatttac

SEQ ID NO: 94354 - DNA, 1592 bp, Zea Mays
ctgctctatatttgggtcttctgtttcggtctgctgttggaggcctgcaactggtgtgttacagcccattttcggttcagagcaccgtatagatcgcttgttgaagacagccttacacacgaggtcctgctactatgatcgctgccaatcacttaatacagccagggaaatatgaagaaatcgagcatcagtatggtatgtcttgcccataaaaacatcacacagagctgaggattgcagcagttccattccatccatctctgaagattcaaaaactgaaacaatggcaaacaacacatttccattttctgaatcttaatcattacacattttgcaaaatccccttgaacctactcgtattccttcacataataaacacagttaataagtcactactatttcgtttctttgtactagtaatctatgcacacttttgcaacgggacaggtcgcccctttcttccctgccttttctacatttttgtcaggaagtggttactgtctgaccctaatcgtgtattacttgcagccatcgcatggtaaattggccagcagcggtggcggcttcctacctgcgctggaaattgaggtgcttgatggcgaggaagaagaggaaggcgaagaggccaatgattgcgagatggaggcaggtcaccagctcaaagtagcgatcctgcaggcctaggtacccctccaggaactcacgcaccgtctgcaccccgagccctggcaccaggatctgctccgtccggtctgcgagctgtgagaacatcagcccgtaaactgtccatgccgctggatcggcccagtacacccaccgccaccacacgggcatcagctgcagcaaattactcaactcatcagatgggtgtgtgtgataagtacctctctcgcgatgatgaagccagagaagacgttccagaagatgaagatgaggaacgacagccccatggcgatctcgatgttgggggtcagggccaccgtcatcatcccgtacagagtgtagtacatgaagctcatcaccaggtataggaagaaccagaagaacttggccgcagacagctggaacccaatcatcgggtacacaatcgatgagaagatcagcacttgcaccaacatgtaagcacattccaatgaccttcaaaatggaaagctcactatatgcaagagtatgtcttaccgaattcgttattggttccgaacatcttagaagagaagttgattgtctccctcactgtcatctcagcatgatggagatcatactggctaacataagcacgcaggatgctgggatccaagtctgtgcgcatgaggagacatgtaccttgacggccggatgaccccgcttacttcgtttatgattctcataggtcttttcctggtaacacacatatggacagacgtcgctaattcctgaaagcaaaataaactcatcatcagaaatctctctctctctctctctctttttccccgaatatgacctaccaactttgcattgtaaaacaaacacatgcatgccatacacttgtattttagctctcgctaaagcacgcagcagcgtaaccgtaacgaggcgcggtatcctttcgattc

SEQ ID NO: 94355 - DNA, 1039 bp, Zea Mays
gaccacagccataaaaagtgctcccatgtacttgttggcatcaagtacagaatcgtgactcatttttgttctcaggaaaagtgtggagatcaccaaagccataacagttatctgaatggtcttgaatatatggactggagagtttcttttcagcagcagtacttcccttgaaaagcatgctttgaaaatattccatctggatattcggcgacttgcattcacttttaccacctttttctttccagtattgtttgaactgcactgtttgtcttctactagaagagggagataggacgtcctgaaggattgtgcaaaattttcaattgtatggtactgatacttgttttgatcaccagcccagtattgcttttggtccatcttagaggttacctggtcagtggccaattgagaaaacttgttacattgtttttgcaaaaggacatggaaaacttgttacattattttgcaaaagcacatgtattgcagaatagcgacattttacgctcctgcacataattatattcctctcctcatctcgtctcctactagggtatcagcacactcagacaggccaagtatctgcatacaatcaactgttactattgtatcatcaaggtatacagcaaatcaaacaacacattccaatgaccttcaaaatggaaagctcactatatgcaagagtatgtcttaccgaattcgttattggttccgaacatcttagaagagaagttgattgtctccctcactgtcatctcagcatgatggagatcatactggctaacataagcacgcaggtactgcggtgttgagtgattcatttcttctccattgtacatgacttttcccttgaactgttcacagtcattggcaacatatatttatgttagttgatgcttcacagtattgtctgtttttttttgcctctttttatgttgacaaatactttggttagcatgaaagcaactcagtgtaccttcaaagaagaatccagttttcctgccaacgcttttagaagagtcgtcttgcctgatccaggcgc

SEQ ID NO: 94356 - DNA, 1049 bp, Zea Mays
ggacgagggagccaccgtcaccgagcgcggttacaagaaaatccaatctctcccccacgctcgtttcgactcgcgccatggaggcgcaggcgcaggacaacagggcggaggatggggacggcgcgcggcaacacgtagccggcggcgtcgcggcgacggggatggctatgggcgcgatctccatgcacgggttcatggtcccgaagccagagccggtggagttcttcggcgggatggccgtggtgcggagcaagccgccgccgcggaaccgcgaccggcacaccaaggtggagggccgggggcggcggatccgcatgcccgcggcgtgcgcggccaggatcttccagctgacgcgggagctagggcacaagtccgacggcgagaccatccggtggctgctgcagcagtcggagcccgccatcatcgccgccaccggcaccggcacggtaccggcgatcgcgaccacggtcgacggcgtgctccgcatccccacgcagtcctcgtcgtcctccagcccctcgtccctcaccaccgtggtcgacggcgacgaggcgtccgccaagcgccgccggaagctgcagccgacgcgagcggccgccggcgcgtccccgctcgccaccgccgcgcccgcggcgtactacccggtcctcgccgacccgctcctgcagggccaccggtggagcggccatctcgccccgggggggggcaaccgcatgattccgcaggccaccgccgtgtggatggtgccccagcctggcgccgcggccgcccagcccacgcaattctgggccatccagcccgcgccgcagctcatcaacctcggcggcgcgcaggccgccgtgttccccgcggcggtgaacgtcgccgacttccagggccagcagcccatctctagcttgtctcacaacagcaactcggagcatctgcacctggggtccgggtcccacgagcagcagcgcggcggtcgcagcgacgtcaaccatccggaggaggaagaagacgacgacgacgacgacgagccggtgtccgactccagcccagaagagtaa

SEQ ID NO: 94357 - DNA, 2806 bp, Zea Mays
atctcttctgaattttctttaacaaaaaaaaggaggaacgaaaaacgaaaatcatatcctgcagaggatatatacaggagtaggagtaatcatgcatgtcatgggtcagcacgatgtcattgacccgatgagaggtcgaagaagggcggatcagcggatgcttcaagctttctctgctcggttaggttgctgtcactcgctctgaggcctcgacgcgctgctagctgagagccgaaagaaggaatcctcggccggcagcaggagaggagagccaccgtttgatcagcgaccgggcaaaagcaggccgcggccggccacccccgcccgtcgctgtccctccgaccccgcaccagcgactcgccgagcgcaggcacaagagggggggctccatccatgaggcagccatgctggtgctcatcaacaggtatttcaggagcaggaacagcagcccggccggaggaggcggcgaagagatggcgccggcggcggcttccagcgaccacctctgcctgccgggctgcgtgcccgtgcgcgccaagcgggcctccgcctccgcctccgccgccgcagcggccacggtcaccacggcgcgggcgtcgcggcacaacttcgtcagggccgcggcgtcgggcctgctggcgggggcgcacttcaccaaccacgagtcgctgccgccgcttcccgacgcgtacgccgagttcgtcgcggcgttcccgcagtacgcccacggcgcgctggcgcgggcggacgcgatccgtggcgaggagtaccagcacctggaccgccacgtctgcctggactacaccggcatcaacctcttctcgcacgcgcagatgagcgcctccctgccgtccacctcctccgcgccgcccgcctggcagccgcccttcttcgacatcgcgtacaagtccacgagcctgcgcgcgcaggtgcaatgcggggacaacgccgcgggcgcggaggcgggcgtcggcgccgccgtcacccggcgcatcatggcgtcgctcaagatccccggggacgagtacgccatggtgtgcacggccaacaggaccgcggcgttccgcctcctcgccgagtcctactcgttccagccaggcaagcagctgctccccgtgtacgactacgagagcgaggccgtgggcgccatggccgacagcgcgcgccgccggggcgccgaggtcgcctccgcgaccttcgcctggccgagtatgaggatccacggcgccgacctccgcaagaggctggccaggggccggcgccgcggcggcgggggacgcggcctcttcgtattcccgctcgcgtcccgcatgacgggcgcccggtacccgtacctgtggatgagcgcggcgcaccagcaggggtggcacgtggcgctggacgcctgcgcgctcggcaccaaggacctcgacaccctcggcctctccctcatccggcccgacttcatcgtctgcaacttcttcaaggtgttcggcgagaacccgtccggcttcgcgggcctcttcgtcaagaggtccagcggcctcgcggcgctcgagcgctccgtcatcgcgcgcagcatcggcatcgtcagcatcgtgcccgcccgccgctggtcgctgcacgacggctactccaccgagctggagcactcgcggagcttccccatgctcgccgccgacccggccctggacgacgccgacgtcgagaccacgagctccttctccggcccgctcagctccatcgccatcactcgcagcaggaccctgcagtcggacgcggcggagaacggcgacgcccacgcccccgagatccgcgaggtcggcagcacggcagagaacggcttctactcggaggaacccagagcagaggaaacagagcggctggccaaggaggagcaagacggggaggggagagagagcgtgatggaggtggagtgccggggcctggaccacgcggacgcgctggggctcatcgccatcggcaaccggctgcgttgcatcagcaactggctggtggtggccctgcagaaactgcggcacccgcacgccgataacgggcacccgctggtgaggctgtacggcccgcgcgtcaagttcgaccggggcccctcgctggcgttcaacgtgttcgactggaagggcgagcgggtgtcgccgctgctggtgcagaagctcgccgaccgccacaacatctccctcacctgcggtttcctgtgcaacatctggttctcggacaagcacgaggccgagagggccgtcgtcctggagcacagggtcgccggcgatcccgtcgccgcgggcagcgccggagggaagaggaggaaggacgccggtggtggcgacgtggggatcctcgtggtgaacgcgtcgctgggattcctgagcaacttcgaggacgcctacaggctgtgggcgttcgtggccaagttcctggacgccgacttcgtggagaaggagaggtggaggtacaccgcgctgaaccagaagacggtcgaggtgtagacgaaacggagagcgctgcagtagcttcagctcagcttggcatattggtacggttcagttcactgtctgtaaagcaccattcttttaggatcagctctgccatcccctccagccattctttcagtgtaaactgtaaggtgtaaagtgtttccataatgatgatatcatttgatatatgaaataagtttcacttttcagcacaaatatacgcccaatattataaaaaaagaagcttaattagagctccgacaatccgaccttccataggccagcctatctccaagagtgacaagacgcttgcttcataaatcatctagtgcctt

SEQ ID NO: 94358 - DNA, 1078 bp, Zea Mays
gaggttgaacatgactttgatggcatcgcggccgcgggcgctgacctcgaaggcctcctccacgtcccgctgcgagaagccgaagcggtgggtgatgagcggcttgacgtccaccttgccgctgcgcaggaagtcgatgcacagcggccaggtgtccttgtaccggaacacgcccaccacgtccacctcccgcgccgccgccgccgtcaggggcagcgtcatctcgttgtggcccatcccgaccaggcacaccttcccgccgggccgcgtcgactccagcgccgtcgacatggtcttgctgaacccggcgcagtccaggctgacgtcgatgtccgagcccatggccgcgcggatgcgctccacctcgtccgccaggtcctccacgcggggcgacacccgcaccgccgcgtccgcgcccagcgacctggccacggccaggcggtggtcgtccacgtccacgaccaccacgcgcggcgcgccgaaggcccgcgccgccagcagcgacaccaggccgatggggccggcgcccaccacgagcacgcccgtctcgggccccacccccgcgcggcggcacgcgtgcacgcccacgctcagcggctcgcacatggcgccctcctccaggctcacaccgtcggggagcttgaagcacaggtcggccgggtgcaccacctggttcgccagcgagccgtgcaccggcggggtggcgaagaacttcatgtcctcgcacaggttgtaccgcccgcccttgcagtggcggcagcgccagcagctgacgcccggctccagcgccacgcggtcgcccacggacaggtgcatcacgccggcgcccacctcctcgaccacgcccgcgcactcgtgcccgatcaccatcggctccttcaccacgaagtgcgcgatgcgcatctcctgcgagaatcgatgatgcgtaaagggtcgaaatccattagccgtgcaacaattcccgcgccgtagaattacagagacatcggataggatcgcgcaccctgaggtagtgcacatcgctgccgcaaatccccactgccttcatgcgcacgcggacatcataagggcctgaaaa

SEQ ID NO: 94359 - DNA, 99 bp, Zea Mays
agttatcgggatccgatctccgattctacggggccatatctcatttctctattagagacatggatatgagtaatttggtcgctatagggtccaaacagc

SEQ ID NO: 94360 - DNA, 684 bp, Zea Mays
atggactccaccgatcccccgccggcgtcgccttcctcgcccgggccaccaggcggccagccgtccccgccgaagcggcccgcggggcgcaccaagttccaggagacgcggcacccggtgttccgcggggtgcggcggcgcgggcgcgcggggcggtgggtgtgcgaggtgcgcgtgccgggcagccgcggggaccgcctgtgggtgggcacgttcgacaccgccgaggccgccgcgcgcgcgcacgacgccgccatgctcgcgctctgcggcgccgccgccagcctcaacttcgccgactccgcctggctgctccacgtgccgcgcgcccccgcgggcctgcccggcgtccagcgcgccgccaccgacgccgtcgcggcgttcttgcggacgcagcaaccgcgcggcggcggggacgcgcccgccgccgcctcgcagggtcagcgcgccaatgccgccacggagacggagttggaccacgccggcgcgtcggcggcggcggtggacggtggcggcggcagcgtggttgaggtggatgtgttcggcggcatggacgacgccgggtcctactacgcgagcctggcgcaggggctgctcatcgacccgccgccgcccgccgtagagtgccccgaggaggaggatgacgattgcggcggcgctggtgagatggagctgtgggactag

SEQ ID NO: 94361 - DNA, 1593 bp, Zea Mays
atgtgccactgctccgagccgacacaatgccaccaccaggtcctgctcccgccaaccaaagcctgccccgcgctgggtgaccgcccgtggccggcgcggcgcggcgacggcggcgtggccatcgaggtcatcgcttccatcctgcgcctcgccgtgccgatggtcggcgcgggcctgctcatgtacatgcgctccctcatctccatgctcttcctcggcaggctcggccgcctgcccctagccggaggctccctcgccctcggcttcgctaatatcaccggctactctgtgctctccggcctcgccgctggcatggaccccgtgtgcggccaggcgttcggcgccggtcgcacgtccgtcctcaccgccgcgctccgccgcaccgtcgtcctgctcctggccgcgtccgtgcccatcagcttgctctggctcgccatgcaccgcgtgctcgtcgccaccggccaggaccccgacattgccgccgccgcgtacgacttcatcatgtgctccctccccgacctcgtcgtgcagtccttcctccacccgctgcgcgtgtacctccgcgcgcagtccgtcacactcccgctcacgtacgccgccgccgcggcactcctgctccacgtcccagtcaactggctcctcgtgcagagcctccggctagggatacgcggcgtcgcgctcggcgccgtttgcaccaacctcaacttcctgctgttccttgtggcttacgtctaccttgctggactaatgcatggcgatgacggcggcaatggcaaggccaacgcgctgtgcgcgacgccggcgtcgcccgaggacgacggcgctgtcgagtgggggtgcctgctaaggctctccctgcacagctgcatgtcggtgtgcttggagtggtggtggtacgagatcatggtgctgctctgcggcgtgctcgtcgaccccaaggcggcggtcgccgcgatggggatactgatacagaccacgtcgctgctgtacatcttcccgcactccctcagctgcgccgtgtctacgcgcgtcgggcacgagctcggcgcgggccggccggagcgcgcgcgcctcgtggcccgcgtcgggctctgttgcggtgccgcgctcgggctcgtggcgtgcgccttcgcggtgtccgtgaggggcgtgtgggcgcggatgttcaccaccgacgccgccatcctgcggctcgcgtccgcggcgctgcccatactcggcgcggccgagctgggaaactgcccgcagacggccggctgtggcgtgctgcgcggcagcgcgcggcccggaaaggcggcgaggattaacgtctacgccttctacggcgttggcatgccggcggcgctcgcgctggcgttctggcccgcgcggctcgacttcaccggcatgtgggtcggcatgctcgctgcgcagctcgtgtgcgcggctctgatgctgcacgcggtgcagcgcatggactggaccgagcaggccgtccgcgcgagcgtgctaaccggcagcgtcaaagtcgtcgccgatgtcaaaagcgggcatgcagacgcggccaaagtaaaggcggaggacgccatgctcgtcgtgaccgtgataacttga

SEQ ID NO: 94362 - DNA, 833 bp, Zea Mays
atggcatggatgaccgctgtatgtgcttctgtcgtgctcaagtcatcacagagtttgaaggagtttaaaacacaagcaaccacattggcatcgcttcagcatcccaatttatgtaaactgataggctattatgcaaaagaagattctaatgaaaggatgttggtctatgaacggctttatcatggaagcttagataagctactctttggaagatcagatggtcgtttcatggactggtctaaacgtttgaaggttgccctaggtgctgccagaggtctagctttcttgcatgatgaaggaccctttcaggccatgtacaacgagttctcaacttgaacatccaaatagataaaggtttcactgctaagctttcaggatatggttgtgttggcttcaataccgaggagatatctaatgcacctgtgcaaacctttcggtggagaccttggagaagggtttactcactcagtttgtctattgctgcaacaagtcggggctggatcgttccaaagtaaatgtaaatggaggcgcgattgcccttggacaccctctgggtgcaacaggtgcccggttgcatggctactcttctgaatgaaatgaatcaccggggcagagactggagatttggtgttgtcaccatgtgtatcggatctcgaatgggggcaacagctgtgttcgagctgtgttcggcccgactggaggtatcgaccatcactcgtcactataacccgatggtgataggcgaccgggagcttccatgttattgcgttctgatacttgagacttttattatgactatgtatgagatattgtctcttattagtactggatga

SEQ ID NO: 94363 - DNA, 1406 bp, Zea Mays
atggaggtggtggagggggcgatggcagtggcggtggcgggaggttccacccttaccgtggttcttccgactattctagcggcggtggagggtacgtacagaggcggtagtggcgttggtaacgacttcagcgaccagaggcaacattatggcggcggcaacagaggcggaggccgtggggatttccaaggttggcatgatgctggtacctatgacaagaacattatcgagtggcccaagtgtagtggcgctaatggtagcttgagatccaaagtcgagttgaagcatggggccaatgctgatcttgtgaatgctctgaagctgatccaacctatcaaggacaagttttcaagtgttacctatgcagatctgtttcagcttgcaagggccatagctattgaggaagcaggtgtccccaaaatccctatgatctatggaagggttgacgttattgcccttgacaatgcccgccaaagggaaggcttcctgggtcagtgataatgatttttgactgttcttaactcatgccaattttggttgagtctaacttataattcagaacctagaactattgtgtatgaaagctgtggctatggaggcctagaacaatacttactcagaacctagaacaatacttaccagagctgtggctgtggaggcctagaacaatacttactcagaacctagaacaatacttaccagaactattgtgtaggccgatagatggcttgacgaacaagcggtggctgtggagcccgcggcagcgcacaaggccatcgctgggttgtggcggggcaggagagatgagtgggggagactgggagagtgatgagccttttctgtaattgagacggactccaccaagatttgggtccagagtttgttttcacaatcaaacggtatcctcatgtatgtgcataaggaggaggatccctagaacttgattctttcctgtgcggccactgatggcatcctttatttgcgtcaaggatttccctcaagatttatgcatgcatgcgtggcacaaatttctttgctctcctaagtggggtaattatcgttgttgaccttacccccacctcttagcgagagaattcttgtgattttcttgatttttgttgttcgcctgttcatgtttgatgtcactgattttatttgttgttgttgtgcagatttgagatcgtgtgaagctaagcttttcatcaagatggcacttgtaagtgtttgttcaattagtagttgtttaagtagcctctatctcttacatttttatatgctagaggcgtgtttaagttgattgcattagtgatattattttattgttgttttgacttgtggtgtggcatgtcatgatggccttaaatcattaggtaaattacttctctactatttgagttaactgatgc

SEQ ID NO: 94364 - DNA, 132 bp, Zea Mays
gtggggacttaagattatctccatgtgagaacttaggattatctttttataaactatttattaatattggtaccttatttgcaatttccggtcgatgctacaatatttttatgaatttaattgtattttgat

SEQ ID NO: 94365 - DNA, 1652 bp, Zea Mays
tacaactccatccatcaggcttaggccatccgagttcttttcagcgtccagttgtgcagggcggtcgcacacacaccacacacgcgccccgtccattccattctcatcgcgatcgaggtggcctggcactggtactggcactgccctcgctggccccaggccatggcctgtcttcgctagcttccttccttacagtataaatattttggtgcgccactgcgccagctccggcctgtcccttagttgtaccatcgtgtccttttcctcctacctcctccttggctggccctcttccccgtcttcctccctcttccttcgtctctccgtttcaagccctaccgacaggcatttgcttctgctccagtgatcagccccctcccctcctggcctcctctccacccggccaaaaactgatctttttttttcggttctggtaccatagctattagtagtcgtagcggctaacttgcaagccgattgtctctagcacgcaagtgtttttccctcccctgagattggtgggtgatcgagagttcgagacagtgtacacatacatactctgctcgtctgctgaggatcgatcgcttggtctcgttgttgcgtagataggtactagaggactatagctactagtaggactaggagaggatccgagggagagagagtaaggccaagatgatgcgcgcgaaccgggagcagagagtggccttctcgtcgacgaaggaggccgccgcggtgcccaaggaggaggtgtgggaggtccggcccggcgggatgctggtgcagaagcggagccccgacgcggacccgccccccggcggcgcgcccgtgcccaccatccgcgtcaaggtcaagttcaacggcgtctaccacgagatctacatcaactcccaggcatccttcggcgagctcaagaagctgctgtcggagaagacgggcctgcacccggacgaccagaaggtggtgtacaaggacaaggagagggactccaaggcgttcctggacatggccggcgtcaaggaccgctccaagatggtcatgctcgaggaccccgccgccaaggccaagcgcctcctcgaggagcgccggaccggcaaggccgagcgcgccgccaaggccatcgcccgcgccgccctcgacgtcgacaagctcgcaaccaaggtgtcggcgctggagacgatcgtgagcaagggcggcaaggtcgtggacgcggacgtggtgacgctgaccgaggcgctgatgaacgagctggtgaagctggactccgtcgccgccgaaggggaggtgaaggcggcgcggcgggcgcaggagaagcgggtgcagaagtacgtggagacgctggacgccatccgcgccaagaacaaggcggcggcggcggcggcgccggccaaggcccgcagcggcagcaacaaggcgcggccgccgcgcccgcccccggcttcggcgcacgcgcatcagagccagcagcagcgccggcagttccagccgccggcgccggtgtcgcagacccagacggcgagctgggagacgttcgacctcctgtcgtcagtgccgtcgacgtcggcggcccccgtgacgaccatggcccccgcgaccagcaccacgccgtccccgcgcttcgactgggagctcttctagatggctcctcaagg

SEQ ID NO: 94366 - DNA, 1749 bp, Zea Mays
tacaactccatccatcaggcttaggccatccgagttcttttcagcgtccagttgtgcagggcggtcgcacacacaccacacacgcgccccgtccattccattctcatcgcgatcgaggtggcctggcactggtactggcactgccctcgctggccccaggccatggcctgtcttcgctagcttccttccttacagtataaatattttggtgcgccactgcgccagctccggcctgtcccttagttgtaccatcgtgtccttttcctcctacctcctccttggctggccctcttccccgtcttcctccctcttccttcgtctctccgtttcaagccctaccgacaggcatttgcttctgctccagtgatcagccccctcccctcctggcctcctctccacccggccaaaaactgatctttttttttcggttctggtaccatagctattagtagtcgtagcggctaacttgcaagccgattgtctctagcacgcaagtgtttttccctcccctgagattggtgggtgatcgagagttcgagacagtgtacacatacatactctgctcgtctgctgaggatcgatcgcttggtctcgttgttgcgtagataggtactagaggactatagctactagtaggactaggagaggatccgagggagagagagtaaggccaagatgatgcgcgcgaaccgggagcagagagtggccttctcgtcgacgaaggaggccgccgcggtgcccaaggaggaggtgtgggaggtccggcccggcgggatgctggtgcagaagcggagccccgacgcggacccgccccccggcggcgcgcccgtgcccaccatccgcgtcaaggtcaagttcaacggcgtctaccacgagatctacatcaactcccaggcatccttcggtaataatgcctcctcatccgtcctccgactgtgcatgtgttgtagctgtttctttctactgagtgaattcgagccggtgaatgcgtgttcctgcaggcgagctcaagaagctgctgtcggagaagacgggcctgcacccggacgaccagaaggtggtgtacaaggacaaggagagggactccaaggcgttcctggacatggccggcgtcaaggaccgctccaagatggtcatgctcgaggaccccgccgccaaggccaagcgcctcctcgaggagcgccggaccggcaaggccgagcgcgccgccaaggccatcgcccgcgccgccctcgacgtcgacaagctcgcaaccaaggtgtcggcgctggagacgatcgtgagcaagggcggcaaggtcgtggacgcggacgtggtgacgctgaccgaggcgctgatgaacgagctggtgaagctggactccgtcgccgccgaaggggaggtgaaggcggcgcggcgggcgcaggagaagcgggtgcagaagtacgtggagacgctggacgccatccgcgccaagaacaaggcggcggcggcggcggcgccggccaaggcccgcagcggcagcaacaaggcgcggccgccgcgcccgcccccggcttcggcgcacgcgcatcagagccagcagcagcgccggcagttccagccgccggcgccggtgtcgcagacccagacggcgagctgggagacgttcgacctcctgtcgtcagtgccgtcgacgtcggcggcccccgtgacgaccatggcccccgcgaccagcaccacgccgtccccgcgcttcgactgggagctcttctagatggctcctcaagg

SEQ ID NO: 94367 - DNA, 1498 bp, Zea Mays
tacaactccatccatcaggcttaggccatccgagttcttttcagcgtccagttgtgcagggcggtcgcacacacaccacacacgcgccccgtccattccattctcatcgcgatcgaggtggcctggcactggtactggcactgccctcgctggccccaggccatggcctgtcttcgctagcttccttccttacagtataaatattttggtgcgccactgcgccagctccggcctgtcccttagttgtaccatcgtgtccttttcctcctacctcctccttggctggccctcttccccgtcttcctccctcttccttcgtctctccgtttcaagccctaccgacaggcatttgcttctgctccagtgatcagccccctcccctcctggcctcctctccacccggccaaaaactgatctttttttttcggttctggtaccatagctattagtagtcgtagcggctaacttgcaagccgattgtctctagcacgcaagtgtttttccctcccctgagattggtgggtgatcgagagttcgagacagtgtacacatacatactctgctcgtctgctgaggatcgatcgcttggtctcgttgttgcgtagataggtactagaggactatagctactagtaggactaggagaggatccgagggagagagagtaaggccaagatgatgcgcgcgaaccgggagcagagagtggccttctcgtcgacgaaggaggccgccgcggtgcccaaggaggaggtgtgggaggtccggcccggcgggatgctggtgcagaagcggagccccgacgcggacccgccccccggcggcgcgcccgtgcccaccatccgcgtcaaggtcaagttcaacggcgtctaccacgagatctacatcaactcccaggcatccttcggcgagctcaagaagctgctgtcggagaagacgggcctgcacccggacgaccagaaggtggtgtacaaggacaaggagagggactccaaggcgttcctggacatggccggcgtcaaggaccgctccaagatggtcatgctcgaggaccccgccgccaaggccaagcgcctcctcgaggagcgccggaccggcaaggccgagcgcgccgccaaggccatcgcccgcgccgccctcgacgtcgacaagctcgcaaccaaggtgcgtacagcagacagcagtcaaggttcctgtcccacgtacgttctgtctctgtgactctcacgccgtatttgattggtcaggtgtcggcgctggagacgatcgtgagcaagggcggcaaggtcgtggacgcggacgtggtgacgctgaccgaggcgctgatgaacgagctggtgaagctggactccgtcgccgccgaaggggaggtgaaggcggcgcggcgggcgcaggagaagcgggtgcagaagtacgtggagacgctggacgccatccgcgccaagaacaaggcggcggcggcggcggcgccggccaaggcccgcagcggcagcaacaaggc

SEQ ID NO: 94368 - DNA, 1595 bp, Zea Mays
tacaactccatccatcaggcttaggccatccgagttcttttcagcgtccagttgtgcagggcggtcgcacacacaccacacacgcgccccgtccattccattctcatcgcgatcgaggtggcctggcactggtactggcactgccctcgctggccccaggccatggcctgtcttcgctagcttccttccttacagtataaatattttggtgcgccactgcgccagctccggcctgtcccttagttgtaccatcgtgtccttttcctcctacctcctccttggctggccctcttccccgtcttcctccctcttccttcgtctctccgtttcaagccctaccgacaggcatttgcttctgctccagtgatcagccccctcccctcctggcctcctctccacccggccaaaaactgatctttttttttcggttctggtaccatagctattagtagtcgtagcggctaacttgcaagccgattgtctctagcacgcaagtgtttttccctcccctgagattggtgggtgatcgagagttcgagacagtgtacacatacatactctgctcgtctgctgaggatcgatcgcttggtctcgttgttgcgtagataggtactagaggactatagctactagtaggactaggagaggatccgagggagagagagtaaggccaagatgatgcgcgcgaaccgggagcagagagtggccttctcgtcgacgaaggaggccgccgcggtgcccaaggaggaggtgtgggaggtccggcccggcgggatgctggtgcagaagcggagccccgacgcggacccgccccccggcggcgcgcccgtgcccaccatccgcgtcaaggtcaagttcaacggcgtctaccacgagatctacatcaactcccaggcatccttcggtaataatgcctcctcatccgtcctccgactgtgcatgtgttgtagctgtttctttctactgagtgaattcgagccggtgaatgcgtgttcctgcaggcgagctcaagaagctgctgtcggagaagacgggcctgcacccggacgaccagaaggtggtgtacaaggacaaggagagggactccaaggcgttcctggacatggccggcgtcaaggaccgctccaagatggtcatgctcgaggaccccgccgccaaggccaagcgcctcctcgaggagcgccggaccggcaaggccgagcgcgccgccaaggccatcgcccgcgccgccctcgacgtcgacaagctcgcaaccaaggtgcgtacagcagacagcagtcaaggttcctgtcccacgtacgttctgtctctgtgactctcacgccgtatttgattggtcaggtgtcggcgctggagacgatcgtgagcaagggcggcaaggtcgtggacgcggacgtggtgacgctgaccgaggcgctgatgaacgagctggtgaagctggactccgtcgccgccgaaggggaggtgaaggcggcgcggcgggcgcaggagaagcgggtgcagaagtacgtggagacgctggacgccatccgcgccaagaacaaggcggcggcggcggcggcgccggccaaggcccgcagcggcagcaacaaggc

SEQ ID NO: 94369 - DNA, 544 bp, Zea Mays
caatttaaattcttcaagatgacaaagtttggtctaaaaaatcatgctaattgtagaatgtggaaatcaacgatttacaagaaacaaatttcgcattgagcaacaactctcagcaaaagtggatatatcctctgagaaggaagctgattgtacacaacatgagactattgatttgaaatctaaacttcagtccaaggaagctaaaattgagaagatgaaatatgaacatctgacgagggaggctgctttggcaaagaaggagcttcttgaagaggagtacaagaaaatgtttgatgaggcaaagaaggaactatctctcgagaatgatctagcaggcatgtgagttcttgttgctaaattgaaaagaggggctttagacatatctgatttgaatgttgatgatcgaactaaagtgtaagggcgtagcgatcaccacattgttgtctcataattggtgttaatgaaaaataacatggtgctgcacagaatctctactttctcttgtaagaaggattgttctgtcagcataatttgatttgcatgt

SEQ ID NO: 94370 - DNA, 1588 bp, Zea Mays
ccctcttctctccgtccccacctactactcggcgcctctggtttctctccaagtctccatgctacgcgaccggaaacttccagaatctaccagtaccaccttcctctctctctctcactcttcctgcgcgacggtgcaccctagcccgatccgcggcgccgccatggtcgccgagcaggccaccaccactgtggctgtgggcgagccgccaactgccaccccgcagccggcggcggcagcggctgcggggcagaggtccgtgcccacgccgttcctcaccaagacgtaccagctggtggacgacccggcggtggacgacgtcatctcgtggaacgacgacgggtcggccttcatcgtgtggcggccggcggagttcgcgcgcgacctcctgcccaagtacttcaagcacaacaacttctctagtttcgtgcgccagctcaacacctacgggttcaggaagatcgtgccggacaggtgggagttcgcgaacgactgcttccgccgaggggagaagcggctgctctgcgacatacaccgccggaaggtgacgctgccagtcgcggcggccacgagggcggtcacggtggtggcgaccatccccatggcgctgcccgtggactcgccggtgtactccggcgaggagcaggtgctgtcgtcaagctcgtcccccgagcccccgtcgctgctgcagcagcagccgacgccgtccgcgtctggctccggtgacatgggcgaggagaacgaacggctgcggcgggagaacgcgtggctcgcgcgcgagctcgggcagatgaagaagctgtgcaacaacatcctcctcctcatgtccaagtacgccgccactaagcagccggacgccgccaaggcggcggccgccgggaactgctccggcggcgagtcgtcgggcgccgccgcggcgcctccgcttccttcgatcctggagctcctgccctcctgccgccgcgaccccgcgtccgcggccgtcgacgcagcggcagcggcagcgggaacggagcacgaggttgatgaaaaggcgggcgctaggctgttcggcgtctccatcgggcggaaacgaatgcgggacgagagcagcggtcacggcggcggcggcgaggaccccgtgggccgctcggcggaggtgaaggcggagccggtggacgcgcgtctcgaccatcagcacagcgcgacggagccgcagtcgtggcccatttaccggcccaggccagtgtaccacccgctccgggcctgcagcggcttggtcagcgctgggagcgaccacgactggtccaacaactcgaggtgacttttgcttgcaagcccaatcgtccacaggttacaggttaaacttagaatgagagatcaagtgtttatgtagcaataactttttgttagtttatctcatattaccgcaagtttcgagtatcattcatgtatagcgatccattaaactagaggttaccttactgaggacgacttgaattaaagtcagttgtttaaactgctagtcagttatttagactgttatcgttgtatttcataatgttaagtaaccctaattagggttatgtgggtaaatatctgctttgcc

SEQ ID NO: 94371 - DNA, 861 bp, Zea Mays
acaccaaaaatcagacgcaaacctcccgtttccgcttcagcggaagcaagctctgcttggccttggccggctgctccttcttgttgttgagcgccgctgcctcctcctgctcctcggcacggcggcggcagcagccgaggtgcgccgcgaggtcctccgcctccaccttcaccacgtccttgcgcaccccgatgtcggtgacgtaccggccggcgcagtacacgccggcggtgacggcggccacgccgagcgggccggcggcggccaggaggttgagcggggtggagaggagcgcggccagcggcacgccgacggcggacgcggcctgcccgctccgcccgatcccggttgcggcggcgggcagcagcgccgtcctgcagtagagcgcgaagtcctcgcagttgttcccgaacacgtcgtagtcgccgaagcagccgtgccggaggaggtgcatggcgcggcgcacggcggcggcgcccgcgtcggcgcgcgccgtggtgcacgtgcccccgcgcagcctggccaggaacgccgccgcggccgcgccgtactcgaagcggtgcgccgcgccgccgcgcaggaagcagtccaggcaggtcagcaccacgccgctgtcggggagttggaagccgcagtccgggagggaggcgggacacgcggcgccgtcgggcccctgctgcgagaggaggaggctgctggacgcggcgaccacggccgagtccaggcccgcgttgcccgcctccttcttacgcgtgaagtgcaccaccttgctgccgccgacgtagatccctgcatgatttgttgccgaatgagaacactattccgcatccatatgcatgccattctcttctcccccacaca

SEQ ID NO: 94372 - DNA, 1660 bp, Zea Mays
gagtattccaatccagcaccgaaccatccagaagcagccgcctcctgctcttaaaaaactctcgtctctggtcatccattccacacacccaacatcacgaaaccacgcgcagatccaaacgaacccgagcccttccaaaccctaagctcgcctcccctcccccccaaacaccaccgcgcacctatggcgaagtacggcgagggcgacaagcggtggatcgtggaggagcgcgccgacggcaccaacgtccacaactggcactgggcggagcgcgactgcctggagtggtcccgcgcgcggctctcttccctgctcgcgggcctcaccatcctcgacggcgagggcggcctcagtctccgcaccgtcgcgctcgacaagcttgatggcgaggcctacgtcaacatccgcaagggcaaggtcatcccggggtacgagctctcgctcaccctctcctgggaggccgaggccgcctcggagtccggagctgcgaaggtcaccggcaccgctgaggttccctacctcgccgacgagaacgccgacgaggaccccgacctccgcgtcaccgtgcgcggcgacgagacgcccctcgcgctccgcgccaaggacgccttcctctcccgcgggaaacccatggtgctcgagaagatccgggagttcgtcgctgccatggccaagggtggaccggccaaggacgagctggactccaagaaaactcccacgaaggtcgccggctccgcaccggcgaaggaggcggtactggctcctgcgccggctgtggagaagaaaaaggccaaggggaaggacaaggagggcttcaagaccattgagatgacggagaagttctactgccgctcaaaggacatatatgagatcttgatggatgagaacagatggaaagggtttacgcagagcaatgcgaggatcagcagagaggttggaggggaatttagcctcttcgacgggtccatcactggcgtcaacgaggagctgcaggaagggaagctgattgcacaaaagtggcggtttggaagctggcctgacggcttgtactcctcggtccggttggtgtttgatgagcccgagtctggagttacaatcataaagctcaaacaaactgatgtgccagaggaagacaagtatggaaattcaactgtggtagagaacaccgagagaggctggagagaactcatattccagcggatacgcggagtgttcggttttgggatctaaagaatctaaagaggcgatttggcatgaagttagatttcaaatttttacggggtcagaccatgcacgtcatagcaatccatgttttattcacccatttgttttccatgtccttaaacacagaacactgcatatcgtggggggtttaaaaacatctgttattcgaacgctgcaatgttgcttgctcccgaaatgagtcgacgctgatctgggttggttatcttgttgcaatgattaagaatgtgtgtcggtgtgaagcgttttagtggctatatactcggtcctcgtgttgtgttttcgttgcatttggacttcaattgagtcgctgtgtgctatagtaacgatcagatcatatccttgtctcgtgctcgtgccactcggaatctggcactctatactttctttattccagatgtgctgccatgatggtttt

SEQ ID NO: 94373 - DNA, 339 bp, Zea Mays
atggagatccagggcagccatgggaggggtagggacgacttctgcatggggagagatggagggagcggctggggagggaggagatggctgggcgagcagggagggcgcggcatgggagagggcaccgaccagggagcgtccatggatcaagaggtgaaagggaaaaggtgtggggaggaggctggcgccggtcgttctgagccaccacaacgtgagacggcctccagcggcgacgattcttggggttcagagtccatgattattgggcagcggctgtcattcccgagggaggcattgggtgtgtatggtgagaaggcgtcgcggatggaaacaaaatga

SEQ ID NO: 94374 - DNA, 1762 bp, Zea Mays
catgattcgatgctcccctgcctgctcccttttgccgggccactcacgtgcgctcgtcaaaccgccgtccccaagggtcaaaaccaagcccgggtcctcgcagcttgctccgtcactcgcctggctgagctctcccactcccacgccgttgccacgctctctcctcagctcctgctccacaacgcacgcagctcgatctgccggcgctataaaccttcgctcccttcgctgtactacggccggctgctgctactgctgcttgtcggggttgagttgtttcttggtgctgggatggagctggggctgagcctgggcgacgcggcagtgccggacgccggcagggcggctccggagctgggcctggggcttggggtcgggattggatccaacgccgccggaaccggcaggggaagcaaggcggcggggacgacgggaactactgggtggtgggcggcgccggccacaccggagtcggcagtgcggctcagcctcgtgtccagcctcggccttcagtggccacctccggacggcggcatctgtcatgtagggcgcgacgaggcgccggcgcgcggcttcgacgtgaaccgggcgccgtcggtggcggggagcgccctggcgctggaggatgacgaggaggagccgggcgccgcggcactgtcgtcgtcgcccaacgacagcgcgggctccttcccgctggacctgggaggcccacgcgcccacgccgagggcgccgcggcgcgggccggcggcgagcggtcctcgtctcgcgccagcgatgaggacgagggcgcgtccgcgcgcaagaagctgcgcctctccaaggagcagtctgcgttcctggaggagagcttcaaggagcacagcaccctcaaccctaagcagaaggcggcgctggcgaagcagctcaacctccggccgcgacaggtagaagtctggttccagaaccgccgagccaggtgcatgcgcactcctaatcctcgtctaactccctccgacccaaccggccaggggctccgctaaccttttgttctctgcaccgcacccatgcaggacgaagctgaagcagacggaggtggactgcgagtacctgaagcgctgctgcgagacgctgacggaggagaaccggcggctgcacaaggagctcgcggagctgcgcgcgctcaagacggcgccgcccttcttcatgcgcctcccggccaccaccctctccatgtgcccctcctgcgagcgcgtcgcctccggccccagccctgcctccacctcggcacctgcgtcgtccacgccgcctgccacagccgccaccaccgccatctcgtacgctgcagcagccgccgcacccgtgcgagccgaccaccggccctcgtcgttcgccgcgctgttcgcggcgacccgcagcttcccgctggcgtcccagccgcggccgcccgcgccggcgagcaactgcctgtagatacgcgcgccattatcggcccgtggcctctccctccgtcggttggtttctcgtaagaatttttggggtttccgaggccgtgcgtcgccgtcgcgtcgacggctgggatgcgatgcgagaagcggaggctgctaggacggcgctaaccttggtttgctttctgtttacgttttctaagaacgccatgtgttcaccttaagcacggatggttaagggtttaagctcgtttaggatgggaggaattagtttcgtttttcccccagtttgtttggcagcagctcagaactatttatgaagtgcatttgcttcgca

SEQ ID NO: 94375 - DNA, 1645 bp, Zea Mays
catgattcgatgctcccctgcctgctcccttttgccgggccactcacgtgcgctcgtcaaaccgccgtccccaagggtcaaaaccaagcccgggtcctcgcagcttgctccgtcactcgcctggctgagctctcccactcccacgccgttgccacgctctctcctcagctcctgctccacaacgcacgcagctcgatctgccggcgctataaaccttcgctcccttcgctgtactacggccggctgctgctactgctgcttgtcggggttgagttgtttcttggtgctgggatggagctggggctgagcctgggcgacgcggcagtgccggacgccggcagggcggctccggagctgggcctggggcttggggtcgggattggatccaacgccgccggaaccggcaggggaagcaaggcggcggggacgacgggaactactgggtggtgggcggcgccggccacaccggagtcggcagtgcggctcagcctcgtgtccagcctcggccttcagtggccacctccggacggcggcatctgtcatgtagggcgcgacgaggcgccggcgcgcggcttcgacgtgaaccgggcgccgtcggtggcggggagcgccctggcgctggaggatgacgaggaggagccgggcgccgcggcactgtcgtcgtcgcccaacgacagcgcgggctccttcccgctggacctgggaggcccacgcgcccacgccgagggcgccgcggcgcgggccggcggcgagcggtcctcgtctcgcgccagcgatgaggacgagggcgcgtccgcgcgcaagaagctgcgcctctccaaggagcagtctgcgttcctggaggagagcttcaaggagcacagcaccctcaaccctaagcagaaggcggcgctggcgaagcagctcaacctccggccgcgacaggtagaagtctggttccagaaccgccgagccaggacgaagctgaagcagacggaggtggactgcgagtacctgaagcgctgctgcgagacgctgacggaggagaaccggcggctgcacaaggagctcgcggagctgcgcgcgctcaagacggcgccgcccttcttcatgcgcctcccggccaccaccctctccatgtgcccctcctgcgagcgcgtcgcctccggccccagccctgcctccacctcggcacctgcgtcgtccacgccgcctgccacagccgccaccaccgccatctcgtacgctgcagcagccgccgcacccgtgcgagccgaccaccggccctcgtcgttcgccgcgctgttcgcggcgacccgcagcttcccgctggcgtcccagccgcggccgcccgcgccggcgagcaactgcctgtagatacgcgcgccattatcggcccgtggcctctccctccgtcggttggtttctcgtaagaatttttggggtttccgaggccgtgcgtcgccgtcgcgtcgacggctgggatgcgatgcgagaagcggaggctgctaggacggcgctaaccttggtttgctttctgtttacgttttctaagaacgccatgtgttcaccttaagcacggatggttaagggtttaagctcgtttaggatgggaggaattagtttcgtttttcccccagtttgtttggcagcagctcagaactat

SEQ ID NO: 94376 - DNA, 2003 bp, Zea Mays
ggctgtggcacttctttgatgatacgagtactagcaaataatgaagagctctggtagtggcaacttccgtttcagcccgccgcgcggaggccgctggttggccaggggacaccacgccttccattattagagtaccactactccattagtaccagcgtaccaccaccaccgaaaacgaatcccagaacagtaccgcagcggcagccatggtgctctcgcacgcgagctccggccgggacgacgacgacgcggtggcctccaccttcgcgtcgcgctacgtgcgcgagcgcctgccgcggtaccggatgccggagcggtcgatcccgcgggaggcggcgcagcagatcatcagcgacgagctcatgctggacggcaacccgcgcctgaacctggcgtccttcgtcaccacgtggatggagcccgagtgcgacaagctcatcatggactccatcaacaagaactacgtcgacatggacgagtaccccgtcaccactgagctccagaaccgctgcgtaaacatgatagctcacctgttcaacgcgccgatcaaggaggacgagacagctattggggtcggaacagtgggatcctcggaagcgatcatgcttgcaggtctggcgttcaagaggaaatggcagaacaagaggaaggagcaggggaaaccgtgtgacagacccaacatcgtcaccggtgccaacgttcaggtctgctgggagaagtttgcaaggtattttgaggtggagctgaaggaggttaagctatcagaagggtactacgtcatggaccccgtcaaggctgttgagatggtggacgagaacactatctgtgtcgcggcgatcttggggtcgactctcaccggagagttcgaggatgtcaagcagttgaacgaccttcttacagagaagaacaaggaaactgggtgggacgtgcctatccacgtcgacgccgcgagcggagggttcatagcgcctttcctctaccctgagctcgagtgggacttcaggctgcctctggtgaagagcatcaatgtcagcgggcacaagtacggcctcgtctaccctggtgttggctgggtcatctggcggagcaaggatgatctgcctgaggagctcatcttccatatcaactacctggggacggaccagcctacgttcacgctcaacttctccaaaggttcctgtcagatcattgcgcagtactatcaactcattcgcctaggcttcgaggggtacagaaacatcatggagaactgccaggagaacgcggcgatactgcgggagggcatcgcggcgacgggccggttcgacgtcctgtccaaggacgccggggtgccgctggtggccttctcgctcagggacagcagccggttcagcgtgttcgacgtctccgagaacctgcggcggttcggctggatcgtgccggcgtacacgatgccggccgacgcggagcacgtggcggtgctccgagtcgtcgtcagggaggacttcagccgcagcctcgccgaacggctggtctcggacgtccgcaagatcctgcgcgagctggacgcgcgcgcgacccacgccgtgagggtcgccaccgccaccgccgagcagtcgggcgacggcgtcgtggccaagaaaagcgtgctggagatcgagcgggaggtcgccgcgcgctggatgaacgccgtgaacaagaagaagacgggggtctgttgatgcgtcgtgggtcggagactgggaggtttcgccatggtagcttcgtctatatgtcgcgtgcttgtttgtgtctgtgcagggcgcttggatgcgttggtccagttccgcgtatgtgaacaaggtgtcgtatgcagtatgcaaatgttcaggatccaggaaccacaaataatggatgtaaatgttgggtttggtgccgtatgttgggtgtggagtatatttcttcgccaggtatttgctgtaatcctgtccctttacgttcgtgcactgcaatgagaataaaaaaaaaataagtgtcgttcacgg

SEQ ID NO: 94377 - DNA, 1917 bp, Zea Mays
caacaccgcactagcctagcctccccccgccgctcggccgaatagaatcgattccccctcctccgtcgctgtccggccgaccgcggagagcggagtcgatcgggggcgacaacgatggtggttagcgtggccgcgaccgggcccggcacggacgccgagccggtgagctccaccttcttcgcgtcccgctacgtccgcgacccactcccacggtaccggatgccggagcggtcgatcccgcgggaggcggcgcagcagatcatcagcgacgagctcatgctggacggcaacccgcgcctgaacctggcgtccttcgtcaccacgtggatggagcccgagtgcgacaagctcatcatggactccatcaacaagaactacgtcgacatggacgagtaccccgtcaccactgagctccagaaccgctgcgtaaacatgatagctcacctgttcaacgcgccgatcaaggaggacgagacagctattggggtcggaacagtgggatcctcggaagcgatcatgcttgcaggtctggcgttcaagaggaaatggcagaacaagaggaaggagcaggggaaaccgtgtgacagacccaacatcgtcaccggtgccaacgttcaggtctgctgggagaagtttgcaaggtattttgaggtggagctgaaggaggttaagctatcagaagggtactacgtcatggaccccgtcaaggctgttgagatggtggacgagaacactatctgtgtcgcggcgatcttggggtcgactctcaccggagagttcgaggatgtcaagcagttgaacgaccttcttacagagaagaacaaggaaactgggtgggacgtgcctatccacgtcgacgccgcgagcggagggttcatagcgcctttcctctaccctgagctcgagtgggacttcaggctgcctctggtgaagagcatcaatgtcagcgggcacaagtacggcctcgtctaccctggtgttggctgggtcatctggcggagcaaggatgatctgcctgaggagctcatcttccatatcaactacctggggacggaccagcctacgttcacgctcaacttctccaaaggttcctgtcagatcattgcgcagtactatcaactcattcgcctaggcttcgaggggtacagaaacatcatggagaactgccaggagaacgcggcgatactgcgggagggcatcgcggcgacgggccggttcgacgtcctgtccaaggacgccggggtgccgctggtggccttctcgctcagggacagcagccggttcagcgtgttcgacgtctccgagaacctgcggcggttcggctggatcgtgccggcgtacacgatgccggccgacgcggagcacgtggcggtgctccgagtcgtcgtcagggaggacttcagccgcagcctcgccgaacggctggtctcggacgtccgcaagatcctgcgcgagctggacgcgcgcgcgacccacgccgtgagggtcgccaccgccaccgccgagcagtcgggcgacggcgtcgtggccaagaaaagcgtgctggagatcgagcgggaggtcgccgcgcgctggatgaacgccgtgaacaagaagaagacgggggtctgttgatgcgtcgtgggtcggagactgggaggtttcgccatggtagcttcgtctatatgtcgcgtgcttgtttgtgtctgtgcagggcgcttggatgcgttggtccagttccgcgtatgtgaacaaggtgtcgtatgcagtatgcaaatgttcaggatccaggaaccacaaataatggatgtaaatgttgggtttggtgccgtatgttgggtgtggagtatatttcttcgccaggtatttgctgtaatcctgtccctttacgttcgtgcactgcaatgagaataaaaaaaaaataagtgtcgttcacgg

SEQ ID NO: 94378 - DNA, 2100 bp, Zea Mays
ggctgtggcacttctttgatgatacgagtactagcaaataatgaagagctctggtagtggcaacttccgtttcagcccgccgcgcggaggccgctggttggccaggggacaccacgccttccattattagagtaccactactccattagtaccagcgtaccaccaccaccgaaaacgaatcccagaacagtaccgcagcggcagccatggtgctctcgcacgcgagctccggccgggacgacgacgacgcggtggcctccaccttcgcgtcgcgctacgtgcgcgagcgcctgccgcggtaccggatgccggagcggtcgatcccgcgggaggcggcgcagcagatcatcagcgacgagctcatgctggacggcaacccgcgcctgaacctggcgtccttcgtcaccacgtggatggagcccgagtgcgacaagctcatcatggactccatcaacaagaactacgtcgacatggacgagtaccccgtcaccactgagctccagaaccgctgcgtaaacatgatagctcacctgttcaacgcgccgatcaaggaggacgagacagctattggggtcggaacagtgggatcctcggaagcgatcatgcttgcaggtctggcgttcaagaggaaatggcagaacaagaggaaggagcaggggaaaccgtgtgacagacccaacatcgtcaccggtgccaacgttcaggtctgctgggagaagtttgcaaggtattttgaggtggagctgaaggaggttaagctatcagaagggtactacgtcatggaccccgtcaaggctgttgagatggtggacgagaacactatctgtgtcgcggcgatcttggggtcgactctcaccggagagttcgaggatgtcaagcagttgaacgaccttcttacagagaagaacaaggaaactgggtgggacgtgcctatccacgtcgacgccgcgagcggagggttcatagcgcctttcctctaccctgagctcgagtgggacttcaggctgcctctggtgaagagcatcaatgtcagcgggcacaagtacggcctcgtctaccctggtgttggctgggtcatctggcggagcaaggatgatctgcctgaggagctcatcttccatatcaactacctggggacggaccagcctacgttcacgctcaacttctccaaaggttcctgtcagatcattgcgcagtactatcaactcattcgcctaggcttcgaggtactactgttcttcgatcggttcttcctcctcttgatcgaacattctgaatatatatgtgcaggggaacaaaagggggtgctgtctgatacgtttcttgagggcgagtcgtttttgtttctgttctcgctttgtgctgccgtaacagcctcccaatctggtcgggttttttttttttggtgccgcttctatctggtgtgtaggggtacagaaacatcatggagaactgccaggagaacgcggcgatactgcgggagggcatcgcggcgacgggccggttcgacgtcctgtccaaggacgccggggtgccgctggtggccttctcgctcagggacagcagccggttcagcgtgttcgacgtctccgagaacctgcggcggttcggctggatcgtgccggcgtacacgatgccggccgacgcggagcacgtggcggtgctccgagtcgtcgtcagggaggacttcagccgcagcctcgccgaacggctggtctcggacgtccgcaagatcctgcgcgagctggacgcgcgcgcgacccacgccgtgagggtcgccaccgccaccgccgagcagtcgggcgacggcgtcgtggccaagaaaagcgtgctggagatcgagcgggaggtcgccgcgcgctggatgaacgccgtgaacaagaagaagacgggggtctgttgatgcgtcgtgggtcggagactgggaggtttcgccatggtagcttcgtctatatgtcgcgtgcttgtttgtgtctgtgcagggcgcttggatgcgttggtccagttccgcgtatgtgaacaaggtgtcgtatgcagtatgcaaatgttcaggatccaggaaccacaaataatggatgtaaatgttgggtttggtgccgt

SEQ ID NO: 94379 - DNA, 143 bp, Zea Mays
acagatagctagctagatcattcataaaagctccagagatgatcagacacaaaagcaccacaacgacatcactccagcttgaagcagttcaaaagcctacaactacatcactaatatttcatatcactccagctattgttcct

SEQ ID NO: 94380 - DNA, 1442 bp, Zea Mays
cacagacacagtccaccactgctactccatggagacagcaggtcagacgacactccaggaaagcgctgtgcacgcccggaggcaggcggcgtgttggtggcctttggacaccacggcatgcagcagcttggacttggacgacgcgagcaccttcagcagcagcagcctcctccttggatgggaatgggatccacagctctgctgctttggtagtccccatgcccgagactctgagctcttcggccccacatgcatggagtctccggtgtccgaggcgtcagcagcggcggccaccggggagctggacgatgaactactactcatgagcctgtggggcgagtgccacctcttcagttcctgcagcgctctcaaggagaagacggccacctcttcccaacgtactcctaagagtttacaatctgatgatgatcatcattccgatctgccgacatccccggccaagactactccggcgacggcacaagcagcagagccttcgcactgcgacgtggacctacgggccagttacaccggcggcgcccagcagcagcagcagcagcagcaccgaaccactcgtgccgccaacagctcgtcgaagcgctcggcgaccgaaccagaaggtaccgcggccgtccggacctccttctgtcacagtactaaaaccgcagcaacggtttctcagttctctcactgttctcctgtgcatgcccttgtccctctgcacgcagagaaaggagcagaaggcggcaagaggagccgcaaggcgccgggctccaccgcggtggcggcgtacccgttcgccgtggtgaagcccggcggcgcggacggcggggtgacgctcgccgacatcaaccggtggatcctcacgccgccggctcgccccgtccggcaccccgtgggggagttcgcgtgcgccccacgcgtgtcggctgccaaccggccggggccgtcgggcaggacggtggccggcttcaccaggctccgcaccgctggcagaggcacgataaccatcgtgaggacaagaggctaattaaatttggtgactgaagtgaaaactagtgactagctagctggttgtattgttcgtgccgacaagagcaaagtagatcgctgcagagggctttttcagaaactgggttgggtagtggttgtggttgtaccagcggacaagaaggctcgtactgagaaattgtacatttgtaccatttgggtagatggttgctgtctttatgcttcaacacctgaaagttcacgcaaccgtgcaagttacggcgctgtagatttaggctcaacaagacgtataacacctaatatgctttgcaatatgctttcatgtatgtctataaatatagattctctctgtaatttgtgttcttcggttgatagtggatctgtttactcgtggttgttcgctcctccatattggagggaattttccacgt

SEQ ID NO: 94381 - DNA, 1310 bp, Zea Mays
cacagacacagtccaccactgctactccatggagacagcaggtcagacgacactccaggaaagcgctgtgcacgcccggaggcaggcggcgtgttggtggcctttggacaccacggcatgcagcagcttggacttggacgacgcgagcaccttcagcagcagcagcctcctccttggatgggaatgggatccacagctctgctgctttggtagtccccatgcccgagactctgagctcttcggccccacatgcatggagtctccggtgtccgaggcgtcagcagcggcggccaccggggagctggacgatgaactactactcatgagcctgtggggcgagtgccacctcttcagttcctgcagcgctctcaaggagaagacggccacctcttcccaacatgatgatcatcattccgatctgccgacatccccggccaagactactccggcgacggcacaagcagcagagccttcgcactgcgacgtggacctacgggccagttacaccggcggcgcccagcagcagcagcagcagcagcaccgaaccactcgtgccgccaacagctcgtcgaagcgctcggcgaccgaaccagaagagaaaggagcagaaggcggcaagaggagccgcaaggcgccgggctccaccgcggtggcggcgtacccgttcgccgtggtgaagcccggcggcgcggacggcggggtgacgctcgccgacatcaaccggtggatcctcacgccgccggctcgccccgtccggcaccccgtgggggagttcgcgtgcgccccacgcgtgtcggctgccaaccggccggggccgtcgggcaggacggtggccggcttcaccaggctccgcaccgctggcagaggcacgataaccatcgtgaggacaagaggctaattaaatttggtgactgaagtgaaaactagtgactagctagctggttgtattgttcgtgccgacaagagcaaagtagatcgctgcagagggctttttcagaaactgggttgggtagtggttgtggttgtaccagcggacaagaaggctcgtactgagaaattgtacatttgtaccatttgggtagatggttgctgtctttatgcttcaacacctgaaagttcacgcaaccgtgcaagttacggcgctgtagatttaggctcaacaagacgtataacacctaatatgctttgcaatatgctttcatgtatgtctataaatatagattctctctgtaatttgtgttcttcggttgatagtggatctgtttactcgtggttgttcgctcctccatattggagggaattttccacgt

SEQ ID NO: 94382 - DNA, 1127 bp, Zea Mays
atggagacagcaggtcagacgacactccaggaaagcgctgtgcacgcccggaggcaggcggcgtgttggtggcctttggacaccacggcatgcagcagcttggacttggacgacgcgagcaccttcagcagcagcagcctcctccttggatgggaatgggatccacagctctgctgctttggtagtccccatgcccgagactctgagctcttcggccccacatcatccatggctgactgcgcccgtgtgataggcatggagtctccggtgtccgaggcgtcagcagcggcggccaccggggagctggacgatgaactactactcatgagcctgtggggcgagtgccacctcttcagttcctgcagcgctctcaaggagaagacggccacctcttcccaacatgatgatcatcattccgatctgccgacatccccggccaagactactccggcgacggcacaagcagcagagccttcgcactgcgacgtggacctacgggccagttacaccggcggcgcccagcagcagcagcagcagcagcaccgaaccactcgtgccgccaacagctcgtcgaagcgctcggcgaccgaaccagaagagaaaggagcagaaggcggcaagaggagccgcaaggcgccgggctccaccgcggtggcggcgtacccgttcgccgtggtgaagcccggcggcgcggacggcggggtgacgctcgccgacatcaaccggtggatcctcacgccgccggctcgccccgtccggcaccccgtgggggagttcgcgtgcgccccacgcgtgtcggctgccaaccggccggggccgtcgggcaggacggtggccggcttcaccaggctccgcaccgctggcagaggcacgataaccatcgtgaggacaagaggctaattaaatttggtgactgaagtgaaaactagtgactagctagctggttgtattgttcgtgccgacaagagcaaagtagatcgctgcagagggctttttcagaaactgggttgggtagtggttgtggttgtaccagcggacaagaaggctcgtactgagaaattgtacatttgtaccatttgggtagatggttgctgtctttatgcttcaacacctgaaagttcacgcaa

SEQ ID NO: 94383 - DNA, 86 bp, Zea Mays
acattatttcatattactgcgcatcagacatgcaagtatatgtatatatatgcatgcgcccaaaggacatcgccaattccattcgg

SEQ ID NO: 94384 - DNA, 967 bp, Zea Mays
tccgcctcctgtctccgcccatctcaaaaccctagcaaccgcgcctccgcccctacccgaatccaatcaaggtctgatccctcggtggcgaggacacccaacgctgattcgtccctgcagatcggtgggcaggacagattcagattcgggttcggggtccgctcaggtcgcctcgccggggtccaccgcggcggtcagagggtatggtgggcggcgggaggcagggcggagcggtggaggaggtcaagctcaacaccggcaacgtgttcgcggcgctcgagtccctcaagaagaagaagaagggtgacaaaggcaaggtggccgggaggaggacgacatgggggccgtgcagtggcaagagacaccgcagaaggagcagttctgggctcccgcgccacttaccaccaagtcctgggcagacgtcgaggacgacgacgactacttcgccaccaccgcgtcgccacgccccttctggggcactgccggtgagcccgctaaggaagaggacgacgtcgatgatgttgtgcgcgccgcccttcaggagctaatttcaatgggtgatgctactcatagtactaaactgtacatagtaaaccttacaactggactctgtacaagttcacatataggagtttcacatgaggaaaaatttagcagggtccaggaggttgtgcaacctgtgcaatcatccatctcagtccaccagtcagctacccaacaaacaattttgcctcaatttgttgagccgttggcacgaagggtgtggcctctgtgcggtgatcccttgaccatgtcgattctgcacgatgactattggagtgatctaacacacctcttttttgtgcatgttgaccgtgtgaggaacacattggaggaattaagaaggagctcatgaatctgaccgtactggccatagttaggcaagcaatcgaccctatggtgaagttactagaaagcacatatgttg

SEQ ID NO: 94385 - DNA, 2335 bp, Zea Mays
ctccacgcttagcctccttctaatcttatcctgccaccgcactaccttgttccttatcctctctcttccctggaacaaaaatcctgtatgtgcatggaaatctgtcgcttccttcaacctctgttcctatccgcgcgtggaggtggaaaaaagatcttctccggccgccgctggatccctacaaatatcaccaccgagcggctccttaccacggcatcgttctccctgcgctctctctctcacactgcgtctttggctcctgctccatctcctttgctgcgaagctccgagctctgctcggccggatttttcatggcgcccagccccttgcgtcggccagcccctgccatggagccttcggctgtgcagctctctccctctcgcgtgccttggatttgtgccgcgccctgcagagctcccttggtgagcgcccaggtcgtccctctccggctctctctgctggcggctgagttccctggaagccgtgctctgctcgccatggatgtcgtccaccatggtgctcggtctagacgtcgattccctcgtcgcagtgagctccagccgattccttgcctcttccccgtttaaatcatggagcatcagccgctgctccctgtttccggcagccaagcccctgcgcgcgcatcctcccgcgcagtccccagcgccaccggccaacctcgccggccaagctccctcgccttcaatcctttagccgtcgcgcccctcagctcgctggccgtgacctcgccgaggtttttcccatggccggctcactgctcaacccaagccgaggtcttgtacgaaacagcaccttccatggccgctgcgtcgcgctccttgtgcttgcgcagctgaacgccatactgcgcagtgttttgtccgatgtcgagcttagctcagtctctgtttctctgcgcacgtcgagttccttgccgcgcgctgagctttctgtcggtctccaactcgccatggtgtccaactcctgtaccaaccgtgacctacgcttggtcttcccagctgcgttgacctgcgtcgacctctgctcgcttcgctcgggatgtcgtgctgggtcgctccatacttggtgcacaccgcgtcgcgatgctgtgcaccatgcgtcaccagtcatcctcaccatggccagcagcttcaaaaatatggacgcctaagcctttttcctatctttcacgcccacctcggtcttcatcctcaatctttgccagaaatttggttaaatggacgaaccagaagatctccagaattttatggatgaagaagaaaataaagtcgaagagtgacgctcgctagatgctcgacgaaaggcgtgaaccgaagatttatcactattcctcaattgccgaattaaattttttttgaggtgagtgattcactgctcctccataatagatcgaagcatggaatggtttcgtatattagatgcgataattttcttgtcgtggttaggatgtgttgtggctgtattaaatattcgttgatgtatcatatgtgcaatgtatgtttgaattggtgacgagaaggataggtctagtatttttattgactagccatcatatttttcaggattatgctagttttgtttattaagatgtagtcgatgctcgactctagtagtcattattttctatgttcggtgaccgattaaatgtcttaagttgatgaaaacgtagattagacaaggagtgcttaggtagacgtgtaggtctagtacgcttgaatcagttctatgtttacgacgtgaagtataacgatgatgcgtggaataaatttagtatttacttaattagctgatgagttgtgtttaggttaattatgtttaatgtgtatagtttgttattcgtgatgtttgcgataggttcaagaagcgtaattattacgcgtagttgtacgtcaataactagtgttttcgtataaaatagtacaacgcctcgccgctagatgtttaaattcgctatcgcatagcactatttaggtttgtaatattcatgtttatatgcattcatatgcataatgcatttcattcaggtacgttaattaatcgcgtgatgcggaagaaaaaccaagtcgaccccaagcgtgggctaatctgcaagctgaagctgatgaatcaacctgaagatggttaaatcaagcaagtgctcggtcaaagaatactcgtcaagcggacgtcacctaacaacactaacctagtgttactcaggcaagccccggtgcatgcaacccctttccttgtgtttttaaatacttttcgcacactttaagtctagtgaaatgtgcattaagtttataggaattgcttgaaaccctttgatgc

SEQ ID NO: 94386 - DNA, 1832 bp, Zea Mays
actcgggctcttctttgttctcgtcgtcgtggtcaccatagagcgcgtctgcaagcgctcccaccccaaaaccccgcggacgcaccgacgcgcgagccataatgcgccgccaaagcctcgccaccgtactgctgctcctggtggccgccgcggccctggccgcccccgccgctgggcactttgagtcctcctgccccttctacgaccacggcggccacggcgaaccacacgaacgccacgaccatggccacagctgcggcggcggcgcggaccatgagcaccaccatcaccatcaccacggccatggacacggcgagatccagcggctgctcccggaggagatggcggaggaggcggatctcgagctcgagtccttcggttacgaagaccatgaccacggccaccaccaccaccaccaccatcaccacagccacggcgacatggagacatcgcccatgggcgtgtggctgagcgcgatggggtgctcgctgctggtcagtatggcgtcccttgtctgcctcgtcctcttgccggtcatcttctttaaggggaaaccgtctaaggccatagtggattcgcttgcagtgtttggggcaggagctatgcttggagattcatttcttcatcagctgccacatgcttttggtggagggcattctcactcgcatgatcatgagggtcatgatcatgctcatgctcatgagcatgcacatgcacactcactgcaagatctatctgtgggtttgtctgtactatttggcattgtactgttttttattgtcgagaagattgtgaggtatgttgaagacaattctcaaaatggggctcatagcatgggtcatgggcaccatcatcataatcataaacggcacgattctagcgataaagccaaattgaattaccaaaagagtgatactgatggtaaagacattgatcatgctgaagaggaaccttcggttaatgataccactggaaaaataagtgatggccatgaatcagaagctactatacgcaagaggagctcatccaaagccactgatggagaagccaccaattctggaagggatcctgcccctgaaaaagcaccatcaatttcaaactctaacttagtgtttggctacctcaaccttttctcagatggtgttcataacttcactgatgggatggctctcgggagtgcctttctgctgcatggttctgttggtggctggtctaggactttatttctgcttgcacatgaacttccccaagaggtaggagattttggtatccttgtgcggtcaggcttcacggtatctaaggccctattcttcaatttcctctctgcgttggttgctcttgctggaacagcactagcattgtctttgggtaaagatccgggacattcctccctgattgagggtttcaccgccggtggtttcatttacattgctgtcgcgggagtcctaccacagatgaacgaccagaaaacaaccatcaagagctcagtagctcagctgatctccctggcaatggggatgctggtcgctctaggcatttctctggtagaataatctgaatccccatttcaccacttgcagctttaggtccaaccgagttaccccaagtcgatataatgctctagcagctccagactagaagcagggttttctgatcctctcgatatatagtaccaaaaagttttttttttttgaaattttggcatctggttatagattgcctcgcatcggtgttatttgaaggcaacccgtcgcactaactgaatactgtacaactttatggccggctggctgatgtcggctcataataaaataagtataaaaaagctaaaa

SEQ ID NO: 94387 - DNA, 1899 bp, Zea Mays
gtgatgctcgggtggtgattggcattgtcactcgggctcttctttgttctcgtcgtcgtggtcaccatagagcgcgtctgcaagcgctcccaccccaaaaccccgcggacgcaccgacgcgcgagccataatgcgccgccaaagcctcgccaccgtactgctgctcctggtggccgccgcggccctggccgcccccgccgctgggcactttgagtcctcctgccccttctacgaccacggcggccacggcgaaccacacgaacgccacgaccatggccacagctgcggcggcggcgcggaccatgagcaccaccatcaccatcaccacggccatggacacggcgagatccagcggctgctcccggaggagatggcggaggaggcggatctcgagctcgagtccttcggttacgaagaccatgaccacggccaccaccaccaccaccaccatcaccacagccacggcgacatggagacatcgcccatgggcgtgtggctgagcgcgatggggtgctcgctgctggtcagtatggcgtcccttgtctgcctcgtcctcttgccggtcatcttctttaaggggaaaccgtctaaggccatagtggattcgcttgcagtgtttggggcaggagctatgcttggagattcatttcttcatcagctgccacatgcttttggtggagggcattctcactcgcatgatcatgagggtcatgatcatgctcatgctcatgagcatgcacatgcacactcactgcaagatctatctgtgggtttgtctgtactatttggcattgtactgttttttattgtcgagaagattgtgaggtatgttgaagacaattctcaaaatggggctcatagcatgggtcatgggcaccatcatcataatcataaacggcacgattctagcgataaagccaaattgaattaccaaaagagtgatactgatggtaaagacattgatcatgctgaagaggaaccttcggttaatgataccactggaaaaataagtgatggccatgaatcagaagctactatacgcaagaggagctcatccaaagccactgatggagaagccaccaattctggaagggatcctgcccctgaaaaagcaccatcaatttcaaactctaacttagtgtttggctacctcaaccttttctcagatggtgttcataacttcactgatgggatggctctcgggagtgcctttctgctgcatggttctgttggtggctggtctaggactttatttctgcttgcacatgaacttccccaagaggtaggagattttggtatccttgtgcggtcaggcttcacggtatctaaggccctattcttcaatttcctctctgcgttggttgctcttgctggaacagcactagcattgtctttgggtaaagatccgggacattcctccctgattgagggtttcaccgccggtggtttcatttacattgctgtcgcgggagtcctaccacagatgaacgaccagaaaacaaccatcaagagctcagtagctcagctgatctccctggcaatggggatgctggtcgctctaggcatttctctggtagaataatctgaatccccatttcaccacttgcagctttaggtccaaccgagttaccccaagtcgatataatgctctagcagctccagactagaagcagggttttctgatcctctcgatatatagtaccaaaaagttttttttttttgaaattttggcatctggttatagattgcctcgcatcggtgttatttgaaggcaacccgtcgcactaactgaatactgtacaactttatggccggctggctgatgtcggctcatgacaggatcaacagcatatagtggaatccctgtttcctagccgaggtgaggcccttttggcggct

SEQ ID NO: 94388 - DNA, 2802 bp, Zea Mays
atggccgctgtcgagccccggcagttcggccgtctggagccggcgcgcgtcggcgcgtaccctcccccgccgagccacatcccgcggcgcgcggactcgcccgcgcgcggctgcggtttccctcccctcgtctccccaccccgcagcacgtcggacgatgcgtcgtcgtcggacgacgagcaggatgactggcgcgagctgtacgggtcgcagctgcagctggaggtggagccggcggcgcaggacccgcgcgacgagggcaccgcggacgcgtgggtcgagcgcaacccgtgcctggtccggctgacggggaagcacccgctgaactgcgagccgccgctggcgcggctgatgcagcacggcttcatcaccccggcgccgctgcactacgtgcgcaaccacggcgccgtgccgcgcggggactgggcgacgtgggccgtggaggtgacgggcctcgtgaggcggcccgcgcggctcaccatggacgagctggcgcgggacttccccgccgtggagatccccgtgacgctggcgtgcgcgggcaaccggcgcaaggagcagaacatggtgcggcagacggcgggcttcggctggggcgccgccggcgtgtccacgtccgtgtggcgcggcgcgcgcctccgcgacgtgctccgccgctgcggcgtcgcgccccgtcacggcggcgcgctcaacgtctgcttcgagggcgccgaggacctccccggcggcggcggcggcgggtccaagtacggcaccagcgtcccgcgcgagtgggccctggacccgtcgcgcgacatcatgctcgcgtacatgcagaacggcgagccgctgctgcccgaccacggcttccccgtgcgcgtcatcatcccgggctgcatcggcggccgcatggtcaagtggctgaagcgcatcgtcgtcacccccgccgagtccgacaactactaccattacaaggacaaccgcgtcctgccgtcgcacgtcgacgccgagctcgccaacgctgaggcgtggtggtacaagccggagtacatcatcaacgagctgaacataaactcggtgataacgacgccggggcacgacgagatcctgcccatcaacggcatcaccacacagcgcggctacaccatgaaaggatacgcctactccggcggcggcaagaaggtgacgcgggtagaggtgacgctggacggcggcgagacatggctggtgtgcgacctcgcccacccggagaagcccaacaagtacggcaagtactggtgctggtgcttctggtccgtcgaggtggaggtcctcgacctcctcggcgccaaggagatcgccgtgcgcgcatgggaccagtcgctcaacacccagcccgagaggctcatatggaacctcatgttttcatctgttcctggtggattatttattctgacgatggcgctcgaacaactgtttcgctgtttggcacgcacggcacaggggatgatgaacaactgctggttcaaggtgaaggtgaacgtgtgccgtccgcacaggggcgagatcgggctggtgttcgagcacccgacgcagccgggcaaccaggccggcggctggatggcgcggcagaagcacctggagaagacggcggaggcggccgcgccggggctgaagcgcagcacgtccacgcccttcatgagcaccaccgacggcggccaccagcagctcaccatgtccgaggtgagcaggcacgcgtcgcgggactcggcgtgggtcgtcgtccacggccacgtctacgactgcaccaggttcctcagggaccacccgggcggcgccgacagcatcctcatcaacgccggcaccgactgcaccgaggaattcgacgccatccactccgacaaggccaaggctctgctcgacgcctaccgtgtcggcgagctcatcgccaccggcacctccgacagctccgtccacggcggctccgcgctgccgtcccacctcctcgcgcccatccgcgaggccgccagggccccggcccccgcgctctccggcccgcgcgacaaggtccgctgccggctcgtcggcaggacggagctgtcccgcgacgtccgcctcctccgcttctccctgccgtcgccggaccaggcgctcggcctgcccatcggcaagcacgtctccgtctgcgccagcatcgacgggaagctgtgcatgcgggcgtacacgccgacgagcgtggcggacgaggtcggccacttcgacctcctcgtcaaggtgtacttcagggacgagcaccccaagttccccagcggcgggctcatgacgcagcacctggactcgctcccgctcggctcctgcatcgacgtcaagggcccgctcggccacgtcgagtacaccggtcgcggcggcttcgtgatcgacggcagggaccgctacgcgcgccgcctcgctatggtctgcggtgggagcgggatcacgcccatgtaccaggtcatccaggcggtgctgcgcgaccagccggaggaccgcacggagatgcacctcgtctacgccaaccggacggaggacgacatcctcctccgcgacgagctcgaccggtgcgcggccgagtacccggaccggctcaaggtgtggtacgtggtcgaccaggtgaagcgccccgaggaggggtggaagtacagcgtcggcttcgtaacggaggacgtcctgcgggagcacgttccggaaggcggtgacgacacgctggcccttgcctgcgggccaccgccgatgatccagttcgctgtctcccccaacttggagaagatgaagtatgacatggccaattctttcgtcgtgttctaa

SEQ ID NO: 94389 - DNA, 1107 bp, Zea Mays
accgtgtctgcctcaaagcgatgccaggacgccacgtccaagcaaagcacccgatgccattgccacctcccagcactcacgcgtgagcgtgactataaaaaacgcaccctctgcatccgcccccgtctgcctgccctaccgaatctttcgccgtcccatcagcccagcaattcttcgctgttcgaggacccctcggtttcgaccgaagcccagcaagccgaccacacaccgctgccgttggttccgtcccaagagatgggcaagtcctggtcgctcatcagccacctccacaccgtcgccgggccaagcatcaccctgctgtaccctctgtacgcgtcggtgtgcgcgatggagagcccgtccaaggcggacgacgagcagtggctgtcatactggatcatacactccttcgtcaccctcctggagatgctcgccgagccgctcctccactgggtacccgtgtggtacccggccaaggtgctgttcgcggcgtggctggcgctgccgcagttcaagggcgcctccttcgtctacgagaagctcgtcagggaacagctccggaactaccgcgccagatacccgcgcaagggcgccgccgccgccgccgtcggcggcgacgacgacgaccataaggtgcacatagccaaggctgaggctgagcacgaccatgtgcagtgaaagcgtgtggagacgacgcaggagctgaccggagatcatcacaggaacttctgtagatctggtgttccaaggtgttcattcgatgtatcatcctacgtatctctgtaactcttgtggactgccggtgtcgcgtaatgtatctgaactcttcgtgagtgcgatggaacccccctccccttgcagcacgagatgcttctgtaagaacgataacatgtagacaagccaagcgcctcagctccttaagtgaaattctctactactactactactataatgcaccagctttgtgcacggatgaattcatgcatcgtgcccatccccacccaaggactagattcaagtcaactacatgctatgcattacaacaagcatctgttgcttgcacaaatggataaatggcataaagggaataaaaattgggctagataa

SEQ ID NO: 94390 - DNA, 926 bp, Zea Mays
accgtgtctgcctcaaagcgatgccaggacgccacgtccaagcaaagcacccgatgccattgccacctcccagcactcacgcgtgagcgtgactataaaaaacgcaccctctgcatccgcccccgtctgcctgccctaccgaatctttcgccgtcccatcagcccagcaattcttcgctgttcgaggacccctcggtttcgaccgaagcccagcaagccgaccacacaccgctgccgttggttccgtcccaagagatgggcaagtcctggtcgctcatcagccacctccacaccgtcgccgggccaagcatcaccctgctgtaccctctgtaagttccttcatcaccctaataatagcagggaccagttttaccagtgcagcagtgaccgaccacggtccacggcatacgtgagctgagagcatcgtgctgggacatgcgtgccgttggtggtgctgcaggtacgcgtcggtgtgcgcgatggagagcccgtccaaggcggacgacgagcagtggctgtcatactggatcatacactccttcgtcaccctcctggagatgctcgccgagccgctcctccactgggtacccgtgtggtacccggccaaggtgctgttcgcggcgtggctggcgctgccgcagttcaagggcgcctccttcgtctacgagaagctcgtcagggaacagctccggaactaccgcgccagatacccgcgcaagggcgccgccgccgccgccgtcggcggcgacgacgacgaccataaggtgcacatagccaagctttgtgcacggatgaattcatgcatcgtgcccatccccacccaaggactagattcaagtcaactacatgctatgcattacaacaagcatctgttgcttgcacaaatggataaatggcataaagggaataaaaattgggctagataa

SEQ ID NO: 94391 - DNA, 173 bp, Zea Mays
aaacatagatggattaaggatctttaacagatgttttttgttattttctcgagatctaaatgttcattgaccaaatttgtcactgtgtatgcaactatgtttttgtatatcactgaaactacctataaaattatcattgtgtatcagtgtatgcagttggcttgatgtgggac

SEQ ID NO: 94392 - DNA, 1017 bp, Zea Mays
atgccgacgcgatggtggggggccagaggaacctgcacgacggaccaaggtcgccggtgtcactgcggcaaccatagcgacacagaaaacagtgaaggaaacgcggcagtgggaggagaagacggtggggatggacgagttcgcggaggaggtagtctgtacctgcgaaggcggcgagatgcggggaggagagggaccggcggtccgggcgacggcgaggagcagcagcagcgggacaacgtccgcgcggaggtgcgggagggcgtcgagttctacagcaacggggaccggtacgagggggagttccgcgggggccgctgcagcggcagcggcgtgtacagcttcttcgggaagggcaagtacgagggcgagtgggcggacggcaagtacgacgggcacggcgtcgagagctgggcgcgcggtagccggtaccgcggccagtaccggcagggccagcgccacggctacggcgtgtaccggttccacagcggcgactgctacgccggcgagtgggccggcggccagagccacggcgtcggcgcccagacctgttccgacggcagcacgtacgccggcgagttcaagtgcggcgtgaagcacggcctcggctgctaccatttcaggaatggcgaccggtacgcaggtgagtacttcgcggacaagatccacggcttcggcgtgtacagcttcgccaacgggcacagctacgagggctcatggcacgaagggaagaagcaggggctgggcacgtacgcgttccggaacggggacgaacgggcgggggagtgggactctggagtcctgaagaagtcgctgcctctgtcagacccagctgtccagcgcgccctacaggctgctcggagggctgcggacggcgccttccacctcccgagagtagaggagcaggtgaacggggccgtcatggctgccaaccgaggggccacggccgcccgtgtcgccgcgatcaaggcagtgcagaatagggtcgatggcaagttctgcttcatcgacgtgtga

SEQ ID NO: 94393 - DNA, 1325 bp, Zea Mays
ctccttccccctctcttccggccgttaccaaagcagacctctgctcagctcagcgcaccctcctccatccatccaaacgcaggaggcttgtcggcggctgcaatggtggacgtggaccgccggatggccggcctgactccggcggcacatgcggcggggctgcggcgcctgtccacgcgcgccgcggcgggcccctcctcggcgtcggcctccccgcggcacgggctgcactccttcgccccgctcgcggccgcggtgctgggccacctccgggcctccggggtggccgtgctcccgggcctgacggagctggagctggcgcgcgccgaggccgagatggggttcgcgttcccgcccgacctccgcgccgtgctcgccgcgggcctgccgtcggggcccgggttcccggactggcggtcgcgcgcggggctccggtccgccttcgacctgcccatcgcggcggcgtcgctgcagatcgcgcggggcgcgctgtggccgcgctgctggggcgcgcgccccgccgaccccgaccgcgcgctgcggctcgcgcgctccgccatccgccgcgcgccgctgctcgtgccgctcttcgaccgctgcttcctgccctgccgcccctgcctggccggcaacccggtgttcttcgtcaccgacgaccgcgtcctctgctgcggcctcgacgtcctgcacttcttcgcccgggactcctgcttccagccgctggacccgcggtcgcgcgacggcgaagcaggcgccacgccgtgcacgcgccgcagcctcgacgcggcctgcggcagcggcaaggcgccccgctggatcgagttctggagtgacgcggcgtccgaccgccgccgccgcgactcgtcctcctcggagacgtccaccgcgtcgtccctgtcctccggatgcgcgtcgccgccgccggctgccaggcgggccaggaacccgcactgggtcgacagctacctcgaccggctgggccacgtgctgcggcagggcgggtggagggacacggaggtgacggagatggtcgaggtggcggcctccgggtccggggtgttggacggcgaggaggcggcggcccccgcggtggactcggacgcggcgctcgacgcgctgctgctcaatgccgaccggtgctccgacgcgctccggcgggccgggtggagctcggaggacgtgtcggacgcgctcgggctggacctccgccggtgcaagcagcggccgcgccctgcggtgcgggtgccgccggagatcgccgtcaaggtcgagcggctcgcgcaggcggtggcgcgcccctgaccctccccggcgcctgccgtggc

SEQ ID NO: 94394 - DNA, 1389 bp, Zea Mays
cagtgtcgtgctgctgtgtttgcaatgcagcacaagactgagcaatctgagctgctagaggtggcgccccgccgggacgcggaggctcgctttctcccagacgcagtagtccttgccgtgcgccgccgggtggaaatccgacgggaccacgctgctcacgccgtaccttgtcccgatcttcaccatgaccttctcgtcgacgacggccacgtacgcgtccgcgtccgccacgaggatccgcagcttgctcccggcgcggatgccgttccgcgccctgatggcagacagcgtggatatctcctgcttcaggttccagtcgaacatgtggtcgtagaactggacgggactcctggatgggtgaggatgtaggcgtagccctgcatgaccttgtcggatgggaacggccagagcttctgcgtcgacccggtgtcatggttgtcgacgaaggtgacggccttctcgggcgcccacccgatcaggccggccgcgttgccggagctgtcgcgcagccgccacagctccccctgcacgcccgcctgcagcaggcccttggtggggaagtcgaacgccatggcgggcccgccgacggcccgcgtccagtccagcagctcctgccggcactggtcctggttgggcgccggcttgccgtccccgctgtagctcagcgagttccatatctccgcgacgacgaagctcggcggccccgtgctctccacgtacattctggcgacggccggcgagtagcccttggcgaagtcgaggcgccagccgtcgaaccccacggcgtcggacctgagccagttgagccaggcggagagctcccgctgcacgcgcgggttgaggtggtcgatgtcgggcgccgccgcgaacccctcgcccgtgtcgcggtgccccgtcccgtccgagtactgcgtgtcgtcgctgcagatcatcccggggccccagtccaggcggtcgtcgggagtcccgccctcgaagatgcagtacacgccgcgcgcgtccttcttttccgcgcaccggtggttgatgacgatgtccgccacgcactgcacgcccctgccgtggaacgccgctatcagggacttgagctccgccgccgtgccgtacttggacgcgtccaggtcgtataggcggcctggcatagtaccttgtggcgagacggagtgcgagggtggaggcagccagacgtgcgtgacgccggccttggcgatgtcgtcgacctgggccttgagcctgttgtaccagcctccctgctgcttgcacgactcccagttaaacccctgcacgcgcgcgcacagatcgtcgtggccagcagggtggtgcagagcgccaagaggaagagcaagcacaagctgctcgagtgcttcatcatctccgtctgcgactgcg

SEQ ID NO: 94395 - DNA, 696 bp, Zea Mays
atgtcccaccgcctcggccgcgttgtcagcgacctcagccacagcaactcccactcagtgacgatgacggaccatagcctccaccgccagagctcgacgagcaacaacgagggcggcaacgccggcaataagtccaagaagaagctctcgctcctcatctccagcgtcgtctcctgcacaagaagcgagagcagctgcgaaaccgaaacgggcagcagggagaggaacagcagcaggaagcagcaaaccgacggcggagctggcgagaggggtcgaggcctagagacgatagtcctggcggcggtgcggaagtacgtggcgatggtggagcagctcttcacgtcgtcctactccgccgccggtagcagccgccgggacgtggacgggctgcaggggcggcggcggccgcacacgttcacctccacgcgccacgccgggggtaacggcaacgccgccgccgcccattcgtccaagcggcacggagggcggctgcggctgccgtcggcgcccgcgtcgatgcgagggtcgcccgccgccagcggccacctctccgtgggggagtcggtgaccacgtcgtcggaggtgagcacgatggaggagctgcagagcgccatccaggccgccatcgcgcactgcaacaactcgggcgccgccgccggcggcgacaggcagcagcagcagcagcgtaaatgttga

SEQ ID NO: 94396 - DNA, 1146 bp, Zea Mays
gggctgtcctgcccttcttcccacggttcacggctgattgagtcggccactgcccacgccacccaaaaactcatggccagcgctgtctgcggcgtcaccgcgcgcgcccacctgccttccgccgtccctgcagccgcaagaaagctcttcttccgctgcagggccgcgtccaccatgaacgaggcatcggcgagctcgccggacgccgaggagaagaagacgacgactgtcttcgtggccggctcgacggggcgcaccggcaagctcgttgtggagaagctgctggccaagggattcggcgtcgtcgccggtacgacggacgtgagcagggcccgcggcagcctgccccaggaccccaaccttcagctcgtcagggctgacgttacggagggcgtcgacaagctggtggaggccgtgcgcggcgtcgatgctgtcgtctgcgcgacgggattccggcggtcctttgacccttttgctccgtggaaggtagacaactttggcacagtgaacctggttgaagcatgcagaaaggctggcgtagcaagattcgtactcgtcagctccattttagtaaatggggccgccatgggtcaacttctgaatccagcctacattgtgctcaatctacttggcttaacactggtcgcaaagctacaggcagagaatcacatcaggaaatcaggaatagattacactatcgtaaggcctggagggctgacagatcaacccccaacagggaatatagtcatggaacctgaggacactctttattcgggatccatatctcggagccaggttgctgaagtagcggttgaagcactggtgtgtccagagtcttcctacaaagttgttgagattatcgcccgtactgatgctccaaatcgctctctgaaggatatgtacgctgcaattaagcaaaattgactgctctatttttttgacaggatggttagtttgttatacaaccatgaatcaatgaagaacacttatagtctatgtatttggcattcgacagtatatttttgactcgcgaaaatctcctgaagccttcagtctaggccggctagttcacctctaaaaccggtcagaccgggtgtccaacatcagctagactggccaaaagttaagtgctcgttcccgtgaaac

SEQ ID NO: 94397 - DNA, 779 bp, Zea Mays
gggctgtcctgcccttcttcccacggttcacggctgattgagtcggccactgcccacgccacccaaaaactcatggccagcgctgtctgcggcgtcaccgcgcgcgcccacctgccttccgccgtccctgcagccgcaagaaagctcttcttccgctgcagggccgcgtccaccatgaacgaggcatcggcgagctcgccggacgccgaggagaagaagacgacgactgtcttcgtggccggctcgacggggcgcaccggcaagctcgttgtggagaagctgctggccaagggattcggcgtcgtcgccggtacgacggacgtgagcagggcccgcggcagcctgccccaggaccccaaccttcagctcgtcagggctgacgttacggagggcgtcgacaagctggtggaggccgtgcgcggcgtcgatgctgtcgtctgcgcgacgggattccggcggtcctttgacccttttgctccgtggaaggtagacaactttggcacagtgaacctggttgaagcatgcagaaaggctggcgtagcaagattcgtactcgtcagctccattttagtaaatggggccgccatgggtcaacttctgaatccagcctacattgtgctcaatctacttggcttaacactggtcgcaaagctacaggcagagaatcacatcaggaaatcaggaatagattacactatcgtaaggcctggagggctgacagatcaacccccaacagggaatatagtcatggaacctgagcatttttgttgtcgaaaatt

SEQ ID NO: 94398 - DNA, 1413 bp, Zea Mays
gggccccatcgttcaccgaaccggtgcttctccgtgcatatatatataagcgagcgagccccggccgggcggcatcacagcacagcagtgcgccgtcattcatcgctgccatggcttcccctgtcctgctcgtcgccgcgctctgctctctcttcgcgctgctcggagcggcgggggagccggcgaggggagcggcggcggaagcttcggcactccgcagcaaggcggccacggaccccaacacggaggtgaagttcgacttcacgccgttcctgatccagtacaagagcggccgcgtgcaccggttcatgggcacgtcgttcgtcccggcgtccgtggacccgcgcaccggggtggcttccagggacgtggtcgtggaccacgggacgggcctcgcggtgcggctgtaccggcctagccgccaagccgtcgccggcggcgccggcggcaggctccccgtgctggtgtacttccacggcggcgcgttcgtggtcgagtcggcgttcgaccccgtgtaccacggctacctgaacgcgctgacggccaaggccggggtcatcgcggtgtcggtgaactaccgcctggcgccggagcacccgctcccggcggcgtacgaggacgcgtgggcggcgctggcgtgggtggtcgcgaacgcgaacgcgaacgcgcggcgcggcggggccggggccggggacccctggctgtccaggcacggcgacgcgtcccgcctgttcctcgccggcgacagcgccggcggcaacatcgcgcagaacctggcgatgcgcgcggcggggcagcagcagaggatcagggggctggcgctgctggacccctacttcctggggcggtacgtgggcgggggcgcggcgcgcgcgtgggacttcatctgcgcgggaaggtacgggatggaccacccgtacgtggacccgatggcgctgccggcggaggtgctgcggcggctgccgtcgccgcgggtgctgatgacggtgtcggagcaggaccggctcgggccgttccagcgcgcgtacgtggacgcgctccggggcagcgggtggcgcgggcgggcgcgcctgtacgtgacgcccggcgagggccactgctacttcctcaacaacctcgcctcgcccaaggccgccatgcacatggccacgctcgccgcgttcatcaacggcagctgatagattgtcggcagcgtggtagtgctgctcacccgatcgatcagccagccctctgtacgtagctatagtggtctgtctatctcactggtgagtggagacatctgtaaccaccataccgtatactgtattttgtcagtggccgcccgagagagaggtgtttagcatgcatgttatgtaatactacgcgcacgtttttttctccttgtctgtaaccgcagtgacatgtaattttccc

SEQ ID NO: 94399 - DNA, 990 bp, Zea Mays
gacgaccgctgattcggccggaaggggagaggtatgtaactttatgttcttcattcttgttcatattatgtgttcaaaatcataatataaactaatactttttatttatcacttggacaggtcttggacggttttggattatgctgggggtcatcgtcgccccccccaacaacatcctcggcctgctgtgcagagaacacttccctggacttgtggagtacgccggagtgacgggcccagccttcaccttcgaccactacgccgtcgcccccgatgcagtagaccgggacgacagggaattcaataacaaggcggagcgggtgaagcaagagctgtgggtaagtcttagtataatgtaaaatatgtcgcattcgttgcaaattcttgaaataatgtatggatacatcgtttttgtatgcatgatttcttcagatgcgatgctggatacgaggctagggcggatgtggtggccaccacgagctgtaagaagctagttgtggacatgcactatgaggcccgcatccaggccatcatcacctaccacggctccgtccttggggagaaggtgaccaaacctcaggcccgaaccatgtcgttgaccagggagcagtacctgcaggtaaagtcatgcatgtttggtaccaatactcaatgcatgaattttattttatcttctgatatgcactttatgtgtttactttgcaggtgattccacattggtgcgccgcacatcctctgtgctgggagcagatggtggataggtggtgttcagctgagtgggacgaggcacacacagctaaccgggaacggcgtttgatgatgcaaggcccgtcccaccaccaaggcagccggagcctgggccaatatgccgaagcatggtcggcgtcacatggtggcaggccttgttccaccttctcggcctatgctatggcccataagggtaaggcgacgtctgacgtcacctacaacccagatgacgggcccgaggcc

SEQ ID NO: 94400 - DNA, 1327 bp, Zea Mays
ataacaattctgattacgcgactcgctgatcgccagcttgtggtcgcgatgccgtacaccggatatcctctagcgccttcccacaatcgcgcttctgcggttctgccgccgacgtccgcgccgccgacgtccgcgcccgcgtccctcgctgctttgccctctccaccctccgccatcaccgccgcggcgtccttctgtaccggatccgtcgcagccaccactccgcagatccgctgggttgacgtccacggagctgctccggggatgtcgtcctccgcttccagcgtcgagggcgacgccgccggagagttcacggaggtcgtaatcgtgcgtcacggcgagacgtcatggaacgcctcgcgcatcatacagggacacttggatgcagagcttaatgatattggaaggcagcaagctgttgcggttgctcatcgtctttctaaagaagtgaaaccagttgccatatactcttctgatctgaagcgagcagcagagactgcgcaaacaattgcaagaatttgcaatgtgccaaatgtcgtgttcgatccagcactgagagaaagacacattggagatctgcaaggcatgacgcttcaagatgctgctacagagaggccagaggcatacaaagcttttatgtcccacaagagaaatcaacaagttcctggtggtggagagagtcttgatcaactgtcggagcgatgtgtgtcttttctgtacgacattgttggtaaacacaaaggcatgtcgaagaaatgctactctgatgtttgcctgtgaggctgatgaacccaccaccgtctactgacacaggggagcgagttatcctggtttcacatggcggcaccatcagagagctctacagacacgtgagtcccacgaagccgctccacggcaaaatacacaacacgtcggtgagcgtcatcctcgtgtccgacgccaccggccggtgcatcgtcaagatgtgcggggacgtcagccacctccaggagacgggcgtcctggagaacgccttcggtggcgacaagacctccgcctgagattccaacattcatcacgcgccgagagctctcggcaattatcacgcgccgagtgagcgctcgtttcggccgtctttttttccactgtaccaatcatcctgttgctaccagtagtggtctagcggagaatgatgcacacttccccccgctgggaacgcggcgatttttgctggaacagttgaaggccgagccggggcgaatccttttggcctggccgtgcactgcttgctgaactgcacgtacgcatgtggagctgaaacgatctgcgttcgctcatgttcgtccac

SEQ ID NO: 94401 - DNA, 1256 bp, Zea Mays
ataacaattctgattacgcgactcgctgatcgccagcttgtggtcgcgatgccgtacaccggatatcctctagcgccttcccacaatcgcgcttctgcggttctgccgccgacgtccgcgccgccgacgtccgcgcccgcgtccctcgctgctttgccctctccaccctccgccatcaccgccgcggcgtccttctgtaccggatccgtcgcagccaccactccgcagatccgctgggttgacgtccacggagctgctccggggatgtcgtcctccgcttccagcgtcgagggcgacgccgccggagagttcacggaggtcgtaatcgtgcgtcacggcgagacgtcatggaacgcctcgcgcatcatacagggacacttggatgcagagcttaatgatattggaaggcagcaagctgttgcggttgctcatcgtctttctaaagaagtgaaaccagttgccatatactcttctgatctgaagcgagcagcagagactgcgcaaacaattgcaagaatttgcaatgtgccaaatgtcgtgttcgatccagcactgagagaaagacacattggagatctgcaaggcatgacgcttcaagatgctgctacagagaggccagaggcatacaaagcttttatgtcccacaagagaaatcaacaagttcctggtggtggagagagtcttgatcaactgtcggagcgatgtgtgtcttttctgtacgacattgttggtaaacacaaaggggagcgagttatcctggtttcacatggcggcaccatcagagagctctacagacacgtgagtcccacgaagccgctccacggcaaaatacacaacacgtcggtgagcgtcatcctcgtgtccgacgccaccggccggtgcatcgtcaagatgtgcggggacgtcagccacctccaggagacgggcgtcctggagaacgccttcggtggcgacaagacctccgcctgagattccaacattcatcacgcgccgagagctctcggcaattatcacgcgccgagtgagcgctcgtttcggccgtctttttttccactgtaccaatcatcctgttgctaccagtagtggtctagcggagaatgatgcacacttccccccgctgggaacgcggcgatttttgctggaacagttgaaggccgagccggggcgaatccttttggcctggccgtgcactgcttgctgaactgcacgtacgcatgtggagctgaaacgatctgcgttcgctcatgttcgtccac

SEQ ID NO: 94402 - DNA, 1474 bp, Zea Mays
cgaacgagttcgtcgtcgcgtgtttttgttcagatggcaccagtgtatgctgccggggacctcggcgccaacaacggctccggcctgacgacgctgaataacgcggtggcgcggcggacgctcagccgcggcgcgtcgacgctggggctgggctcgcccaggtcgcctccgccggcctacgggagcatcgtgaccgtgctgagcatcgacggcggtggcgtgcgcgggatcatcccgggcaccatcctcgccttcctcgaggagaagctgcaggagttcgatgagcggccggacgcgaggctcgcggactacttcgacgtgatcgccgggaccagcaccggcggcctggtcaccgccatgctcacggcgcccaacaaggagggccgtccgctattcgccgccaaggacatcaacgacttctacctcgagcactgccccaagatcttcccgtccggcagcggcggccctatgggattgttcaagagcatggcaggacccaagtacgacggcaagtacctccactccatcgtccgggagctcctcggcgacaccagggtcagcgaggcgctccagaacatcgtcatccccgccttcgacatcaagctgctccagcccaccgtcttctccagatacgacgccatgatcgacgtctccaaggacgctctgctctcggacgtgtgcatcagcacgtcggcggcgccgacctaccttccaggccaccagttcgagaccacggacaaggacggcaaggcccgtgccttcaacctcatcgacggaggcgtcgcagcgaacaacccgacgctgctggcgatgacgcacgtgagcaagcagatcctgctgggcaaccaggacttcttcccggtgaagcccgcggactacggcaagttcatggtgctgtccctcggcaccggctccgccaaggtggaggagaagttcgacgccgtgcagagcagcaagtggggcatcctcggctggctctacaacaagggcgccacgcccatcatcgacagcttcagccaggccagctccgacctcgtcgacatccacgcctccgtgctcttccaggcgctgcactgcagcaagcggtacctccgcatccaggacgatgagctcacgggagaaacgtcgtctgttgacgtgtccaccgtggagaacctgaaccgcctcgtcgacgtcggcaaggggctgctgaagaagccggcgtgcaaggtgaacatcgagaccgggaagaacgagccggacggacacaggggcaccaatgaggaggagctcatccttttcgcccggatgctggtagatgagcgacgggcaagacttcagaagaaaggcaacaacgcactgtaaaatggatgggctaggatactctcgtgtcaaatacttgtgcaggatatagattattacatgatatatagcatgtatatatataagtatgctctataattatattcattcctttatatatcctaaaaagcgt

SEQ ID NO: 94403 - DNA, 288 bp, Zea Mays
aaacagctcgatggtaagttcacggccatgtttagtgagcatggtgctcgaagtttccggttcgcttctgaaattggtcgtaaacttgtgctaaatagcatgaatatcatttttgaatgcacggttttctaagttttaagtgacttgcagttcaaatgtgaattttccgaagaaattcaaataaacgaactaaatccaatagttattgtaaacacttttataattgtcccaaaatagtacatgtaggtctatatagtgtagcaacataccacaaaaagtttagttggc

SEQ ID NO: 94404 - DNA, 1596 bp, Zea Mays
tcgccaccacaacgcaccacacaaagcgcagcagcccgcccgagagacaagcagccaaatcaagcctttatttacgatccggccggccgggatctagaccacctctctctcctcgtacgtagtcgttgagtctttgaggtcaatcgagcgaggtaaaatggcgcccgtctacgctgccgcggaccacggcaccaacggcggctccggcctgaccctgaacccggtggcgcgccgggcgctcagcctcgtcggcgcgcccaccacgccgtcgtcgtccacgccgccggcgtacgggagcatcgtcaccgtgctcagcatcgacggcggtggcgtgcgcgggatcatcccgggcaccatcctcgccttcctcgaggagaagctgcaggagtacgacgagcgaccggacgcgcggctcgccgactacttcgacgtcatcgccgggacgagcaccggcgggctggtcaccgccatgctcacggcgcccaacaaggacggccgcccgctcttcgccgccaaggacatcaacggcttctacctcgaccactgccccaggatcttcccgcccggcggcggcgccggcggtcctctgggcctgctcaagaagctgtcggggcccaagtacgacggcaagtacctccacgccctcgtccgggacctcctcggcgagaccagggtcagccaggcgctgcagaacatcgtcatccccaccttcgacatcaagctcttgcagcccaccgtcttctccaaatacgatgccatcaccgatgtttccaaggacgccctgctgtcggacgtgtgcatcagcacgtccgccgcgccgacctacctcccaggccaccagttccagaccacggacaaggacggcaaggcccgtgccttcaacctcatcgacggaggcgtcgcagcgaacaacccgacgctgctggcgatgacggacgtgagcaagcagatcctgctgggcaacccggacttcttcccgatcaagccggcggactacggcaggttcatggtgctgtcgctgggcacaggctccgccaaggccgaggagaagttcgacgccgtgcagtccggcaagtggggcctcctggggtggctcagcagcaaggacaccacgccgatcatcgacagcttcagccaggccagcgccgacctcgtcgacatccacgcctccgtgctcttccaggcgctgcactcggagaggcagtacctccggatccaggacgacgagctcacgggacagacgtcgtccgtcgacgtgtccaccgaggagaacctcaaccgcctcgtcgacgtcggcagggggctgctgaagaagccggcgtgcaaggtgaacatcgagacgggcaagaacgagcccgacggcaagagaggcaccaacgaggatgaactcgtccgcttcgccaagatgctcgtacgggagcgccgggcaaggatccagaaaaaagaagccagcaacacactctagacagagctagctagcagagacaccaacacaaagtgtctactacatcatagtctaattaagcctcatgttgttctacaatccagtcatgcatgttatgtgtatccacttcaataattctttcaaagtgtcta

SEQ ID NO: 94405 - DNA, 1227 bp, Zea Mays
accattacaaccactcaaccaaactccaccttaaatagctgtagtgttggctgcgcaaatcccggtctgatctagactgaggacgcgggccaaacaccaccatcactccacagcgtcggcgaggaagtcggcatgagcgtgttcggcggcgacagctgggcgcgtgatgcgcagcagcggaagcggcgtctcgacgagctcttgctacccatcacggcgccctcgtctccctcgacgcctgattccttcaagaagctccacaacggcaagctcgcctgcctcatctgcccccaccgccccgtcctcgacaccccgctcatgctctccatgcataataaaggtgcacggcacatcgctgcagaatcgaggctgagggagaaagaattatctaagaagcacgaaattagcaagagactggctctctcttcagatgtttcccattcaaattctggcaatccacggaccagtgtttggcctaccaatatcaaagaaaaaccattgattgaggagacccggagggcaattctggaagcacagtcgagcagattcaatgatttccaaggcaagaaggtatcttgtgattcggaatggatgacaattacttcatcctttgactccaatgttgcttcttctgatgttcccaaggaactgtccactggaaatactggatcacgagaatggagctgtaaaggacaatcttttgctggaaatcagactcaagacaagttattttctgacagacaaacagaagttcgaaagcgccaggagcaagaactttggttcactgcttcaggctggaaacgggatggccatggaagatggtacagagatgaaaatgcaatcggaattgaactatcctatggcccatctgggagtattgaattcatcacaatgcaatatcaagttcaatctctccctacaaaaaatggtccaatcagattttgtcagactgtcagcttttctgatcaatggaaatgtcagatcatgttcctgttaaacttaaatgtttgtttcattgtgagccaaacctgtataatgatagttgagaaatacagtgtgtatttattttgtgaaaacatttagagatcagagaattccgttttcaaagatgtagtctaaacctgccattagtcactgtaaagataggcgatgcattttggttttggagcttgttttcagactaatattttatttgtaaggaaaataatgaagagcaaaaaaaaaaaa

SEQ ID NO: 94406 - DNA, 805 bp, Zea Mays
accattacaaccactcaaccaaactccaccttaaatagctgtagtgttggctgcgcaaatcccggtctgatctagactgaggacgcgggccaaacaccaccatcactccacagcgtcggcgaggaagtcggcatgagcgtgttcggcggcgacagctgggcgcgtgatgcgcagcagcggaagcggcgtctcgacgagctcttgctacccatcacggcgccctcgtctccctcgacgcctgattccttcaagaagctccacaacggcaagctcgcctgcctcatctgcccccaccgccccgtcctcgacaccccgctcatgctctccatgcataataaaggtgcacggcacatcgctgcagaatcgaggctgagggagaaagaattatctaagaagcacgaaattagcaagagactggctctctcttcagatgtttcccattcaaattctggcaatccacggaccagtgtttggcctaccaatatcaaagaaaaaccattgattgaggagacccggagggcaattctggaagcacagtcgagcagattcaatgatttccaaggcaagaaggaactgtccactggaaatactggatcacgagaatggagctgtaaaggacaatcttttgctggaaatcagactcaagacaagttattttctgacagacaaacagaagttcgaaagcgccaggagcaagaactttggttcactgcttcaggctggaaacgggatggccatggaagatggtacagagatgaaaatgttgaatttgactcagatgaagatgatcctaacatctgtctct

SEQ ID NO: 94407 - DNA, 96 bp, Zea Mays
agagtttgtccaatcttattactatcttcagtgttcagtccgagaccaaaaaaccttttttattattcttttcacacacagctgccccatttattt

SEQ ID NO: 94408 - DNA, 1223 bp, Zea Mays
cacggtttccaccaaagcgacgcgccccgcgacatggcggtggtgcgcctgcgcgtatctccacgcctccgctccattcccctcctgctctcccagccagacgccgctacagtccggcgtagtttcgcctgcgccagcgcctcccaagcccccgcacccgcgcgggctatggcggccccgtcctcctcatccgcgacgccctccccgtacacgacgctcgtcgggcgcgtgagctgcgagcgcgagatcaagcgcagcaagttcatcgccatcgcggccccggtccccaacgagcgtgccgccatggccttcctggatcaggtcaaggatccacgtgctacccataattgctgggcatacaagctgggagatcaattccgttacaacgatgacggtgaaccttctagtacagctgggaagccaatatactctgccatcatttcctctggcattgataaggtcatggtggttgtgattagatattttggaggcataaaactgggaaccggtggactggtgagggcttatggtggggttgcttctgaatgtcttaaagatgctcctacttgtcttgtgaaaccaaaggctcgtgtgggtatggaagtaccatttaatctgttgggaacagtctatcatcagctacaacatttcgaagctgaagatatcaaacaggactatgacactggaaaagatggtaccgttatggtcatgttcgaagtggaatatgaaaaaattgagaatcttggaaatgcagtgaactcagcttgcagtaggaagatagaactatatctataaaccacaatcacgggttaaggatgagtgtaagtgtggagacacgcaatcgtatgtacttgcaagcctctagttcttattcatttgcatcgatatttattctggaatctccatggttttttttttcaccaagcatgtaggcaccagaaatattcagcgccttatccaagctaactgctagagtgctaggccatattgaactgctccagtgtaaactgtacagtcatctatcttttgaatttcaccatggtaattgtttcatgaccttttttttattatttgttttggttcattgtgttgacatgatggatggtatcttttctttaatatcagtcttcacggtaagccaccaatattttgatcttgagggacattcttgccttccaaatgtttttgtagctactattatgttctgaacgacatcggtgttc

SEQ ID NO: 94409 - DNA, 1001 bp, Zea Mays
accaaatactcctctctccacttaacgagcaccaccagttccttgttcggtcggaacgcagcgcagcggcggcggcgatagggagagaggagagagtctgcaggatccagcaggccgagggaggagtcagcggcgggccggagaatatgagcggcaacggcgcgaagaaggtggtcgatgcggcggtgaaggccggcaggacgatcatcgactgggacggcatggccaagttgctcgtcaccgacgaggcgcgcaaggagttcgccgccctccgccgcgctttcgatgacgtcaaccaccagctccagaccaagttctcccaggaaccccagccgattgattgggagtactacagaaaaggaattggatcaaaagtggtggatatgtacaaagaggcttttgaaagcatcgagatcccgaagtacgtcgacacagttactccccagtacaagccaaagtttgatgctgtgattgctgaattaaaggaggctgagaaagagcatcagaaggagtcagaaaggatagagaaggaacttgctgaaatggaggaaatgaggaaaaagatcagtacaatgacagcagatgattactttgagaagtaccctgaactcaggaagaagtttgacgatgaaatccgtaacgataactggggatattgaagagattggagagaactcttatgatgccatttccatgtccgtgaagaaccaataattttcctgtgccctgaattgggtggtttccatagcatgtgcacggggtttgggtggaatgcctacagaatcgactgtgtcaagctttcttgattccgtagaaacatgttttgtttgacctcatcatagaggatctccgcttttatcgtacaaagattgtgatatgttcttagcttctttctacctgaataagaggatttctgcagacccttttccaactgactttctgtgacgcattggtctggatgcttaatttttttgttcggtgcaagtgtggcacttgtccta

SEQ ID NO: 94410 - DNA, 885 bp, Zea Mays
atggaccgggagggccattacggaggccgcggcggcggcaggctcctggagtgcttctccgacgaggtgagcagcggaaatggcggcggcgaggagcgcgcgaacgacgggggtggtccacggccgccggcgcccggcagcggcgtcgtcggggcctggaagcggaggcgagggcggccgccggggtccaaaaacaagccgaagccgcaggcggcagcggcggcggcggcggtcgcgcgggacgtggagcccgcgtcgtcggccatgcgcccgcacgtgctcgaggtccccagcggcggggacgtcgcgcgcgcgctcgcgggcttcgcgcgccgccgcggcctcgggatctgcgtgctcgcggggacgggcgccgtcgccgacgtctcgctccgccacccctcctcctccgcggacggagctggaggctccgcggccgtcttccgcggccggtacgagatcctctccatctcggccaccttcctggccccgtccacgcccgccgcggtggcccgcgcgaccgtcagggacctctcggtgtcgctcgccggcccgcacggccaggtcgtcgggggcgccgtggtgggccctctcgtcgccgccaccgccgtcgtcgtcctggccgccgcgttcacggaccttaccttccaccgcctccccctcgaggacgacgcaccggcgtccgtctccgatattgccggagccgacgaacgccgtgggcacgggcggcatcagtacccggagcagcacgacgcgggcgggtcgtcgcacccgcaagccatggctccggcaactcagccggttcccttgttcgcgcgcgagtcccacgagttgtggcccgcggcgccggcaagtgcacagcgcccacgctcgccgtatcagtag

SEQ ID NO: 94411 - DNA, 243 bp, Zea Mays
gaagatctatgagcagcagctgcatgaatgggaatcaaaagtatgcagaatgcagagttcatcaaatgggtaccaagaaaagaaattgcctcccaagcctgcattgtttgtcttctgtttgaggcctcgtggactccatgtaccatacaagggaccaaagcagcgttctcataagaagcttatgtccacaggctgccatagcttttcaagagagcatgatggcttttaccggcaagctattct

SEQ ID NO: 94412 - DNA, 1906 bp, Zea Mays
ccaaacacaacaacaacaacaacaacaacaacaaagccttttgtcccaagcacgttggggtaggctagagatgaaaccccgtatgaaaacctcagagctcaacccccaaagaaaaaaggggaaacaaaggcaaaggagaaccgaaaaacgacgaaacggggaaacacataaaagagataaaacccacaagaaccagcaagatctaaatgggcacaagaaaaggtcaaacgattaaggaggaaaagcgaaactataaatcaaggttctggcacgtgaattgcacacttccaccccttcctatccacggcgagctctttatcaatatttcactccttcaggtccctcttcacagcctctgtccacgtcaaggttggtcgacctctacctctcttcacattctcgggacgcctaattattccgatatgcattggtgcctcttcaggtcttcgttggatatgtccaaaccatctcaaacgatgttgcataagcttctcctcaattggcgctacttctactctctctcgtatgacatcattccggactcggtctctccttgtgtggccacatatcaagcgcaacatacgcatctctgccacacatagttgttggacatgtcgaccaaacacactattagttttttattcaagatgcaaatcctatgagcgtgctaaaaagaagctgacaatagaagaagcaccgaatattctgactattgcactgaaaagatatcagtctggcaagtttggaaagatcagcaaagccatcagatttccagaaaccctcaacttggctcgctatatgaacccagatactgatgacatatcgccagtttacagcctctatgcagtggttgtccatcatgatgtcatgaatgctgccttctctggccattatgtatgttatgttaaagatacacagggaaagtggtttaaggcagacgacagccaggtgaaacctgtatctctggacaatgtcatgtcaaagtgtgcttatatgctgctgtatgcaagatgttcaccgagggcaccaagctctgttaggcaggctatgtcggacccagcacacccgaagcaggccaagcagagggtggttccaggaggaccaacatggcgaggaggttccttcaacgggcaccaagctggccagcggcacagcgacgacgcggaagacgacgacgccacacatgctgcatttgacgaatatagatacgcaccatattcgccttcagattctccgagccctagcgagagttcatccctcttcagcaactccgacgcagggtcgcacagcaccgacagcagcgagagcacgaggaactcgacaagcaccgaggagtacgagtacgtgttcggagccgctgatcagatgtaccgcgtgggaggggggacacctgtggagggtggctatccgacgtattcccgttcgaggtccagcttgaatgccagctcatcggggcgggaggcatacagcgcgggtacctacgctgagcacaggactcagggcggcggtcccggtgggctttgggttgagggcgatgagagcccgtccttgttatacactgacagaagtaaacagccgtcgaacagtacgttaagagaccagtataggcagttagataggagcgatgagcgaacatgaccctgggcaaaccaggggcggtgttttattgagaagaccatctagggacaggaccgcccagacattttattgatgttgcagggtttgggctgtagtctgtagagaaataaatagtgtaatgtagcctgtaatatgtatctcgctgcaaacgtgtaaaaaagggaagaggaatgtcgtagttcataaaagttaaatgcctagattgatgatatagttccgaggaacctgtaacaaaacgttgcattttgcatgtgatcggcggagtaga

SEQ ID NO: 94413 - DNA, 3379 bp, Zea Mays
ccaagaccagaccaggcacggaacgaacccgaacctgagagggaggggggaaattttcgcagcggatttgcgtttgcgccggttaggtgggaatcggggcccggatccggcgagtaggagcggcggggccgagatctatgcgcggagggggaggaggaccgggctgaggaggggagctgcaggggcccaatggaggaggcggcggagtcgtcctcggcggcggcggcggcggccctggtgctggcgctggtggcgctcgtcgtggtgccggcggtggcgctgctggtgcggggccgctggcgccgggccgcggcgcggagggaggaggtgcgccgcctcgcgcggctggctgccgaggagtccgagctggcggagcgcgagtccgcgcttgcctactactccgagctgttcccgggcgtcgtgcacgccgcgggggcgcccgagtggggcccgccgccggtggcggtcccggtcccggcgcaggaggagttcgacgcgcagccgcagccgtccgtgggggcaaagggggtctgtgcggtgtgcttcaggcccaccacgttcaggtgcaagcagtgcaaggccgtcaagtactgttccttcaaatgccagatagcccactggagacaaggtcacaaagatgaatgccatccaccaagtgttaatactaggcctgatgatgaagaagaaaaggctgaagtgggaaaatctgccaaagagaatgcatcagttggtgttaaacaggatgctcaaatgaacaaaccagctgttggatctgaaacttctgatgcaaaccatgatttgaagagttcaaatggtaaaagtaaacatatgccttctgaagcagtatgtaccagtgcagagattcctggaggtcataagtccaacagcacagttgaaattgatcaaaacattcagtctgttgacagtagtaagatgggatcaagtatcaaacatgcaaattttgttgaagatggttcttccaccgtggacttaaatgaggcattgccatgtaactctcattcttcttcaccaaacattaatggtcatagcagttttgtaaacgaagaattctgcaatcattccaaggaacaccaaagagctaaggatgccagtgttgttgaggattgttctcagacaagcagtaccagggagcttgaagacagtagcattccccacgcagctgcatctgttgtcttggagtccaaaagttctaggactcctattcatgtagaacttgagaggtctaaaacaaaatctgctgggaatgacagcattcagagcacgaaacctgtgccatctgcattgactgttgacaaagccacttcagttcgtgggagtctttctattacacctaataattcatctaaagtagcagatagtcttcctgacagaagttttaaaccttcagataggtcaggctcaacaacaaataaccttgcaacatctctgaagaaaatggtcaggcagcaaactgcaccaaaagttgtgaggcattatccatcagaatcgactctcttcccatatgaactttttgtgaagctctacagcaaggttgagttgcacccttttggtcttcataacctcggtaacagttgctatgcaaatgctgtttttcagtgtttgatgtttactcgaccactcacaacatatcttttggaagggcttcactcaaaaaactgttctcaaaacggatggtgcttcatgtgtgaatttgaaaaactcattgtggagggcaaacgacgcaagattgccttgtcaccgactggaatactctctcatttgaatgacattggcagtagctttggtcctggtaaacaagaagatgctcatgaatttcttaggtatgcaattgatgctatgcaatccgtatgcatgaaggaagctagaaaaggaggtgttcttcagtcagcggaagaaacaactcttgtgcaattgatatttggtggatatctgcggtctaagatcaagtgctcaaggtgccatgttagttctgaacagtgtgagcccatgttggatcttactgtcgaaatagatggtgacattagttcgctcggtgaggcactcgtgcgctttacatccacagaagtcttggatggagaaaacaaatatcactgcagcagatgcaaatcctatgagcgtgctaaaaagaagctgacaatagaagaagcaccgaatattctgactattgcactgaaaagatatcagtctggcaagtttggaaagatcagcaaagccatcagatttccagaaaccctcaacttggctcgctatatgaacccagatactgatgacatatcgccagtttacagcctctatgcagtggttgtccatcatgatgtcatgaatgctgccttctctggccattatgtatgttatgttaaagatacacagggaaagtggtttaaggcagacgacagccaggtgaaacctgtatctctggacaatgtcatgtcaaagtgtgcttatatgctgctgtatgcaagatgttcaccgagggcaccaagctctgttaggcaggctatgtcggacccagcacacccgaagcaggccaagcagagggtggttccaggaggaccaacatggcgaggaggttccttcaacgggcaccaagctggccagcggcacagcgacgacgcggaagacgacgacgccacacatgctgcatttgacgaatatagatacgcaccatattcgccttcagattctccgagccctagcgagagttcatccctcttcagcaactccgacgcagggtcgcacagcaccgacagcagcgagagcacgaggaactcgacaagcaccgaggagtacgagtacgtgttcggagccgctgatcagatgtaccgcgtgggaggggggacacctgtggagggtggctatccgacgtattcccgttcgaggtccagcttgaatgccagctcatcggggcgggaggcatacagcgcgggtacctacgctgagcacaggactcagggcggcggtcccggtgggctttgggttgagggcgatgagagcccgtccttgttatacactgacagaagtaaacagccgtcgaacagtacgttaagagaccagtataggcagttagataggagcgatgagcgaacatgaccctgggcaaaccaggggcggtgttttattgagaagaccatctagggacaggaccgcccagacattttattgatgttgcagggtttgggctgtagtctgtagagaaataaatagtgtaatgtagcctgtaatatgtatctcgctgcaaacgtgtaaaaaagggaagaggaatgtcgtagttcataaaagttaaatgcctagattgatgatatagttccgaggaacctgtaacaaaacgttgcattttgcatgtgatcggcggagtaga

SEQ ID NO: 94414 - DNA, 2247 bp, Zea Mays
ccaagaccagaccaggcacggaacgaacccgaacctgagagggaggggggaaattttcgcagcggatttgcgtttgcgccggttaggtgggaatcggggcccggatccggcgagtaggagcggcggggccgagatctatgcgcggagggggaggaggaccgggctgaggaggggagctgcaggggcccaatggaggaggcggcggagtcgtcctcggcggcggcggcggcggccctggtgctggcgctggtggcgctcgtcgtggtgccggcggtggcgctgctggtgcggggccgctggcgccgggccgcggcgcggagggaggaggtgcgccgcctcgcgcggctggctgccgaggagtccgagctggcggagcgcgagtccgcgcttgcctactactccgagctgttcccgggcgtcgtgcacgccgcgggggcgcccgagtggggcccgccgccggtggcggtcccggtcccggcgcaggaggagttcgacgcgcagccgcagccgtccgtgggggcaaagggggtctgtgcggtgtgcttcaggcccaccacgttcaggtgcaagcagtgcaaggccgtcaagtactgttccttcaaatgccagatagcccactggagacaaggtcacaaagatgaatgccatccaccaagtgttaatactaggcctgatgatgaagaagaaaaggctgaagtgggaaaatctgccaaagagaatgcatcagttggtgttaaacaggatgctcaaatgaacaaaccagctgttggatctgaaacttctgatgcaaaccatgatttgaagagttcaaatggtaaaagtaaacatatgccttctgaagcagtatgtaccagtgcagagattcctggaggtcataagtccaacagcacagttgaaattgatcaaaacattcagtctgttgacagtagtaagatgggatcaagtatcaaacatgcaaattttgttgaagatggttcttccaccgtggacttaaatgaggcattgccatgtaactctcattcttcttcaccaaacattaatggtcatagcagttttgtaaacgaagaattctgcaatcattccaaggaacaccaaagagctaaggatgccagtgttgttgaggattgttctcagacaagcagtaccagggagcttgaagacagtagcattccccacgcagctgcatctgttgtcttggagtccaaaagttctaggactcctattcatgtagaacttgagaggtctaaaacaaaatctgctgggaatgacagcattcagagcacgaaacctgtgccatctgcattgactgttgacaaagccacttcagttcgtgggagtctttctattacacctaataattcatctaaagtagcagatagtcttcctgacagaagttttaaaccttcagataggtcaggctcaacaacaaataaccttgcaacatctctgaagaaaatggtcaggcagcaaactgcaccaaaagttgtgaggcattatccatcagaatcgactctcttcccatatgaactttttgtgaagctctacagcaaggttgagttgcacccttttggtcttcataacctcggtaacagttgctatgcaaatgctgtttttcagtgtttgatgtttactcgaccactcacaacatatcttttggaagggcttcactcaaaaaactgttctcaaaacggatggtgcttcatgtgtgaatttgaaaaactcattgtggagggcaaacgacgcaagattgccttgtcaccgactggaatactctctcatttgaatgacattggcagtagctttggtcctggtaaacaagaagatgctcatgaatttcttaggtatgcaattgatgctatgcaatccgtatgcatgaaggaagctagaaaaggaggtgttcttcagtcagcggaagaaacaactcttgtgcaattgatatttggtggatatctgcggtctaagatcaagtgctcaaggtgccatgttagttctgaacagtgtgagcccatgttggatcttactgtcgaaatagatggtgacattagttcgctcggtgaggcactcgtgcgctttacatccacagaagtcttggatggagaaaacaaatatcactgcagcaggttttgttacggctcttggtcttctattttcttcatctgaccttcatgtcttgtgcctttttctgctaattttatctgcagaccataagcttttttcactgaatcattaagactactaaaggacttc

SEQ ID NO: 94415 - DNA, 1650 bp, Zea Mays
tgttcgtctccttccctggcccttcccgcaccgcgccacccagctataaattgcgtcccctccctgccgccttcttcccccacccacacatccgacgccgaggaagtaggaagcacgaccagcatatgtcacagagggccagcgtcccacactcctcctgcatagccttcgcgctccattcccatctcctggtctccagtgagatgtgccccagctcctattggcagcaatagctattctccgccttcctttttttcttcttcttcttcctttcctcccgtctggatttcgtttccgtttgatcgagctggctctcagcttccgtttttagttttgttggcatctttgctctcggatccgtctctccctaactcctgaaacccaaaaggagagaagaaaccgggcaagcaagcgatgggtgtcaagggattcgtcgagggcggcatcgcctccatcgtggccggctgctccacccacccgctggacctcatcaaggtccgcatgcagctgcagggggaggcggcggccgccgtggcgccgcagccggcgctgcgcccggcgctcgccttccacgccgggggccacgccgtcgcgctcccgcaccaccacgacatcccggcgccgccgcggaagcccgggccgctggccgtcggcgcgcagatcctgcggtccgagggcgccgcgggcctcttctcgggggtgtccgccaccatgctgcggcagacgctctactccaccacgcggatggggctgtacgacatcctcaagaccaggtgggcccgggagaacggcggcgtcctcccgctgcaccgcaagatcttggccggcctcgtcgccggcggcgtcggcgccgccgtgggcaacccggccgacgtggccatggtgcggatgcaggcggacgggcgcctgcccctcgcggagcgccggaactaccgcggcgtcggcgacgccatcggccggatggcgcgcgacgagggcgtgcgcagcctctggcgcgggtcctcgctcaccgtcaaccgcgccatgatcgtcacggcgtcgcagctggccacgtacgaccaggccaaggaggccatcctggcgcgccgcggcccgggcgccgacggcctcgccacgcacgtggccgccagcttcaccgccggcatcgtcgccgccgccgcgtccaaccccgtcgacgtcgtcaagacgaggatgatgaacatgaaggtggcgcccggcgcgcccccgccctacgccggcgccgtcgactgcgccctcaagaccgtcaggtcggagggacccatggcgctgtacaaggggttcatccccaccgtgatgcgccaggggcccttcaccgttgtgctcttcgtcacgctcgagcaggtgcgcaaggtcttcaagggcgtcgagttctgagaccggcgacgaggaaagatgatgacgacaacaaacgctgcgctgccagttcgtcaccgcgttcgctgccaagaataataacccgctgccaccctagaggccgcgactactattacgccctttgcttgcattgcatcccgtgttagacttgtgctcatgcgcttcactgcatcctgttgtatctggatggatttgaccaaatgcaaattgccaacatttttattaattaaaattgctactgcaatgtctcaactc

SEQ ID NO: 94416 - DNA, 405 bp, Zea Mays
tggctccgtctggacggtgggcgagcggaaatggccaggcgaccggcccgccgctgaggcctggcatgtggcggctgcgtgccgcacggcaacaaacaacaacttggcgccgatcaggccggtgcgaaagcaatagcgcggtactgctgcctgctggctgctgctgctgcgtgcctggctggactgtacactgtgttggaacgagccacccatgtacacacgtaatacacacgaccctgataggacgctgcatcccgtctgttacaattcctttccttggctacgcgccaaggtctagcgcgcgcgtggcccacctcacacccccgccgcagaaaagcacttccccaattccaacgcctccggtgtgtcttccctcctgtatatgttttgttttgttggcgagca

SEQ ID NO: 94417 - DNA, 635 bp, Zea Mays
atgtcgtcgaggaacgtgagcgcgtcccaggccggcgcgcctcggcagcagaggccagagggaggcgaggaccgcgcgacagtggcacgggtccgagtcaaggaggagcggcggcatgcagcggaggaggtccgcggcggcggagggctggccggcgcggcagagcgcggcgatgtcatcgagccgcttcttgtagaagttgaccaaatctatcaccttgcttgccctgcttcaccaatcttctacaagcacaaccctgttaagaccatcaagacaaatgttattggtaccctgaacatgctaggacttgcaaagagagttagagctaggattttgttaacatcaacctctgaagtttatggtgatccacttgagcatcctcaaactgaggcctactggggcaatgttaacccgattggtgtttaggagttgttatgatgagggtaagcgtgtagcaagagacgttgatgttcgactatcacaggcagcatggcattgaaatccgaattgccaggattttcaacacctatgggcctaggatgaacattgatgatggtcgtgttgttagcaacttcattgctcaggctgtgcgcggtgagcccctgactgtccagaggccaggaacacagactagg

SEQ ID NO: 94418 - DNA, 390 bp, Zea Mays
ttttttttttgtctcagcttgaattcggatgccgattttcttacgaatccaaaagcttatggttactcctagttatccacattttttatgtatatatgcatggtgtgtgtgtgtaggatatctattattctcttgcgcaaattaataatacaggttaagatagattatcatttgactagagccgcccctccgggggtatacactagaagaactggcttctatagatgcatagaagtgccctgggggtaataccagaagaactggcttatgtatagatgtgtaaacgtttggtcttagctagatacttgggttacacagacagataaatagatgttttctttagtttcgatcttgtatatatatactgatattttccaagtggaaaacgag

SEQ ID NO: 94419 - DNA, 1838 bp, Zea Mays
cagggcgacaggtgcgcgtagccaggagacacggctagattggtagtagtagagcgagaagcagagagagagagagagagatgtgtttgtgtggctacatcatctccccaagggcacaggcacaggcacagcagccgcttgcctgcctgcaggctgctgcaggctgctgccgcgcagcagtgccgctgccgatgcgtcaaaattagcagcaggggagtgtgcacagttcacggtctgctctctttctctctcttcccctattacgagtcccagcagctagaacaacacaaaccctctcctgtagctagatgtgtggtagtaagctctcgctgttaacctcggcaaagaacctactggaagtcggaagggaaaaagcaaagtaggagtagctagctagtatagcaaacaagctcccccgtgtgccgacgagccgccgactaggtcagccgccatggacttcgacgagcacgatgacggcgacgaggagatgacgccgatgcccgtgagctcgagctacgatgcgccgatgcagccggggctgggactgggcggaggaggcggcgagaccccgaagcacggggattctgctggagccgggagcttcaggacgccgccagcaggcggcttcgggggaggaggcgcaggcgcaggcgcaggcgcaggcggtggcggggccaccaggtaccgggagtgcctcaagaaccacgcggtcggcatcggcgggcacgcggtggacggctgcggcgaattcatggccgctggcgaggagggctccatcgacgcgctgcgctgcgcggcctgcggctgccaccgcaacttccaccgcaaggagtccgacaactcgccagcgggaggcgggggcgtcgcgccgcccgatcccgccgccgccctgtccccggccgccatcacagcctacggcgccgccgtggcggcgcaccaccaccagttctccccctactaccgcacccctgccgggtacttcctgcaccagcagctggcggccgccgccgggcacatgcagcgcccgctcgcgctgccgtccacctcccactcgctggggcgcgaagagggcgacgacgtgtccgggctgatcggccccatggtggtggcgcccatgatgggcatgtcgctgggcccgggcggcggcccgtcggggggctcgtccggcggctcggggtccggcaagaagcggttccgcaccaagttcacgcaggagcagaaggaccggatgctggcgttcgcggagcggctggggtggcgcatccagaagcacgacgaggccgccgtgcagcagttctgcgaggaggtctgcgtcaagcgccacgtgctcaaggtgtggatgcacaacaacaagcacaccctcggcaagaagccatgaccgaccgccggccattcgcttcgcgccggcgcctgcactgtgtgctagctaggtacaccaccactgatcgcattgcatcatggatctcctcctctctttctcagcaccgtattgcttgctagccttttttttttgggggtactcctctccttgccttcctttttttagagttttagctagaaatgtaagctagctacttaggtcagtagcgagcagcagttcttggattttagctacgatggagaagacggccgttgttctcttgtcatcttcattattttattgtacttctttggctgtgtgtgtgtgtgtttcgtagatgagacgatcatgacgttggtgttgggaaggaggagggcagggcatggccatttgccgatttggatggatcttggagatgtacgagtcgcttttgtgtttgcaatttaaaatttagatcgtgtctggggatttgggttgc

SEQ ID NO: 94420 - DNA, 1651 bp, Zea Mays
accacggccatcttcttctccctgccgagcaactcgtccagcgcctccctgccgagcaactcgtccagcgcctgttccctggccatcagcacgtcgcgcgccctcctgctctctctgctcggcctcctctccatctctctgatcggcctcctctttcttccctatcttccatggccggtgccctctcgaaccgcctctgctcgccatggatgatggtcgtcgcgcccctggcactggcctctactcggagctccctggtgccgagtccctcccagccatggtgctcgccggcctacagctcgccctcagccgtgccctggtgccgcgccccaagtttttttcccccgcgcggcaacttggctccctgcaagctgcagcacccgagattctctctcttccccaacacgtcttctttcccatcgtgccatggccgcgcgctgccggagctccctgctcgccgcgctctggttcggtttctggctcgtcgcgcgcgttccgttctccctgtgtgcgcagccgcgctccacctcgccccatcgcggcactccagcgcctgctcgccatggctggcctcgcgctggctccctgctcggccgccgacctgtctgtgctcgtgctgatcttggacgccaccgcgcctcaacctcgccatgaacctggttgtgtctgtccgctgctctggctcgccggcggtcagtgccctcgcccggccttcagcttgccttgcctcgggctggcacatccttgccgaagcgccatgctctgtgggggtgctccccatcggcatcgcttcaaccgctcggccctgttccctggccagcgctcgactctgagcttctatcttcctgcgccgttgttccacttgcagctagtggaggtggacctcggcagcgtacccatcgccgtagagctcccagacacgttcctctctgctcgttcgtcctcggttctgaccagatctcgcgcacgtggttttaaagctatgcacattcgtcgtgccgcgttgtctgtcgatgttcactcccgacagacctcgccgtcgaccttattcaagtgattgctcggcgtccatctctagctcgtcgaatccccttgcttctccctccttctgcccgttttcaaagccgccgtgcgcgcgtcagctccgctgttgttgctgcggtgtgggtactagtggtagatcaaggccgccaagtccgatccgctcctctgcgtgcagttcgccgtaacttccgtccgttgtggttgccagtcgtcgaccctgcttggattctatctcaccagctcgctccagacttgatctcgttgtcgttccatgcgtcataaaaaaatcccaagaatcgggtgaagacaaagctagcagcgcgatattctccaagcgctcgacaaattgcctggatcagaaaatcgctaccgatcttgcggcgatcttgcggcttcgagtcagctgctgaaacggaacgttaattaatcgcgcgatgcggaagacaagccaagtcgaccccaagcgcgggctaatccgcgtggtggtgcagatgaacaaacatgaagaagggcagactgagcaagtatcagaacaaaggctgatcgtcaagtggacgtcgtctaacaacactaacctagtgttacccaggcaagccccggtgcatgc

SEQ ID NO: 94421 - DNA, 1743 bp, Zea Mays
ctccctgccgagcaactcgtccagcgcctgttccctggccatcagcacgtcgcgcgccctcctgctctctctgctcggcctcctctccatctctctgatcggcctcctctttcttccctatcttccatggccggtgccctctcgaaccgcctctgctcgccatggatgatggtcgtcgcgcccctggcactggcctctactcggagctccctggtgccgagtccctcccagccatggtgctcgccggcctacagctcgccctcagccgtgccctggtgccgcgccccaagtttttttcccccgcgcggcaacttggctccctgcaagctgcagcacccgagattctctctcttccccaacacgtcttctttcccatcgtgccatggccgcgcgctgccggagctccctgctcgccgcgctctggttcggtttctggctcgtcgcgcgcgttccgttctccctgtgtgcgcagccgcgctccacctcgccccatcgcggcactccagcgcctgctcgccatggctggcctcgcgctggctccctgctcggccgccgacctgtctgtgctcgtgctgatcttggacgccaccgcgcctcaacctcgccatgaacctggttgtgtctgtccgctgctctggctcgccggcggtcagtgccctcgcccggccttcagcttgccttgcctcgggctggcacatccttgccgaagcgccatgctctgtgggggtgctccccatcggcatcgcttcaaccgctcggccctgttccctggccagcgctcgactctgagcttctatcttcctgcgccgttgttccacttgcagctagtggaggtggacctcggcagcgtacccatcgccgtagagctcccagacacgttcctctctgctcgttcgtcctcggttctgaccagatctcgcgcacgtggttttaaagctatgcacattcgtcgtgccgcgttgtctgtcgatgttcactcccgacagacctcgccgtcgaccttattcaagtgattgctcggcgtccatctctagctcgtcgaatccccttgcttctccctccttctgcccgttttcaaagccgccgtgcgcgcgtcagctccgctgttgttgctgcggtgtgggtactagtggtagatcaaggccgccaagtccgatccgctcctctgcgtgcagttcgccgtaacttccgtccgttgtggttgccagtcgtcgaccctgcttggattctatctcaccagctcgctccagacttgatctcgttgtcgttccatgcgtcataaaaaaatcccaagaatcgggtgaagacaaagctagcagcgcgatattctccaagcgctcgacaaattgcctggatcagaaaatcgctaccgatcttgcggcgatcttgcggcttcgagtcagctgctgaaacggtaagctgataaattatttagaatagttcaatcgttgaataaattaatgtgctagtgcgatacacattaaggtgctcgataaattgcgtaagtcacgaaactctcgtcgacttcgcagttcttgcgattatcgagccaggttcagttagagcgaattatttcgctatttcggtcaatcagctgaattagtgtaccgagtagaatatgagtaggcctgtgtaatgataaaatattttaatcacttctatagatgtatgtatattcacgataaagaaataattaattaattgttgatatgtaaaatatgtgaggagaaaaataaaattaaa

SEQ ID NO: 94422 - DNA, 1766 bp, Zea Mays
cccaacaaaatcctcgtccttcgcgtcatctcgacgccacaactctccgagccccgctccgcaatagacccgtaagacgctgtctcgatccgtccccctacctcccccgccgccgacgctcgactcgatacattggagcaggaggcgccgccgccaaaacccaagctaggagtgggagattccgatcctccgcgcgcgcgcgcgcaccatggagccggtgccccggaagcgcaagggcgcgcccccggtgtgctccgccgccaggtccctccaagatttggcctcccgcaagcgcgcctgccgcggctccgtgccgcagcaatcccactgcaccgacgcccccgcccccgctgtggtgatgacggcccccgcggcgagcggcgcgtcggcgtcagcgggggtcctcccggggcgcgggctcaagcggaaggtgggctgcatcgacaacgccacgcggatcgggcggcggaagcggctggagaacgagtacgacctcggcgaggagatcgggcacggcaagttcggctccgtccgcgtctgccgccccaaggcccggacccggggcgaggaggagttcgcctgcaaggcgctgccgaagaacggcggtgacacggcccaccgcgaggtggagatcatgcagcacctctcgggccacccgggcgtcgtcacgctcagggccgtctttgaagacaccgacgccttctacctcgtcatggagctctgccacggcggacggctcctcgatgaggtggccagggagggtaaactctcagagcgccgcgccgccaatgtgatcaaggagctcatggcggtcctcaagtactgccacgagatgggcgtcgtgcatagggacgtcaagccggagaatgttctgctcaccaagtctggaaggttgaagcttgcagattttggattggccgtgcgagttgctgatggtcagcaattgactggtgttgctggcagcccggcatatctggcacctgaggttctactaggaaattactcccaaaaggtagatgtatgggctgccggggtgcttctgcatgttctgttgatgggcactcttccgttccaaggaaaatctgtcgaagctatctttgatgctataaagactgctgaacttgactttcacagcagtcagtgggcatctgtgtcactgcttgctcgtgatctcattggccgaatgcttaatcgagaggtctcttcaaggcccgatgccgaagatgttctccggcacccttgggtcttattctacactgattgcccgcagaaagctgaattctctaacctatggggtactaacaaaactgcagctcccatgattcatcaggagatagtcaggtttggttactgcgagtcttcatcttcaaaatcctcaagtgacaactctgaagagcgagatgaatgcggtatagttgacgcactggcgacagcaataacacaggtgaggatctcagagcccaagaggagtcggctgttcagcctacccaacgggttgttgccaccaagcaggaacagtctccgaacatgaagaggatgaatccgtgtgtggctttctaacttgacctacctagctcccatccccatgcatgtataaacgagataaacgagctctgtgattttatagatggaaaattttcaccgtggttgatgttttgcgattgctagctcgctgaggctgcaatcctctgtaaatatatcactgttgtcatcgtttctatacatcgatgatcaccgtaattgattcgattatttaggttttttcc

SEQ ID NO: 94423 - DNA, 1662 bp, Zea Mays
cccaacaaaatcctcgtccttcgcgtcatctcgacgccacaactctccgagccccgctccgcaatagacccgtaagacgctgtctcgatccgtccccctacctcccccgccgccgacgctcgactcgatacattggagcaggaggcgccgccgccaaaacccaagctaggagtgggagattccgatcctccgcgcgcgcgcgcgcaccatggagccggtgccccggaagcgcaagggcgcgcccccggtgtgctccgccgccaggtccctccaagatttggcctcccgcaagcgcgcctgccgcggctccgtgccgcagcaatcccactgcaccgacgcccccgcccccgctgtggtgatgacggcccccgcggcgagcggcgcgtcggcgtcagcgggggtcctcccggggcgcgggctcaagcggaaggtgggctgcatcgacaacgccacgcggatcgggcggcggaagcggctggagaacgagtacgacctcggcgaggagatcgggcacggcaagttcggctccgtccgcgtctgccgccccaaggcccggacccggggcgaggaggagttcgcctgcaaggcgctgccgaagaacggcggtgacacggcccaccgcgaggtggagatcatgcagcacctctcgggccacccgggcgtcgtcacgctcagggccgtctttgaagacaccgacgccttctacctcgtcatggagctctgccacggcggacggctcctcgatgaggtggccagggagggtaaactctcagagcgccgcgccgccaatgtgatcaaggagctcatggcggtcctcaagtactgccacgagatgggcgtcgtgcatagggacgtcaagccggagaatgttctgctcaccaagtctggaaggttgaagcttgcagattttggattggccgtgcgagttgctgatggtcagcaattgactggtgttgctggcagcccggcatatctggcacctgaggttctactaggaaattactcccaaaaggtagatgtatgggctgccggggtgcttctgcatgttctgttgatgggcactcttccgttccaaggaaaatctgtcgaagctatctttgatgctataaagactgctgaacttgactttcacagcagtcagtgggcatctgtgtcactgcttgctcgtgatctcattggccgaatgcttaatcgagaggtctcttcaaggcccgatgccgaagatgttctccgagatagtcaggtttggttactgcgagtcttcatcttcaaaatcctcaagtgacaactctgaagagcgagatgaatgcggtatagttgacgcactggcgacagcaataacacaggtgaggatctcagagcccaagaggagtcggctgttcagcctacccaacgggttgttgccaccaagcaggaacagtctccgaacatgaagaggatgaatccgtgtgtggctttctaacttgacctacctagctcccatccccatgcatgtataaacgagataaacgagctctgtgattttatagatggaaaattttcaccgtggttgatgttttgcgattgctagctcgctgaggctgcaatcctctgtaaatatatcactgttgtcatcgtttctatacatcgatgatcaccgtaattgattcgattatttaggtt

SEQ ID NO: 94424 - DNA, 1303 bp, Zea Mays
cccaacaaaatcctcgtccttcgcgtcatctcgacgccacaactctccgagccccgctccgcaatagacccgtaagacgctgtctcgatccgtccccctacctcccccgccgccgacgctcgactcgatacattggagcaggaggcgccgccgccaaaacccaagctaggagtgggagattccgatcctccgcgcgcgcgcgcgcaccatggagccggtgccccggaagcgcaagggcgcgcccccggtgtgctccgccgccaggtccctccaagatttggcctcccgcaagcgcgcctgccgcggctccgtgccgcagcaatcccactgcaccgacgcccccgcccccgctgtggtgatgacggcccccgcggcgagcggcgcgtcggcgtcagcgggggtcctcccggggcgcgggctcaagcggaaggtgggctgcatcgacaacgccacgcggatcgggcggcggaagcggctggagaacgagtacgacctcggcgaggagatcgggcacggcaagttcggctccgtccgcgtctgccgccccaaggcccggacccggggcgaggaggagttcgcctgcaaggcgctgccgaagaacggcggtgacacggcccaccgcgaggtggagatcatgcagcacctctcgggccacccgggcgtcgtcacgctcagggccgtctttgaagacaccgacgccttctacctcgtcatggagctctgccacggcggacggctcctcgatgaggtggccagggagggtaaactctcagagcgccgcgccgccaatgtgatcaaggagctcatggcggtcctcaagtactgccacgagatgggcgtcgtgcatagggacgtcaagccggagaatgttctgctcaccaagtctggaaggttgaagcttgcagattttggattggccgtgcgagttgctgatggtgtgtcaagagtcgaagtggtgctaacttggtagttgcagtcgagttgttgtcatctggaggtagttgttacttccacggagttctggatatttgggttcacagcatcaatagattgacatcatgatggtcaggtagtcaggtcattgttaacggtacatcggtcttgtggttctaagacatttgtgtgactaactggttttaaggccagtgaaaatttgctcatcaggaagtggtaaaatgtcaattattttgtcaagtattagcagttttcttgtgtatgtgatcagactaacactgacatgtctttgttttcctgtaaaactatgtatgatgaaaccatggtgtgattgtattggctggcctta

SEQ ID NO: 94425 - DNA, 1355 bp, Zea Mays
tccgccaccaccatccatgcagcatgcgtttgggtttgggattggtagatagattcattcagttgcctgctgagactggcagctggatcgattccaattaggacgggctgactgacgacggcgatggccgcaagcacggcgcggtggcagctgctggccggccaggtgaaacggcaggcgtcggggttcctgcaggacaagtacaagcaggcgaggctggcgctgggcgacgtgacgccggcagagctgctggcccaggaggccaccaacaacgagccttgcgtccccgacgccaagacgctggcgtgcatcgcagacgccgccttcgacatggacgacctgtggaggatcgccaaggtgctgcaccagaggctgagccgcgccgccgactggaaggagtggcgccccgtgtacaaggcgctggtggtgctggagttcctgctgacccacggccccgaggacctgccccgcgagttcctggcggacgtgcgcgccatgcacgacctccgcagcttccactacgtggacgacaagggcttcgactggggcgcctgcatgcagcgccggaccgacagcgtcctgtcgctgctcacggacgccgaccgcctcagggaggcgcggcgcagggtctcccacgaggtgcacggcggcggcgggggcttcggcagcccgacgtcgtcgtcctccccgtcctcggcgtcgtcctccgcctcctccaggacctcgcgcacctggtccttcggcggcggctcccactactccgacagccctaccatgtgcctcacctgcgcccccgacgccgactaccgccacgacaaaaaatgcgacgcctacacggccgacgacgactgttgggccgcctcgtcgaattacaagagcggcagcaggtgggcagccacagtggacgaaggcgacggcgaggaccagcagcagcaccaggggctcatggacgacgcctgggacgcccactcggtgaaggacagcaccagcggcacatggtccgccaggttgctcggttccttgtccttgagcaccagcagggcctcaggcttccagagtctgtcgcaaccggagcagcgaaggacaaccaagaagctgcaggggcagctacagtgccaggtttccgccgattattcacggccttgatcgctcggtcgatgaatactgcaattctctttttctctagattaaccattgatttgaccggcctattactgtaatttctatcttttttcccctcctagcacaattaagtttcatctcatcttctatttttatactttatgataagcatggatacaaaaaagggacaagacttgctcgcaaatgtccataaatttgtgctttagtatcgg

SEQ ID NO: 94426 - DNA, 1642 bp, Zea Mays
aacatacttggctgggccttccccagcggcgagggcgtggcccgttgtacaagtataacaacaattggcccagcgtagcatgcccgtggtggtggcgtcatcgtgtctcctcgatcccctctcgttcctccctcgtcgcctcatcaattcaagatccaatctttgctgctgccactcggcgatccgatcgttctcgagcaaggtcggtggccatggcacgctgccgccatcacctcctcctcctttccgtcttacttgccttggctgctgctgctgcgcggcaggcgcagagtcatggaaaagcctccgccgtcttcatcgatgcctcgtcgcaccgctaccttcgggaccagcaagccgaccaccaggacgcttcaatgtcgttaaatgaagtttctgcggttgtttctgtcttgcttggtttcgcaccgtcaacatccctaccagctatttcttcttcgaagttgaacaaagttcttcttcctaatccatttgatagaccgcgtgctgttttcctcgtgcaaattgatgggttcaatgttcctagcttcgtatctgaaggcagcaacattttcaagaccaggattgaaggtgcaaacatcgctgatacagggcttacagataaggatgacttaattgtcattcattcagatgaatctctagatctctctcgatcagattatcttgataatgaactttccagcttggcaaactggttggagggatcttatcagaagtctaccggcaaactagtcattcccttggagaatggaaacagtcttactttgcaacttgataaggaagcagacaaggaattcatgtccagcttggcttcccttcttaagactattgaaagggcgatccaggttcatgaagatttctcaggtgtcgtgaaccctgcagagttattagaatgtcacttcacagggttgaaggctctggagaatgaatatggttctggtgaaattgttaagcagggaacagaaatagttcagagagctgtcaccaaatcattccagtccctacatgaagcatacaaagggaaaattgttgggctggtaatatccacaaatgaggctccatcatccttaggatccataattgacgcaccatcttcactgcacatttcaagacggctagaagaagcaagcaagactacagacatagcctctgtcgtacttgttcgaaagagcttggcatggattacagggatcatcctgcttgtttcaactctcataggggtttgcttgcttatgaacatgccacttaccagggacaccctcctgtactcgaatgtcaagatcgattagtttgaaggggtgttcgcggcagctactcttggggttcaactttggccttgtgtatttatgggatggatttcagatggtagagacgtatgcttgtgctgttcacaaaaccagtgtacaatgtgatactaggtgctacgtgcctttctttttttaatctgtgcttccatcttgcctgtatgggctgttttgttgttgggttcccggtaaataatccagagcagtggcacaaacgattagttgttgcagaatgctactgccttttctgaataaatctgtcattgtaatcgaatttcaacttgaataacagtgtgtatgctatgtttgtggcgctc

SEQ ID NO: 94427 - DNA, 1636 bp, Zea Mays
aacatacttggctgggccttccccagcggcgagggcgtggcccgttgtacaagtataacaacaattggcccagcgtagcatgcccgtggtggtggcgtcatcgtgtctcctcgatcccctctcgttcctccctcgtcgcctcatcaattcaagatccaatctttgctgctgccactcggcgatccgatcgttctcgagcaaggtcggtggccatggcacgctgccgccatcacctcctcctcctttccgtcttacttgccttggctgctgctgctgcggcgcagagtcatggaaaagcctccgccgtcttcatcgatgcctcgtcgcaccgctaccttcgggaccagcaagccgaccaccaggacgcttcaatgtcgttaaatgaagtttctgcggttgtttctgtcttgcttggtttcgcaccgtcaacatccctaccagctatttcttcttcgaagttgaacaaagttcttcttcctaatccatttgatagaccgcgtgctgttttcctcgtgcaaattgatgggttcaatgttcctagcttcgtatctgaaggcagcaacattttcaagaccaggattgaaggtgcaaacatcgctgatacagggcttacagataaggatgacttaattgtcattcattcagatgaatctctagatctctctcgatcagattatcttgataatgaactttccagcttggcaaactggttggagggatcttatcagaagtctaccggcaaactagtcattcccttggagaatggaaacagtcttactttgcaacttgataaggaagcagacaaggaattcatgtccagcttggcttcccttcttaagactattgaaagggcgatccaggttcatgaagatttctcaggtgtcgtgaaccctgcagagttattagaatgtcacttcacagggttgaaggctctggagaatgaatatggttctggtgaaattgttaagcagggaacagaaatagttcagagagctgtcaccaaatcattccagtccctacatgaagcatacaaagggaaaattgttgggctggtaatatccacaaatgaggctccatcatccttaggatccataattgacgcaccatcttcactgcacatttcaagacggctagaagaagcaagcaagactacagacatagcctctgtcgtacttgttcgaaagagcttggcatggattacagggatcatcctgcttgtttcaactctcataggggtttgcttgcttatgaacatgccacttaccagggacaccctcctgtactcgaatgtcaagatcgattagtttgaaggggtgttcgcggcagctactcttggggttcaactttggccttgtgtatttatgggatggatttcagatggtagagacgtatgcttgtgctgttcacaaaaccagtgtacaatgtgatactaggtgctacgtgcctttctttttttaatctgtgcttccatcttgcctgtatgggctgttttgttgttgggttcccggtaaataatccagagcagtggcacaaacgattagttgttgcagaatgctactgccttttctgaataaatctgtcattgtaatcgaatttcaacttgaataacagtgtgtatgctatgtttgtggcgctc

SEQ ID NO: 94428 - DNA, 941 bp, Zea Mays
cagacatttcgaattggagaccgatttgttggcggaagaaagggcaggcaggcacgcagccaacgagttgagtggcttcctccccaccacaaggctccccccaccccgctctatctctatctcttctcccgtcctcccttagctcggagtcggacacccacccgccacgaccaccagaccactcgcttccccgaagcttcagctccgcgcttctctgttcgagctagccagcctccagcaagagcgagcgagcgagggcaacgggcatggcggcggctgtgtccttctcccgggtgcgagctctcccgacgtggtccagctccgtgtccggcgacgaccaccaccgctcctactccgcggcgctggccatgtcggtgtcggtgcggccccggtgtcgcgcgcggtcgccggcgcggatgatgggcaacgtgaacgccggcaaggggctgttcgcgccgctcgtggtggtggcgcgcaacatcatcggccgcaagcgcttcaaccagctcagggggaaggcaatcgcgctgcactcgcaggtcatcaccgagttctgcaagaccatcggcgccgactccaagcagcggcagggcctcatccgcctcgccaagaagaacggagagaagctcggattccttgcctgagacgaccatgttctacgcacatatataagtatataatctataagtactacatcatcaagtagtggcggacaatgataattatattgataccttcttccttgctccgatcgagtcctctatcaagtggtagctagtacatgtcatgtgatgattcttcaatccagcttccgatgctcggctgtccatcagctagctgcatgcttgttttgcttcgttcctgcagagattcctattgcgtgtggggcattgcattcttaccaattgggatgctgcaccatgcatcttactaagctgatt

SEQ ID NO: 94429 - DNA, 2844 bp, Zea Mays
ggactgagggagagccctcctcgtctcctccgcccctcctccaggtttgcgtgagatcggcgagcgaatcacgcacacagctgtaggatggagtggggatttgctgtctctccctcttgattgcagtttaatcctttccatttcatccgtccgttcctcgtccacccgagtccgttgaccgttgaagtacagtgggacagggagcaaccgccatcatccctgttcgtcatctctcccaccatcaacaccaacatgggcagcaacacggaaagggccaggaaggcgttgggcgccatgaagctgatcggtttctctaagaagcaggccatcccagtactcaaggaactcctcaaaatcttcaacaacaactgggagcccattgaggatgagagctaccgtgccctcgcagatgccatcctcgataggcaagacagcaagcaaacccctccctcccaacagggcacccaagcagcccatgcggacttggagcctcttagatcaacaagggacgatcggcaacaatatctttctgctagccttgatgacacatgtgaagatgataatgaaacacccctggtcaagaggcccaggatgggcaccgctaatttcagaccagagctgcagccaccacagcaatccagtgtttcaacccaaggtgctctgcctgcttcaccacaaacgagtcgtcggcaaactcggtccttgactgtagagccacacgctgctggccatgaatatcctttagctgtcaacgatgctctagttgtgaaagaacccaaaccagaaccacaaattgatagagcagaagattttgtggctggtcctaatgccacacaactcaatgatggatcttcagaacaaacttcgggttttggtgcaagaggcaacatagttcaccaagctcaaagtcttggcaggagcctgcaagcagccgcagtgtgcaagaatggggtagggtctacagttcaaaatactcatgagacttcgattgtggaggtggacgttgcttcctcagccaatggtgaggtgaagatgtcattgaaatgcagcttgggttcttcaaatttcagcattagtatggaggaggttttcaaaatggtggaggagaagtgccttcactcatacaagatgctaccttcagatctttctattggcaagctgctgagtgaggtatgccaatctgttgtgcagttgggcactatgcattctgaggttaatagggacagtggcagcttgcataatgaagtagttgttccatttgtgaagccaatctcttgtgaggctgctgtgggcataagtgatgatgtggctggtgggtcatcagtccttgaatcctcagaaccttgtttgcagaattcacttgttgcttggaatcctgagttggctcactgtaatcaaaagacaacccatgatactactgatatatccaaaggcgaagagcgggtaagaatacctgtagtaaatgaatttggcagcgagacctgtcctccatccttttattacataccaagaaatcttgtcttccaaaacgcttatgttaacatctcgatttctcgaatttgtgatgaagattgttgtgctgattgttctggcaactgtttatcagcgccagttccatgttcttgtgcaagaataacagggggcgagttctcctatacacttgagggcctgcttaagacagcattccttgatgaatgtacctcagtgaatcatttcctacaagagcaccataggttctactgtccagtttgccctcttgaaagatctaagaacgaaggctcacctggtccatgtaaaggtcatattgtcagaaaattcattaaagaatgctggagtaaatgtggatgtggcatgcagtgtggaaaccgtgtgattcagcgtggtataacatgcaaattacaggtgttctttacacgtgagggtaaaggctggggagtacgcacagtggaagatctcccaagaggtgcctttgtctgtgaatatgttggagagatactaacaagtgctgaattgcatgaaagagcaattgagaatgcaagaaatggtaagcatatgcatcaagtgctcctggacgctggttggggttcaggtgtagtattgagggatgaggacgcttgtagccttgatggttcattttatgggaatgtcgggcggtttatcaaccaccgatgctacaatgcaaatttagttcagatccctgtagaagttgagacgcccgatcatcattatcaccatctggcatttttcacgaacaagaaagtggaggcatttgaagagttaacttgggattatggcatcgattttgatgacatggaagggcccagtaaaccgttcagatgcatgtgtggaagtagatactgccgcgatccgaacaatccaaggaggatgggtagagcagctgctaagcgaaagtaggcagggagcgcggacttggttggagttgagcacaccaacttttgctgtgggggggtctggtttcgtgtttgatgtggagtaatgcagtaccatcacctcagctagtattaagtgtagataggtgtggatgattttggtgaatggtgttatggacggaaatgctgcaggctgagcgacctagtaacctatgccatgtagtggcatctaaattagcctgggattgtgtatgcgtaaaaagaacgcctaagacttaaccatgttattatgtcagcttggtacatggtgataaaaagaatctgaccatttcatgtcagccacaattcttgggacggtcggagagtgaactagtatgtcgctggtgcgttgcaggcctgtttggttgtatgcatattgtctaaaattagttgctcaaattgttgtcacatctta

SEQ ID NO: 94430 - DNA, 1573 bp, Zea Mays
gcagcagctccatcagcccgtatactattgatcatcccactctccccgttatcttcttcctgttatataggcgtcccgcagcagcagctgagcagagcagcggcgaagaagcagcagcagaatgctttccgttccaggagcagcaggtagccgtggcaggctcgtcgcagccactgcgtgcttcctcctcgtcctcctgctgctgcaggtgcgcccagccacggccaccccgaccccgccccgcgccttcttcgtcttcggcgactcgctggtggacagcggcaacaacaactacctggccacgacggcgcgcgccgactcgccgccgtacggcctcgactacccgacgcaccgcgcgacgggccgcttctccaacggcaagaacgtgccggacatcatcagcgagtacctgggcgcggagccggcgctgccgtacctgagcccgcacctggacgggcggaagctgctggtgggcgccaacttcgcgtcggcgggcgtgggcgtgctcaacgacacgggggtccagttcgccaacatcatccgcgtccagaagcagctgcgctacttccggcagtaccaggaccgcttgagccgcctcgtcggcgaggacgccgccgcgcgcctcgtccgcggagcgctcgtgctcgtcaccctgggcggcaacgacttcatcaacaactactacctggtgcccttctcggcgcggtcccgcgagttcgcgctgccggactacgtgcgctacgtcgtgtccgagtacgccaaggtgctgcggcagctctactcgctgggcgcgcgccgggtgctggtcacggggtcgggcccgctggggtgcgccccagccgagctggcgctgcggggcagccgcgacggggagtgcgacgccgagctgcagcgcgccgccgcgctctacaacccgcagctggtggacatgatcaagggcgtcaacgcggagctcggcgccgacgtcttcgtcgccgtcaacgcctaccggatgcacatggacttcatctccgacccggcggcctacggcttcgtcacctccaaggtcgcgtgctgcggccagggaccatacaacggcgtggggctctgcaccgccgcgtccagcgtctgcccggaccgcagcgtctacgccttctgggacaacttccaccccacggagaaggccaaccgcatcatcgtcagccagttcatggacggcccacaggagtacatgcacccgctcaacctcagcaccatcctcgccgtcgacgcccgcgccgccgccaccttcaactagctaaaacacgatacagcatatgaaaacagaccacattcatattctatcatatattatgcacccatccgaaccccaggctggcagttcatcagtatttgtactccgatatgacacatcatacatctagtagcatgcatttcgccctagtggctagtactagtacgcttcctgctgagaatctgaaataaaaacgagttgtacttcatcattcatccagtatactgtagttgctgccagcaacacccagaaattagtcccaaatggaacaaggatgaatcaatgatacattgatcacaa

SEQ ID NO: 94431 - DNA, 2151 bp, Zea Mays
attgtcatctccagtcgtgttgtggccggaagagacagacacgcaaacgagaggactcgagagagattccgccgccaccaccgccggctcagatgccgccgccgcagtcgggcatgaccctctgccgccttcccaaggccacccttggccttcccctttctctcccctctttgctatatcgtcccagcctgtccctcgccgcacgtcgcaccaaggccgtctccgccagggcctcctcctcctctccatcaccggactcttccttcggttcgcggatggaggattccgtcaagaagacggtggccgataaccccgttgtcatctactctaagtcatggtgctcatattccatggaggtgaagtcactcttcaagcggatcggtgtgcagccccacgtcatcgagctcgacaatctcggagctcaaggaccacaactacaaaaggtattagaaaggctgactggacagtctactgttcctaacgttttcatcggtggaaaacacgttggaggctgcacagataccgtgaagctgtatcgcaagggggagctagctagcatgctgtcggacctggatatcaacattgacaactcatgacaagctatgttctgcaaggattgggcgagacttgggcagcactgtattgagtttctttttttaacatgtgcgatgacaaacactggtgtcatttacacattttcgtttggtactccgattaaatcattgaatttgaccaccgtatatatgcaatttgctagaaaaagaagggaacgagctcgcaaatcttgtgtcctcggcaatttttgtctattttttcccaagcgcatatattgcaacgcaaacgatgtgcggcccgtcatgtgccgtggagcaagatcgggtagctgaaacccccaggccccagtcacttgtggggagtttgactgcccgtcccgtgatttttggagtaaatataccagcactgccgaagcccgaaaatgaatggcctgaaaaatggggtggtgtagggcgtcccgcagcagcagctgagcagagcagcggcgaagaagcagcagcagaatgctttccgttccaggagcagcaggtgcgcccagccacggccaccccgaccccgccccgcgccttcttcgtcttcggcgactcgctggtggacagcggcaacaacaactacctggccacgacggcgcgcgccgactcgccgccgtacggcctcgactacccgacgcaccgcgcgacgggccgcttctccaacggcaagaacgtgccggacatcatcagcgagtacctgggcgcggagccggcgctgccgtacctgagcccgcacctggacgggcggaagctgctggtgggcgccaacttcgcgtcggcgggcgtgggcgtgctcaacgacacgggggtccagttcgccaacatcatccgcgtccagaagcagctgcgctacttccggcagtaccaggaccgcttgagccgcctcgtcggcgaggacgccgccgcgcgcctcgtccgcggagcgctcgtgctcgtcaccctgggcggcaacgacttcatcaacaactactacctggtgcccttctcggcgcggtcccgcgagttcgcgctgccggactacgtgcgctacgtcgtgtccgagtacgccaaggtgctgcggcagctctactcgctgggcgcgcgccgggtgctggtcacggggtcgggcccgctggggtgcgccccagccgagctggcgctgcggggcagccgcgacggggagtgcgacgccgagctgcagcgcgccgccgcgctctacaacccgcagctggtggacatgatcaagggcgtcaacgcggagctcggcgccgacgtcttcgtcgccgtcaacgcctaccggatgcacatggacttcatctccgacccggcggcctacggcttcgtcacctccaaggtcgcgtgctgcggccagggaccatacaacggcgtggggctctgcaccgccgcgtccagcgtctgcccggaccgcagcgtctacgccttctgggacaacttccaccccacggagaaggccaaccgcatcatcgtcagccagttcatggacggcccacaggagtacatgcacccgctcaacctcagcaccatcctcgccgtcgacgcccgcgccgccgccaccttcaactag

SEQ ID NO: 94432 - DNA, 2559 bp, Zea Mays
gtgtcgtgttgcttttgctgcgacatggccacagcggccacaggagagggacggagtgctgagggagtgagggggacccagcccagccaagcacattttacccatcgcatcgcacgaaaccgaaggagagcggcgatccagcctctcttcctctcagatcaaactcactcctcactccgcgagctgcttgctattcccaagccccaacacctcagtctagccgctacagtccttcagacgattcgatgcatccttgcatgctcttcctcctctgcctggccgcgctgccgctggcctcgcattcctcctccaaccccgacgtcgcgctgctcctcgccaaggtgaagccggcgctgcagggcgagcgcgccaacgcgcagctcgccacctggaacgcctccacgccgctctgcctctggcgcggcctccgctgggcgacgcccgacggccggcccctccgctgcgacgccgccgccacgcgcgccaacctgtcgctcgcctccgaccccgccctcctcctcctctccgtccgcctccccgcgtccgccctcgccggccgcctcccgccggacctcggcgccttctccgcgctcgactccgtctacctcgccgccaactcgctctcgggccccgtcccgctcgagctcggcaacgcgcccgcgctctccgcgctcgacctcgccggcaaccgcctctcgggggacctgcccgcctccatctggaacctctgcgaccgcgccaccgagctccgcctccacggcaacgcgctcaccggggccgtgcccgagccggccggccccaacaccacctgcgaccgcctccgcgtcctcgacctcggcgccaaccgcttctccggcgccttccccgccttcgtcaccgcgttccgtggcctccagcgcctcgacctgggcgccaaccgcctggagggccccatcccggaggccctcgccgggatggcggcgacccagcagctccaggcgctcaacgtctcctacaacaacttctccggccagctgcccccgtccttcgcggcctcccgcttcacggcggactcgttcgtaggcaacgaaccagcgctgtgcggcccgccgctgcgccagtgcgtgacagcctcgggcctcagctcccgcggcgtcgccgggatggtcatcgggatcatggccggcgccgtcgtgctcgcgtccgtgtccatcggctgggcgcaggggaggtggaggcggagcggcaggatcccggagcaggacgagatgctggagtcggccgacgacgcccaggacgcgtcgtcagagggcaggctcgtggtcttcgagggcggcgagcacctcacgctggaggaggtgctcaacgcgaccggccaggtggtggacaaggccagctactgcacggtgtacaaggcgaagctggcgagcggcggcagcagcatcgagctgcgcctgctgcgggaaggcagctgcaaggacgccgcgtcgtgcgcgcccgttgtgcggcgcatcggccgcgcgcgccacgagaacctggtcccgcttagggccttctaccaggggaggcgcggcgagaagctgctggtgtacgactacttcccgcgcagccggacgctgcaggagctgctgcacggtggcagcgagcccgcggcggggcggccggcgctcacctgggggcggcggcacaagatcgcgctgggcgcggcgcgcgcgctggcgtatctgcacgcgggccagggcgaggcgcacgggaacgtgcgctcgtccatcgtggtggtggacgacctcttcgtgccgcgcctggcagagtacgcggtggaccggctgctggtgccggcggcggcggaggcggtgctggcggcggccaaggcggacgggtacaaggcgccggagctgcactccatgaagaagtgcagcgcgcgcacggacgtgtacgcgttcgggatcctgctgctggagctgctcatggggaggaagccgtcggcctctgcaggtggagctgcaagggcgatggacctgccgtcggtggtgaaggtggcggtgctggaggagacggcgctggaggaggtgctggacgcggaggtggtcaagggactgcgggtgagtccggcggaggaggggctggtgcaggcgctgaagctggcgatgggctgctgcgcgccggtgccagcggcgaggccgagcatggcggaggtggtgcggcagctggaggagagccggcccaagaacgtccacccgcggtctgcgctgtacagccctacggagagcaggagcgacgccggcacgccgaccaccgcctagctacaccgtatctatttgacggctgcatcacctgattttcagcctgttctgattcatgccgccggaatgcatgagaccgtcgtaatacgcctgtctgaatgtcctgatgcttggtggtagcagtttttctcttgtctctgcaatcaatcagcttagaatccaatcaattactgttctactccgtagctaggaagttcaaggtctatctctatatataatttgaagaaggaaacaaattaaacaaaggcaaggtttaattcgattggaaggaatcaaa

SEQ ID NO: 94433 - DNA, 154 bp, Zea Mays
agatataagagataattattcctgaactcaactatgataatgtcgtgtttacattttagttgttggtacatacacacaaaactctatttcaccataacaccacagttagcaaaaaaaactgagttcaaaaggctcttccagctttcctgatgtg

SEQ ID NO: 94434 - DNA, 656 bp, Zea Mays
gtcctcctctggaaaaccacctcttctcctagacttcttccgttgcatcttctcttctgttctccacgacgcagttcggctgccagacaaaaaccctaaacgccgccgccgccgccgctcttcctcgagatgggaggcaagtgcccgcaccgcaaggtaaagaagcgccgcctatcccacaagacggctcgccgcggcaagttcctcctgaaggccgacgatgccgtctatgacgagctcgtcaagctggccgaccagggcaaggacgctgaagccaaggagctccccgtcgatgaggacctcccaggcctgggacagttctactgcctccactgcgatcgctactttgcaagtgaaagcgtgaaggatgatcactaccgctcaaagcgccacaagaaaagggttaaggtaatgtctggaccggccccgcacacgcagcttgatgcagaactcgctgcagggatgggaaagcctgacaacggcctgaagctcatgtccatgtgaaggaacctcttgctggtactggtacttgttccgtgcctttgttgctgccgtacaattgaagctgctttgcgcagtaagtaatagcaagagttatagcagacggtttttttttgttgtacgcaagactttcgaagtgggtgtaagttgtttta

SEQ ID NO: 94435 - DNA, 2349 bp, Zea Mays
agatgattcagccataacctgtaaaggattctgtacaatattatggaacctgaaagcagatttacaagatgggtgcttaatattcataacaggagacccgcttaccctgggctgttgggaatccaacatggctgttcagttggctccttctgttgaaagcaataatatatggacagctgaaataaaggtaccatatggagtgcatttcaaatatagttattttgttcgagaagaaatgagttcctcttctgatattatatggaggccaggtccagtatactccttatcaataccttcagatggccagaaaaagcaggttattattgtgaaagacctatggatgaaaaccagtctaccaggtcttcctactcctacatggggatcatggctgatggaagctgattctcttgaaggtgaactttttgatggtggaaataaccagaacattgtgaaagatcactctgtcagggatacacggaatcaaggcttatctgtaggtgatcatattatattgaagcttgggaatggcacaccattacatgcaaaactgttgtcggataatcaatctaccatcatgcacaactgtgtaactgaaataccaaatgccagttatataagccaatatggaaggcctcaagtcgtagaggagccatggattcttgaatcaattgtgtctgcaaagaaaccagttgcaaaagtcaaagataagaaagggcaaaagaagcttgtaaattataagcacactttgagtggagttagtaaaaacatgcatgaacagtatcagcctgttgaagagccatggttatttcaatctatattggaactaaatgaaactatagttcttgctgatggaaaagtagaagcaagggacattatcagaaaattaaggaaaatagaaaaacctttaacgcctttggatgagagtaaaccgactggtggtgaaccgtcatcaagagttatacttatgaattcctctgtctgcactatgcagagaattgcagtattagaagatggaaaactagttgaactcttgctggaacccatcaagaacaatgtacagtgtgatagtatttatctaggtgtagtaacaaagctcgttcctcatatgggaggagcatttgtagatattggaatttcaaggccttcacttatgagcataaagcaaaaccgagatccttttgtgtatcctcaagtttttaagaaccgaggaacagatcatgttggtgattattgtaatgaagagaaccttccagcttatgaaaacgatgatgatatgagtgacgacgaatttgcagatgaagaagctcatgatggttcatcatttccagttgagaatgttacagataacaatgtcgatgatgatgaagttgacagcatttctgtttatgacgtagacaaagatgaagaaaatgaccacatggaagatgaatatagtgagggcatactgcaaggatatcaatcagaaatttccaatgatctcaagactttatcttcaattcagcatgctttaagagaatctaatgatgacacaaatggaagcagatggtctcaagttcgcaagggcacaaaagtaatggttcaagttgtcaaagaaggattgggtacgaaaggtccaacacttagtccatttccatgcctgcgaagccgattttggatattggtttcccgtggcaacaaagttggggtatccaaaaagattactggaatagaacgcaccaggttaaagggcatcacaaaattactgcgacctcctggatttactttgacggctcgcacagtcgcagctggtcattcctgggaggaactgcagaaggaccttgatggcttgctatctacatggaaaggaataactgagcatgctcaatctgctgccttggctgctgatgagggtgtggaaggtgctgttcctgtaatgttgcacagagcgaagggtcaaactttatctgttgttcaagacgattttaatgaaaaggtcaagaggctggttgtggattctcctcgaacatatcatgaggttacaagctatcttgaagaagtcgcacctgagctctacagccgagttgagctttatgagaaaagaaaacctatatttgatgaatacaacatcgagaaggagatagacaacatcctttgtaaaaggtgctacttcattgtttctatattatttcatagttcctgttggtggattttttcattagtttttttctaaagcgcccaggagaactgcacatcaattatattaagaagatagaagaaaaatggtctaaaaatagaccaaaatacaagaacaaccacctttttttagaaacaaaaatacacaaaagaatccatctagaagtcagcctaaag

SEQ ID NO: 94436 - DNA, 132 bp, Zea Mays
ctctttcacttatgtgcggtactggcctccgtaaggagttaaatgttgtaaccctggtctactatagaccttttttcctcttcttaatatattttaaggcgcagttcccctgcgctttcgagaaaaaaaaaa

SEQ ID NO: 94437 - DNA, 562 bp, Zea Mays
atagtatatcgtatttgtttatgttgttttattgttcttttcatttttatatttttatctttcgtttctgatttgactataattaatcattttattttattgtgtgctattcttttacattttctttcttttttctttctcttttttattatatagattttgtggctttcccttttcctccctaatataataaattattttgtgttttcatgttttaatttttttattttctatattccatgagatgttacgatgttcatatggtatgcacgtaatgtgctatgatgcattttatgatgcttacttaggatacctgtgatgtacacatagtatacaatgatattatatgccgtactttgtgatgtttatgcagtatatatgttatgttctatgatatttatgtggtatacatgtgatattctatgatgtatatatttgtgatgttcatgtaatatacatatgatgtatgatatatttttcttgtgtaggtgatatacatgtgatgttttatgatttactttataatatttatatcatatacatgtgatgttctatcatatat

SEQ ID NO: 94438 - DNA, 2175 bp, Zea Mays
aatgggcacttggggaggccgcgccgaatattcgggcgcgttgggaagaagatccttctccgccgcttataaatagcggccgtcctcatccctcgctgccccaagaccaagatagaccacccaagcattgaagccgtagccgccgccgccggacgagacaggttgaggcggggcggcaatggccgccggggaccttgaggtgctcaccgcgctcgacaccgcgaagacgcaatggtaccacttcaccgccatcgtggtcgccggcatggggttcttcaccgacgcctacgacctcttctgcatctccctcgtgactaagctcctcggccgcatctactacaccgtggaggggtccgcgacgcccggcaccctcccgccgcacgtgtccgcgtccgtcaacggcgtggccttcgtgggcacgctgtcagggcagctcttcttcggctggctgggcgacaagctcgggcgcaagaaggtctatggcatgacgctcatgctcatggtcctctgttccgtcgcgtcggggctctcgttcggccacaccccggcgtccgtcatggcgacgctgtgcttcttccgcttctggctcgggttcggcatcggcggcgactacccgctgtcggcgaccatcatgtccgagtacgccaacaagaagacgcgcggcgcgttcatcgccgcggtgttcgcgatgcagggcttcggcatcatggccggcggcctcgtggccatcgtcgtgtccgcgtcgttcaaggccaggttccccgccccggcctacgccgtcgaccccgccggttccacgccgccgcaggccgacttcgtgtggcggatcatcctgatgctgggcgcgatgcccgcggcgctcacctactactggcgcaccaagatgcccgagacggcgcggtacacggcgctggtggccaagaacgccaagcaggccgcggctgacatgtccaaggtgctgcaggtggagatctcagccggcgcccccgaggaggacgccgcggctgcggctgcgactgcgcctgcgccggcgtcggcgtcctttgggctcttctccggggagttcctccgccggcacgggctgcacctcctgggcacgtcctcgacgtggttcctgctggacatcgccttctactcgcagaacctgttccagaaggacatcttcagcgcggtggggtggatccccaaggcggcgacgatgaacgcgctggaggagctgttcagcatcgcgcgggcgcagtccctgatcgcgctgtgcggcacggtgcccggctactggttcacggtggcgctgatcgacgtgttggggcggttcgcgatccaggtgacggggttcctgatgatgacggtgttcatgctggggctggccgtgccgtacgagcactggacgacgccggggcaccacatcggcttcatcgtcatgtacggcctcaccttcttcttcgccaacttcgggcccaacgcgaccacgttcatcgtgcccgctgagatcttcccggccaggctgcggtcgacgtgccacggcatctcggcggcgtcggggaagctgggcgccatcgtcggctccttcgggttcctgtacctggcgcagaaccgggacccggccaagacggaccacgggtaccccgcgggcatcggcgtgcgcaactcgctgttcctcctcgccggctgcaacctgctgggcctggcattcacgttcctggtgccggagtccaagggcaaatccctggaggagatgtccggcgagaacgacgaggcggccgccgccgccgccacgccgaactacaacaaccgcacagtgcccgtgtaagtagccgtagtagatgcatctgcatgcatgcatgcaaatgttatataaggaacaagtacgtacgtaacgtaacgtgtcgtgtgtgtggctgttgcacggtagggtacacgcactgttctccttcgatctggtcgaggttgtttgtcgaggcacagccgtcgccttccgttacgtcattgtttcctttctgtctggtgcttgtgtgcatgttcagttgaacttgcgcgatcgatctgatgggatcagagacgtgctcctaaataaccggaggtcaccgtcggatatagacgtgctctcctggatgttgtaccaagcgcgtcatgctgctttattagatcaatcaagtactgttgttttcgttcaaa

SEQ ID NO: 94439 - DNA, 629 bp, Zea Mays
catttatagctacaaatgagagctttaagtgctatgaaaaagttaggagcactttacagaaactgttggagacaattttttgtgttttttcaaaaaaaacttgatttgaaagaattatggggaactcttggagatgttcttactaaacagggcctctacctgactacctcagtcacactcctccaatcaaggatgtttgccggtatgtgtggataggacaatctattctcctaaagactcctccaatcaccggcttagtacagcatcacgcgaaaaccagagtcaagggacatagggattatgatctagcctgctattggacaggagtagcactcatgctttatgctctccggatccagtgctgatgcttccactggccagtggccactaccgaagatcagagagatgccgtgaggcatggcggtggcggccaccacacgcccacacggtttcgacgcgcaagctttctcctttttccgctggtgggcaggaccgctggagtaccatgcacacaccatcatcatcacgactcacgaaacctttcgtttccgccgcccccatctcatccaattcctaccccaccaccagaggtccaatcggtttcggcatgtagctccgatccccaacca

SEQ ID NO: 94440 - DNA, 109 bp, Zea Mays
caaaagcatcatgatttccatggcagatctgaattatatatatacaggatttccatggcaaatggcatcatcacacaccaatgaggcaattcgcatactattactaaat

SEQ ID NO: 94441 - DNA, 1996 bp, Zea Mays
cgcctcgccctgctgctaatccagttccctacgcgcgctactgcatacagctatatttctctgatcggagaagaaggcgagcgcgcggtgtccaccactccctcctctcctctcccgtcctatccatccggcacgcccagcatccatccactcctcccctgctccggctccggctccggctccgccatgggcctttcaacagtttactccccggccggaccgcgcctcgtgccggcccctctcggccgctgccgctctgcccagccccgccgcccgcgccgagccccgctcgccaccgtccggtgctccgtcgacgccaccaagcaggcgcaggatggcgtggcgacggcggtcgcgacggaggcgccggcgtcgcggaaggagtgcttcggggtcttctgcaccacctacgacctcaaggcggaggacaagaccaagtcgtggaagaagctagtgaatgttgctgtgtcaggcgcggccgggatgatatcaaatcacctgctgttcaaactcgcttctggtgaggttttcggacaagaccaaccaatagcacttaagctactcggctcagaaagatcgtttcaagccctcgaaggtgtagctatggaactggaggactcgctgtatccactgctgagggaagtcagcattggcatagatccttacgtggtctttcaagatgtagattgggcccttcttattggcgctaagccccgaggtcccggcatggagcgagctgcgctactggatatcaatggccaaatctttgctgaccaggggaaagcacttaatgcggtcgcctcgcggaacgcgaaagtcttagttgtcggaaatccctgtaacactaatgcgctgatttgtttgaaaaatgccccaaacataccggcaaaaaactttcatgcattgacgaggttggatgaaaatagagcaaagtgccagctggcactaaaagcaggtgtattttatgacaaagtatcaaacgtgactatttgggggaaccattcgacgactcaggttcctgatttcttgaatgccaaaattgatggaagaccagtgaaagaagtcattaaggataccaagtggttagaggaagagttcaccctcacagttcaaaagcgtggaggtgtgctcatccaaaaatggggcagatcatcagctgcatcgaccgctgtttcgatagtggatgctattagatccctcgtaactcctaccccagaaggtgactggttttctacaggggtttatacgactggaaatccttatggcatagcagaggatatcgtgttcagcatgccatgcagatcgaagggtgatggtgattacgaactagctagtgatgtgttgatggacgattttctctgggaacggattaaaaagagcgaagctgaattgcttgctgagaagaaatgcgttgcccatcttacaggagaggggaatgcattctgtgatcttccggaagataccatgctaccaggagaagtgtagtttagttacagaagcaacagcagcggaatgcatttgccaatacattagctgagacttgaaacatctgcttgccagatgcagcaactacttttatatatatatgtgtatattcaataattgtgccacacgaatttgactatgatgcaaacctcttacacaggtaagtcttttttttttccgtaaatacgagaaagactgcttcaaattcatgatctggtgattcagtgagataatcctcaccaatccgctaggcgtgtgccgttcagccacaacttgcattcatcgttacgttgtgaaccatcatgactcccatggaggatctgaaatatatatacatgattttgcactatcatcgccactgcaactagaagcatggcaaatgacatcatcacaccaatgaggcgattcgcatactattattaaatgctctctccattctaagttataaattatgttattaagagtcgaagcatcttaaatttagtcaacattatagaaaaaaaaatacaaa

SEQ ID NO: 94442 - DNA, 981 bp, Zea Mays
atgaaggcacaggagatgacgatgttgctggttccgcagacgttgatgctgagtaacggaacaacattcaaagcaagatcacagtgcttttggacacgagcaccaccagccatggagacccgcttttgggaactgaggatcgcttttgggaactatcccagttcatctagacttgaacacagcctggaacacatcaggccactgatatttcctgctaagaggcgcaaggttgtcactatgaagaagaggaaggaaagggtgtcctctgaatcaacccttcctttagtggtgggtatcactgcagaagaaagcactgcattgatacctgctgcttcagaaagtaaggcacaaaaggatcttactcctgttggaagagatgctttgtcacgaattaggggtcgagattttgactcagcatgtggtcttactgaggatactggagccttgattgtatggcaagcaccacctattctagaggagatggctgcccacaatcagttagactccaagcaggacccagatagtttcaggcctccggcgacctctgttattgagtaccagcgacaaggaccaactgcacaaatgaccaatatttcgtttatggttgggaactcatcccatgcaaggccgactgaccaggatgatgaaaacttgagaggagatgttctcacattgatcaatgagctggaagatgaaagagcagctgcacttgagaggacaagaatccttgaagagaggctccagcaagagttggaaaatgaaaggacagttgctgctgagaggactacaattcttaagagcaaggaagctgctattgagagaacaagagttcttgacgagaatttggaagtacgtgctattgagagaacaagagttcttgacgagagactccaaagagaatatgaaatcgcacgtactgctgcaagccagaatgaagctttaaaagaggagattttcaaacttcaggagttcgttttctaa

SEQ ID NO: 94443 - DNA, 1197 bp, Zea Mays
atgacgtccgatgacggcgaaaacgatgaatattgccaaaatgtcaactttgtattggggccaacgggcatatgtatagtttatgaacagtacatatttcctgctgccaagcaatatgctgaaacattaagaacttcagatgaattttactgggataatgggccaaagatcagagaaggaggtggtgcatacttcctttttctattgtccatagcatttctcatgtcattcttcggcatattagtgcctggagttcctacaaactgcataggagacattgcagatgcaccacctgctaccacaggtggcatagacgatgttggtgcaggaacaggtggagctacaggtgtcggcacggacgcttgtaggggcaatgtagcaggtgcctgtgaaggtgcaggttcaggaggagggcgcgtgacatctggaaggaaattgaaaggtgtaaggaactggtggagaggttcaaggcaaaaaataatttctttgcctactgctccttgctcaggtgataccactaacagcaacaagaacaagagggggcctgcttctgcattggaaaaagattgggcattggaagaccataagcacatggacgctttaattagtagatcaatttattctggaggatcctcagaggtgattgattttattgttgtttctgagaaggcacctatgttcttgagggctgataattgtcaagtctgcactgtttgcagagtggaatttgaatatgggggatggggacgggttgtgaacgcagttggagtacctttgaatttaaagatgaaagctaggttccaaaaactacgccagaagaaggggaaaaactttgatccattggttcatgaggacttcaacttggacaatgagtgggctgattctttgcatgtagtccctgaaggtgggcgtgggtgtgagtgtgaccttacatgggaccttgtggataatgccattggagcatcacaagcacttcgtggccgaaacttaccaagaagagcccataatgtgtattcaagaagaaattctgttgctgcacaaaatatgtcagaggctgaagaggaagatgaagatgaagaagatgttccacatgatgatgcagaaatcacagattgtgaagatgaatctaatggtggcaatgatggtgaagaaggggaggcacccaatatcccaggagagtttgatgatgatttttga

SEQ ID NO: 94444 - DNA, 493 bp, Zea Mays
tagaacagattgaccaaaagttttatttatttcatcgagaaggagcaggactacaaggggaccctatataagaaatcttatctataaaaggcagaggtatctgatcaacctcctacgcttacgctctagttcctccttgtcaccaccgtcattggcggcagcgacgtcaaggaagctctccacactagtatcgtcgctgaaatctcagtcgaggtcctcctcaggctcctcgttggtggagctgctgttacgcagccacatctctaccaactcctccgatctcctcagaggagacttcctcctcagtggagtcgatgtatgcctcatcacagtcccaatcatcttccgaggaggagagtacaaaggggcatgtaggaggcaagcaactcacgcaacaaacaacgaatatgcatcggactcatcgacgatcgttgaggcataatcgatcgagaaggggtcaatgtcttagtggaagtcccaatcctcctcgact

SEQ ID NO: 94445 - DNA, 212 bp, Zea Mays
ttttttattttttattttattttattctattttattttctttcattattgttatttattttattttgttttgggcaagctaatcatcgttcatgttaatgaaatatgaaacttaatttagaattccgttacattagtcaatttatatagtcaattgttcatttcgcttaaggtcgatcaactaaaaaggggctaggtttccgttagtgcata

SEQ ID NO: 94446 - DNA, 787 bp, Zea Mays
aaaatgtcaactttgtattggggccaacgggcatatgtatagtttatgaacattacatatttcctgctgccaatacgctgaaacatcggagatattaaaatctcacccgttttgctgcgccgaccgcattcggcggcttccccgccatccatcaggcgacatgtgatagtcgcttggacccgaaatttccctaaattttagctctgagcggctagtcgcgtccgtctaccatcgaacactctctccccatgccatccttatctcctctccttcctgtacctttctccctcccacgccactgcttccccctcgcggcttgctgtcgccgctggcgttccctgctccaagccttccaggctcagcgatgggccatcatgatgttcaagaacctattgaggcacatgttcgacaacttgtagagcaagctgttcctagatgacttcacgcatgcatgagatttggcattcaagagtaattcagtactggaagcttatggagtctgagatacaaaaggattcctttcgaaacattatggatatgagtgctaaccttggcagatttgcagcatctttgaagaaaaaggatggttgggctatgaatatattcccttttacaaaataaggaagctaaagattatatgtgatcgtggtttaatggggactgcccatgattagtaagattctcctagcaatcacaaaactaggctaacctcgacacatggtaagcaccaattgcaaaactgcatttttacaaagttgttttgtagcactaaaatttcttgtacctt

SEQ ID NO: 94447 - DNA, 1048 bp, Zea Mays
agtataataaacgcgagcccaccttatcgccagtcagtcacccaccccatccaaggccctcccaaagtcccaaaggccgccgccgcccgccagcccaccatggccgcgcagtccttcctcctcgccgccactgccgccgccaggtcccccgcggtcttcgccgctccctattcctccgcacgccctttccactcggtccacttcgtcgccggcccgtggggcgccgccgccgccagggcgctcgtcgtcgcggacgccactaagaaggccgtagccgtcctcaagggcgcgtctgaggtcgagggcgtggtcacgctcacgcaggacgacgatggacctacaactgtgaatgtccgtatcactggacttacccctggacttcatggcttccacctccacgagtttggtgatactaccaatgggtgcatatcgacaggaccacattttaatccaaacaatctgacgcacggtgcaccagaagacgaagtccgtcatgcgggtgacctgggaaacattgttgcaaatgctgagggcatagccgaggcaaccattgttgatacccagattcctttgactggcccaaattcagttgttgggagagcatttgtggttcatgagcttgaagatgatttggggaaagggggccatgagctcagcctctctactggaaatgctggtggaagactggcatgtggtgttgttggcctgactccattgtaggttgctcgccgggtgcccgggttgcagttgcagctacgctgttacatccttgccttggtggacttttgtcttcaatcgtgttattgggacagtgacctttttgtattacttggattcattccatgcatgtggtatggtgcgtaatagcctttgcaggtcgactgtataaaaagcaatatttagttgaggaaataagtgttgccacatatccaaatcgatctatgaagcactatgaacatcaaatgttattttgattttgttttaaccttttttaaagctatttctaaaaaataatattcgagagtttttttttcttctaaaactaaca

SEQ ID NO: 94448 - DNA, 851 bp, Zea Mays
gaagtataataaacgcgagcccaccttatcgccagtcagtcacccaccccatccaaggccctcccaaagtcccaaaggccgccgccgcccgccagcccaccatggccgcgcagtccttcctcctcgccgccactgccgccgccaggtcccccgcggtcttcgccgctccctattcctccgcacgccctttccactcggtccacttcgtcgccggcccgtggggcgccgccgccgccagggcgctcgtcgtcgcggacgccactaagaaggccgtagccgtcctcaagggcgcgtctgaggtcgagggcgtggtcacgctcacgcaggacgacgatggacctacaactgtgaatgtccgtatcactggacttacccctggacttcatggcttccacctccacgagtttggtgatactaccaatgggtgcatatcgacaggaccacattttaatccaaacaatctgacgcacggtgcaccagaagacgaagtccgtcatgcgggtgacctgggaaacattgttgcaaatgctgagggcatagccgaggcaaccattgttgatacccagattcctttgactggcccaaattcagttgttgggagagcatttgtggttcatgagcttgaagatgatttggggaaagggggccatgagctcagcctctctactggaaatgctggtggaagactggcatgtggtatgttcattttgctatatttatggtgaaccgttgaatgtgactgggataatgatgtcagaaaaggcattgaaacttgtcatcggtgcccatccagttaatttctacgaccgtaaaaaaataagccactgcaactgttttacaagaagtattca

SEQ ID NO: 94449 - DNA, 576 bp, Zea Mays
atggagctgatggaagatgagcgcttagaattattagaactggcctctcgtagtaaagggctcctctcaatggtttctcttgatagtgacacattacagcagcttgattcatttagaggaatgctgggaaagtttcctcctgaaactgtgagactgaaggattcaaggctcttaggtgaattgcatattcctctgctgaaatctatcattaaagatattaaggatgttgctcggactccttcagttgctttaggtgtaaatcagagcagttctgccaatcctggaggtggtcactcagtggtcgccataaacttatatgtcgtcgtcgccatctgcgactgctcgaatagacaattgaaaaagagaattgatcttttttatgggcgaagtgttgaagatggctttggtgaaggaaatgtcttgttagcatcaagtaagtggcgacatcataacccctacaagcttgtgacttaaaacaagaggatacaagaagttggagtgcttttgtgaaggcttttgcgaatcacttgaagcgttaggacttttgtgaatgattttgtaaagtgtttgcaaata

SEQ ID NO: 94450 - DNA, 2414 bp, Zea Mays
agttcttgtcgacggagagtaatgagatatagaataaggtaccctatagaataaagaatctttctctgaaaagtctgacgtacgtaaataagatataataaaaaaaatacaaagagaagcgctggactggagatgctcctatatgcggcaatgcctgtgcttataaatagccacctcggtcggcaaggacatgaacggcggacgcagtgtgcatgcatacaagagcaacaagatactggcgcagaggagcaatgcccggcatggatgccttcgctgctgtgtcactactcgccacactctttctggttcgtgcggcagctgcccatcctccggcggcggctgcggacgccatgacgccgacggactattggcgagcggtgcttcctgagaccccgatgccccgagccatactcgacctattgaccacatctacagttggtgagggctcaaggaaggtcaccacgtcaaatgggtaccaaggccatgacttaagaacggtcagcacatcatatgcatctcaagatggggacaactcatggaaggccaccatgtcatatgggttccaaagtggtgagggctcgaggaaggtcaccacatcatatccgtaccgagggcaggacttaaggatggtcagcacatcatatgtatctcaagatgaggacaactcatggaaggtctcaatgccatctaggttccaagttggtgagggctcaaggaaggtcaccacgtcaaatgggtaccaaggccatgacttaaggacggtcagcacatcatatgcatctcaagatggggacaactcatggaaggccaccatgtcatatgggttccaaagtggtgagggctcgaggaaggtcaccacatcatatccgtaccgaggccaggacttaaggatggtcagcacatcatatgtatctcaagatgaggacaactcatggaaggtctcaatgccatctaggttccaagttggtgagggctcaaggaaggtcaccacgtcaaatgggtaccaaggccatgacttaaggacggtcagcacatcatatgcatctcaagatggggacaactcatggaaggccaccatgtcatatgggttccaaagtggtgagggctcgaggaaggtcaccacatcatatccgtaccgaggccaggacttaaggatggtcagcacatcatatgtatctcaagatgaggacaactcatggaaggtctcgatgccatctaggttccaagttggtgagggctcaaggaagctcaccacaccattcgaatcacaaagggaggactcaaggaaggccaccgcatcatatggaatccaagatgatgaggacacaaggaaggccactacatcatatggaatccatggggaggacccaagaaaggccaccacgtcatatggttcccaggatgagaagggatcaaggaaggtcataatgtcatatgggtctaatggtgaggatgatccaagaaaggccaccacatcatatggaatacaagataaagagtatcccaggaaggccaccacatcttatggagttcaaggggacatccatcaccatgaccatgctgccgttcacatccacagcagcggcaacaagctagtagcagatgttttcttcttccacgacgtcctacgcccagggtccgtaatcacgccgatcatcccaccgaccatcaccctaccacctctgctgcctctccgcgaggccgacgcgctcccgttctccaccgggcgcttcgccgacatcctcgccatgttcgcgccgacgacatccgacgccatgggcgaagagatacggtcgacgctcgacacctgcgagaacacgcgcccgctccctggcgagaaggccgcctgcgccacctccctcgagtctctcgccaggatacccgccgtcctcctcgggacacgcaacgtccgcgctttctccggcgacatgcccaccgatcctgccggcacgtcggcgaagcgggggcggtataacgtaacggccgtgcagaagctctccgagtcactgacggcggcggcgtgccatgacctgacgtacccctacgttgtgttctactgccacacgaccaacccagcggccacgtacctggtgaagctggcagcccaggatggcgggacgccggacatggaggcgttggtcgtgtgccacctcgacacgtcgttgtggagtcccagacacccattcttggtggcgcacagtctcaagccaggggacgacgcagtcgtgtgccattttctctctaagctcagcatcgtctgggtccccgctggcgagcaggggtggcgtgcgtgaagtgaagcctaatagcgttaagtacccgtgctcagagctctatctgtaacctgtatggacctaatgtggctctgtaatgctaaataaaacctgcgtcaatcatgtatcgtgatattttat

SEQ ID NO: 94451 - DNA, 1769 bp, Zea Mays
gtactagcccacagtacaacatcactcgctctcgctcggtcgctactccactctcacgctgtgctggctggcactccgcccggctgcccttaatccttatatagcgacccctccgagctcagtgactccccactctccgtgctcttggtcgagtagttccctctcctctctctgattcttctgcttctcggtctagctagctagctcggtgcctcggccaaccgggcgtcgcgcgctggccggcctgccaggcaagcaacaatggcagattcaggggaggggcgtcgggtgtgcggcatgccggagaaggcgcagctgcacgtggcgatgctgctgctgcagttcggctacgcgggcttccacgtggtgtcgcggctggcgctcaacatgggcatcagcaagctcgtcttccccgtctaccgcaacatcatcgcgctctgcctgctcgtgcccttcgcctactttctggagaagaaggacaggccgcagctgaccctcaacttcgtcgtccagttcttccttctcgcgctctgcggcatcacggcgaaccaagggttctaccttctgggcctggacaacacgtcgccgacgttcgcgtccgccatccagaactcggtcccggccatcaccttcgccatggccgcggcgctgcggatcgagaaggtccggctggaccgccgcgacggcgtggccaaggtggcgggcacgctggcgtgcgtggcgggtgcgtccgtcatcacgctctacaagggccccaccatcttcggtcccagcggcagcggcggcggcggcggcctcgagctggcggcggtgggcggcgacaagaactggacgctggggtgcgtgtacctgatcgggcactgcctgtcgtggtcgggctggctggtgctgcaggctcccgtgctgaagaagtacccggcgcggctgtccgtcacctcctacacctgcttcttcggtgtcatccagttcctcgtcatcgccgccttcatggagagggacgcggaggcctggaagttccactccggatccgagctcttcaccatcctatacgccgggttcatcgcgtccggggtggcgttcgcggtgcagatctggtgcatcgaccgtgggggcccggtgttcgtggcggtgtaccagccggtgcagacgctggtggtggccatcatggcgtcgctcaccctgggcgagaagttctacctggggggcatcatcggcgccgtgctcatcgtcgccggcctctacctcgtgctctggggcaagagcgaggagagggcgcgcgtcgccagggacgccgtctccggcggcgaccgcgaggggctccttgtcgcggccgccgccggaggtggtggcggcggcatcgtcaggagcgccggcaataaggcggcgtcggccgcgacgcagcctctcctgctgccgtcctccacccccactgacaacgtctgaccgatccatggatggatgaatcgtcatccatgcttgcctttggtgcgtggagatctgaggcagcatgcagaattaccagttattagtcatttctttgaggttttccttgttgattttcacgcatgtatgtatgctgctacctacgtgtacgtacgtacgtatatgcatgcatcactatggttgttacgcctttgatcacaagacaactacgtagctaggatcgtcggagtgtgttgacgacgtttggtatgtgcatgcgcaatgcctcatcacaggaggtgtgtaataatattagtttgcaggtataattatgcgttttattaaga

SEQ ID NO: 94452 - DNA, 1308 bp, Zea Mays
atgggggtctttcggtgctccggcggctggccggccggcggtggcggtgtgcaacggagcctgggacaccaaacgcaatcgcaggagggcctccaaacggggaaggggcctgggacaccaccccaggggggacaccgaacggcagcggcgactgagacgacgcacttggaggccctccgaacggtggcggcggctgggacattaccccaggctgtccgccaaagggcagcgaggtggaagttaaaagcgtcggcgcccgcacgaacggcggacaaaggttctgatgaggttgtattcaaggccatggggagggctatcaataagactgtcatggttgtggaattgatcaagaggaggattgttggcctccatcagaataccaccactggatctactgatattactgatatgtgggagccattggaggaaggcctacttctgcttgagacaacaagacttgtctctatgatcactataactctttcaaagaaggaagtggacacatcatctatcggatatcaatctcctttgcctcctgatgaagtgaagcctttggttaaatatgataatgatgaaggtattatgcacactcacctggtggcccgtggaaggggtcgtagtggtcgaggctgtgggcaggggcaggggcagagaaatgggttcaatgagtttgctgatgttggttgggaagacgatcacgcccctgcatatatgggcaatggatatgcctgtggaagaggtcgcagtttcaggggtcgtggcaggagaggcggctacaataaccagcctgaataccaacaggacggaggttattacgaggaggcacctgttcatgctccagctttaggtggattttcaccatttgtaatggaactgaaaccagcctctcatcgaagtggaaacctttttttagtcgtaaacatttacatggtttatccagtggtcctgggtacctcaaattttgtccacattgaaccagtacgaatgacatcttccttgaaagttatagaaatgcttcaaagttcaaatgtcattcagcatgttccatgtgctgctattccagcactcatttcttgtgctggcaatgcatttcttgtgctggcaatgcaaactggaactggaagtgtttgctcctcatccaatcgaattgggcaccgatggttagtcagacagtcacctactctacgtactctttctttaggaatggtagccttcggttttttcaaagcaacagataaatatggacatgtcctctacctattctgggaagtgctgccagtagtcctgaagagattaaaaatgttttag

SEQ ID NO: 94453 - DNA, 6637 bp, Zea Mays
atggaaaatagaaaaactttttcttggttaaaggaacagatgattcgatcgatttctgtatcgatcatgatatacgtaataactcgcacatctatttcaaacgcatatcccatttttgcgcagcagggttatgaaaacccgcgggaagcaactggacgaattgtatgtgccaattgccatttagctaataagcctgtggatattgaagttccccaagcagtgcttcctgatactgtatttgaagcagttcttcgaattccttatgatatgcagctgaaacaagttcttgctaatggtaaaaagggagggttgaatgtgggtgctgttcttattttgcccgagggattcgaattagcgccgcccgaccgtatttctcctgagttgaaagaaaagataggaaatctctcttttcagagttatcgtcccaataaaaaaaatattcttgtgataggccctgttcccggtaagaaatatagtgaaattgtctttcccattctttcccccgatcccgctacaaaaaaagacgttcatttcttaaaatatcccatatatgtagggggaaaccgaggaaggggacagatctatcctgacggtagcaagagtaacaatacggtctataatgctacgtcaacaggtatagtaaaaaaaaatactacgtaaagaaaaggggggatatgaaatatccatagtggatgcatcggatggacgccaagtgattgatattataccccccgggccagaacttcttgtttcagagggggaatcaatcaagcttgatcaaccattaacaagcaatcctaatgtaggagggtttggtcagggggatgcagaaatagtgcttcaggatccattgcgcgtccaaggccttttgtttttcttcgcatctgttattttggcacaagtttttttggttctcaaaaagaaacagtttgaaaaggttcaattgtacgaaatgaatttctagatcctgggatttcttaccatcaagtgagaaaaaagcctcgatttctggaattccttatttctatctcatgcaaaagaagaggatccaaggcaaagacgagaacaataaaaggaacaagtccttttaggaggaattgtgggtcttcttaatcctctattgggcacaagaaaaaggcttttttgcctttttcttgtgtcgattcttcttgtatcgaagtaagaatcatttttcttcttatttgttttgtcaaagattactatttattctttattcgggtctgtcttttggacttcctttgcttaggttcgggcgcggtagtggacaaacagagggaaagaaggtatggcgggggacacatttcttgtgagcaaatagaattgctttactttttgaattaagttcaactttgaacttacagaaattttgtaaaaaaaaatctataccctcccatggaagggtggttttgatttttaggctagttgagtagttttgattaaggttttattagtttattactctaaactaaatcaacgatttgcaggatacttccttcatggaataaaatactggatcctctcccctctttcttgttgcttcataagagtgaatccattttatgggcgaaaggcgggggctttaaatcgaccgatggattgcttcactcactaacatcattaacaaacaaaagaataaatggagggattccaaccatcagagcaaaggttttctctttgttatttttacaaatagaaataggtaaccaatttctagattatggaacaaaaccgcgttataacaataagaattctgcgggccctttccgctctaatcagataaaggggagtaaggacccgctaagttcctactttttcatgtttacaatctggatcctccgattactatagagatgaacccaatccagaatacgaaccgtaaaagaaaacacctattaaaccaatcacaagaataccagttacagtacctatcagccaaagaggaattcttccagtagtatcggccatttcccctactttcctccacattttctcaagtggtcatgctagagacaaaaacagtcatggatagttataaagatggtatccttccaaatgggataagagaattcttactactctctttctttctctcaattgaagaagtaattggaaaataaaacagcaagtacaaaaatgagtaataaaccccagtatagactggtacgattcaattcaacattttgttcattcgggtttgattgtgtcatagttctatagttggaatttggtttatcgttggatgaactgcattgctgatattgatcccaagaaaaaaaccatgggtacagctaatccgtgaacagccagccatcgcactgtaaaaataggataggttcgatctatggtcattgggggcctcctaaaaggatctactaaattcatctagttgttctaaagaatcaaaacggtcggttattaatggaattccttgtcggctttccgtgaaatactcgtttggtcgaggacttccaaacacgtcataagctaaacccgtactgacaaataaccaacccgcaatgaatagggaaggtatagtaatgctatgaataacccagtatcgaatactggtaataatatcagcaaaagaacgttctcccgtgcttccagacatgctgagctcccaaaatttttattcaaaaaaggaattgattccgtaaaagatgggatccaccagtaaatagaaaattactgatatttcatccttgtgagattgtcaattttgtaccaaaggtgtatttttgagtataccaaattagtatagctatccttcctatggcacagcaatccagttttgcttggtcccgaaacagaattccttttttctcttttttgttccttgtctataggaaaattacatgttattcaaggcatcaatagaaccccacaattttttgggtcctacttattttcattgtcttcggaatagtagaataatttaatttggaatagcggccaagatcttgggaaaatctaagttaatgattaataagataaagaatttaggaaggatattctcatattgacgcaatacaaagataagtatatgcaaaatcgatccctttttagttaaaggaatttaattggttagcataaaataatatctaataaatagaaaatcgaatagcggataatccgttatgaaagaaacggaatacattctttgaagaatcaagattcgtaatcaatccttgtcttgtttgttggattaggtctaattttcttgaccaaacaacaagcatggaactttacaagaagaacttaaaagaaaaggataattgaagtaactttgaatccacttttgttggggttcaaaaaacgaataaaaataaataaaaaaaagtaaatttaaggaatagttccctttttgaggggcccctcgggggtcgtggaatgcttttcttctcctcttattccatatggaatacaatgagttaaaatttgctccaaaaagaggatgaaatccatcctattaaaaaagaaataatccgaatccgaaatagaaagaattttttttttcaaattcaattctttatttatcttttattccaaaattctcccgaaaatccaatttcatttttcaatggggttagatgatctagttcttaatattattagtttacttaactgacagattccacaacaaatctcttgattcggaattagggactcatgttccgtctgatgaatcgattttctcttttttttacacttctgtatctcactctatcttgttttttagtattatctaaaataaccgatgaattatgaattttccataacttaaacttaggtaagtgctttaccaacatatgtagtgtagtaaaaaaaatggaattgaaccccttcatgcttactataactagttatttcggttttctactggctgctttaactataaccccagctctatttattagcttgaacaagatacgtcttatttgaaatgaattgaatagaagaatctttcttttggattcttggtattctagactcttttccacactaattaccaattcttttcttggtcattgagattcgtgggtagtttagactattatttagagatagatcgtacctctttttttatcccctcgaacaaatcgaaatgattgaagtttttctatttggaatcgtcttaggcctaattcctattactttagcgggattattcgtgactgcgtatttgcaatacaggcgtggggatcagttggatctttgattgagtaatatttcttttttgattgacctcctctctggtctggaggaggtcaaattggagttgcaattctactttgtttttttttaagttattttagtttcgacataagatatatggaatcacgctctgtaggatttgaacctacgacatcgggttttggagacccgcgttctaccaaactgaactaagagcgctttcaaaacaaaaaaaaaagaaaatccttttctattcctaacgtgtctcacgtccgtatagtatccacaaattcaagttatacccactttaatcgatctccccactactgcccataacgaagagagaattaataggtagggatgacaggatttgaacctgtgacattttgtacccaaaacaaacgcgctaccaagctgcgctacatcccttttccaaattgttgtacaatgccattgtacacaattcctttcttgttttccacatcgtaattttcttctatttctttatccatatagaactttcttgtcatttcttgtttttggtctcatataatcaaggaaggggtataaactaaaatccagtcaaatttcacctataaaagaaagactactattccttagtaatgtataggaagaaggggtcatcttttttagggataggaaaatctcgtctatacggttcattctatatatatataatatttattttgtttttttagttaggaatttcgcctaaacaaaagaaatacaaaggatcttgggcaagagtatctgatcatatatgtattccaatacggaaggaggattttcaatgcgggatataaaaacatatctctctgtagcacccgtgctaagtactctatggtttggggctttagcaggtttattgatagaaatcaatcgtttattcccagatgctttgtcattcccttttttttaattctagttattcctatgcgagagatagaattcttcgtgacatgacgaaaatttcccctttttgaattcttttttagtatatgaagcaaaaagaaagaaaagatggataaggattgtattctttaattatttctctatgttttattacttaatttacgaatttcaaaaattttgtattctattggattggatttgttcgagaattcgaagaattacaacaaaatctttagaaatcacatttttagttaggaacttctatggattttattcttcttcttttctttggatccaaaatagaagaataaaagaataggtataagaattaagttaagtcgatccaaaaaggaaaggaggttcatggccaagggcaaagatgttagaatccgagttattttggaatgtattagttgtgttcgaaagggtaccaataaggaatcgacggggatttctagatatagtactcaaaagaatcgccacaatacgcccggacaattagaattaagaaaattttgtcgttattgtcgcaagcataccactcataatgaaataaagaaataggagcatcgtgtgttcgatttttccaaagaacagaaagagtaagaacttcttattaaatatatagaacatagatagaatactaaatacaaatcaactcatctgattttaggtagatattatttcatatgtatagagggtttttatttttatatatttggattttttatatttttatatagtatattttgatttaatcaatttatatagtatattttgatttaatcaaataatatatggaccaaagaaagactacttcttctggttctggatcaaaaattaataaaagaaagaaatccattttttttcaaattttaaaataaggaataaatcatgtatatatctaaacaaccttttcgtaaatctaagcaaccctttcgtaaatccaaacaaacttttcataaatctaagcaaccttttcgtaaattcaaacaaccttttcgtaaatctaagcaaccttttcgtaaatccaaacaaccttttcgtaggcgttctcgaataggcccgggggatcgaattgattatagaaacatgagtttaattaatcgatttattagtgaacaaggaaaaatattatctagacgaataaatagattaaccttgaaacaacaacgattaattactcttgctataaaacaggctcgtattttatctttcttaccatttcgtaactatgagaatgagaagcaatttcaagcccaggcaatttcaataattactggtcctagacacagaaaaaatagacatattcctcaattaacacaaaagttcaattccaatcgaaacttaagaaactccaaccagaatttaagaaacaacaatcgaaacttaagttccgattgttgatgttttattcgaaagactcagactcatatataaagtaaagtaatccaatttggattcttgtgtttgttataagaaagaaaaa

SEQ ID NO: 94454 - DNA, 760 bp, Zea Mays
gaccgagctaggagaagcgcgaacgccgtgcatgcgcagacgttgaggtcgagggacacggtatctctgagcttcatcggagagcgacccgccaccgccacgcttggccgcaagccgagaagagtgccgggccgggagaccggacgattattgatccgtagcagattcgctaatggcggagacggcggacatggagcggatcttcaagcggttcgacaccaacggcgacggtaagatctcgctgtcggagctgacggaggcgctacggacgctggggtccacctctgccgacgaggtgcagcgcatgatggccgagatcgacaccgacggcgacggctgtatcgacttcaacgagttcatcaccttctgcaacgccaacccggggctcatgaaggacgtcgcaaaggtcttctgatccattacatcttcgtccaacctgcttatatatacacacacacgtaccattcagctccaacatatgatttcgatcggcttgcctgcctcgccgggcttaatgctgtctttcgccttcctataagcactaagctactattaggattttgttttatttaacttttttttgtctccaatctaatatatgtggacttctttttttattcatttttccctattttggttcgatcggataagtatttctatgtaattaattaattcattggagataagcgatccatctccttgtaattcgtaaacgaagtactgtatttcaaggggaatggtgtgcttatttttacaatca

SEQ ID NO: 94455 - DNA, 1611 bp, Zea Mays
aaaaccaaagcaaagcaaacccagggcggccagcggacggaacccaaggcgaaaaggaagccagcggaagcagcgaaaagcccacgccaccttccaatcccccccaaattcccttgcattccattcccttcttcccttcccacacacctcctcctcctcctcctccgcgtctcttccccggcccccacatccgtccccccctctctctctcttcgccggccgccattgcgctcccgcattgcgccgggtcctaccagtccagcgcgggtccgtgccggcggcgggcatgatgccgcggcgcgtggcgtcggtgccggtgcccgactggctggaggcgctgctggccacgcgcttcttcctcgcctgcgccgcgcacccggcgtccccgcgcaacgagtgcaacatgttctgcctcgactgcacgggcgcgccgccgccgccgccgccggccttctgctactactgccgcgcgcaccgacactcgtcgcaccgcgtcatccagataaggcggtcctcctaccacgacgtcgtccgcgtgtcggaggtggaggacgtgctcgacatctccggcgtgcagacctacgtcatcaacagcgcccgggtgctcttcctcaacgagaggccccagccgcgcggcgccggcgcggccgcgggcaaggccgccgcgtccccctacaactgcgagatctgcggccgcgcgctgctcgaccccttccgcttctgctcgctcggatgcaagctggtggacaccaagaggagcaacggccacgcggctagttccgcggacggaggcggcggcggcggcggcgcagccagtggcaatgacgagacgacggaggccggcgggagcaagaacggcccgggggcgcggccgcacggacggcggcggaaggggaccccacaccgcgcgcccttctggtcctgacccaccaccggcaatggcgatcggtcgagttactccactagcgagcatcgaggcaatcaagagatcgataggggaataatggagggaggggacgatcgccgtctctcctccgcgccgccccgcgcttcttcggttcggttcggtttggttgtccttatatatacgtaattagaaacagaaaagcaaaggagagagaaaaagatactgcccgcccaactagagaaaggaaggaaggttatagataaacagatagaaaagcgagctgaggtcggcaccctcgcgcgcatcccccctcaaccaccggagggagggagagagggagccggcccggggccgcgcgctcgctggactgcagtaagcaacttgtctgtccccatccctctctcaccataccatggcgccatttggtacggtaggtgtgcatgatggcatgcctgatcatctcctcctcctcctcctcctagtcatcatattcatagatgatgctggtgaacttgagctagcaggaaatggatttaattctttctttttttttgacattggttggttaaccgttgacagtgagtagtactgataattatgtcttttttttctccctgctacattatagtaatgtactcctgttgtttggttcacattgcattgccggataatatatatatatatatatacaaagttattcctca

SEQ ID NO: 94456 - DNA, 562 bp, Zea Mays
ggggagcaggttggcctcggtcacgtgcttgggcacgtcgccacggtcgaggcacgcgcagcgacgcagcgagggaggcgaggtggcattcagcagcaggctaaggtgaacgacggggacacgctgtgtcgagcgcaggcgttcgagccatggagcgacggtggtgtagactcctgcgcggatatgccgccgacacatcgtgaggcaggggaagggaccagatcttcttatctccttgaccttgagctcggcgaaggtgacggggtcgtcggcgagactgaggggtcgaagtactggccgccggggtagaggctgtttccgtcgtcgacgccgtcgtggccgttgacgcggaagccctcgacgaggcccatgaggacgacctgggagccgagcacggtgaggatgctatgcgcgtgcaccaggttggggttgcccaggtagtccagcccgccctcagagaagatctgcgcgccggccttgaacttaccacacggcctccctgaagtccacgcgcacccagctctggagcacctccggggtgacgcaacccagcgcccccagt

SEQ ID NO: 94457 - DNA, 770 bp, Zea Mays
gcagatggagaaaactgttgacatcaatgaagggagccattttttgaaagatcttgaaatgctcggaagtgtcacaggtgaacagatacccaacttggttggtgaaacaagtcctgggtttcaaatgggaagcaacacactagaaaagctcgggctgtacatgaaaaacgatgaggatgatgaggatggtgatttcacagatgaaccagtggctgatgttgaagagggagaaatagattaactgtgtttctggaccatttttgatatgttacaggagacctgttggcatgactgatctgcatagctttcctttggtatacaaagtgacctgacgaaagatcgtgtcacattgaacctgaaggtctggtattcatttttgtaactgcctaagttttggagccaagttggcaaatgacagggagcctcagacatgttggaagttcgtcgtgctgcatgtgaggagagcatcgagcgtgcgtatcgtttggattgagaattctctctggactttccatatccatacaatggaacagcgagtttattgcatatatgatgaggccacaaaaggggagagggttggaggagggaccacaaggagtgatggtgatagttcttggctcttgcacaggtgcgagccgtttttgaggggtagttttagagccatttccgtgttgtgaatgtaacatcggaaactgtacaaaagttagcctgatagatggaaaacattgacttgaatttatgcagtgcctgttcttcatcaatcacttcac

SEQ ID NO: 94458 - DNA, 797 bp, Zea Mays
gatctgcattccgcgcaggggcttctcctgaccacctcgcgccctcgtctctccaagtaaacacccgcttcccttcctcatgagtcacgagccttggcttcccttcctcgcgcaggggcttccagtaacaagtctagcattgtcgagcgaggataccgagcaaggatgtgtgcctgctatttaattcttgcagttgcgatcaaagccaagccatgcagcaacagtgtagatttaggtccaatgagcagatgtttagtagaatagcctgttgttgagtgtagcaagatcgatgattcagtgataacaaagtgacttaccttctccttcatctgtgcacattcaaggtttactcagagcatctgttgcaacctctaatggagacaattactgcattatttctgcaaagcagttgtttgggaactactgaatcgttgcatgctatccagctaggatacgagatccgtttggccaccgtccatgagaagatgatggaaatgtggaaaagcaatcattgtgaaaaccatctctaaattgtgaaaaccgagtctcgtattgatgtttgctgtcagttccgggactgatatatatgcttattatgtgtattttgagacagatggatgtaaatagttttttggtagacttgcgttctgcaatgggtggccatgtatgtgtgagcccatggattatactaattcaataagctagtggtggtgcttgcatgtttgtgggggcccttggattgctaatgtaatattgctatggattttgaaaggatcggggcagggttgggttgcaaa

SEQ ID NO: 94459 - DNA, 411 bp, Zea Mays
atggcaaccgagccgccgccggcagcggagaagaagaaggcgccgctccccaaggtggtcacgctcaataaagccctcaagctggcccagacatgggtggacaaaatgagtgcatcggagccggatgaacccaacgataaggatttcgagggccggccaccaaagctcggtcttggtgctaaagcggcacctggtgtgaagcgtgtggttcccactgacccagttgagaggaggttgcttgggaaggtgaatgcgcagaagaggaaggccttggaggatgatgatagaaatgctcaggtggcgaatgaggctagcgacgacgatgagcctgaaagcaggaccagtgcctttaacaagaagaggccagtgccttcagttacttctacacctttagggaagaaggctaagtga

SEQ ID NO: 94460 - DNA, 2218 bp, Zea Mays
gcacgttcgcccacagccacagctccacttgtccctgtccatccattcatcattccccgtcactccaccaattcaccacccaaaaccctaaaccccattccgtacctcaacgccgccgccgccgccgccgccgctgcgatgcagtccatggcgctcacctccccctcactcccggaggtcggccccgtttccggccgccgtctccagcgcatccgtgccaccgcggtatccgacgagctcaagctgaacaagtacagcgcgcgcatcacggagcccaagtcgcagggcgcctcgcaggccgtgctctatggggtcgggctcactgacgctgacctccgcaagccgcaggtcggcgtctcgtcggtgtggtacgaggggaacacctgcaacatgcacctgctccgcctcgcggaggccgtccgtgacggcgtccgcgaggccggcatggtcggcttccggtttaacaccgtcggtgtcagcgacgccatttccatgggcacccggggcatgtgctacagcctccagtcccgtgacctcatcgccgacagcatcgagaccgtcatgggagcgcagcactacgacgccaacatttccatacctgggtgcgacaagaacatgccaggtacaataatggcaatgggacggcttaatcgacctagcataatgatatatggtggaactattaagcctggtcactttcagggcaattcctatgatatagtatctgctttccagtgctatggagaatatgttagtggttcaatcactgatgagcaaagaaagaacgtcctccgcaattcatgtccaggagcaggtgcctgtggtggtatgtacacagcaaacactatggcatctgctatcgaaactttgggcatgagtcttccatacagttcttcgacacctgctgaggacccactaaaactagaagagtgccgtcttgctgggaagtatcttttagagttgctaaagatggatttgaagcctaaggacattatcactgagaagtcattgcgaaatgcaatggttattgttatggcacttggtggttcgactaatgctgttctgcatttgattgccattgctcggtccgttggtttgcatttgactcttgatgatttccagaaggtcagtgaccaagttcctttccttgcagacctcaagcccagtggcaaatatgtcatggaggatctacataagattggtgggacacctgcagtcattcattaccttttggagcaaggtcttcttgatggtgattgcatgactgttactggtaaaactctagctgagaatgctaaaatcttccctcctctgtctgaggggcagcaaataattcgaccacttgacaatcctatcaaaccaactggccatattcaaatactttatggaaatcttgcaccggaaggttctgtcgcaaaaataactggcaaagagggactgttcttctcaggtcccgcattagtttttgagggtgaagaatccatgatcacagctatctcagaaaacccagcgaatttcaagggaaaggtagtagtaatccgaggagaaggaccaaaaggagggccagggatgcctgaaatgttgactccaacaagtgcaataatgggtgctggtctcggaaaggagtgcgccctgctgacagatggtagattttcaggaggctcacatggatttgttgtcggccacatatgccctgaagcacaggaaggtggcccaattggccttgtccatagtggtgatgtaatcaccatcgatgtaagtaagagggtaatcgacgttgaccttaccgagcagcagctcgaagaaagacggaggaaatggaccccaccgccatacaagtccacctgtggagctctttggaagtacatcaagcttgtggctccagcgtctagaggatgcgtcactgatgagtaggatgtgttacattctgttaggttgtgcacatgatgtgtttgtcaatcaaaagctgttgccaggaacaatttccctgttagagtgattcattgtagttcggttttgcatgtggcaggtatgacaataaattgccggtttctaagagcttagcaatgctgcagaaactgctgaataatcgagtgtaatcggggtccgtgagcaatcacatctttgtcagtctcccttgttttgtttgtctcattgtttgtagtaccttgttcaaagagatgataatgtcgattattctttggtcctccacatgtaa

SEQ ID NO: 94461 - DNA, 1510 bp, Zea Mays
caattgtaatctccacagctagctcacgcacgattcccacactagctataggcagctaggctactgtatatagccagtcaccaccaaagtgtgaagtgtgtgtgcgtgtagtgcaagctacctgtaatatatatacgcttgaggcgtcacctcacctagctagctagcggctgcttcaaagctctatatgagcttggttgttgcggcgccaatggcgatcgtcgagttggccaacgcccagctgcagcagcaagccgcagcggcggccaagaaagacggcggcggccacgagctggaagatggggcggcggacgcggacacgagcacgacgatgggtatgagctgcaagcggagcgagcagcagcagcagctggtggagtcgtcctcgtcctacgactacgactacggcgccctgatgaaaggcgtgaggcacctctcggacagcggcattaccaggctgcccgacaggtacgtcctgcccgtgtccgaccgccccggcgtcggcctgattgccgcctcgtccaccgcggcggcggcgggcggcgtcggcagggtcaagctccccgtcgtcgacctcgccggcctccgcgacccctcccagcgcgccgccgtgctggcgacgctcgatgacgcgtgccgggagtacggattctttcaggtggtcaaccacggggtcgggagcgacgtgagcggcgggatgctggacgtggcgcggcgcttcttcgagctgccgctggcggagcgggcgcggcacatgtcggcggacgtgcgggcgccggtgcgctacggcaccagcttcaaccaggccaaggacgccgtgctctgctggcgcgacttcctgaagctcgtctgccagccgctgcgggaggtggtcccgcgctggccgcagcagccggcggacctgagggacgtggccaccgggtacgccgcggcgagccacgcgctgttcatggaggtcatggaggcggcgctggaggccctgggcatccccgcccccgcggccggcggcggcgtgctcggggagctggcggccttggcgtcgcacatgatgacggtgaactgctacccggcgtgcccgcagccggagctcacgctggggatgccgccgcactcggactacggcctcctcacgttcgtcctgcaggaccacgtcgaggggctccaggtcttgcacgccggccgctggctcaccgtcgaccccgtcccgggatcgttcgtcgtcaatgtcggcgaccacctagagatctacagcaacgggcggtacaagagcgtgctgcaccgggtgcgcgtgaactcgacgcggccgcgcatctcggtggcgtcgttccacagcctgccggcggagcgggcgatcgggccggcgccggagctggtggacgacgaggccggcaacccgcggcgctacatggacaccgacttcgccaccttcctcgcctacctcgcgtccgccgacggcaagaacaaaaccttcctgcagtcaaggaagctgccgctgcatacgtctagctaa

SEQ ID NO: 94462 - DNA, 408 bp, Zea Mays
attggggcttgtaggagtagcttgccatgtgaatgagggcgccattaccgggcacagggaggtgggatgagagtgaaagagtcgtcgcatggatccggccgccgaccccctacgttccttcgccgtcctcgggctggcggcaaccactgccgcagccaactccggcttcgcggactccaacccgatccgtcctgtcaccgtccgcgcggcctctgcgctcttccaccgtcttcgtcgcgctcggccgcacccgcgacgcgcttcgattcgccatcctcgatacacctggtgcaggcctgggtgttgcgacttgccgctggggggttctcgtggattcactagcaaggttaccctcggatgctcgcccagtttctcatcagagcttcaactccgtcgtgtgccgcaccg

SEQ ID NO: 94463 - DNA, 115 bp, Zea Mays
tgtaattttgagatactacagtttacaattgtacatgatacaaatactacgatattactttaccacagtaaaactatagtattgctcaaaaccgaggtctgttcggttccattag

SEQ ID NO: 94464 - DNA, 262 bp, Zea Mays
atgccatcttcgggggtgtcggcggcgcccggcgcgccgtacgaggaccccagccgtgcccgctgcatcgccttgtacgcctggttcttccccatctcttcctcgccgccaggcccggcgagaccagattggaatcggaaggggaggagccggggccagggacagagatccctttcgttctgctgctggaggcggggcgggcgtggcaacgggcgcgcgcggcgaggggcggcggggcagaggcggggcgcgcgcggcgagg

SEQ ID NO: 94465 - DNA, 1154 bp, Zea Mays
attgcctatcaaccgctactcacgccgtactgtctgatcggcaacacctcgtgtacacgtaggcccggagatatggcggcatcgccggtggccatcggcacggcggtgttccagcgggggccactccgcgtggaggcgaggcacgtcgactacagccaggtccccagcgtgcccaagccgctcatggtggtcgcccccaccgacgccggcgtctaccccgtggccgtcttcctgcacggctgcaacacggtcaacagctggtatgagagcctcctgtcgcacgtcgcgtcccacgggttcatcgccgtggcgccccagctctactgcgtgacgctcaacatgaacgacttgaaggacatcgacgccaccaggcaggtcaccgcctggctcgccgacaagcagcaaggcctggcgcacgtgctcgccaacatcctccagctccacggcgtgaggccggacctctccaggctggcgctggccggccacagccgcggcggcgacacggccttcgccgtggcactcgggctcggacccgccgcctcggacgacgacgacaacaacgcagacgcaggcacatcgccggcggcgttgccactcaagttctccgcgctgatcggcgtggaccccgtggcggggctatccaagcaggcgcaggtggagccgaaggtgctgaccttccggccccggtccctcgacccggggatgccggcgctggtcgtcggcacggggctcggccccaagcacgtgggcgggccgccgtgcgcccccgcgggcgtcaaccacgccgagttctacgacgagtgcgcgccgccgcggtaccacgtcgtgctgagggactacgggcacatggacatgctggacgacgacggcgtgccctacgtcatcaacaactgcatgtgcatgaggaacaccaaggacaccaaggacctcgccaggagggccatcgggggagccgtggtggcgttcctcagggccacgctggaggacgacgacgaggatctcaaggtcgtgctcgagaaccgccctggcctctcgccggcggtgctggacccagttgggcatgacttggcttgaatagcaaggctggcggagtgtgctacattgtcgctccttatttacacacacataccacatgtttcttttccattttgtcc

SEQ ID NO: 94466 - DNA, 825 bp, Zea Mays
attgcctatcaaccgctactcacgccgtactgtctgatcggcaacacctcgtgtacacgtaggcccggagatatggcggcatcgccggtggccatcggcacggcggtgttccagcgggggccactccgcgtggaggcgaggcacgtcgactacagccaggtccccagcgtgcccaagccgctcatggtggtcgcccccaccgacgccggcgtctaccccgtggccgtcttcctgcacggctgcaacacggtcaacagctggtatgagagcctcctgtcgcacgtcgcgtcccacgggttcatcgccgtggcgccccaggttcgtctccgtcgtcgtcatcgtgcaagcatcgatcgtgtgcatgcatgtttccgttcttttgctgagctctgaaaacacatcacagctctactgcgtgacgctcaacatgaacgacttgaaggacatcgacgccaccaggcaggtcaccgcctggctcgccgacaagcagcaaggcctggcgcacgtgctcgccaacatcctccagctccacggcgtgaggccggacctctccaggctggcgctggccggccacagccgcggcggcgacacggccttcgccgtggcactcgggctcggacccgccgcctcggacgacgacgacaacaacgcagacgcaggcacatcgccggcggcgttgccactcaagttctccgcgctgatcggcgtggaccccgtggcggggctatccaagcaggcgcaggtggagccgaaggtgctgaccttccggccccggtccctcgacccggggatgccggcgctggtcgtcggcacggggctcggccc

SEQ ID NO: 94467 - DNA, 2832 bp, Zea Mays
cctatatacaaaaagatcaccactactgtactacggcaccccttcctcccccgctcccccacctccgctcccgaaaccctcgccgccgccgccgccgccgccgacgccgaaatcctcgtcgcggcggcgatcactgctcccctctatgatagcggcgcgtgagggcggcggagcgcggcctgtcgctccccggtccgcgtgcccggggcggctctgagagcccagagctcgtctcggttccctgccaagcgcagccgagcaccgcgccggcgccgcgtggcagttcaggccgtagtctgggcgctgttctgctctgggtctactggagtgcgtttgggattttttcggttcctactacattcgggggcgctgaacgacattgcttcacacaataaggcttctgactgggtgcagtttggtttccatgtgaacccccacatgtcccacgccagaaaataaggcgtctctctttcatggggcagccagggatggattctgttccagggaaggagaacaacggcattgcccctaacctcaatggggtcgtgtctccagcgaagcagcagctggaggggaaggaagcgatgcggtatgcaaacatcctccggtcgcgcaataagtttgctgacgcgatcaacctgtacaccattgttctcgagaaggatggcaccaatgtggaggcccttatcgggaaagggatttgcctccaggcgcagaacctaccaagacaggccattgagtgctttacagaagctgtcaaaatcgagccaggaaatgcgtctgctcttacacattgtgggatgatttacaaagatgagggtcacttggttgaagcagctgaggcatatcaaaaagctaggatggctgatccttcctacaaacctgcttcggaatttcttgctattgtgttgactgatcttggaactagcttgaagcttgcgggtaatacagaggaggggattcaaaaatattgtgaagctctggaagtagacaaccactatgcgccggcttactacaaccttggagttgtttattcggagatgatgcaatttgatatggctcttagttgttacgagaaagctgcactggagagaccattgtatgctgaggcctattgcaacatgggagttatctataagaatcggggagatctagatgcagcaattatctgctacgagaggtgcttgaccatttctcccaactttgagattgctaagaataatatggcaatagcactaactgacttgggaacaaaggtaaaaattgaaggtgacatcaatagaggtgtagcatattacaagaaagctctatactacaattggcactatgctgatgccatgtataatcttggcgttgcatatggtgaaatgttgaattttgagatggcaattgtcttttacgagcttgcgctgcacttcaatcctcgctgtgcggaagcatgcaacaatttaggagtcatatacaaagacagggataaccttgacaaagctgttgaatgttatcaaatggcactgtcaattaagccacttttcgctcagtcgctaaataaccttggagttgtctatactgttcaaggtaagatggattctgctgctagcatgattgagaaggctatacatgcaaatcccacatatgctgaagcatataataatctaggtgttctttacagagacgctggtagtattactttagcaattcatgcttacgagagatgccttcagatcgatcctgattcacgaaatgctggccagaaccgtttgcttgcaatgaactatattgacgagggctcagatgacaagctttatgaagctcacagggagtggggaaaacgctttatgaaattgtatccacaatatacaagttgggataactcaaaagttgctgaccgcccattgatcatcggttatttgtctcctgattactttactcattccgtgtcctacttcattgaagctccccttacacaccatgattccacagtttgcaaggtggttgtctactccggtgttgtgaaggcagatgccaagacacttagattcaaggataaggtgttgaaaaagggtgggttgtggagagatatatatggtattgatgaaaagagggttgctagcttggtaagggaggataaagtggacatacttgtggaacttactggtcacacagcaaataataagttagggacaatggcatgccgacctgctcctattcaggttacctggattggctaccccaacacaacaggtttgccaacaatagactaccgaatctcagactcattgactgatccacctatgacaaagcaaaagcatgttgaggagttggtgcgccttcctgaaagctttctttgttatactccttccccagaagctggtcctgtttgtccaacaccagcaatttcaaatggtttcgtcacttttgggagctttaacaatctagcaaagattacaccgaaagtgttgcaagtttgggccagaatattatgttcagtccctaactccaggcttgtggttaagtgcaagccattctgctgtgagaacataaggcagaaatttttggccacactggaggagttgggtttggagtcattacgggttgatctgttgccactcatccatctgaatcatgatcacatgcaggcgtattctttgatggacatcagcctggatacatttccctatgctggtactacgactacatgtgaatctttatacatgggggttccatgtgttacaatggctggtgctgttcatgctcataacgttggtgtcagcttgctcagcaaagtcgggttggggaggctggttgccaaaactgaggatgagtatggagcaa

SEQ ID NO: 94468 - DNA, 2790 bp, Zea Mays
cctatatacaaaaagatcaccactactgtactacggcaccccttcctcccccgctcccccacctccgctcccgaaaccctcgccgccgccgccgccgccgccgacgccgaaatcctcgtcgcggcggcgatcactgctcccctctatgatagcggcgcgtgagggcggcggagcgcggcctgtcgctccccggtccgcgtgcccggggcggctctgagagcccagagctcgtctcggttccctgccaagcgcagccgagcaccgcgccggcgccgcgtggcagttcaggccgtagtctgggcgctgttctgctctgggtctactggagtgcgtttgggattttttcggttcctactacattcgggggcgctgtttggtttccatgtgaacccccacatgtcccacgccagaaaataaggcgtctctctttcatggggcagccagggatggattctgttccagggaaggagaacaacggcattgcccctaacctcaatggggtcgtgtctccagcgaagcagcagctggaggggaaggaagcgatgcggtatgcaaacatcctccggtcgcgcaataagtttgctgacgcgatcaacctgtacaccattgttctcgagaaggatggcaccaatgtggaggcccttatcgggaaagggatttgcctccaggcgcagaacctaccaagacaggccattgagtgctttacagaagctgtcaaaatcgagccaggaaatgcgtctgctcttacacattgtgggatgatttacaaagatgagggtcacttggttgaagcagctgaggcatatcaaaaagctaggatggctgatccttcctacaaacctgcttcggaatttcttgctattgtgttgactgatcttggaactagcttgaagcttgcgggtaatacagaggaggggattcaaaaatattgtgaagctctggaagtagacaaccactatgcgccggcttactacaaccttggagttgtttattcggagatgatgcaatttgatatggctcttagttgttacgagaaagctgcactggagagaccattgtatgctgaggcctattgcaacatgggagttatctataagaatcggggagatctagatgcagcaattatctgctacgagaggtgcttgaccatttctcccaactttgagattgctaagaataatatggcaatagcactaactgacttgggaacaaaggtaaaaattgaaggtgacatcaatagaggtgtagcatattacaagaaagctctatactacaattggcactatgctgatgccatgtataatcttggcgttgcatatggtgaaatgttgaattttgagatggcaattgtcttttacgagcttgcgctgcacttcaatcctcgctgtgcggaagcatgcaacaatttaggagtcatatacaaagacagggataaccttgacaaagctgttgaatgttatcaaatggcactgtcaattaagccacttttcgctcagtcgctaaataaccttggagttgtctatactgttcaaggtaagatggattctgctgctagcatgattgagaaggctatacatgcaaatcccacatatgctgaagcatataataatctaggtgttctttacagagacgctggtagtattactttagcaattcatgcttacgagagatgccttcagatcgatcctgattcacgaaatgctggccagaaccgtttgcttgcaatgaactatattgacgagggctcagatgacaagctttatgaagctcacagggagtggggaaaacgctttatgaaattgtatccacaatatacaagttgggataactcaaaagttgctgaccgcccattgatcatcggttatttgtctcctgattactttactcattccgtgtcctacttcattgaagctccccttacacaccatgattccacagtttgcaaggtggttgtctactccggtgttgtgaaggcagatgccaagacacttagattcaaggataaggtgttgaaaaagggtgggttgtggagagatatatatggtattgatgaaaagagggttgctagcttggtaagggaggataaagtggacatacttgtggaacttactggtcacacagcaaataataagttagggacaatggcatgccgacctgctcctattcaggttacctggattggctaccccaacacaacaggtttgccaacaatagactaccgaatctcagactcattgactgatccacctatgacaaagcaaaagcatgttgaggagttggtgcgccttcctgaaagctttctttgttatactccttccccagaagctggtcctgtttgtccaacaccagcaatttcaaatggtttcgtcacttttgggagctttaacaatctagcaaagattacaccgaaagtgttgcaagtttgggccagaatattatgttcagtccctaactccaggcttgtggttaagtgcaagccattctgctgtgagaacataaggcagaaatttttggccacactggaggagttgggtttggagtcattacgggttgatctgttgccactcatccatctgaatcatgatcacatgcaggcgtattctttgatggacatcagcctggatacatttccctatgctggtactacgactacatgtgaatctttatacatgggggttccatgtgttacaatggctggtgctgttcatgctcataacgttggtgtcagcttgctcagcaaagtcgggttggggaggctggttgccaaaactgaggatgagtatggagcaa

SEQ ID NO: 94469 - DNA, 2752 bp, Zea Mays
cctatatacaaaaagatcaccactactgtactacggcaccccttcctcccccgctcccccacctccgctcccgaaaccctcgccgccgccgccgccgccgccgacgccgaaatcctcgtcgcggcggcgatcactgctcccctctatgatagcggcgcgtgagggcggcggagcgcggcctgtcgctccccggtccgcgtgcccggggcggctctgagagcccagagctcgtctcggttccctgccaagcgcagccgagcaccgcgccggcgccgcgtggcagttcaggccgtagtctgggcgctgttctgctctgggtctactggagtgcgtttgggattttttcggttcctactacattcgggggcgctgaaaataaggcgtctctctttcatggggcagccagggatggattctgttccagggaaggagaacaacggcattgcccctaacctcaatggggtcgtgtctccagcgaagcagcagctggaggggaaggaagcgatgcggtatgcaaacatcctccggtcgcgcaataagtttgctgacgcgatcaacctgtacaccattgttctcgagaaggatggcaccaatgtggaggcccttatcgggaaagggatttgcctccaggcgcagaacctaccaagacaggccattgagtgctttacagaagctgtcaaaatcgagccaggaaatgcgtctgctcttacacattgtgggatgatttacaaagatgagggtcacttggttgaagcagctgaggcatatcaaaaagctaggatggctgatccttcctacaaacctgcttcggaatttcttgctattgtgttgactgatcttggaactagcttgaagcttgcgggtaatacagaggaggggattcaaaaatattgtgaagctctggaagtagacaaccactatgcgccggcttactacaaccttggagttgtttattcggagatgatgcaatttgatatggctcttagttgttacgagaaagctgcactggagagaccattgtatgctgaggcctattgcaacatgggagttatctataagaatcggggagatctagatgcagcaattatctgctacgagaggtgcttgaccatttctcccaactttgagattgctaagaataatatggcaatagcactaactgacttgggaacaaaggtaaaaattgaaggtgacatcaatagaggtgtagcatattacaagaaagctctatactacaattggcactatgctgatgccatgtataatcttggcgttgcatatggtgaaatgttgaattttgagatggcaattgtcttttacgagcttgcgctgcacttcaatcctcgctgtgcggaagcatgcaacaatttaggagtcatatacaaagacagggataaccttgacaaagctgttgaatgttatcaaatggcactgtcaattaagccacttttcgctcagtcgctaaataaccttggagttgtctatactgttcaaggtaagatggattctgctgctagcatgattgagaaggctatacatgcaaatcccacatatgctgaagcatataataatctaggtgttctttacagagacgctggtagtattactttagcaattcatgcttacgagagatgccttcagatcgatcctgattcacgaaatgctggccagaaccgtttgcttgcaatgaactatattgacgagggctcagatgacaagctttatgaagctcacagggagtggggaaaacgctttatgaaattgtatccacaatatacaagttgggataactcaaaagttgctgaccgcccattgatcatcggttatttgtctcctgattactttactcattccgtgtcctacttcattgaagctccccttacacaccatgattccacagtttgcaaggtggttgtctactccggtgttgtgaaggcagatgccaagacacttagattcaaggataaggtgttgaaaaagggtgggttgtggagagatatatatggtattgatgaaaagagggttgctagcttggtaagggaggataaagtggacatacttgtggaacttactggtcacacagcaaataataagttagggacaatggcatgccgacctgctcctattcaggttacctggattggctaccccaacacaacaggtttgccaacaatagactaccgaatctcagactcattgactgatccacctatgacaaagcaaaagcatgttgaggagttggtgcgccttcctgaaagctttctttgttatactccttccccagaagctggtcctgtttgtccaacaccagcaatttcaaatggtttcgtcacttttgggagctttaacaatctagcaaagattacaccgaaagtgttgcaagtttgggccagaatattatgttcagtccctaactccaggcttgtggttaagtgcaagccattctgctgtgagaacataaggcagaaatttttggccacactggaggagttgggtttggagtcattacgggttgatctgttgccactcatccatctgaatcatgatcacatgcaggcgtattctttgatggacatcagcctggatacatttccctatgctggtactacgactacatgtgaatctttatacatgggggttccatgtgttacaatggctggtgctgttcatgctcataacgttggtgtcagcttgctcagcaaagtcgggttggggaggctggttgccaaaactgaggatgagtatggagcaa

SEQ ID NO: 94470 - DNA, 269 bp, Zea Mays
aggaagtaaaatagcataatgacatctatgtcggttaatcgactcttcaagttgttttactgtcatatttctactacatatacaaccgggaacccgcgccttctaatgaagcaacttaagttaccatatcaagaacctacaggggcaaagccctacaaatcgaactttataagacacatttaatcaccttacagaccgcaagtgtcaataaatcagacacccggagcttaacaacccctccctctaaacacagatgtgctaactcactc

SEQ ID NO: 94471 - DNA, 953 bp, Zea Mays
aaaaaagacagaaattcacatcatagcataaaaatccaaaccagtttaaaaaaaaatactagatatagattcaatttttttggacctgaaaaaagtaccatttccgaagtactactactaccgcatggcgagcgagtagacggttcttctaatgggccgttccgtgggcttcattgtttaacctggggctagctatatagtaataccatcccaccccgctcctcaaaaccctagctagcgccgccgccgctgcagactcctccttttcgatcccttcacaaagcgccgccgtcgccccatcgaacatggctccgaagaaggataaggccccgcccccgtcgtcgaagcccgccaagtccggcggtggcaagcagaagaagaagaagtggagcaagggaaagctaaaggagaaggtgaacaacgcggtgctgttcgaccaggctacctacgacaagctgctctctgaggtgcccaagtacaagcagatcaccccctccatcctatccgagcgcctcaggatcaatggctccctggctcggagggctatcaaggacctgatggcgcgtggcctcatccggttggtctcggttcactcaagccagcagatctacaccagggcaacaaatacctaaggatgggattcccttgtttgccctctctgtaggagctcgtcttctttagaacagttgccatctctgtcaagagtttgctaatgctatgttagatgagtttctcacgtggctgaaacgtttcagagagtttgcgttagtttggcttgcctattataccttatctggccttagctttttctatggaaatctgccttgaaatgtctgatccgtgattatgcaactctatctaaactactgttatgctgcaattctgtcaacttgtctgaccagcaagtctgatgaatgaacttctgtatagatgtgatatttgcttgtgctgaa

SEQ ID NO: 94472 - DNA, 721 bp, Zea Mays
gcgctcgcttgattccctacagcttattggacaactctgtatggcgtcgcgctaacttcctcgtgtatgctcttgcttgcaggctccgaagaaggataaggccccgcccccgtcgtcgaagcccgccaagtccggcggtggcaagcagaagaagaagaagtggagcaagggaaagctaaaggagaaggtgaacaacgcggtgctgttcgaccaggctacctacgacaagctgctctctgaggtgcccaagtacaagcagatcaccccctccatcctatccgagcgcctcaggatcaatggctccctggctcggagggctatcaaggacctgatggcgcgtggcctcatccggttggtctcggttcactcaagccagcagatctacaccagggcaacaaatacctaaggatgggattcccttgtttgccctctctgtaggagctcgtcttctttagaacagttgccatctctgtcaagagtttgctaatgctatgttagatgagtttctcacgtggctgaaacgtttcagagagtttgcgttagtttggcttgcctattataccttatctggccttagctttttctatggaaatctgccttgaaatgtctgatccgtgattatgcaactctatctaaactactgttatgctgcaattctgtcaacttgtctgaccagcaagtctgatgaatgaacttctgtatagatgtgatatttgcttgt

SEQ ID NO: 94473 - DNA, 760 bp, Zea Mays
aaaaaagacagaaattcacatcatagcataaaaatccaaaccagtttaaaaaaaaatactagatatagattcaatttttttggacctgaaaaaagtaccatttccgaagtactactactaccgcatggcgagcgagtagacggttcttctaatgggccgttccgtgggcttcattgtttaacctggggctagctatatagtaataccatcccaccccgctcctcaaaaccctagctagcgccgccgccgctgcagactcctccttttcgatcccttcacaaagcgccgccgtcgccccatcgaacatggctccgaagaaggataaggccccgcccccgtcgtcgaagcccgccaagtccggcggtggcaagcagaagaagaagaagtggagcaagggaaagctaaaggagaaggtgaacaacgcggtgctgttcgaccaggctacctacgacaagctgctctctgaggtgcccaagtacaagcagatctacaccagggcaacaaatacctaaggatgggattcccttgtttgccctctctgtaggagctcgtcttctttagaacagttgccatctctgtcaagagtttgctaatgctatgttagatgagtttctcacgtggctgaaacgtttcagagagtttgcgttagtttggcttgcctattataccttatctggccttagctttttctatggaaatctgccttgaaatgtctgatccgtgattatgcaactctatctaaactactgttatgctgcaa

SEQ ID NO: 94474 - DNA, 764 bp, Zea Mays
aaaaaagacagaaattcacatcatagcataaaaatccaaaccagtttaaaaaaaaatactagatatagattcaatttttttggacctgaaaaaagtaccatttccgaagtactactactaccgcatggcgagcgagtagacggttcttctaatgggccgttccgtgggcttcattgtttaacctggggctagctatatagtaataccatcccaccccgctcctcaaaaccctagctagcgccgccgccgctgcagactcctccttttcgatcccttcacaaagcgccgccgtcgccccatcgaacatggctccgaagaaggataaggccccgcccccgtcgtcgaagcccgccaagtccggcggtggcaagcagaagaagaagaagtggagcaagggaaagctaaaggagaaggtgaacaacgcggtgctgttcgaccaggctacctacgacaagctgctctctgaggtgcccaagtacaagcagatcaccccctccatcctatccgagcgcctcaggatcaatggctccctggctcggagggctatcaaggacctgatggcgcgtggcctcatccggttggtctcggttcactcaagccagcagatctacaccagggcaacaaatacctaaggatgggattcccttgtttgccctctctgtaggagctcgtcttctttagaacagttgccatctctgtcaagagtttgctaatgctatgttagatgagtttagtttggcttgcctattataccttatctggcc

SEQ ID NO: 94475 - DNA, 900 bp, Zea Mays
aaaaaagacagaaattcacatcatagcataaaaatccaaaccagtttaaaaaaaaatactagatatagattcaatttttttggacctgaaaaaagtaccatttccgaagtactactactaccgcatggcgagcgagtagacggttcttctaatgggccgttccgtgggcttcattgtttaacctggggctagctatatagtaataccatcccaccccgctcctcaaaaccctagctagcgccgccgccgctgcagactcctccttttcgatcccttcacaaagcgccgccgtcgccccatcgaacatggctccgaagaaggataaggccccgcccccgtcgtcgaagcccgccaagtccggcggtggcaagcagaagaagaagaagtggagcaagggaaagctaaaggagaaggtgaacaacgcggtgctgttcgaccaggctacctacgacaagctgctctctgaggtgcccaagtacaagcagatcaccccctccatcctatccgagcgcctcagggtaatcactcgttccagatctgtgatgtttgtgtgcaaaccctgtgaataaccgcaacgatgattaaattgctttgctatcagtgtatattatctttaattatatcacacttgcgtactacatgtttgatcggtaacctggaattttatgataagccatagttaacgcattccagctacatatgatgggcaaggttcatggctgatggctccattggtttatttgctgccaattaatatgatattgtaagctcgtcatgttttaactatgccaatcacctgggtgctcatttggactagtcaggattgttgttttgtcctgtatatgtttagtgttatatgattgccaattgttgagtctaacacatagtgctttgaattga

SEQ ID NO: 94476 - DNA, 1193 bp, Zea Mays
cctagggcgactgggcgagtcagtacttcagacttgagtccacccagccagccaagacacgcagcgcaggcgcatcccagccagattcaacccgagttcgcgacgagagcacgagatggcgatgcggacagcgctgacctccctccccgcgcgcctgcgcgcccctgcgccccccgcggcgacgggcggccggcgcctcctcagcgacgggaaggggcgtgtgctcagcgaggaggagcgcgccaaggagagcatctacatccagaagatggagagggagcggcaggagaagctgaagaagaggctcgagcaggagaaggccgactccgacaaggccaagcccgccgacgccgacaagaaggccgagggatctacctagctaggattggcatggcgctgttggaaggcaatcacgtttcgcatgtatccgaatccgatggtcagctttcggcgtgtttggttctcgtgctcgccccgcccaagctcatcaggtgcgttgaccgcatgcaaaccggtgattggttgcctgaacgcttggatgtcggcctgtatctgtggatgcaactcaggtgttttctcatgtgtctgcctgcgcgcgtggagacgtggggagagagcatctctagccgcccaggccgctacgagcccggcgcccgtgaacgcggcaaccaaacatgccgtttgtgaatgaataaattctgtaaaacgtcaacagcactggatatgctgtggcttcggttgcttgcatgttgaagttgaagacgacattgatattttgatactgctgctctttgtggactcgcggtagatcggtctttgttgtgttacctgctgttttgagttttctggttcctggctcggagacaaggacttcgaggtacagctgacgcgtttcctcggtctgcctgcttgcacttgccccctcgaccccgaggctgattcaaattgcatcgtgatcgaaccaagtttatgccaaaggaacttgggttccatattgcacccggtccgctagacacgtacgaagtccgatgtccctattccctacgaacgtaccagaagttcgatacggtgcctatgaatttcgttgacatgttatgttgtggctagcagaccgtgtatatatttgtgtaaaatattgttcgctttgattaaaaatcggctgcaatctatatagacaaaaaaatttataaaaa

SEQ ID NO: 94477 - DNA, 1526 bp, Zea Mays
acacacatcagaaccaccacctccaggcttcccagatcccaacaagggctaccgcccaccggccaccaccccacgcgcgtctcacgccatgggcagcgcgtcgtccccgccatcgcacaggcggtggagctggggctcggcgctggcgggcgcggcgacgacggccgccgccacggccctagtgctgtgccggccgcgggacccgcggttcgagctcatctccatcagcctgtccgccttccacttccgcccgccggcggcgctggacatcgggctcaccctcaccgtgcacgccaccaaccccaacgtcgtgcccgtgcgctacgggccctccaccgtctccatcctctacggcggcgcgcacctcggcaccgcccgcctcgacgccggcgagcagcccgccacctcctgccgcctgctccacctcccggcgcgcctcgacggcgtcgagctcgcgcaccgcgcccgcgccctcctctccgacgtcgcgcgccgccacatggagctagacgcggccgtcgagatcgccggcgaggccgcggtgctgctctggtcccgccccttctccgtccgcatcgacagccacatcactgtcgaccccgtcttcctggaggtcgtcgagcaggagaaccgctcggagatgcagctctacctcgcttgaattttttttaccaactagactagagtagatgcgatgcccaaagatcatatcaagtctagtcaaaaaccctatcgcttatcttgtgcagtgctcaaaatgcaaaaccttatcatttgttcgcacaatgcaatgcagcattcagactccagtgcaattcttgggcaaatttctgatgctctacaaaaatcagtgtcgcacaaggcaatgatacagatgattgactgggggaaggggaaatgcactggggggagagccaaggcagctcacccgccgcagttaacttagcacaagtgcacaacaaggacaccaaattgatgctctactaataaaattacactgcacacgggggatgtgagatgtctcagttgattgtcgcgagcggcaagcgagggatctgagataacttggattctttgctcgattcagattcatacggatggttctcacggaactcgttcatcaaggtctccatgggcatggctcgcagcgactcgatcgagcctttgcttggcacgttcggctcagacctcactggagtttcacccgtcggctcgtagtcctgcaagaatatatcatttgcggagttaggggattagggtaagcgaggtgccaattgttcagttactcgggaagtaatttgtttcaggctttcagcagattttcagtctcaccttgtaactggtttggaaagacttgtctgcgtgcatgttgataccggtagcctgggtggagtggctctcttgcagcttctgtagctctgcgaagtgagcctccaccattgagaccactcttgaactagatttctgtgccttttccaacagatctgaagcaaattgatataacaagacgcccagatcaggtaggg

SEQ ID NO: 94478 - DNA, 1677 bp, Zea Mays
gcactagcagcaggtacaccaatcgcttcgtccccgcgtctcgccgcgtaggcgccacagaaactcgcacgccgctccccgccgtccggcccgagtcgccgtcgccgccgaatccaatccatggctccgcccgccgcactgcaccaccgcacgcccctcctcctcccccgccgcaccgtcgccttgggtgccaccgccaccgcgcgcgccgccagggccgcttctctcgccgtcagggcccagccggacaccaccgccgcagccgtctccaccaccgcgcctgagccgacgcccgagttcaagcctccgccggggttcaaggcgcccgagcccaagaggttcgaggtcaagtccggccagctgggcagcgtcctcggcgcctcgctcgccatccccctccgcctcggcaccggcgtcttcgtcctcgggtactcgccatctcttgtttctgcatcagagataccatcagaccagtatgcactggaattcggagcttggaaggtgaaagaggaatcaaaaataggacagtgcaaacgaccagaaaagcctatcgagatatatgaatttgaaggttgtccattttgtcggaaggtcagagagatggtaacagtcttggacctagatgtattattttacccctgtcctaaaaaaggcccaacattccgacctaaagtcctcgaaatgggtggaaagaaacaattcccttacatggtggatccaaacacaggggtcgccatgtatgaatccgatgacatcataaaatatctagctgatacatatggtgtgtattcaacacatctccttttcacttttgctcttaaaggttgatcctccctatttgtgggggaaaaggcttgtctcggtttaaccctgagaccccattcatgtgggagcctcactggatttgtgtgtgaaaaggatcgtatcgttttatccccttcctagaccccatttttggcactgggtatgccctcttaaagtttcttcctataagtgaccttactgacctcactcacttatgcttgtttttcttaggcgatggaactgttccaattatgctatcacttggtctgttgacagcaattacagcagggcttgctactcttggtcgtattggaaagggaaattcctacattgcttcaaaagtcccaccgcagcccatagagatatgggcatatgagggatctcccttctgtaaattagtacgagagacgcttgtcgagttggaattaccacatctgctacacagctgcgcacgtggcagccccaaacgacaagaatttttcaagaaaaaggggcttttccaggcgccgtacatcgaagatcctaacacgggagtccagatgtttgaaagcgctgaaatcatagactacctgaaggcaacatatgccctgtacccaagctcgtagtgatgtatcagaaatggtgattgtaatgttgcgtgtagattcagttatttccggtaataaaaggaaaagaaatagtgggccacgcattctgtatgatgcacagccgattttgtctacgcaggtctaaactttgaagctacttcaaattcctgtttttcctagtgtttggttccagatcctagttggacacagcgactatgttctagttactggggatagaacggctccgatttgtgtttaatagttagaatggaaccgctttgttttt

SEQ ID NO: 94479 - DNA, 1336 bp, Zea Mays
ctccacttgcactagcagcaggtacaccaatcgcttcgtccccgcgtctcgccgcgtaggcgccacagaaactcgcacgccgctccccgccgtccggcccgagtcgccgtcgccgccgaatccaatccatggctccgcccgccgcactgcaccaccgcacgcccctcctcctcccccgccgcaccgtcgccttgggtgccaccgccaccgcgcgcgccgccagggccgcttctctcgccgtcagggcccagccggacaccaccgccgcagccgtctccaccaccgcgcctgagccgacgcccgagttcaagcctccgccggggttcaaggcgcccgagcccaagaggttcgaggtcaagtccggccagctgggcagcgtcctcggcgcctcgctcgccatccccctccgcctcggcaccggcgtcttcgtcctcgggtactcgccatctcttgtttctgcatcagagataccatcagaccagtatgcactggaattcggagcttggaaggtgaaagaggaatcaaaaataggacagtgcaaacgaccagaaaagcctatcgagatatatgaatttgaaggttgtccattttgtcggaaggtcagagagatggtaacagtcttggacctagatgtattattttacccctgtcctaaaaaaggcccaacattccgacctaaagtcctcgaaatgggtggaaagaaacaattcccttacatggtggatccaaacacaggggtcgccatgtatgaatccgatgacatcataaaatatctagctgatacatatggcgatggaactgttccaattatgctatcacttggtctgttgacagcaattacagcagggcttgctactcttggtcgtattggaaagggaaattcctacattgcttcaaaagtcccaccgcagcccatagagatatgggcatatgagggatctcccttctgtaaattagtacgagagacgcttgtcgagttggaattaccacatctgctacacagctgcgcacgtggcagccccaaacgacaagaatttttcaagaaaaaggggcttttccaggcgccgtacatcgaagatcctaacacgggagtccagatgtttgaaagcgctgaaatcatagactacctgaaggcaacatatgccctgtacccaagctcgtagtgatgtatcagaaatggtgattgtaatgttgcgtgtagattcagttatttccggtaataaaaggaaaagaaatagtgggccacgcattctgtatgatgcacagccgattttgtctacgcaggtctaaactttgaagctacttcaaattcctgtttttcctagtgtttggttcc

SEQ ID NO: 94480 - DNA, 104 bp, Zea Mays
cgatttttcccctcaaaattaataattgttatcatgttactaccagatcacagacaagctactaatacatgtctgagaagtaacaatattctcgccttaataaa

SEQ ID NO: 94481 - DNA, 237 bp, Zea Mays
atggcgggcggcgaaggaacctacgacgagctgctcaaggggcgccaggagaaaagtgagcacctgataattccccagtgcgcatcacttatatgggcagcaagccggttcggctccaccttggatgcagatcaaaggcagacgaccttgcaaatacaagcaatgagagttgtcaaatccttggaaccctactcacctggagcgccgagcgccggtagggataaatatcttgtgtag

SEQ ID NO: 94482 - DNA, 1343 bp, Zea Mays
ataatcacaaataactcgccagcagtgccgcaggtacaccaatcgcttcgtccccgcgtctcgccgcgtagcggcgtaggcgccacagaaactcgcacgccgctccccgccgtccggcccgagtcgccgtcgctgccgaatccaatccatggctccgcccgccgcacccaccgcgctgcaccaccgcacgcccctcctcctcccccgccgcaccgtcgccttgggtgccaccgccaccgcgcgcgccgccagggccgcttctctcgccgtcagggcccagccggacaccaccgccgcagccgtctccacctccgcgcctgagccggcgcccgagttcaagcctccgccggggttcaaggcgcccgagcccaagaggtacgaggtcaagtccggccaggtgggcagcgtcctcggcgcctcgctcgccatcccccttcgcctcggcaccggcgtcttcgtcctcgggtactcgccatctcttgtttctccatcagagataccatcagaccagtatgcactggaatttggagcttggaaggtgaaagaggaatcaaaaataggacagtgcaaacgaccagaaaagcctatcgagatatatgaatttgaaggttgtccattttgtcggaaggtcagagagatggtaacagtcttggacctagatgtattattttacccctgtcctcaaaaggcccaacgttccgacctaaagtcctcgaaatgggtggaaagaaacaattcccttacatggtagatccaaacacaggggtcgccatgtatgaatccgatgacatcataaaatatctagctgatacatatggcgatggaactgttccaattatgctatcacttggtctgttgacagcaattacagcagggcttgctactcttggtcgtattggaaagggaaattcctacattgcttcaaaagtcccaccgcagcccatagagatatgggcatgtgagggatctcccttctgtaaattagtacgagagacacttgtcgagttggaattgccacatctgctacacagctgcgcacgaggcagccccaaacgacaagaatttttcaagaaaaaggggcttttccaggcgccgtacatcgaagatcctaacacgggagtccagatgtttgaaagcgctgaaatcatagactacctgaaggcaacatatgccctgtacccaagctcgtagtgatgtatcagaaatggtcattgtaatgttgcgtgtagattcagttcttcccggtaataaaaggaaaagaaatagtgggccacgcattctgtatgatgcacagccgattttgtctatgcagatctaaactttgaagttacttcgtgttgaca

SEQ ID NO: 94483 - DNA, 1343 bp, Zea Mays; identical to SEQ ID NO: 94482

SEQ ID NO: 94484 - DNA, 565 bp, Zea Mays
tttcttattacagataaattcaggtcaatgtcagatcatcgccttcatacaataataagccttaggcattaggatgtgttttaacagacaattggtccacggtggtggccaggactttctttccctgtgtgaatggaatagaagatggggtacaatacattctgggaccttttcaaacctgagagacgagctccttgctccccaaggaagtttgtcacacacactctcccccatcgccgcatgtccccagcatctcatctgctctgcgcctataaaagtgagcaagccttcgcctcctgccgtcactcactctgacatcagacacaacactcagcagatggctcttcagtcccctgattcccgtgccttcctgagcaagaagccacccgcggcggcgatggagcggcaggaggcggcgaggcggaccctgccgcggcgcgggcagatcaagctgcgcatcttcgcgagcctgttccggtgcttcatcacccccgaggcacccgcgcgcaaggaaggcgacaagaacagagatggcggcggccgccgcgtttccccaggtggctga

SEQ ID NO: 94485 - DNA, 1351 bp, Zea Mays
gtcggcgaaaatccctttcaacattcgtgggcggggcggatgacctggagctggaggttcgtggtagcggccgccgccggccatggagaagagaaatcggattctcgacctgcaggacctcctctctgacgcggacttcggcccactactcgcccgacagctactgtctccgttcatgcggcggccacctacctacctcgtagcaagacaccatatcataagtgctgccatggatttgcacctagagctctacattggtcgccggcgccgcggcggaggcgagactcagaactcagaagtaccctcccatgggagtccacttctgtcggcttgatggagcacctgatggatggagaggagctcgcccaacagagtgaatggaacggagcgtgactgtgagagcgggatgggaacggagcggctccgtccggttgatttttttggagcggaatggtccttcctgctgccgcggccgcctcccacttcgactgctcccgcacctttcgttcacgcaagcgcaacctgcttctcccgctggctgtctcggacaccccctccctcctgccacgcatcctccccgcccacgagtctcccccgcaaggccgcaaccggataataaggaagaggaagagaaaccgtgcggtgcggcgaaaggaacagtgaaaaaggaagaatctctgatcgaggttcctgtccggcttgcagaatcttggcggccagccagccatatatggatgtactgctaggttccgggaggttcttggcgcgacggcctcccctcgcgctcgtccctcgctgctctcgaggctccccggacaaaagcggcagcgacaaaggtgaaacctcagctgactgggacaaggcatggtctgccttcaagaagaaagggaagaggaccctgttttctgatttctcaccggacaagtacgtgatctggaacccacggcgcagcgagtatccattgtcagaagaggtcgatccaatcaagagaagtgaaagatctaacttgatgctgtggacaagcccccagttcaccttggtcggggcgattatcatcgtcttgacattgctaatctatacactagttgttcctcctcccaagtaactgcagaggtgacaactactaggggggtgagctgtaaactagtagtatttcaactggggagtctgtattgtacatttttacgtgtactatggcaactatagcagtattaattcaattgcgatcatgtagatacaacaccactgtccattccattctggaggttttcttcaattgtgtgctaaatggctgctgtctgagtcttatattcacttattataatgaagaaatatttggggtcaggtagaa

SEQ ID NO: 94486 - DNA, 1828 bp, Zea Mays
gtacctgcaacgacctcaagcaaattacagacgatggtggatagcgccatggacgcggcgaggatcataggctacttcaaggataagaccatcctcgtcaccggctcgactggctttcttggaaagatccttgtggagaagatactgcgggtgcagcctgctgtgcgcaggatctacctcctcgtgcgagcggccgacgagccctccgcacagcagcgcgtccagcaagaggttaccggcaccgagctgttcagcctcctgagagacaagtacggcgaagaaggcttcgacctgttcatccgagacaagatcgttcctttggccggagacatcacgaaccaggacctgggcctggagccaaccacactcgacggcatggccaaggagatggacgtcatcgtcaacgttgctgcaaccaccaacttctacgaaagatatgatgtcgccctggacgtgaacgtgatgggagtgaagcaactctgccacttggccaagcactgcgccaacctcaggatgttcatgcatgtctccactgcctacgtgtccggcgacggcagcacggagccgatcctggagaagcccatcaagcccggcgaggcgctgcggggaggcggcacgcgcgtcgacgtcgacggcgagctgcgcctcgtcagtgacgccaagaacgacctgacgacgacgtcgaccaccggcgcggcggagaggaaggccatgaaggagctgggcctgcggagggctcgccacttcgggtggtccaacacgtacgtcttcaccaaggccatgggggagacggtgctggaggagcagctccggcgggacggcgacggcgacggcgacggcggcatgccgccgccggcggtggtggtggtcatgcggcccagcatcatcaccagcgtccgggccgacccggtgcccgggtgggtgcagggcacgcgcaccatcgacacgctcatcgtcggctacgccaagcgcagcatctcggccttcctcgccgacatccgcctcgtcatggacgtcatcccggcggacatggtggtcaacgccatgctggcggccgcggtggcgcactccgggtccgggtcggggtccgggcaggacgtggtggtatactaccagcccacctcgtcgctgcgcaacccggtgacctacgccgtgctctaccgctccggcagccgccacttcagggagcacccgcgcgtgcgggacgacggcgaggccatccccaacaaggagatgcgcttcttcaccaccatcccgaggttccgcctctacatgatcctctcctacaagctgcctctcgagatgttgcacatggcgaatctgctgctctgcggactcttctccaagttgtacaaggactccaaccgcaagtacaagtttgtgatgcatctcgttgacgtctacgggcccttcgccttcttcaaaggatgctttgacgacacgaacatggagcgcctgcggtcgacgatggtgatgcgcagccctgaagatgacatgttcaactacgatcccaagaccatcgactgggacgattatttttacagaatccacatacctggtgttctcaagtacgtctgcaagtgaagctggggaaaactctgttctgtatcaggcacaccttgctccttcacctaatcaccttgttcatatatgcgtgggggaaaactcttttcttttttttcttttttttttcttttttgcctctactggctgtaatcaatcacaaagacatgtcatccattggcagaacttgttaaacgtatcggtcaactcaagcaccatatatgaaatgttaacaaaaatgggtgctttgtggttggctgccagc

SEQ ID NO: 94487 - DNA, 1053 bp, Zea Mays
aaagaggggagaagaagccaaggatgtactggttccagttcaacctccctgagctgtgatgggaatcgcattccctctataattcctataaataggggccctcccgctcccatcacaatcacccatcactcgctctattcccattccaagtccccgctcttggattcccgacgacgagctcggagcttcttcttccctgctcggtgctcgtcgcaacagctgccgccatgtctgccgcgaaccagctcgccgctctggtcagcaacatgtacgccacgggtttgcttgacgatcagttccagcagctccagctgctccaggaccccagcgcccctgacttcgtctccgaggtcgtcacgctcttctgtcaggacggcgagcggatcatcgaagagctggccaaactgctggagaagcccaacgtggattttgacagggttgacgcctttgtgcatcagctcaagggaagcagtgcaaatattggtgctcagaaggttaagaacacttgcattcagttccgcgaattctgtcagcagaagagcagagatgggtgcctcaaggtactggagacaatgaggattaacttctatgagctgcgtggcaagtttcagaccatgcttcagctggagcgtcaggtcaatggctttccccccaacaagtaaaccagatggtggagtggaccttcatgttaggatgatgcttgcacctttcaagtttcagaacattctgaatgagctcctcaattggtttctgggaagtcttgtaatagcttagcagcaagattagcgttgacaccaccgtagcagtagtcattgtcgtcaagtagttgtcctaaatgtctgtgctgggttatggatctcctgcaagcagttgcaggcttgcagctgttctgtttactctagtagtttattttggagtagtcgctctcaataaatctgtcctaggagtctattggtggattattagtcagtcagtttctgggattcctggtggtgaagcaaaacaatgttatggctatcggttaataataatagtttgctgtgtttgacaaca

SEQ ID NO: 94488 - DNA, 1023 bp, Zea Mays
aaggatgtactggttccagttcaacctccctgagctgtgatgggaatcgcattccctctataattcctataaataggggccctcccgctcccatcacaatcacccatcactcgctctattcccattccaagtccccgctcttggattcccgacgacgagctcggagcttcttcttccctgctcggtgctcgtcgcaacagctgccgccatgtctgccgcgaaccagctcgccgctctggtcagcaacatggtttgcttgacgatcagttccagcagctccagctgctccaggaccccagcgcccctgacttcgtctccgaggtcgtcacgctcttctgtcaggacggcgagcggatcatcgaagagctggccaaactgctggagaagcccaacgtggattttgacagggttgacgcctttgtgcatcagctcaagggaagcagtgcaaatattggtgctcagaaggttaagaacacttgcattcagttccgcgaattctgtcagcagaagagcagagatgggtgcctcaaggtactggagacaatgaggattaacttctatgagctgcgtggcaagtttcagaccatgcttcagctggagcgtcaggtcaatggctttccccccaacaagtaaaccagatggtggagtggaccttcatgttaggatgatgcttgcacctttcaagtttcagaacattctgaatgagctcctcaattggtttctgggaagtcttgtaatagcttagcagcaagattagcgttgacaccaccgtagcagtagtcattgtcgtcaagtagttgtcctaaatgtctgtgctgggttatggatctcctgcaagcagttgcaggcttgcagctgttctgtttactctagtagtttattttggagtagtcgctctcaataaatctgtcctaggagtctattggtggattattagtcagtcagtttctgggattcctggtggtgaagcaaaacaatgttatggctatcggttaataataatagtttgctgtgtttgacaac

SEQ ID NO: 94489 - DNA, 2598 bp, Zea Mays
aaatgaggtgtgaggaaaaggagggaaagcattggcgggcgggcgggcgggcgcctgtctcttgcggctgtggtgccgcccgagagcgcgacccattcgttcgcgagcctcacttccagttccagcacgaatcctcgtccaatccacgcctgctgctcgcgagccatcgccacagtgctggcctggccatgcctggagccgttgcgcttgcgcccacgttcgcggcagcgagcagctccgccgccgcggcctccacgctggctccgaacccgacaagccgaggcgacccgctaattattaggttgtgccgcaatgctcctgctagcgcaactccacttgttccacttgtagccacccgtcgctacgtgcgtggctgccgcggcgcggctctagtggccagtccccaccacgctccaaaccctcgcctccgattcgcgtctgcggcagaggggatggctgcggaagcgagcacggcgggtgcggcgtcggcagccgaggcgaagcccttcgccgtcctcttcgtgtgcctcgggaatatttgccggagtcctgcggctgaagctgtgtttcggaccctcgtaagcaagcgtgggcttgactccaagtttctcatagactctgctggtaccatcgggtatcatgagggtaataaggcagactcaaggatgagagcagcttcaaaaaagcgggggattgaggtcacatcaatatccaggcctatcaaaccctcggattttcgtgattttgatcttatccttgcaatggacaggcagaactatggttgtctctcaggctctattatttgtgtttcagtacctctctaaatttgttgttatatgctgcttgatgcattggagcatttctgttttgaacaatatgcagaagatatattgaactcgtttgagagatggagacgcaaagagcccctccctgatagtgcacccaataaggttaagctgatgtgctcctactgcaaacaacatactgagtctgaagttccagatccttattatggaggtcctcagggatttgaaaaggtgttggacttattggaagatgcttgcgagtcgctgcttgatagtatcgtcgcaaacaatgcaagcatttctgggtgacatcgatgtaaatctccacatagacatctattttcagacgcaccggctgtagcatccatgcacaaccggagtaatttggttgctaatgcaacattgatcatgtcgttattacccaggtcttggtctggtttgtatataccaccatccttatacctggttatgtgataagtgacaaaaaaactgctcatcatcacttttttccactaaagataatcagaaacaatcagaatgactgacaaagcatgcttatgtccatttgaaacttactattttcgcataaggcatactcggttcctcaggaaccatgcttggaacaattgtttgactaatttatatgacatttgataagctggaacagtttctgggttctggctagatttctagctatccctttgtttgaattttgcactgttttttttttcttcttcccggtgcttttctttagcctgcagcaggctgcaaccagcacgacctccacaggtgactgcggctaccatgaaatcagtcgtcaccggcggtagcactgcacatgcaagaagaagccgccgggcgactgctctgtggcagctgtgtcgtcggccatccacagcctgccctccttctccgccctagccttcaccatgaactgcgcccccgagcccgcgctgccgccaccccgcccaccgaaccaccagtcgtgcacgtcccacatgacgtcgaccacctctccgtcgggcagcacggcggcgcggttgccccggaagccccagcccacccgccgcacctccgtcaccttctcgccgtcgatggtgacccgcagctccccctccccgcccctgcacgcgtgcacggccacctcgtgctcgtccccgccctcgcggaacctgcagcgcgtgacgtgcgccgccgccgccgctgccgcgcagcgcagctgctcccgccggctgacgaggagcgcgggcgcggcgcgagcgctcggtgcgaggccgaggcggcgggagagctcgcgcgccgcgccgcccgcgccgaggaggagcgcgagctcggcgtcggccacgacggcgaggcagtagtcgcgttcgggctccggggacgaaggcgacgggtacttggcctccgcggtgtcccagtgcacgccgacggccgtgccggcgccggtgaccagcgaccggctccctcttctcttgtgcagcaggaggacaggaggcctcgtccgggccggcgacggcttcggcgcgtcggaggtgccgccgccgccgtcgtcatcgaagtcgaaggcgaccgcgacgccggcctctccggccgcgctccgggtccacgtcacccggacgagcacctccttgcccgaggacagcgcggccctgtacacgctggtggtggccgcctgcagcgcccggtcgagcgcgccgcggccggagacggcggcgtcggccgtggccacgctgacggagccgtcgccgaagcaggacagctccctcatcgccgcagccacttgattcggacg

SEQ ID NO: 94490 - DNA, 2532 bp, Zea Mays
aaatgaggtgtgaggaaaaggagggaaagcattggcgggcgggcgggcgggcgcctgtctcttgcggctgtggtgccgcccgagagcgcgacccattcgttcgcgagcctcacttccagttccagcacgaatcctcgtccaatccacgcctgctgctcgcgagccatcgccacagtgctggcctggccatgcctggagccgttgcgcttgcgcccacgttcgcggcagcgagcagctccgccgccgcggcctccacgctggctccgaacccgacaagccgaggcgacccgctaattattaggttgtgccgcaatgctcctgctagcgcaactccacttgttccacttgtagccacccgtcgctacgtgcgtggctgccgcggcgcggctctagtggccagtccccaccacgctccaaaccctcgcctccgattcgcgtctgcggcagaggggatggctgcggaagcgagcacggcgggtgcggcgtcggcagccgaggcgaagcccttcgccgtcctcttcgtgtgcctcgggaatatttgccggagtcctgcggctgaagctgtgtttcggaccctcggtaataaggcagactcaaggatgagagcagcttcaaaaaagcgggggattgaggtcacatcaatatccaggcctatcaaaccctcggattttcgtgattttgatcttatccttgcaatggacaggcagaactatggttgtctctcaggctctattatttgtgtttcagtacctctctaaatttgttgttatatgctgcttgatgcattggagcatttctgttttgaacaatatgcagaagatatattgaactcgtttgagagatggagacgcaaagagcccctccctgatagtgcacccaataaggttaagctgatgtgctcctactgcaaacaacatactgagtctgaagttccagatccttattatggaggtcctcagggatttgaaaaggtgttggacttattggaagatgcttgcgagtcgctgcttgatagtatcgtcgcaaacaatgcaagcatttctgggtgacatcgatgtaaatctccacatagacatctattttcagacgcaccggctgtagcatccatgcacaaccggagtaatttggttgctaatgcaacattgatcatgtcgttattacccaggtcttggtctggtttgtatataccaccatccttatacctggttatgtgataagtgacaaaaaaactgctcatcatcacttttttccactaaagataatcagaaacaatcagaatgactgacaaagcatgcttatgtccatttgaaacttactattttcgcataaggcatactcggttcctcaggaaccatgcttggaacaattgtttgactaatttatatgacatttgataagctggaacagtttctgggttctggctagatttctagctatccctttgtttgaattttgcactgttttttttttcttcttcccggtgcttttctttagcctgcagcaggctgcaaccagcacgacctccacaggtgactgcggctaccatgaaatcagtcgtcaccggcggtagcactgcacatgcaagaagaagccgccgggcgactgctctgtggcagctgtgtcgtcggccatccacagcctgccctccttctccgccctagccttcaccatgaactgcgcccccgagcccgcgctgccgccaccccgcccaccgaaccaccagtcgtgcacgtcccacatgacgtcgaccacctctccgtcgggcagcacggcggcgcggttgccccggaagccccagcccacccgccgcacctccgtcaccttctcgccgtcgatggtgacccgcagctccccctccccgcccctgcacgcgtgcacggccacctcgtgctcgtccccgccctcgcggaacctgcagcgcgtgacgtgcgccgccgccgccgctgccgcgcagcgcagctgctcccgccggctgacgaggagcgcgggcgcggcgcgagcgctcggtgcgaggccgaggcggcgggagagctcgcgcgccgcgccgcccgcgccgaggaggagcgcgagctcggcgtcggccacgacggcgaggcagtagtcgcgttcgggctccggggacgaaggcgacgggtacttggcctccgcggtgtcccagtgcacgccgacggccgtgccggcgccggtgaccagcgaccggctccctcttctcttgtgcagcaggaggacaggaggcctcgtccgggccggcgacggcttcggcgcgtcggaggtgccgccgccgccgtcgtcatcgaagtcgaaggcgaccgcgacgccggcctctccggccgcgctccgggtccacgtcacccggacgagcacctccttgcccgaggacagcgcggccctgtacacgctggtggtggccgcctgcagcgcccggtcgagcgcgccgcggccggagacggcggcgtcggccgtggccacgctgacggagccgtcgccgaagcaggacagctccctcatcgccgcagccacttgattcggacg

SEQ ID NO: 94491 - DNA, 312 bp, Zea Mays
atgtgccactgtttggggaaagttgagaagtacgtcggggctcatggctcctccttagtaagcgcttggacaacatctcgtgtcgtgtccgagatatcattgactttggtgttcatcgaggagctttggtccggatgtggtcttcgtgacatcgttggccttccttcatctctatcggaagaggagctagaggatgtactggaggactacgagaaggcgaccaatcatgttgtagataggttgtctaaagacgatatcgttcgtagcgctcgatgtccccctagtgtattacgtcctaatgtcgtttcctga

SEQ ID NO: 94492 - DNA, 1624 bp, Zea Mays
gcgcatcgcggcatcggcatcgccacaaggccctctcacgctcacgcggtcacgcccccggacccttctccccgcgccgccgctcgccggagctccgcgtctccgcccgcgccacaccctgtagaatcctcaatggctgccgcaaggggcattaaccagctcctgaagagaactctctacaaccagtctgttggttcgtcgccgcttttctcatttcggggaaagcatgaagaatcgtctgctggactgagagcattggctcttcttggagttggtgcctctggtcttttgagttttgctacaatagcatctgctgatgaagctgagcatggcttggcagccccagattatccctggccacatgctggcatcatgagctcgtatgatcacgcatcaattcggcgtgggcatcaagtttacacgcaagtttgtgcctcttgtcactccatgtccttgatttcataccgtgatttggttggcgtggcctatactgaagaggaaacaaaggcaatggctgctgagattgaggtagttgatggtcctaatgatgagggtgaaatgttcacccgccctggtaaactgagcgatcgcttcccacagccttatgcaaacgagcaagcagcccggtttgctaatggtggtgcataccctccggaccttagtctcatcacaaaggcaaggcacaatggtcagaactatgttttcgctcttcttactggatatcatgatccacctgctggtgttcagattcgtgagggtctgcactacaatccctacttccctggtggtgccatagccatgccgaagatgcttaatgatggagctgttgagtatgaggatggtacacctgcaactgaagcccagatgggtaaggatgtcgtatcattcctttcgtgggcagctgagcctgagatggaagagagaaagctgatgggagtgaaatggatctttctactatcactagcgcttctccaagctgcctactaccgccgcatgaggtggtcagtcttgaagtcccgaaagctggtcctggatgtcgtcaactgaggactatcattacccttttttttattgaaatatgttgagccgttaaggagcattcaaaataatgagttggtggtgtacaattttccactggggctaggttccatgcctagaaattattttgttttctttactctgctgagctgcaaaagcatttcaccaagggagtacatttcacggtttgtttttggtttgcaatgcctcaatatcaccagcaatcttctaacttaactgctgatgggtctcatgctattgaatactcatatagtcctatcgtacggttgggcctctcttaaagtcatattttgtgttcgcttatattgggttgcatggttatggttaaatataatcatttagagccttaaaaacacgtgtgattccccctgtttgaactacatgagtggtccttgatttgagtttgcaccgtgaagtctgtaccaaaatgtttgtctagacacaattcggtcttgtactcaagttcatagggtcaagtttatagggtgtggtgattggattcaggctttgggcatgtagcacaatgaggtgtttggtttgaggaattatttcattcaaaatgagg

SEQ ID NO: 94493 - DNA, 1645 bp, Zea Mays
gcaccccgacgggtccgagttcgaggcgcatcgcggcatcggcatcgccacaaggccctctcacgctcacgcggtcacgcccccggacccttctccccgcgccgccgctcgccggagctccgcgtctccgcccgcgccacaccctaatcctcaatggctgccgcaaggggcattaaccagctcctgaagagaactctctacaaccagtctgttggttcgtcgccgcttttctcatttcggggaaagcatgaagaatcgtctgctggactgagagcattggctcttcttggagttggtgcctctggtcttttgagttttgctacaatagcatctgctgatgaagctgagcatggcttggcagccccagattatccctggccacatgctggcatcatgagctcgtatgatcacgcatcaattcggcgtgggcatcaagtttacacgcaagtttgtgcctcttgtcactccatgtccttgatttcataccgtgatttggttggcgtggcctatactgaagaggaaacaaaggcaatggctgctgagattgaggtagttgatggtcctaatgatgagggtgaaatgttcacccgccctggtaaactgagcgatcgcttcccacagccttatgcaaacgagcaagcagcccggtttgctaatggtggtgcataccctccggaccttagtctcatcacaaaggcaaggcacaatggtcagaactatgttttcgctcttcttactggatatcatgatccacctgctggtgttcagattcgtgagggtctgcactacaatccctacttccctggtggtgccatagccatgccgaagatgcttaatgatggagctgttgagtatgaggatggtacacctgcaactgaagcccagatgggtaaggatgtcgtatcattcctttcgtgggcagctgagcctgagatggaagagagaaagctgatgggagtgaaatggatctttctactatcactagcgcttctccaagctgcctactaccgccgcatgaggtggtcagtcttgaagtcccgaaagctggtcctggatgtcgtcaactgaggactatcattacccttttttttattgaaatatgttgagccgttaaggagcattcaaaataatgagttggtggtgtacaattttccactggggctaggttccatgcctagaaattattttgttttctttactctgctgagctgcaaaagcatttcaccaagggagtacatttcacggtttgtttttggtttgcaatgcctcaatatcaccagcaatcttctaacttaactgctgatgggtctcatgctattgaatactcatatagtcctatcgtacggttgggcctctcttaaagtcatattttgtgttcgcttatattgggttgcatggttatggttaaatataatcatttagagccttaaaaacacgtgtgattccccctgtttgaactacatgagtggtccttgatttgagtttgcaccgtgaagtctgtaccaaaatgtttgtctagacacaattcggtcttgtactcaagttcatagggtcaagtttatagggtgtggtgattggattcaggctttgggcatgtagcacaatgaggtgtttggtttgaggaattatttcattcaaaatgagg

SEQ ID NO: 94494 - DNA, 1469 bp, Zea Mays
agtgtgacaaacccaaagaccggcaccccgacgggtccgagttcgaggcgcatcgcggcatcggcatcgccacaaggccctctcacgctcacgcggtcacgcccccggacccttctccccgcgccgccgctcgccggagctccgcgtctccgcccgcgccacaccctgtaggtaactgattcggacccttgctcccaatcctcaatggctgccgcaaggggcattaaccagctcctgaagagaactctctacaaccagtctgttggttcgtcgccgcttttctcatttcggggaaagcatgaagaatcgtctgctggactgagagcattggctcttcttggagttggtgcctctggtcttttgagttttgctacaatagcatctgctgatgaagctgagcatggcttggcagccccagattatccctggccacatgctggcatcatgagctcgtatgatcacgcatcaattcggcgtgggcatcaagtttacacgcaagtttgtgcctcttgtcactccatgtccttgatttcataccgtgatttggttggcgtggcctatactgaagaggaaacaaaggcaatggctgctgagattgaggtagttgatggtcctaatgatgagggtgaaatgttcacccgccctggtaaactgagcgatcgcttcccacagccttatgcaaacgagcaagcagcccggtttgctaatggtggtgcataccctccggaccttagtctcatcacaaaggcaaggcacaatggtcagaactatgttttcgctcttcttactggatatcatgatccacctgctggtgttcagattcgtgagggtctgcactacaatccctacttccctggtggtgccatagccatgccgaagatgcttaatgatggagctgttgagtatgaggatggtacacctgcaactgaagcccagatgggtaaggatgtcgtatcattcctttcgtgggcagctgagcctgagatggaagagagaaagctgatgggagtgaaatggatctttctactatcactagcgcttctccaagctgcctactaccgccgcatgaggtggtcagtcttgaagtcccgaaagctggtcctggatgtcgtcaactgaggactatcattacccttttttttattgaaatatgttgagccgttaaggagcattcaaaataatgagttggtggtgtacaattttccactggggctaggttccatgcctagaaattattttgttttctttactctgctgagctgcaaaagcatttcaccaagggagtacatttcacggtttgtttttggtttgcaatgcctcaatatcaccagcaatcttctaacttaactgctgatgggtctcatgctattgaatactcatatagtcctatcgtacggttgggcctctcttaaagtcatattttgtgttcgcttatattgggttgcatggttatggttaaatatatgttg

SEQ ID NO: 94495 - DNA, 1616 bp, Zea Mays
atccggttcggttccgtcgtccactctcgttccccagttcgctggaccatctcaaaatcctatcctcctctccttccctccgtatctcatccggccgattcgaatctccggtcccatcctctacggcttcaccccgcgcccaatccagtctgtacgtgaatcttgacaggggagagaagaatcggataaggagacctgcaccttcctccgagcaaagcaggagaggaaacaagaatagaggaggagatggccatgcccaccttacgccttgctcctgacctgccgcccgtatcccgcctctgcttcgggacaatgacgatgggagagcagagcggggcggcgtgctcgctccgcctcctcgacgccgcctacgacgccggcgtcaacttcttcgactccgcagagatgtacccagtcccacagcgcagtgagacgcgcgggcgtagcgaggagctcctcggccgctggttgcgggcccgccgggccccacgggacagcgtcgtcgtcgcaaccaaagtcgcggggccttcagggcagatgacgtggattcgcggcgggccgacatctctcgattcacagaacatcgcagaggcaatcgatggctgtttgcgcaggctgggtgtggactacatcgacctctaccagatacactggccggatcggtatgttccaatgtttggggagacagagtatgatccgaactgccagtacacgtctgttccaatggaagagcaactggaggctctcggaagagcaatagatgctggcaaggtacattggccttagcaatgagacaccatatggtttgatgaaatttcttcagttgagtaaggattctcagttgcttccaaagctactgacactgcagaactcgtataatttgttgtgccgaaattttgattctggattggcagaatgctgccatcatgagagaattagcttgctggcttatagcccaatggcaatgggtatactttcaggaaagtatcacttatctgataattgtggtccgccagacgcaagaatgaatcttttcaaaggtaccgtgttctgaaaattttaaaaggtttatagtctggttccaatcctctctttcattttagtttggttccactacgttagcgctcctcctttatagggagatactctgaaggtgaatcccggtacaaactgcagagccccaaagtgaaagcagctgtgaagatttctgcaaagtatggcatttctccagtgaccttagcgattgcatttgtcttgagacatccacttgtggcatcggctgttttcggtgcgactaaattgtggcagcttgatgaagttcttcaggcaactacagtccatctttgtgaggaaattgttgctgagatcaatgatgtacatgcaagataccctaacccttgcccataaaattttgcaaaaaaaaaactttatttagcatcacatggatccttatttatcatcgagagatatttttttccaatatagcactgggtatgttttttcccaatatagcaccgccattagatgtgacacttagggcctgtttgtttaccccatggattatataatctggattatttttggaggattatatagggcctgtttgtttacccccc

SEQ ID NO: 94496 - DNA, 1424 bp, Zea Mays
atccggttcggttccgtcgtccactctcgttccccagttcgctggaccatctcaaaatcctatcctcctctccttccctccgtatctcatccggccgattcgaatctccggtcccatcctctacggcttcaccccgcgcccaatccagtctgtacgtgaatcttgacaggggagagaagaatcggataaggagacctgcaccttcctccgagcaaagcaggagaggaaacaagaatagaggaggagatggccatgcccaccttacgccttgctcctgacctgccgcccgtatcccgcctctgcttcgggacaatgacgatgggagagcagagcggggcggcgtgctcgctccgcctcctcgacgccgcctacgacgccggcgtcaacttcttcgactccgcagagatgtacccagtcccacagcgcagtgagacgcgcgggcgtagcgaggagctcctcggccgctggttgcgggcccgccgggccccacgggacagcgtcgtcgtcgcaaccaaagtcgcggggccttcagggcagatgacgtggattcgcggcgggccgacatctctcgattcacagaacatcgcagaggcaatcgatggctgtttgcgcaggctgggtgtggactacatcgacctctaccagatacactggccggatcggtatgttccaatgtttggggagacagagtatgatccgaactgccagtacacgtctgttccaatggaagagcaactggaggctctcggaagagcaatagatgctggcaagattaggtacattggccttagcaatgagacaccatatggtttgatgaaatttcttcagttgagtaaggattctcagttgcttccaaagctactgacactgcagaactcgtataatttgttgtgccgaaattttgattctggattggcagaatgctgccatcatgagagaattagcttgctggcttatagcccaatggcaatgggtatactttcaggaaagtatcacttatctgataattgtggtccgccagacgcaagaatgaatcttttcaaagggagatactctgaaggtgaatcccggtacaaactgcagagccccaaagtgaaagcagctgtgaaggaatacacacagatttctgcaaagtatggcatttctccagtgaccttagcgattgcatttgtcttgagacatccacttgtggcatcggctgttttcggtgcgactaaattgtggcagcttgatgaagttcttcaggcaactacagtccatctttgtgaggaaattgttgctgagatcaatgatgtacatgcaagataccctaacccttgcccataaaattttgcaaaaaaaaaactttatttagcatcacatggatccttatttatcatcgagagatatttttttccaatatagcactgggtatgttttttccc

SEQ ID NO: 94497 - DNA, 1874 bp, Zea Mays
atccggttcggttccgtcgtccactctcgttccccagttcgctggaccatctcaaaatcctatcctcctctccttccctccgtatctcatccggccgattcgaatctccggtcccatcctctacggcttcaccccgcgcccaatccagtctgtacgtgaatcttgacaggggagagaagaatcggataaggagacctgcaccttcctccgagcaaagcaggagaggaaacaagaatagaggaggagatggccatgcccaccttacgccttgctcctgacctgccgcccgtatcccgcctctgcttcgggacaatgacgatgggagagcagagcggggcggcgtgctcgctccgcctcctcgacgccgcctacgacgccggcgtcaacttcttcgactccgcagagatgtaggctcacctgctccctcatctccctgcctcggttcgagagtaatgaaaggaaaggtgtctggaactctggatgcacatctgcaaacatgtttactcgtcaggtacccagtcccacagcgcagtgagacgcgcgggcgtagcgaggagctcctcggccgctggttgcgggcccgccgggccccacgggacagcgtcgtcgtcgcaaccaaagtcgcggggccttcagggcagatgacgtggattcgcggcgggccgacatctctcgattcacagaacatcgcagaggcaatcgatggctgtttgcgcaggctgggtgtggactacatcgacctctaccagatacactggccggatcggtatgttccaatgtttggggagacagagtatgatccgaactgccagtacacgtctgttccaatggaagagcaactggaggctctcggaagagcaatagatgctggcaaggtacattggccttagcaatgagacaccatatggtttgatgaaatttcttcagttgagtaaggattctcagttgcttccaaagctactgacactgcaggtaagtagcgcagtttgatctaatctgtagtactgtaatcgctctccatatttcttcacctgtgtttttgcagaactcgtataatttgttgtgccgaaattttgattctggattggcagaatgctgccatcatgagaggtatgcttgacacggtcagaagccctaactgttgtcttcagtgtctctaatcttctcatgtatggtcctggcatgagttggtagtgcatattggttttttccctctctatgactatgatacaacgatacatagctctcctgcatgttcgaaaaaatattgacatctgtttagtttaaagaagaatggcattgtcatatcgtatttgctcttggttaaggtattttccaaattgtattctgttttgactcaatttatacaattgtttttcttctgaacttccattgttgaactatggcatttgcagaattagcttgctggcttatagcccaatggcaatgggtatactttcaggaaagtatcacttatctgataattgtggtccgccagacgcaagaatgaatcttttcaaagggagatactctgaaggtgaatcccggtacaaactgcagagccccaaagtgaaagcagctgtgaaggaatacacacagatttctgcaaagtatggcatttctccagtgaccttagcgattgcatttgtcttgagacatccacttgtggcatcggctgttttcggtgcgactaaattgtggcagcttgatgaagttcttcaggcaactacagtccatctttgtgaggaaattgttgctgagatcaatgatgtacatgcaagataccctaacccttgcccataaaattttgcaaaaaaaaaactttatttagcatcacatggatccttatttatcatcgagagatatttttttcc

SEQ ID NO: 94498 - DNA, 1787 bp, Zea Mays
atccggttcggttccgtcgtccactctcgttccccagttcgctggaccatctcaaaatcctatcctcctctccttccctccgtatctcatccggccgattcgaatctccggtcccatcctctacggcttcaccccgcgcccaatccagtctgtacgtgaatcttgacaggggagagaagaatcggataaggagacctgcaccttcctccgagcaaagcaggagaggaaacaagaatagaggaggagatggccatgcccaccttacgccttgctcctgacctgccgcccgtatcccgcctctgcttcgggacaatgacgatgggagagcagagcggggcggcgtgctcgctccgcctcctcgacgccgcctacgacgccggcgtcaacttcttcgactccgcagagatgtaggctcacctgctccctcatctccctgcctcggttcgagagtaatgaaaggaaaggtgtctggaactctggatgcacatctgcaaacatgtttactcgtcaggtacccagtcccacagcgcagtgagacgcgcgggcgtagcgaggagctcctcggccgctggttgcgggcccgccgggccccacgggacagcgtcgtcgtcgcaaccaaagtcgcggggccttcagggcagatgacgtggattcgcggcgggccgacatctctcgattcacagaacatcgcagaggcaatcgatggctgtttgcgcaggctgggtgtggactacatcgacctctaccagatacactggccggatcggtatgttccaatgtttggggagacagagtatgatccgaactgccagtacacgtctgttccaatggaagagcaactggaggctctcggaagagcaatagatgctggcaaggtacattggccttagcaatgagacaccatatggtttgatgaaatttcttcagttgagtaaggattctcagttgcttccaaagctactgacactgcaggtaagtagcgcagtttgatctaatctgtagtactgtaatcgctctccatatttcttcacctgtgtttttgcagaactcgtataatttgttgtgccgaaattttgattctggattggcagaatgctgccatcatgagaggtatgcttgacacggtcagaagccctaactgttgtcttcagtgtctctaatcttctcatgtatggtcctggcatgagttggtagtgcatattggttttttccctctctatgactatgatacaacgatacatagctctcctgcatgttcgaaaaaatattgacatctgtttagtttaaagaagaatggcattgtcatatcgtatttgctcttggttaagaattagcttgctggcttatagcccaatggcaatgggtatactttcaggaaagtatcacttatctgataattgtggtccgccagacgcaagaatgaatcttttcaaagggagatactctgaaggtgaatcccggtacaaactgcagagccccaaagtgaaagcagctgtgaaggaatacacacagatttctgcaaagtatggcatttctccagtgaccttagcgattgcatttgtcttgagacatccacttgtggcatcggctgttttcggtgcgactaaattgtggcagcttgatgaagttcttcaggcaactacagtccatctttgtgaggaaattgttgctgagatcaatgatgtacatgcaagataccctaacccttgcccataaaattttgcaaaaaaaaaactttatttagcatcacatggatccttatttatcatcgagagatatttttttcc

SEQ ID NO: 94499 - DNA, 1338 bp, Zea Mays
atccggttcggttccgtcgtccactctcgttccccagttcgctggaccatctcaaaatcctatcctcctctccttccctccgtatctcatccggccgattcgaatctccggtcccatcctctacggcttcaccccgcgcccaatccagtctgtacgtgaatcttgacaggggagagaagaatcggataaggagacctgcaccttcctccgagcaaagcaggagaggaaacaagaatagaggaggagatggccatgcccaccttacgccttgctcctgacctgccgcccgtatcccgcctctgcttcgggacaatgacgatgggagagcagagcggggcggcgtgctcgctccgcctcctcgacgccgcctacgacgccggcgtcaacttcttcgactccgcagagatgtacccagtcccacagcgcagtgagacgcgcgggcgtagcgaggagctcctcggccgctggttgcgggcccgccgggccccacgggacagcgtcgtcgtcgcaaccaaagtcgcggggccttcagggcagatgacgtggattcgcggcgggccgacatctctcgattcacagaacatcgcagaggcaatcgatggctgtttgcgcaggctgggtgtggactacatcgacctctaccagatacactggccggatcggtatgttccaatgtttggggagacagagtatgatccgaactgccagtacacgtctgttccaatggaagagcaactggaggctctcggaagagcaatagatgctggcaaggtacattggccttagcaatgagacaccatatggtttgatgaaatttcttcagttgagtaaggattctcagttgcttccaaagctactgacactgcagaactcgtataatttgttgtgccgaaattttgattctggattggcagaatgctgccatcatgagagaattagcttgctggcttatagcccaatggcaatgggtatactttcaggaaagtatcacttatctgataattgtggtccgccagacgcaagaatgaatcttttcaaagggagatactctgaaggtgaatcccggtacaaactgcagagccccaaagtgaaagcagctgtgaagatttctgcaaagtatggcatttctccagtgaccttagcgattgcatttgtcttgagacatccacttgtggcatcggctgttttcggtgcgactaaattgtggcagcttgatgaagttcttcaggcaactacagtccatctttgtgaggaaattgttgctgagatcaatgatgtacatgcaagataccctaacccttgcccataaaattttgcaaaaaaaaaactttatttagc

SEQ ID NO: 94500 - DNA, 2860 bp, Zea Mays
tatgatttactgggtcatagaatggattatagtgctcatggaagctgccgccagaagctctcagattagccaaatgtgaccacatgcaacgacaggagattgtgacaccagattgctccctttctcgttcacttccatttcaaaccaaaaattagatgaagaatattatacaataaatatgatcgaggtgtacaggtgaaaaaataattaaaagctttttttctctatacgtgtcatttcattaagtaaaacagactacaaatgagaagtcaagagaccaatccagaaacccccaacaccaacggaaacacactccaaattacagcgactagttgctgtccaacactacacacaccaactcagaacagagatcctgagggaaacattatagagggcttaacctccaactgaacaccagagagtcagagatcacatccctctcccacacattctcatacagaaggataagtttgtctcagattcaaaatacgtggaaagaaattataaaagaaagaatatatggcaaatggtagtataatcaattagaacatgtttgtagtcctatttttacgaaacaaatgttttggatggcattattgcgaagcgcgatgtttgaagtcctaaatatgcaattgtctccttttgcagcatctagatacttgggctaactccctcaaaaacactaaaggctggttcggtgtaggggtgacaatgggctctaaattttacactataaaaagtaaggatcggatcgggttaggatcgggccctatttccattgttattgaagcgtcgcttaaacggtaaaacgtgattaaggagtaaaacgtccgcacgttttaagaaaaaggtttagaacgtccgttttagacatttaagcgtcctctgagcgtctgaaacacgttttacggcgttttggacgttttctggacgttctagatgttaatgggccttcctgggcctttagacgtcctcattcctcaaaccctaaattctaagccgccacagccgttgagccgtcctcagccacacagccgacgtcctctgcgctccccgctaccgtcgtccagactccagagctgccaggtacgccgccggtcgccggcccccctcctccctcttacctccgcccacagctcaaaaatctagtgcgcagccgccgccagccgccagtgctccagagtccgcggctgccagcctccagtgcccactccccagtccccactgcgctgctctgcgcaagctgccagtgcaagccaccagtgcccagtgctgagcaacagagcaagacgccactccccactgcgctgctctgcctcacttctgctgagcaagaccagcagccagactcaaattgaatttgttgattttgctcacattgaatcaatctctatttgatgaggatcttagagagaagattgatgcacaagctgttctttatgagaccaaagagaggcatttgcaaatccaacggctataaaaaatgcacaaacaaggaatccacgtaagtattctaaaattgatagccttccctccattttcagcatgtaacatataatcttctttgttcttgccattttagttgattggtggcttgcatatggtggtcgtactattgaattatataagtttgcaagacggattgttagtctttgtgcttcatcatccggttgtgagcgaaattggagtacatttgaatttgtaagtgagctagtcaaattattcaatttctattcgccactacttttttatcctcagttcttcattggttacttttatttgcacttgtagatgcataccaaaaagaggaataggttagagcacaaaaggttgaatgacttggtatatgtttcatacaacagaaagatggctgataggtttcaaaaaatacgcgagaaaggaaaaaactttgatctttgattttagaagactttgattgggacaatgaatgggttgatccattagctaattcttctcatgttagcaatgctcttggagatgatttcaatttatcatgggatgctcatggtcttaatattgatgagttcgatgatggttactaatcatgcataaaagttgtaacttgtgtggttgaacttgtgttgttgaacttgatttgtttctttttatgctaatgctatttggtttgtgaactcaacttatgtatgaacttattctatatttgaaattctatgtcaagtctaaaaagacgtttcaacgttcgtttaaacgtttcaacgttcgtttaaacatttaaacgtcgaaaagttggttcataacgttttaacgttttaccgtttttttttctctcgaaagcgcaagagagctgcgcgaaaatatattaagaaggggaaaaggtccaaaaaaggaccccaagttttaccgttttaataaccatgcctatttctatcgatttttaaactaaaaataatttagggccctagcaatttgtgaagaaacatttggattatgatctattaccacccatagtttgtcgcgcctaagagaatcttgcaacacttttacaagtcattgacgagtgggacctatgtagctggagaaaaatcttgccacaacaatgactccaaatcaaagttgcctaacctgaggcgtaacaaactatgacaagtgaggcagcaaaccaaatagccccctagtgacataggctcccacacgaatggggtctgggaagagataaaccgaggcaaaccttcccccgcaaatgtggagatgctacttcaaacccgcgacttgataactcagtgagactgatggaataagtcttgagcatctagaggacaacagtcgcttttgactgtcctctgtagtcctttagcatctagaggacagcttgactgtc

SEQ ID NO: 94501 - DNA, 812 bp, Zea Mays
gatcttagagagaagattgatgcacaagctgttctttatgagaccaaagagaggcatttgcaaatccaacggctataaaaaatgcacaaacaaggaatccacgtaagtattctaaaattgatagccttccctccattttcagcatgtaacatataatcttctttgttcttgccattttagttgattggtggcttgcatatggtggtcgtactattgaattatataagtttgcaagacggattgttagtctttgtgcttcatcatccggttgtgagcgaaattggagtacatttgaatttgtaagtgagctagtcaaattattcaatttctattcgccactacttttttatcctcagttcttcattggttacttttatttgcacttgtagatgcataccaaaaagaggaataggttagagcacaaaaggttgaatgacttggtatatgtttcatacaacagaaagatggctgataggtttcaaaaaatacgcgagaaaggaaaaaactttgatctttgattttagaagactttgattgggacaatgaatgggttgatccattagctaattcttctcatgttagcaatgctcttggagatgatttcaatttatcatgggatgctcatggtcttaatattgatgagttcgatgatggttactaatcatgcataaaagttgtaacttgtgtggttgaacttgtgttgttgaacttgatttgtttctttttatgctaatgctatttggtttgtgaactcaacttatgtatgaacttattctatatttgaaattctatgtcaagtctaaaaagacgtt

SEQ ID NO: 94502 - DNA, 979 bp, Zea Mays
cccccatgacagcgccagcgccaccccttcttcctcctactcatgccgctgttaccgttgacccttttccttccttccctttccctcgcgttaacactttctatatgctagtaaaaataagggaaatttggatccataccattaaaagataaccactttggatccatacgtactatctcacttacatgtgggtccacatgagtcaatgacatgtggggtccatggtatatatctaaagtttggatcttttaatgatatagatccaattgttcctaaaaataaagtctggcgctgaacagtgaacatgcactgcgctctcttccccattagtggatggtgggccggactggacagtagatttgtggcccaacaaaaatacatagcccacaaccctgacttagtgggccagtattgtcagaggcaccaccagccaaggagggagggagagggacggacgaaggcgagccgacccgacctcctgcggcgtgtaggtggagagagagagagagagtgaccctaccgggcgggagagagccaggaagaggagggcgacgatggcgtccggctggggcatcaacgggaacaagggccgctgctacgacttctggctggagttcagcgagtgcatgagccgctgccgccagccctccgactgcggcctcctccgcgaggactatctcgagtgcctccaccactccaaggagttccagcgcaggaacaggatctacaaggaggagcaacgtcagatcagagctgctgctcgtaaggccaaggaggaagctgagggtgcccctgctgttgcagcacaccattagtctccctgtctattttttgtgttgttgttttctgttaactcatctttggttcagttatgatgctaagggcaaggcaataatctccagctgttggactacacagattttttcccccatgacttaaatatcaagactcattttgtgcttctgctggtttctgcttg

SEQ ID NO: 94503 - DNA, 2554 bp, Zea Mays
gccacccttttgcttcagatcatcatcctctgatgataaaacacagacttatccaagccatgctgttttttccctccttttctattttgtggaatgacagttctcttaatatctcatggaacagatcattgcggttacggttttcttccttctggtgattgctttttatgcattcttcgcaatgtttctagggaagcaagtcctagagtatgttgtgatcggtgtctacactgccgtggtgttttctgtcgccatgctttacatccgctgcactagtataaaccctgctgatcctggaatcatgtcaaagttcgacaatgtcctcatcgatgcacctggaagtgctgccaacatacagggcacggatttgccagtgaaagctggtattggcgctggaacaatctccccatcggcaacatctacttgtaggaactctgtagatgggcattctaacgctggtgctttagctgctggagacacaaatctggatttaaggtctcagccgccaacaagtccatggagctgcttacttggagggcttgtttgttttttgtttgtgaaggaggattgtaggaaatacgatgattcagagaatcaagttgatggggaaggagccttgttctgcacgttatgtgacgccgaggttcgcaaattcagtaaacactgcagaagttgtgacaagtgtgtggatggatttgatcatcactgtcggtggctaaataactgtgttggacggaagaactatttcacgtttcttgctctgatggctaccagtcttctctggcttgctatcgaaattggagtaggcatcggtgttcttgttatatgctttgccaacaagaattcagagagaattattcaagacaggcttgggaatggtttgcctcggcctgcctttgctaccattgtagcgttttttactcttctttctctagtcgcttgcatacctttaggggagcttttcttcttccacatgatcttaatcagaaaggggatcacaacttatgaatatgtcgttgcaatgagagctatgagtgaaacacctcaagaggaggaagagcacgaggaggaggagggggtaaacattgtttattccccaacaaattcagccaccactgcgttcagtggtgctagttcactcagtcttcactacaagggctcatggtgcacacctccaaggatttttgttgatcaggatgaagtgatcccgcatttggagccagggatggtgccttcaaccatcgatcctgatgctgttggacgcgccgaaagagccaacaaagccaagaagcaggtcaaaatcagtgcctggaagcttgcaaagctggacagcaatgaggcgatgaaggccgctgctaaagtccgggcatcatcgtctgtcctccggcctattgattcccgccgggttccaggtgctagccctggctccagtggcaatgccagcatgagaagcagcatgagtgccggttacagcgccagtggcaccaaggaaaggggggctggtatgcttcagagtccctcgtatcctcagagccctgcaagccaggacgactacgagtcgggcacgcagagtggtagcagcaggaccagcccggtgcacattcacagacccgccgcaccgcacgctcagatcaacgtgccactgccacctcgtgtgccccaagcacctccaaggcctgcgccggcgttggcaccgaggccgcctgttccagccacgcagatgtccaagccaacgttccagtcggcaacatcttatgtccgtgagaaccggaaagtatcggttgtttgggatcaagaggctgctaggtacgtgtccgtggcaccggcgcccacaaggccagtaactggcaaccatggaagaactctcgcatccatgaatccttcgtcctcagcgttgccatctggacagccgtccgagaggttggcatacactgggcagtcgatattctttggtggaccgcttctgggtgctgctgctgctgaccctcggaggaatgaagctgtcgcgggagtgccgccggagacaaggaggaacgatggcactgggggagagaggagacgaactgcggagtccttcccggtgtttgctccaggatcccttgagaagaacccgccatccaacaggtgatctcgtggcggtatggcaccaccttttctgaccatcgtgaccaagacaatgggacgatcgttactcaacaaggagccctggagagtccaagggtgattactgtgagttcatcggcgatcgtcaccaattccacacgcagagaaggcgtcacagggacatgctacaagtctgaaatgggggcatcctagtactgagcctgaacccgaggttgagggatgtgagtgtctgagtgacaaatgaaccgtgcaggtgtcaagaaagctgaaacagggaggacacacacaaggcgtgagtgactgattggggtgtaaatgttttgctcgtttcgttggagtaacttttgggttagacgtgtgttttgtagagacaatataagttaggtcaagacaatggctattgattaggtgtatatggatttcatgtctc

SEQ ID NO: 94504 - DNA, 2612 bp, Zea Mays
ccgagaaagcagggcaaagcgtttgtgccgtgccgtggccttgtgggaagagaaagaaagggagagaaagacaggactggagaaggtgagtgagagggaggcgcgcagcggcagcggcggcggcggcgtcgccgtccatggcgaggaagcacggatggcagctccccgcgcacacgctccagatcattgcggttacggttttcttccttctggtgattgctttttatgcattcttcgcaatgtttctagggaagcaagtcctagagtatgttgtgatcggtgtctacactgccgtggtgttttctgtcgccatgctttacatccgctgcactagtataaaccctgctgatcctggaatcatgtcaaagttcgacaatgtcctcatcgatgcacctggaagtgctgccaacatacagggcacggatttgccagtgaaagctggtattggcgctggaacaatctccccatcggcaacatctacttgtaggaactctgtagatgggcattctaacgctggtgctttagctgctggagacacaaatctggatttaaggtctcagccgccaacaagtccatggagctgcttacttggagggcttgtttgttttttgtttgtgaaggaggattgtaggaaatacgatgattcagagaatcaagttgatggggaaggagccttgttctgcacgttatgtgacgccgaggttcgcaaattcagtaaacactgcagaagttgtgacaagtgtgtggatggatttgatcatcactgtcggtggctaaataactgtgttggacggaagaactatttcacgtttcttgctctgatggctaccagtcttctctggcttgctatcgaaattggagtaggcatcggtgttcttgttatatgctttgccaacaagaattcagagagaattattcaagacaggcttgggaatggtttgcctcggcctgcctttgctaccattgtagcgttttttactcttctttctctagtcgcttgcatacctttaggggagcttttcttcttccacatgatcttaatcagaaaggggatcacaacttatgaatatgtcgttgcaatgagagctatgagtgaaacacctcaagaggaggaagagcacgaggaggaggagggggtaaacattgtttattccccaacaaattcagccaccactgcgttcagtggtgctagttcactcagtcttcactacaagggctcatggtgcacacctccaaggatttttgttgatcaggatgaagtgatcccgcatttggagccagggatggtgccttcaaccatcgatcctgatgctgttggacgcgccgaaagagccaacaaagccaagaagcaggtcaaaatcagtgcctggaagcttgcaaagctggacagcaatgaggcgatgaaggccgctgctaaagtccgggcatcatcgtctgtcctccggcctattgattcccgccgggttccaggtgctagccctggctccagtggcaatgccagcatgagaagcagcatgagtgccggttacagcgccagtggcaccaaggaaaggggggctggtatgcttcagagtccctcgtatcctcagagccctgcaagccaggacgactacgagtcgggcacgcagagtggtagcagcaggaccagcccggtgcacattcacagacccgccgcaccgcacgctcagatcaacgtgccactgccacctcgtgtgccccaagcacctccaaggcctgcgccggcgttggcaccgaggccgcctgttccagccacgcagatgtccaagccaacgttccagtcggcaacatcttatgtccgtgagaaccggaaagtatcggttgtttgggatcaagaggctgctaggtacgtgtccgtggcaccggcgcccacaaggccagtaactggcaaccatggaagaactctcgcatccatgaatccttcgtcctcagcgttgccatctggacagccgtccgagaggttggcatacactgggcagtcgatattctttggtggaccgcttctgggtgctgctgctgctgaccctcggaggaatgaagctgtcgcgggagtgccgccggagacaaggaggaacgatggcactgggggagagaggagacgaactgcggagtccttcccggtgtttgctccaggatcccttgagaagaacccgccatccaacaggtgatctcgtggcggtatggcaccaccttttctgaccatcgtgaccaagacaatgggacgatcgttactcaacaaggagccctggagagtccaagggtgattactgtgagttcatcggcgatcgtcaccaattccacacgcagagaaggcgtcacagggacatgctacaagtctgaaatgggggcatcctagtactgagcctgaacccgaggttgagggatgtgagtgtctgagtgacaaatgaaccgtgcaggtgtcaagaaagctgaaacagggaggacacacacaaggcgtgagtgactgattggggtgtaaatgttttgctcgtttcgttggagtaacttttgggttagacgtgtgttttgtagagacaatataagttaggtcaagacaatggctattgattaggtgtatatggatttcatgtctc

SEQ ID NO: 94505 - DNA, 671 bp, Zea Mays
aaagctcaccgtggatcttttcctttgttccctttttcttttcagccgccacaccgcagctccggaaccgctgctgcccggcccattttaccaccgatccatggcggaggattcggcggcggcggccacgtggggcggcggcgacaagctcatcctgcgcggccttcagttccacggcttccatggcgtcctgcgggaggagaagacgctggggcagaagttcgtcgtcgacatcgacgcctggatggacctcgccgccgccggcgagtccgactgcatcgctgacaccgtcagctacaccgatatctacagcattgcaaaggatgttgtcgagggcacgccacgcaacctcttggagtcggtagcccactcgatcgcagaggccacgctgctcaagttccctcaggtctccgcagtccgggtgaaggttggcaagcctcacgtcgcggtgcgaggcgttctggactacctgggcgtggagataacgaggcagagaaagaaagaatgagacgctgtacagtctgatcggagatgaacaattattgtacccacacccacactgccgccataaaccacaatccacacttgttggcaacttggcatcaatgtttcctcccttctcgaacacaacttgtggcatcacgtttgatgaacaaagacagtttggcagc

SEQ ID NO: 94506 - DNA, 122 bp, Zea Mays
aattgcatcttaacgattttctatgtaaagaaattaataatactcaaaatagcattataaatttatggaatttatggaggcgtaacatatgtccacatataatcctaaaaacgtttggacta

SEQ ID NO: 94507 - DNA, 548 bp, Zea Mays
tccacctcttgtgatgatttattagctatgccatgttcttcaagtatagattattactattcttccttgtcttgtgagactaaccttttgaaggaaaataataagctcaaaaacaaagtgaagaatttaagcaacatgtttgagagatggcataaatcaaaagtcactcatgatcttatattgaaaaatcaaagaagatatgatgacaagggtggccttggtttcaacaagagcaatatcaaaggcagacaattcaaattaaaaggaaatgagctatctcacttcatgtgctataaatgccatgagatgggtcatcttgcaaaggcatgccccaataaaaggaagctcaagttgaagaaggaagaaaggaggctaaagcatgacgagtgcttcaagtaccacacttggggtcacctcacctcaatgtgcccaaccaagaaattagtgaagccacaagtgaagcctcaaccaaagccacgagttgagcaaaggaaggatccccaaaagcaaatcaagattaaccatgaatataatggtgatgtggggaa

SEQ ID NO: 94508 - DNA, 2327 bp, Zea Mays
ggccggcccgttcaccatttctcatcgttcaattcagaatctgatacatcagagaagggccacagcacagagagagactgtctgccagtggacgcgagggagcgcctccgcctcagatccaacccccaccgatgcgagctccggcgatgctccgctgggccgcggcggcgctcgcggcgctcctcgccgcctcaccggccgccgcgttttacctacccggcgtggcgcccaacgacttccataagaaagatccacttttggtgaaggtgaataagctgacatccacgaagacgcaacttccctactcatattactctcttcctttctgtaaaccaaacacgatagttgacagtgcagagaatcttggagaagttctgcgtggtgatcgcattgagaactctccttatgtgtttgagatgggggaacccaagatgtgccagattatctgcaaagcaaaaattgatgataaacaggcaaaggagcttaaggaaaaaatagaggatgagtatcgggtgaacatgattcttgacaatctcccactagttgttcctattgcaaggcaggataggggtgctactgtttaccaggctggatatcatgttggtgtcaagggccaatacactggtaacaatgatgagaagtcctttatccacaaccacttggcatttttagtaaaataccataaggatgaaactacagatctctctagaattgttggatttgaggtcaaaccattcagtatcaatcaccagtttgaagggccgtggaatgataaaaacactcgtttaatcacatgtgatcctcatgccagcaagcttgtggtaaactcagatactcctcaggaggttgaagccgggaaggaaatcatatttacctatgatgtaggcttcgaggagagtgatatcaagtgggcttctcgctgggacacctacttgttaatgatagatgatcaaattcactggttttctattgtgaactctctcatgatcgtactcttcttatctgggatggtggcaatgattatgctccgcaccctttatagagatatctctaggtacaatcagcttgaaactgaagaagaagcccaagaggagacaggatggaagcttgttcatggagacgtattccgccctcctgcaaactccgacttactctgtgtctgtgttgggactggtgttcagttcttcggtatgctactagtaaccatgatctttgctgttctgggtttcctttcgccatcaaaccggggaggactgatgactgccatgctgctcacttgggtcttgatggggttgttcgccggatatgcttcttcacgcctgtataagatgttgaaaggatcggaatggcggagcatcaccctgaggaccgccttcctgtttcctgggattgctttcggtattttcttcatccttaatgctctaatatggggggagaagtcgtctggcgctgttcctttcaccacaatgtttgctttggtcctcctctggtttggtatctcggttcctcttgtatttgtcgggagctatctgggcttcaagcaacctgccattgaggctccggtgaagacgaacaagatcccaagacaggtccctgagcaggcttggtacatgaaccctgccttcaccattctgattggtggcatacttccgttcggagcagtcttcatcgagctcttcttcatcctgacgtcgatctggcttcaccagttctactacatctttggcttcctgttcctggtgttcattatcctcatcatcacctgtgcggagatcacgatcgtgctgtgctatttccaactgtgcagtgaggactacctgtggtggtggaggtcctttctgacctcaggatcatcagcaatctacctcttcctgtacgccgggttctacttcttcactaagctacagatcactaaggttgtgtcaggcatgctgtactttggctacatgcttcttgcctcgtttgctttctgtgtgctcaccggtacgatcggcttctacgcctgcttctgcttcacaagattgatttattcatctgtgaagatcgactaggcatgttccatgggcctgcagcgagtatgcccattgtgtgttttttttcatgaattttcagtgcagctgtacttttggtgttagcttataaacaatttatgctcactgtggttcagagttgtacaaggataggacactactgctagctttatatggggtaattttaacttgtgctgttgagaactgctgcatacgttcaatccatagtctcgttatcgtctgccacccctttcctgcttcagctgcatgatgatgtccatacgtgcttggcttcat

SEQ ID NO: 94509 - DNA, 635 bp, Zea Mays
ggccggcccgttcaccatttctcatcgttcaattcagaatctgatacatcagagaagggccacagcacagagagagactgtctgccagtggacgcgagggagcgcctccgcctcagatccaacccccaccgatgcgagctccggcgatgctccgctgggccgcggcggcgctcgcggcgctcctcgccgcctcaccggccgccgcgttttacctacccggcgtggcgcccaacgacttccataagaaagatccacttttggtgaaggtgaataagctgacatccacgaagacgcaacttccctactcatattactctcttcctttctgtaaaccaaacacgatagttgacagtgcagagaatcttggagaagttctgcgtggtgatcgcattgagaactctccttatgtggtcagtactagattactgcttgtcacatattcagcattgtaatttgtaatgtaccaaatcacttagtcgtcatgcactttgtcgttttacgtttgtgttgtagtttgagatgggggaacccaagatgtgccagattatctgcaaagcaaaaattgatgataaacaggcaaaggagcttaaggaaaaaatagaggatgagtatcgggtgaacatgtacggatttta

SEQ ID NO: 94510 - DNA, 2290 bp, Zea Mays
ggcccgttcaccatttctcatcgttcaattcagagtctgacatatcagagaagggccacagcacagagagtgactgtctgccagcgccagactgccagtggactgcgagggagcgcctccgcctcagatccaaccccaccgatgcgagctccggcgatgctccgctgggccgcggcggcgctcgccgcgctcctcgccgcctcaccggccgccgcgttctatctacccggcgtggcgcccaacgacttccataagaaagatccacttttggtgaaggtgaataagctgacatccacgaagacgcaacttccctactcatattactctcttcctttctgtaaaccaaacacgatagttgacagtgcagagaatcttggagaagttctgcgtggtgatcgcattgagaactctccttatgtgtttgagatgggggaacccaagatgtgccagattatctgcaaagcaaaaattgatgataaacaggcaaaggagctcaaggaaaaaatagaggatgagtatcgggtgaacatgattcttgacaatctcccactagttgttcctcttgcaaggcaggataggggtgctactgtttaccaggctggatatcatgttggtgtcaagggccaatacgctggtaacaatgataagaagtcctttatccacaatcacttggcatttttagtaaaataccacaaggatgaaactacagatctctctagaattgttggatttgaggtcaaaccattcagtatcaatcaccagtttgaagggccgtggaatgataaaaacactcgtttaatcacatgtgatcctcatgccagcaagcttctggtaaactcagatactcctcaggaggttgaagccgggaaggaaatcatatttacctatgatgtaggcttcgaggagagtgatatcaagtgggcttctcgctgggacacctacttgttaatgatagatgatcaaattcactggttttctattgtgaactctctcatgatcgtactcttcttatctgggatggtggcaatgattatgctccgcaccctgtatagagatatctctaggtacaatcagcttgaaactgaagaagaaacccaagaggagacaggatggaagcttgttcatggagacgtattccgccctcctgcaaactctgacttactctgtgtctgtgttgggactggtgttcagttcttcggtatgctgctagtaaccatgatctttgctgttctgggtttcctttcaccatcaaaccggggaggactgatgactgccatgctgctcacttgggtcttgatggggttgtttgctggatatgcttcttcacgcctgtataagatgttgaaaggatcagaatggaagagcatcaccctgaggaccgccttcctgtttcctgggattgctttcggtattttcttcgtccttaatgctctaatatggggggagaagtcgtctggcgctgttcctttcaccacaatgtttgccttggtcctcctctggtttggtatctcggttcctcttgtatttgtcgggagctatctgggcttcaagcaacctgccattgaggctccggtgaagacgaacaagatcccgagacaggtccccgagcaagcttggtacatgaaccctgccttcaccattctgattggtggcatacttccgttcggagcagtcttcatcgagctcttcttcatcctgacgtcgatctggcttcatcagttctactacatctttggcttcctgttcctggtgttcattatcctcatcgtcacctgtgcggagatcacaatcgtgctgtgctatttccaactgtgcagtgaggactacctgtggtggtggaggtcctttctgacttcaggatcatcagcaatctacctcttcctgtatgccgggttctacttcttcactaagctgcagatcactaaggtggtgtcgggcatgctgtactttggctacatgcttcttgcctcgttcgctttctgtgtgctcaccggtacgatcggcttctacgcctgcttctgcttcacaagattgatttattcttctgtgaagatcgactaggcatgttccatgggcctgcagcgagtatgcccattgcgtttttttcatgaattttcagtgcagctgtacttttggtgttagcttataaaccatttatgctcactgtggttcagagttgtacaaggataggacactactgctagctttatatggggtaattttaacttgtgctgttgagaactgctgcatacgttcaatccatagtctcgttatcgtctgccaccccttt

SEQ ID NO: 94511 - DNA, 100 bp, Zea Mays
cctccaaactttttgtattgtgttcatacaatctctagacctacatgttcagttttggcatatttctcaaagtgtttgctatatctgttggatttagttc

SEQ ID NO: 94512 - DNA, 2215 bp, Zea Mays
atgaccaaaatttccctcctaccttgtgctcgaatttggatgcctctctctctctcccatgttgcgtctgccctgctcttgttgccgtttgcgcacctggcagcggcgacgcaggtgggcgacgcgtgctcctcctccagcggcggtggctccggcctgcactgcagcccctgtggcgccggcggggcagcatctgcacgtgcgccagccccgtggacccggccacccacggcacgggcctccccttcaacaactacccgtggctcaccacccacaactcctacgctctcgccggcgccgcctccgccaccggctccgcgctcatcaccgagaccaaccaggaggacaccgtcactgcgcagctcaaggtaacccaaccagttcccgtttcatccattcatttgccgcctggcctctccactgctgaggccagctcaggtcgtctaaccgcttccgccttccgctccgacgccggcgacgctgggaatggaaacggcatcgagttttcctttggttgaggaatcaacgacgtgtgggggtactactgaaaagctagacaggagaggtgttgacagcaacataaataaagcagataaaaggaaaagcgtatcttatatcttttgcaagtgatcgtgtacacatgtagcagtagtagataggaaatccagtcctcaactatctcaagcatggtgtgctgatataggccctaattatcagccacgtttcggttgccagatgctgttgatgcaggggaaggagagatgccaccagccgtccagccagccctcccctttcgtgactgtgaccgccactatggccacgacggatggtaattatcttgtcttattaaccgagacttggatccattttcatcacaaaggagcacagcagcacaggtgtagtatgaaatatgaatgcgatgttcatttatttctgatgatacggcttgtttgcgccggagacgcaaggttggcatgggaaggagatctggagctgcacaggtgtaacatccagaaagtggcagctgagccagttgagttcaatcaagagattaggagggaccattgtttggagccggcccctttggtgaggggaggtaggcagggcaggtggtgggagggccatggggggggggggttcagcactgatgtccatgatgttgtttgagccactccatccatccatcgccgtgtaccagactagaatcagtccacacccacaaatgtgatatctgtctctggagccctgcctatctacggagcggatttggggagagacaaaaactgacttggcttccacattttgatggagactttgtttcagtagcgagttttttttagcgagcacaggctatgctatgaaatcgagagataggagtatagaagcaaacagaagcccagttcgtagcagcagagcacaacgcctaaagtgatgtttattatccttgattgatggcattgaagacagagggtgacacaaagggttcaaagtcttctgatcagaatggaaagaaacagatgttacccaatggtgaacttggatcatcagtaatatttactttctggttgcaaaactgccaccaaataaccctcttcctaatctgttacttcacatctcctctttctaaaataggactaagtacaacaacatggagccagatgttgttgatttctttggggaatgtatgaatagtccccgaaatggtcgtactccgcttgcaaatgagatatatgagcaaatggttgcagagaaggaaagagagctagaagaaggagaagcacaaaagtcaccctccaagattgttgctgatagtctcagccagatcagtcgctcatccaccttccttctaaacattggtgtctgtttgaatgcttcaaacctttgtggtggaacctttgtatgtttgaacctctattgtggaagaactagtgtgctggaattgtgtatgacttgtgatgagaatgttgtgtatgatggcttttatgtgtattatgattctgtgagctatcatgagagctctgtgtatcatgagagctcagtgtatgattctgcgtcactgttagaagagttaccaagaagtaagcatgagagtacttccatgccaggaaagcagaaattgctgcaaaaacaggggaaaagcgagttgataggcaacatgacacatatacttggtaacacaaagcttaggatgatgatattcattctacttgcctga

SEQ ID NO: 94513 - DNA, 2417 bp, Zea Mays
gctccatccccatcttcgcctcctcctcctcctccttggcttcaactccactcctcgcacgcttgcttgctttccaaaccaagggataacggataacataaccgccgcccgtctaagcgcttccaccaccaccacgtactacgccgcccatcccaactgcactgcactgcacccagcaacagccaacagggcctgtctgtctggtggtctcaaaacctgcatcaggagcctctgtgcctgctgcatgggccctccgcggccggcctcgccggcctgtgccaccgccggcgtcacggtcaaggtcagcgacagatacgtcgagatcaaaaacggcatctttgacctgacgctgtccaacccggacgggatcgtcaccggcgtgcgctacaacggcgtggacaatctcatggagattctcaacaaggaagacaaccgagggtactgggaccttgtttggaacccaccaggacagaaaactggcatctttgatgtgatcaaaggcaccgaattccgcatcgtttaccaagatgagaaccaggctgaggtatccttcaccagaaattgggatccttcccttgaaggaaaagctgtccccttgaacatcgataagaggttcatcgttctccgtggctcatccgggttctacacctatggtatctatgagcataaggaaggatggcctgatttcggcttgggagagacgagggtggctttcaagctgcggaaagacatgtttcattacatggcattggctgacgacaggcagagaattatgccaatgcccgatgaccggttgcctcctcgaggacagccattagcataccctgaggctgtgctccttgtggacccaatcaaccctgaacttagaggggaggttgacgacaagtaccagtactcttgcgaagaccagtacaacaatgtccatggttggatgtcattcgatcctccaattggcttctggcagatcactccaagtgatgagttcaggacaggaggacctctgaagcaaaacttgacttctcatgttggccctactatgctggctatgtttcttagtgcacattatgcaggagatgacctctcaccaaagttcacgaatggagagtactggaaaaaggtccatggaccggtattcatgtatcttaattccagttgggatgcaagtgacccaactatgctatgggaagatgcaaaagttcagatgatgattgagaaaggaaactggccgtactgttttgcactttcagaggattttcagaagacagagcaaaggggttgtgtctctggtagattactagtccgagacaggtatatagatgatcaagacctttatgcctcaggagcctatgtaggcttggccctaccaggagaagctggatcctggcaaagagagtgcaagggataccagttctggtgtagagcagatgtagacgggagcttctacataaggaacattgtaactgggaactacaacctgtatgcttgggttccagggtttctaggggactacaagctagatgccacagtgaccatagcttcaggggatgatatttatctgggtgacctcgtgtatgagccgccaagagacgggccgacgatgtgggagattggagtacctgatcgatctgctgctgagttttatgttccggatcctaaccccaactacgtcaatagattgtacgtcaaccaccctgcagatagatttagacagtatgggctctgggaacgatacgcggaactataccctgacagtgacctggtatacacagttggccaaagtgactatagcacggattggttctatgctcaagttaacaggaaaattgatgacaacacttaccagccaacaacatggcaaatcaagttcgaccttgacagtgtcagcccaagcagcacctacaagttcagggtggctctggcgtcttctgcgctcgctgagttgcagatttccttcaacgaccaggacagggctgttcctcacttcgccaccgggctgatcggcagggacaacgccatagcaaggcacgggatccatgggctctactggctgtttaacatcgatgtggccagtgcttggcttgtgcaaggggtgaacaccatctacctgaagcagcccaggagccagagcccgtttcaggggttgatgtacgactacttgcgtttggagggaccgtgcggctgctaatcgatttgtgtgtgaaattgcgttgctagatgtgaaattacaactgcattcactgtgtaaacccaatgcatacgattggggaaaagatgttgcggtattataggcattggggttacgtgtaggtaatgttagtttaattttcgcatttataaccgtgcagctatgctgatttgtaactataatgatgtaagtgtgtacgcaataatgggtgtttttagtcaggtaactaatt

SEQ ID NO: 94514 - DNA, 1693 bp, Zea Mays
gtgaattacgttttcactcgcgatatcgtacttttggttcgtcgtgtactcgtgtggaaggcggctgcctgctcccgcggtctcttccgtctcggaggtgggagagagcgatcagcggcgtcgccgggtggatccaaagcgcgcgagaaaatgcagggcggatccagcggcatcgtgtatggtggcctcaagtaccaggcgcggtgtatcgccgacatacgcgcggacgccggctcgaccaccttcctcgccggcaccctcagcctcaaggaggagaacgaggtgcacctgatccggttttcgccggcggagagcgagctggtgtgcgatggcctcttctaccaccccaacgagatttgggacctcaaatcatgccccttcgatcacagggttttctccacagtctacacgtctggtgagggctatggtgcatcagtttggaagatcccggagctcaatgggcaatcaaactcaccacaacttgagcagctctttgagcttagtgggcatacgggcaagattagacgtgtgatctggtggccacttggaaagcatgataaactaattagcattgatgaccgaaatatttttctttggaacatagacacgtcaaaaaaaatagctaaggtgatctcacagggatcaactgacatgcttccaaatttacgtggtggagcttgggatccacacaatcataatttagttgctgcaatatctgattcatcacttcagctgtgggatctacgttctatggaaaaatcaactgcaattgaacatgcacatatacgggatgtggattataaccccaagaagcaaaacattgttgcaacagcagaagaggaatttggaattcgcttgtgggatctcagaatgcttaagtatcctctaaaagatctccctgggcactcacattggacatgggctgttcggcacaatcctgcgtatgatgagctccttctgagtgctggaacagattcaactgtaaatttatggttggctaaagttagcagtgacgatcctgaatctgatagcccttctgctttatccaataggcaagaagtaccattactcaactcatatactgactatgaagacagcatctatggtattgcatggagctcccatgatccatcattattcgcttctttgtcatatgatggaagggttgtcttggaatcagtcaagccctacttgcagagaaaatgaaccttgtctagttttctaaattgtaaggtgcaaaatatggtttcttgtttcctttatcttgtccttattattactgaagttacctcatgtcctaataaactgttctcttcctgctacatgtgggcttgtttgttcatattggaagctgagtagctttgccttgccattctgtagcctcttaacaagcatttatgtgatgattcggtttactgttgtagcaatggcagaaaaatggataacaagattgttacagaaatcaatttttaggatgttgtatatttgaagtgtccatgaaaaggtcttgtgttatatgatgaggtggggttgaactcaatttgtaaaaccgttcagaatttcagattagtaggattagttttttttttttacttttctgtttcgcattcagaatttcgttctttgcaggcagaattgagcaaacttggtaaaccattcagattaacgagaataagttattttatgaactatc

SEQ ID NO: 94515 - DNA, 1002 bp, Zea Mays
ctgtgcagttgcgtcaacctcttttccctatataaagagggcacccaaagctatgaagacaccatagcagttgcagcagcttgacttctcttccatctccagcgagaagaggttctgtagcttccgttccatcccaagcattatggcctgccacctgagatccgcaagtgtgccctcaagcccttgctccaacaaaaccagcgtcgaggagcagctccagagcctgaaggcgaccatctcttcaccctctgcgacagtccaaactatcaccaatggcctgtccaggctcgggagcatctacagctgcatcgatgagctcgcgtgcctgcccagcaccagcagccagcgtcagcagaggaaagcagtggaggaggagctggagcgctctctcgttctgctcgacctctgcagcgccatgcaagaaaggctggcagatctcagggtgatcgcccaggagatgctgctgggtctgaagagaggaaacaacgtgtctgtccaggccaaggctcaggcttatgcccgcctggccaagaaggcgcaaaagcagttcaagaagaccagcagcaacattgctcttgacgacactgaaagctgcagggtggtcaagctgttgtctgaagcgagagaggtcgctctctcgatgctagagtcgacattgtacctactgtcaagggagatcgtgatgccgagcgcctccaagtggtctcttgtctccaagacattccagaagaaaagagtcgagtacagggaggagcaactgcaagcgttggagttggagattgctgaccttgagagccaggttcaggttgtcttcaggagactgatccaatgcagggtctctcttctgaatgctcttagcctgtagaaaggtcatgccccaaccaaccaactccgatggcctgcgattagcttccgccttttagaggattggctgatcatcagaacaattttgatgtatatatgagacaaagtgtacagaaaagtagttgatgaaagagcaag

SEQ ID NO: 94516 - DNA, 1050 bp, Zea Mays
gctgttgcatccacttctttcgctatataaagaggaaagccatagcccagatgaccaccgttgcaggagctttccttctctccccgtttcaagaaaaaagaagctacacagattcaacctccattcaaaccatggcttgccaccttagatccgcgagcgtgccatccagccctcgctctaacaaagccagcatcgatgaacagctgcagagcctgaaggcaaccatctcctcaccttcagtggccattcaaaccatggttgatggtctcaacaagatcgtgagcatctacagctgcattgacgagctcacatccttgcccggcaaccaacgtcagcagaggaaggcagtggaggaggagctcgagcgctcccttgtcctgcttgacctctgcaacgccgtgcaagagaactttgcagagctcaaggtcagcgtccaggagatgcagctggttctcaagagaggagacaacgcggctcttcaggccaaggttcaatcttacgtacgcttggccaagaagacacagaagcagttcaagaagatcaacagcaaggctgcctctgacatcgaaggattcaaggtagtcatgttgttggctgaagcaagggagattgctgtgtcgatgcttgaatcggcctcacatctcctctcgaagaagatcgcgctgcccagcgctagcaagtggtctcttgtgtccaaggcatttgagaagaagaaatttgtgtgcaaggaggagcaattgcaggcgttggagttggacattgttgatcttgagagtggagttgccactttgttcaggacactgatccagagcagagtttctcttctgaacactctcactctgtagatagatcatacaacaactctaatgcctgcgattagcatccgtgttttagaggatctgctgatcatcgaaacaattttgatgtacatatatgagagtgtacagaaatatactcaactggaagtcaaagttttgagtctattttcctgatgtcgatttttccctctttcgtctcgttcaacatggaggacagctaaataaaaaaaaa

SEQ ID NO: 94517 - DNA, 85 bp, Zea Mays
cacttggttacacatgagcatgattcttgttgtctgctggtcgaacatttacgctgctagtgcacaagcaatggagagcagagac

SEQ ID NO: 94518 - DNA, 714 bp, Zea Mays
atggcttgccaccttagatccgcgagcgtgccttccagccctcgctctaacaaagccagcatcgatgaacagctgcagagcctgaaggcaaccatctcctcaccttcagtggccattcaaaccatggttgatggtctcaacaagattgtgagcatctacagctgcattgaccagctcacatccttgctcggcaaccaacgtcagcagaggaaggcagtggaggaggagctcgagcgctcccttgtcctgcttgacatctgcaacgccatgcaagagaactttgcagagctcaaggtcagcgtccaggagatgcagctggttctcaagagaggagacaacgcggctcttcaggccaaggttcaatcttacgtacgcttggccaagaagacacagaagcagttcaagaagatcaacagcaaggctgcctctgacatcgaaggttgcaaggtagtcatgttgttggctgaagcaagggagattgctgtgtcgatgctcgaatcggcatcacatctcctctcgaagaagatcgcgttgcccagcgctagcaagtggtctcttgtgtccaaggcatttgagaagaagaaatttgtgtgcaaggaggagcaattgcaggcgttggagttggacattgttgatcttgagagtggagttgccactttgttcaggacactgatccagagcagagtttctcttctgaacactctcactctgtag

SEQ ID NO: 94519 - DNA, 1213 bp, Zea Mays
agcagtggaggactagctctgttctgctgcagcttgatctcttcagcgctatgcaatgagcatgcaattgtgtcaagattgtccagtggagagtaactaacctgttgattattgtcgccaacagttgaagcatgacaatgtgatggatcactgagagaatagctggcaactctaaaaaaaatgatgaacacacgcggcgtgatggaggaaacagattccttatgctgctgccagatctcagaccttgagagacaacactgaggagaagaaatggcaggattctctttgtctaccattcaaaagatgctgcctcataccctctgtgtataaatagggtctcggcagagacttgaatcatcaggcaaaaaagttcgcttctcatattacttctacctcatttcaaacacacaagaacttccagccagagactacaggtcgatatggcttgccatcttaggtccataagcttgccgtccaggcctcagtccagcgaagccgcagtgcagcaagagatgtgtattctagaggcgatcatctcctcaccatcaacatgtatcgtcacgatgtgtgacggtttgaggaggcttggagacatctacagcagtgttgtggagatgactcacttgccgagcaaccaggtttgctcttcccagcaaaggaagatgctggacggagaaactgagtcttctctcgagctgctggatctctgcaacaccatgcaggagatcttcgttgagttgaaggccattatccaagagttgcaagtggctctaagaaaaggggatggtgcaaccgtccaggccaagatccagtcttacagccgcttggtgaagaaggctaagcagtctttcaagaagtcaagcaagaaggccgtttctgacaagacagactgtgcaatggtcaggctactgaccaaggccagggatatcgccatctctctacttgagtccacggtgcagctcttgtcgaagcaaattgaagtgccgaagcagtcacttgtctcaaaggcgttctccaagagaaaagcggttgtctgcgaggaggaccagttacaggcgttagagtgcagcattggagatcttgagagcggagcgggacacctgttcaggatattagtccagagcagggtctctctcctaaacattcttagctcatagatactccttgttgcttttgacatcctgtgattggcatccgcgttttttgaggatta

SEQ ID NO: 94520 - DNA, 988 bp, Zea Mays
aaattcgggtccagtgttcagtgggcggcgacggcggttctctaaggtcgactccggcggaaggatttggacctcgccaccatcgttgattcgtcggatccgcggtccagaggagaaggcctgagccaagtgcatgattgacataaaggacaatgttccatgagtgggaggtgccgagctggtgaagtttcagtgcccttcttacaagggctcgcgagccggaacaagccggctcggctcggctcgctgcaaaaacgagctcaaagaaggggctcggctcggctcgttcgaggctcgcgagccgctccgagccgagccgctccgagctcgagccggctcgggagcctcgagcttattttctagccctactctcagccaagcaactcgagtgtgtttggttggacgtacaaggagggatcgaagggggtggccacagtttctatagtgtttggataagagtcacgtgggggcgaggtaaacaccgtagtaatttttgatgacggcgtgatccaaaaaaatcgaggggacggtgtcgccctcacctcatcctattttgaccttaaatcaaacacatactaaggaatcatcgaggacatgtgagggtgctcccattgtgcggcagcaaacccctcttccagtttactgcttttttcactattattattgcttctatatgttccaagcacttgtaagcttctgataactgcgaactaatttaaaaccggtaaccgtgaactaacttcaatttcactaccattcattttactcacaagagctcaagttgcaaacccccacaggtgaagctaatgatagctttatatatcgttttcacgttggtcacatttgtgtcttaatgaattaggttttatcctatttgtctctagaactcctctagcagggaggagattttgaagcgaaagtcagcttgtggagcttggttttgacagctgtaacacaagcgctcaagctgttcaaagggaagcataat

SEQ ID NO: 94521 - DNA, 978 bp, Zea Mays
caactcaacggcttaagtcttgaaacctcaaaacttgtacgatcacaaacaatggctttccaccaaagatcagtgagcctgccgtccaagagcctcaccaaggaggccgaagtcgaggccgaactgcaaagcctggaggacgccgcctctcccccctcctcctcctcctcctcctcaaccgtcgcggcggtgcgcgacggtctgacgaggctcggagacgtgtacggacacatcgaggagatcgtccacctccccagtaaccaagcctgcaccgtccagcagcagcggaaggagctggacgcggagatggagcgctctctggacctcatcgacctctgcaacgcgacgcaggagagcctcgccgagctgaaggccgccgtccaggacctgctggcgggtctcaggaggagggacgacgcgagcgtccaggccaaggtccagtcgtacgtccgcctggccaagaacgcgcggaagcagctcaggaaggccggcaggagggccgctgccgcctctggcagggaggagcgcgagtgcagtctcgtcatcaggctgctgctcagggccaggctggtcgctgcctccctcctcggctcggcgctgcagtgcctcgcgggcgtggcgaagcaggtggtgactctgacgcccaggaggtcccttgtctccaaggcgttgcagaggagaagcaaggcggtcgtctgcgaggagggccagccggccaggtgctggcgctggagcgcgtcgtcgttggagagcttgagcgtggagcggagcttctgttcaggaggatggtccagaccagagtcgccctcctcaacgtccttagctcgtagatcctcctcgtcttcatgtgtagcgcgcgtcctgcgattggcctccgcgttttagaggatcctccaatctacatatgtgtacagtttttgtagatagatgtgcagtatgtagtgcgatggaaagaaaggaaaaatacaattttgatcc

SEQ ID NO: 94522 - DNA, 579 bp, Zea Mays
atgacattatctatacctgattgtggtggtgctgctgcaggtggagcattagtacttgatgatggtgttggtgtgccactagcagtagcatcgccggcacttgatgggtctgcactcggtgtcggcgtcgatgtagggacagaaatagcagccggtccggcacagtgtcgccactcaccagttaggcagtcaccagtcaccacacgggcagcagggacgtcggacgcagggcgtgctgtggactatggtgttgggcgggctgggcactgccgcactcacctggtcgcctggatcttgctccttgctggcggagtggcggtggcgggctggcgggaagggacttcggcagtcgtacgccgacgaggagcagggtcggcacttcggcagttgtacgccgacaaggagcagggcagtgcggcaggtggctggggctgcagtgcggcagcgacaggtggctggggcggcagtgcggcaggacgacaggacggcagctcgacgccgtacgccgacgaggagcaggacaggagctttctgctttctggcgaagatgcgtgcggcggctggtggcttctggcttga

SEQ ID NO: 94523 - DNA, 571 bp, Zea Mays
tgcgcgtgcgtctgctccgtcccggcgcccaagctccaagtctgtcaatccgcggcacgccggcagttcgccgccaacgtccggtcgccggtctgcccctgcgcgcggcctcctacacgccgggatggctcgtctccattggccggacgtcgatctcctatttgccatggacagcgcatcgacgccccattacagcagcccgtcgtggaactctagtgcttgtcgttgattcccggtcgtcttcaacctttgtcttgtcgtcgtcattcggtcatccagcctcgatgctggcccctacgtgctgtctctaacttgtgttcgcgccgacaaaagaatcccaagaggatgtggagaagcaagcccctagtcgatgcccccaagtgctcggcgaaaggcctgaacaaggatcatcgccatttttgcgaagttctagtaatatggagagattccaagagttgtggattgaggagaaagtgaagctcagttcaatactcgtcaggtgtttgatcgaagacttcaatcggagactgtcgtcgttctcgcaaatattgagtcaagttaattatggtga

SEQ ID NO: 94524 - DNA, 953 bp, Zea Mays
gccgaacctttcggacagccgcgcgtgtcgttagttgatttcgagctgcctctgcttctgcttgcttgctggtgggaaggacggggatgcttaacggatccatatctggcttacttcggggcagcaggagcagcagccgtcccagcgatggactagtccttcgcgagcaagccctgcgtcgccccggcgttgatgtcgttccgatcggcggcgagggaggagccttcgttcccgcagttctccgccttcgacggcaccaagaacacagcccctcgtatgctcacgcaccagagatcgttcggccccgacagcacgcagtacgctgcgctgcaccgcgcgcagaacggggctagagtcgttccggtctcgtcgccgttcagccagagcaacccgatgttcagggtccagagctcgcccagccttccgaacagtaccgcgttcaagcagccgcctttcgccatcagcaacgccgtggccagttcgactgtgggttcctatggcggaacaagggatgcggtgaggccaaggacggcacaactgacgatcttctactccggttctgtcaatgtgttcaacaacgtctcagctgagaaggctcaggagctcatgttcttagccagcagaggatctgttcgctgctcgcctcggcggattacgacgggctcgtcgggtcgccagcctctctacggtcggcgaggggaaagacgctcgtgccgtccaatcttgacgatccgttctcggcggagatggcgggcgccgcggcatctcactctcctcggtacgcagaccagggcggctctgctttctcgccgacgtggttacagcagggacccgtgcggttagtcggagctctggctgaacggcgatgcgcagcggtaacagagctcgggagtggcgccaacgtggttacaacagggacaaaattgacttttaccatatctaatggaaggtaa

SEQ ID NO: 94525 - DNA, 265 bp, Zea Mays
gctagatatcttgatggtgattttgaccctaagttgaaattaactcacaagtgtatcacacattcaaaaaaatactataagaaatgttatatgattcaattttgcaaccttggcctaaataaattaataagggaatatattaaaaaaaaattagcatccatgctgtcatttttgattgaacatttgatcactagtttaaaattcaaaacaaatttgaattagaaattggaaatgaattaaaagggaaagaaaagaaaaaaaagaa

SEQ ID NO: 94526 - DNA, 99 bp, Zea Mays
aagctaggagatgctagctttttggtttttaagaaactgtaaattcaatttatataaattgagacataaattggtatgtttggaaccacatcagtttcc

SEQ ID NO: 94527 - DNA, 339 bp, Zea Mays
atgaggtccgcggcgtcttcaactgtggcgattgtttgtgcgctggactcctccacgctaatatcgaagtgctcctcgagactcatcacaatctcaaccttgtccagtgaatctgcaccgagttcagagaatttcgattcaccgcaaacttcagtatggtcaggaagagcaagctgcttcttcacaatctcacaaaccttgtctgttgtatccttcttggcctgtcacaatccatatttcgaaatgtcattatgtttgcagtataagagaatatatattgaaaaaggtggcactgtgtatggttatcttgctagatcaagagcactgcaacaacactag

SEQ ID NO: 94528 - DNA, 2750 bp, Zea Mays
gtcccggcggtccgctcctctcccggccacctctaccccggacgcatgcatgtggacatgtcccaccgcgtccggctcgcggcggcggcgctcgtcgcggtcgcggcgctggccctggcgctcgcccccggcgccgcggccaagtggcagcggaccaggaacggcaccgtggtcagctacgaccgccgctcgctcatgttcgacggccaccgggaaatcttcttatccgggtccatccactacccgcggagcccgccggacatgtggccggagctcatcgccaaggccaaggagggcgggctcaacaccatcgagacctacgtgttctggaacatccacgagcccgagaagggtgagttcaacttcgaggggcagaacgacgtggtgaggttcttccagctgatccaggagcacgacatgtacgccatggtccggctcgggcccttcatccaggcagaatggaaccacggaggactgccctactggctaagggagatccctgacattgtgttccggacgaacaacgagccatacaagatgcacatggagacgtttgtgaagatcataataaaaaggctcaaggatgccaaccttttcgcgtcacaaggaggccccatcattctagcacagatcgagaacgagtaccagcatatggaagcggcgttcaaagatgagggcaccaagtacatcaactgggcagcgaagatggccatctccaccaacatcggcataccgtggatcatgtgcaagcagaccaaagctcctagtgatgtgattcctacctgcaatgggagaaactgtggagatacatggccaggtccaacgaacaagagcatgccgctcttgtggactgagaactggacagcacagtacagagtattcggtgaccctccatcccagcgttctgctgaggacattgcattcgccgtggcgcgcttcttctccgtgggcggaaccttggcaaactattacatgtaccatggtggaacaaacttcggaaggacatctgctgcctttgtgatgccaaaatactacgacgaggcacctctcgacgaattcggcctgtacaaggagcccaagtggggccatctgagggacctgcaccaggcgctgaagctgtgcaagaaggccctgctgtgggggacgccgtcgacggagaagctgggcaagcagttggaggcgagggtgttcgagatgccggagcagaaggtgtgcgtggcgttcctctccaaccacaacaccaaggacgacgcgacgatgacgttccggggccggccctacttcgtgccgcgccactccatcagcgtcctcgccgactgcgagaccgtcgtcttcggcacccagcacgtgaacgcgcagcacaaccagcggacgttccacttcgcggaccagacggcgcagaacaacgtgtgggagatgttcgacggggagaatgtgcccaagtacaagcaggccaagatcaggctgcgcaaggccggcgacctctacaacctcaccaaggacaagaccgactacgtctggtacacctccagcttcaagttggaggcggacgacatgccgatccgcagcgacatcaagacagtgctcgaggtcaacagccatgggcatgccagcgtggcgtttgtcaacaacaaattcgtaggatgtgggcacgggaccaagatgaacaaggcgttcacgctcgagaagcccatggacctgaagaagggcgtgaaccacgtcgccgtcttggcatcgtcgatgggaatgacggacagtggcgcttacatggagcaccgtctggccggcgtggacagggtgcagatcacgggcctgaacgcgggcacgctggacctgacgaataacggctggggccacatcgtcggcctcgtcggcgagaggaagcagatctacaccgacaagggcatgggcagcgtcacctggaagccggccatgaacgacaggccgctcacctggtacaagaggcacttcgacatgccgtcgggagaggacccggtcgtgctggacatgagcacgatgggcaagggcatgatgttcgtcaacggccagggcatcggccgctactggatctcctacaagcacgccctcggccggccatcgcagcagctttaccacgtgccccggtccttcctgcggcagaaggacaacatgctggtgctgttcgaggaggagttcgggcggccggacgcgatcatgatcctgacggtgaagcgcgacaacatctgcaccttcatctcggagcggaacccggcgcacatcatgtcgtgggagcgcaaggacagccagatcacggcgaaggcgaacgccgacgacctcagggcccgggcggcgctggcgtgcccgcccaagaagctcatccagcaggtggtgttcgcgagctacggaaaccccgcgggcatctgcggcaactacaccgtcggcagctgccacacgccgcgcgccaaggaggtggtggagaaggcgtgcctcggcaagcgcgtctgcacgctgcccgtggccgccgacgtctacggcggcgacgccaactgctccggcaccaccgccacgctcgccgtgcaggccaagtgctccaagaggtcgcccagcgcggcgcagtaattcagtcgctcgtcgggacatcctattcgtggctgggcggggaacacattgtcggtactgtcattgtaagcttaaaaaaccctatattgtactcgtggctgggcggggagcatctaacaatatatttatagattgttcattttagtgatgtc

SEQ ID NO: 94529 - DNA, 2715 bp, Zea Mays
gtcccggcggtccgctcctctcccggccacctctaccccggacgcatgcatgtggacatgtcccaccgcgtccggctcgcggcggcggcgctcgtcgcggtcgcggcgctggccctggcgctcgcccccggcgccgcggccaagtggcagcggaccaggaacggcaccgtggtcagctacgaccgccgctcgctcatgttcgacggccaccgggaaatcttcttatccgggtccatccactacccgcggagcccgccggacatgtggccggagctcatcgccaaggccaaggagggcgggctcaacaccatcgagacctacgtgttctggaacatccacgagcccgagaagggtgagttcaacttcgaggggcagaacgacgtggtgaggttcttccagctgatccaggagcacgacatgtacgccatggtccggctcgggcccttcatccaggcagaatggaaccacggaggactgccctactggctaagggagatccctgacattgtgttccggacgaacaacgagccatacaagatgcacatggagacgtttgtgaagatcataataaaaaggctcaaggatgccaaccttttcgcgtcacaaggaggccccatcattctagcacagatcgagaacgagtaccagcatatggaagcggcgttcaaagatgagggcaccaagtacatcaactgggcagcgaagatggccatctccaccaacatcggcataccgtggatcatgtgcaagcagaccaaagctcctagtgatgtgattcctacctgcaatgggagaaactgtggagatacatggccaggtccaacgaacaagagcatgccgctcttgtggactgagaactggacagcacagtacagagtattcggtgaccctccatcccagcgttctgctgaggacattgcattcgccgtggcgcgcttcttctccgtgggcggaaccttggcaaactattacatgtaccatggtggaacaaacttcggaaggacatctgctgcctttgtgatgccaaaatactacgacgaggcacctctcgacgaattcggcctgtacaaggagcccaagtggggccatctgagggacctgcaccaggcgctgaagctgtgcaagaaggccctgctgtgggggacgccgtcgacggagaagctgggcaagcagttggaggcgagggtgttcgagatgccggagcagaaggtgtgcgtggcgttcctctccaaccacaacaccaaggacgacgcgacgatgacgttccggggccggccctacttcgtgccgcgccactccatcagcgtcctcgccgactgcgagaccgtcgtcttcggcacccagcacgtgaacgcgcagcacaaccagcggacgttccacttcgcggaccagacggcgcagaacaacgtgtgggagatgttcgacggggagaatgtgcccaagtacaagcaggccaagatcaggctgcgcaaggccggcgacctctacaacctcaccaaggacaagaccgactacgtctggtacacctccagcttcaagttggaggcggacgacatgccgatccgcagcgacatcaagacagtgctcgaggtcaacagccatgggcatgccagcgtggcgtttgtcaacaacaaattcgtaggatgtgggcacgggaccaagatgaacaaggcgttcacgctcgagaagcccatggacctgaagaagggcgtgaaccacgtcgccgtcttggcatcgtcgatgggaatgacggacagtggcgcttacatggagcaccgtctggccggcgtggacagggtgcagatcacgggcctgaacgcgggcacgctggacctgacgaataacggctggggccacatcgtcggcctcgtcggcgagaggaagcagatctacaccgacaagggcatgggcagcgtcacctggaagccggccatgaacgacaggccgctcacctggtacaagaggcacttcgacatgccgtcgggagaggacccggtcgtgctggacatgagcacgatgggcaagggcatgatgttcgtcaacggccagggcatcggccgctactggatctcctacaagcacgccctcggccggccatcgcagcagctaaggacaacatgctggtgctgttcgaggaggagttcgggcggccggacgcgatcatgatcctgacggtgaagcgcgacaacatctgcaccttcatctcggagcggaacccggcgcacatcatgtcgtgggagcgcaaggacagccagatcacggcgaaggcgaacgccgacgacctcagggcccgggcggcgctggcgtgcccgcccaagaagctcatccagcaggtggtgttcgcgagctacggaaaccccgcgggcatctgcggcaactacaccgtcggcagctgccacacgccgcgcgccaaggaggtggtggagaaggcgtgcctcggcaagcgcgtctgcacgctgcccgtggccgccgacgtctacggcggcgacgccaactgctccggcaccaccgccacgctcgccgtgcaggccaagtgctccaagaggtcgcccagcgcggcgcagtaattcagtcgctcgtcgggacatcctattcgtggctgggcggggaacacattgtcggtactgtcattgtaagcttaaaaaaccctatattgtactcgtggctgggcggggagcatctaacaatatatttatagattgttcattttagtga

SEQ ID NO: 94530 - DNA, 257 bp, Zea Mays
ggctctagcaatttgtgtataatcgcacatacgaacacatacggtgtgactaaaaacctaaagtttatgagcaaagataatcgtgcatctagtgtttttttattaaaaagatatggtctactatatttcaaaattcttaattatatttaatttaatttcaactgttaccaaactaacatgtaaacatggaaaatggcataaacactattttaaatagctcaacatatacacatgagatcaatcattcaatttacacg

SEQ ID NO: 94531 - DNA, 83 bp, Zea Mays
tccaaagctcactgcataaaacccctatctgtaatgtgcgtaagatttcccaaataaatcaccacaatagcatacattggcca

SEQ ID NO: 94532 - DNA, 1811 bp, Zea Mays
agggaatccactccgtctcagtttgaattggctggttgcttgcctgtggcggccggtcctccccgtccccggcggttataaaaccggcaagccacgcacgccacgccttccggctccccgcagccccacgtcggcacatcccacgttcccccctgctccgcaagcgagcgctggccgtgcgggtcgcgaccacttccaccacctccaccactcccctccccaaccgccgccgccgccttattactcggccgcacccgccccgccgccccggtccatgagtccatcctccctctagctagcactaatcgtccatccagtctcacagtcaagctccccgaccaccagcgcgcctcgagctcgagcttccctcctgacagcgtgctggtcgcttcaatggcatctcgggcgcacctgccgggctcgccggcctcgatcgccgtcctcatcctctccttcttccaagcggtgtccgtttccgctgcggtgctcgcgtccgtcgcgcagggtcggtatgcggcatcacgttcaccttcaccaaccgctgcggcgacacggtgtggccgggcctgctgtccggctcggggacgccgccgctggagaccacgggcttcgcgctcgcgccggggcagtcgcgctcgctgtacgcgccgcaggggtggtcgggccgcttctggggccgctccggctgcgccttcgacgcctccggcaaggggtcctgcgccacgggcgactgcggctccggcgaagtcgagtgccgcggcgcgggggcgtcgccgcccgccacgctcgccgagttcacgctcgacggcgacggcggcaaggacttctacgacgtcagcctcgtcgacggctacaacctgcccatgctcgtgcagcccgccgcggccggctgccccgacacggggtgccttgtcgacctcaacgagcggtgccccgacgagctccgcgccgacggcggccgcgcctgccgcagcgcctgcgaggcgttcggcagccccgagtattgctgcaacggcgcctacggcaaccccaacacctgccacccgtcccagtactcgcagctcttcaagtcggcgtgccccaagtcctacagctacgcctacgacgacgccacatccaccttcacatgcaaccacaccgattacaccatcaccttctgccccgaatcaactccatccagcgacagatccaaacattcgtctcggaggccaagccacgagcaactggaagattcagtgtggcttgcatccttgaaggcaagtggcgccagttctatgaaaataacgtcatggtggtcggcgcccactgtgttccgatctggattagcaattgcagtggcgaccttgcttggtgcacaaattgcaccggatcatcctgtggtcggcttgctatgattcggcaaggttgcggttcttgattcttaggagccatccaagttattttcagaccggaagcagattagagcggtagtagatcagcaatggggatagaattctgtgtaggttttttgttggtggataggtgctagcgctagagaaggaacgatgtgttacaagttggcaatcggaattccatgaatgcattacataagcacattgcctttcagaaacattgctctttgaattataatcttctgtgtgcatcaactgtttttctttggggtggcggggggcgtgatccacgccgcacgctgatccggcgtcactttggaatgagaataaaatatacgatctgatgttctgttatcatcgggtccttgtttctatttttccagtaaggcgtataaacaatctcaaatggattttgtaacc

SEQ ID NO: 94533 - DNA, 1770 bp, Zea Mays
agggaatccactccgtctcagtttgaattggctggttgcttgcctgtggcggccggtcctccccgtccccggcggttataaaaccggcaagccacgcacgccacgccttccggctccccgcagccccacgtcggcacatcccacgttcccccctgctccgcaagcgagcgctggccgtgcgggtcgcgaccacttccaccacctccaccactcccctccccaaccgccgccgccgccttattactcggccgcacccgccccgccgccccggtccatgagtccatcctccctctagctagcactaatcgtccatccagtctcacagtcaagctccccgaccaccagcgcgcctcgagctcgagcttccctcctgacagcgtgctggtcgcttcaatggcatctcgggcgcacctgccgggctcgccggcctcgatcgccgtcctcatcctctccttcttccaagggtcggtatgcggcatcacgttcaccttcaccaaccgctgcggcgacacggtgtggccgggcctgctgtccggctcggggacgccgccgctggagaccacgggcttcgcgctcgcgccggggcagtcgcgctcgctgtacgcgccgcaggggtggtcgggccgcttctggggccgctccggctgcgccttcgacgcctccggcaaggggtcctgcgccacgggcgactgcggctccggcgaagtcgagtgccgcggcgcgggggcgtcgccgcccgccacgctcgccgagttcacgctcgacggcgacggcggcaaggacttctacgacgtcagcctcgtcgacggctacaacctgcccatgctcgtgcagcccgccgcggccggctgccccgacacggggtgccttgtcgacctcaacgagcggtgccccgacgagctccgcgccgacggcggccgcgcctgccgcagcgcctgcgaggcgttcggcagccccgagtattgctgcaacggcgcctacggcaaccccaacacctgccacccgtcccagtactcgcagctcttcaagtcggcgtgccccaagtcctacagctacgcctacgacgacgccacatccaccttcacatgcaaccacaccgattacaccatcaccttctgccccgaatcaactccatccagcgacagatccaaacattcgtctcggaggccaagccacgagcaactggaagattcagtgtggcttgcatccttgaaggcaagtggcgccagttctatgaaaataacgtcatggtggtcggcgcccactgtgttccgatctggattagcaattgcagtggcgaccttgcttggtgcacaaattgcaccggatcatcctgtggtcggcttgctatgattcggcaaggttgcggttcttgattcttaggagccatccaagttattttcagaccggaagcagattagagcggtagtagatcagcaatggggatagaattctgtgtaggttttttgttggtggataggtgctagcgctagagaaggaacgatgtgttacaagttggcaatcggaattccatgaatgcattacataagcacattgcctttcagaaacattgctctttgaattataatcttctgtgtgcatcaactgtttttctttggggtggcggggggcgtgatccacgccgcacgctgatccggcgtcactttggaatgagaataaaatatacgatctgatgttctgttatcatcgggtccttgtttctatttttccagtaaggcgtataaacaatctcaaatggattttgtaacc

SEQ ID NO: 94534 - DNA, 93 bp, Zea Mays
gaagaaaccacatgtgtcccagttcagaagaggcagaaggtttcaggcagcaggtgaatcttatccgcgctgcaatttgcgccgtccagaatc

SEQ ID NO: 94535 - DNA, 2194 bp, Zea Mays
tccggcatcgccgttctcgtgttaccctctccgccgccgccggacggcgggccggccgcgacacgacgccgagggctcgctcctcctcgttcttcctcgcacgcggcattgatcgaccgatcccttccactgagcgtgaacggcagggggccgcgcggatggacgacctgaaggcgagcctggcgcggccgatacagctcgcggagcaggtgatcaagtgggcggacgaggcgcagacgtgccggcaggagtgccaggacctcaaggccaagctggagcgcctctccaccctgctccggcaggcggcgcgcgccgacctctacgagcgccccgcgcgccgcatcctcgaggacacggacaaggcgctcgacaaggccgccgcgctgctcgagcgctgctgcggccacggcttcgtccgccgcgtcttcaccatcatccccgcggggtcgttcaagaaggcgtcctacctgctcgacaactccctcggggacctcacctggatcctccgcgtctccaactacgccgcctccgacgaggacgacgaggacgaccacatcggcctgccccccatcgcgcagaacgagcccatcctcttcctcatctgggagcagatcgccgtgctgcagtacggcgggctcgaggcccgcgcggacgccgccgccagcgtcgtctccctcgcgcgcgacaacgaccgctacggcaggctcatcatcgaggaagacggagtcccaccgctgctgcggctcatcaaggagggccgcgccgacgcgcaggagagcgccgcgctagccatcgggctcctcggccgcgaccccgagtgcgtggacctcatgatcctcgccggggtctgcacctccttcgtcaagatcctcaaggacgcgcccatgaaggtgcaggggatggtggcgtgggcggtctccgagctctcagccaaccaccccaaatgccaggacgccttcctccagcacaacgtcatccggctcctcgtctcccacctcgccttcgagacggtgcaggagcactccaagtacgccgtcgcctccaagatgtccatccactccgtggtcatggacaaaaagagcaacgacagcacacatgacccctcgggaagcggggagcaagcggcggcggcgaaaccaaacgtgggcggtggcgggacaggagccagtagctcgagcctgactgttcccggtcccagcggcagacccgtcggcatggccgggacaaggctgcacaacgcgtccatttccgccacgagcacccgggggagggagtacgaggacccggagatcaaagcgtacctgaaagcgcacgccgcccgggcgctgggcacgctggccacgggcaaccccgccatctgcaagaacatcacggagtcgagggcgctgctctgcttctcgatcctcctcgagaaggccacgggcgacgtgcagtacaactccgcgatggcgctcgtggagatatgccgcgtcgcggagcagaacgccgagctccggcggtcggcgttcaagcccacctccccctcggcgcgcgccgtggtggaccagctcctccgcgtggtggagaaggccgactacgacgacctcctcgtcccctgcatcacgtgcctggggtgcctgtcgaggacgttccgggcgacggagacgagggtcatcgggccgctcgtcaggctcctcgacgagcgggagaccgacgtgagcctggaggccgcggcggcgctggccaagttcgcgtgcatggacaactacctgcacgtggaccactgcaagtcgatcatcggccacggcggcgccaagcacctggtgcagctcgtctacttcggcgagcaggtggtgcagaccgccgcggtcgtcctcgtctgctacctcgcgcacaacgtccccgacagcgaggagctcgcgcaggccgaggctttgatggtgctcgactgggcgtggaagcagggctacatgtcgcaggatccggtgatcgagagcttgctgcccgaggccaagattaggatggagctttaccagtccagaatagcgaaaggaggatactactattgatcatttgatcttgatcggagactgctgtcaacttaacttgtgtggctattagattcaggggcgaaacagaaacacaaggatgcatggctgccgcttcaccttcacatcaactgactactgtaaatagattcaggtaactttgttca

SEQ ID NO: 94536 - DNA, 2185 bp, Zea Mays
cgcacgcgccacgccgcgctcgccttttccctgcagccggcgccgctccgcgccccatttccaaaacaaaacaaccccaagtccccaacccagtttcaaacaaactagatccgcggcgaccatgcggcgcggcggcggtcgccggttccccaagccctccttggcgccctccaccgcggccgaggccaccccggcgctggacgccagcgtcatccgcaacctcgactccgccttctcccgccgcgactccgacgccaacagcctctgcagcagccgtcccgcttctaccgtcggcgccatcctcaacttctccgaccgcgccacgcaggtcgccgcgctccgcgtcgtcaacacattcctcgcccccgccgtcacgctccgggggcctctgcccgccgcgcgcgacatccaggcggcgctccgcctcctcgtcgaccgtctccacttgccccgcaacgacgccacattcgatgatgacctcatccaggaccttcgccttctcggatgcccctacaaggtcacccgctccgcactcaaggcccccggcaccccgcactcgtggccggtactgctctccgtactccactggctcaccctcctctgccactcccaaggagacgacccggatgccccgagcggcccatccgacgatctcttgctctacatcacccagtcgtactcccacttcttgtcgggggacgacgccgccgtcgaaaccgtcgacgaggagtacgcctccaaagcccggatgaccggtgaggcgtacgttgcaacggctcgtgccctggagaaggaggctgaggaactggagacccaggtgaataagctcatctcgggtccctcgcggcgggaagcactggagtcagagaaggaggccttcaatgctgatattcacaagttcgacgcagtggtgaatgcttggaaaactaagttcaatgaaagggaacaatcgtttggggatttggagaaagagttggaggcaaaagtgtcggacacccagcgcgctgctgctgaaattcaggatctattgaaacaagtggatgctcagccggtgaatgtgaaggatgtggatagaatgcgtagggagatgcaggctattgaagatgacattgccaacgccgagaaggggaaaacagcactggaggataaggtctgggaacttgaagctaagctggttaccaagcttgaggagcttgagaggcatgctgagcagtgcaaccaggccctcaaaaagttgaaacctactgttgcttttcagtacatgatagattcaaaaggatcttctcctgctgagatgctaggtactggttacaaaacagtactaaaacctgcacttctggctcatgctgaggagaacaaaaggatctgtctctcaaatcttgaaaacttaaatgatctacagaagcagctgcaaggaaatgctaaggttctagaggaggaaaggaataatatttccagtctccaggaaaaaaatgacgaaatcgttgctcgtttgaatttactggatcgtgaaattataaatgatgactcaagattcacatctgaagctgcacaaatgaaagatgagttggagaaaaagaagaatagtttgatttctgctgaaaagcaggcagatgattttcttaagaaatcggagaagaggctccaagatgtaacacttaaagttgaagaagaaactcagggcagctgctaaggagctgctggagcttcttgattccatggctgaacataaagagttcatggaaacaacaattgctcagaggaggaaggacctctatgaaactgcagattatatagcatctgtggcatccaagacagtcatcacccaagtaccgaaccctgctgaatcctgatacctgaattatgcagtaatcttttcgcatagaaagttcatcatagcaggcctgcctaccgtggcagccttctctggcatgtaatataagttgaagttgtcccacttgaagctgtggtcttttttggccttggactttggtttgcgttctggtgaggtagtagttggtatgttcgggcttcaatcctagatgtcatgaaactgttgtaatttcattgcttcagtaatgaactttggattggtcctctgtgaaaaagtacccaaccctcttggtgtttgtttcagctttatgaacctgcttctgctttagaaaaacacaaacaagttcagttt

SEQ ID NO: 94537 - DNA, 2084 bp, Zea Mays
cgcacgcgccacgccgcgctcgccttttccctgcagccggcgccgctccgcgccccatttccaaaacaaaacaaccccaagtccccaacccagtttcaaacaaactagatccgcggcgaccatgcggcgcggcggcggtcgccggttccccaagccctccttggcgccctccaccgcggccgaggccaccccggcgctggacgccagcgtcatccgcaacctcgactccgccttctcccgccgcgactccgacgccaacagcctctgcagcagccgtcccgcttctaccgtcggcgccatcctcaacttctccgaccgcgccacgcaggtcgccgcgctccgcgtcgtcaacacattcctcgcccccgccgtcacgctccgggggcctctgcccgccgcgcgcgacatccaggcggcgctccgcctcctcgtcgaccgtctccacttgccccgcaacgacgccacattcgatgatgacctcatccaggaccttcgccttctcggatgcccctacaaggtcacccgctccgcactcaaggcccccggcaccccgcactcgtggccggtactgctctccgtactccactggctcaccctcctctgccactcccaaggagacgacccggatgccccgagcggcccatccgacgatctcttgctctacatcacccagtcgtactcccacttcttgtcgggggacgacgccgccgtcgaaaccgtcgacgaggagtacgcctccaaagcccggatgaccggtgaggcgtacgttgcaacggctcgtgccctggagaaggaggctgaggaactggagacccaggtgaataagctcatctcgggtccctcgcggcgggaagcactggagtcagagaaggaggccttcaatgctgatattcacaagttcgacgcagtggtgaatgcttggaaaactaagttcaatgaaagggaacaatcgtttggggatttggagaaagagttggaggcaaaagtgtcggacacccagcgcgctgctgctgaaattcaggatctattgaaacaagtggatgctcagccggtgaatgtgaaggatgtggatagaatgcgtagggagatgcaggctattgaagatgacattgccaacgccgagaaggggaaaacagcactggaggataaggtctgggaacttgaagctaagctggttaccaagcttgaggagcttgagaggcatgctgagcagtgcaaccaggccctcaaaaagttgaaacctactgttgcttttcagtacatgatagattcaaaaggatcttctcctgctgagatgctagaagcagctgcaaggaaatgctaaggttctagaggaggaaaggaataatatttccagtctccaggaaaaaaatgacgaaatcgttgctcgtttgaatttactggatcgtgaaattataaatgatgactcaagattcacatctgaagctgcacaaatgaaagatgagttggagaaaaagaagaatagtttgatttctgctgaaaagcaggcagatgattttcttaagaaatcggagaagaggctccaagatgtaacacttaaagttgaagaagaaactcagggcagctgctaaggagctgctggagcttcttgattccatggctgaacataaagagttcatggaaacaacaattgctcagaggaggaaggacctctatgaaactgcagattatatagcatctgtggcatccaagacagtcatcacccaagtaccgaaccctgctgaatcctgatacctgaattatgcagtaatcttttcgcatagaaagttcatcatagcaggcctgcctaccgtggcagccttctctggcatgtaatataagttgaagttgtcccacttgaagctgtggtcttttttggccttggactttggtttgcgttctggtgaggtagtagttggtatgttcgggcttcaatcctagatgtcatgaaactgttgtaatttcattgcttcagtaatgaactttggattggtcctctgtgaaaaagtacccaaccctcttggtgtttgtttcagctttatgaacctgcttctgctttagaaaaacacaaacaagttcagttt

SEQ ID NO: 94538 - DNA, 1652 bp, Zea Mays
cgcacgcgccacgccgcgctcgccttttccctgcagccggcgccgctccgcgccccatttccaaaacaaaacaaccccaagtccccaacccagtttcaaacaaactagatccgcggcgaccatgcggcgcggcggcggtcgccggttccccaagccctccttggcgccctccaccgcggccgaggccaccccggcgctggacgccagcgtcatccgcaacctcgactccgccttctcccgccgcgactccgacgccaacagcctctgcagcagccgtcccgcttctaccgtcggcgccatcctcaacttctccgaccgcgccacgcaggtcgccgcgctccgcgtcgtcaacacattcctcgcccccgccgtcacgctccgggggcctctgcccgccgcgcgcgacatccaggcggcgctccgcctcctcgtcgaccgtctccacttgccccgcaacgacgccacattcgatgatgacctcatccaggaccttcgccttctcggatgcccctacaaggtcacccgctccgcactcaaggcccccggcaccccgcactcgtggccggtactgctctccgtactccactggctcaccctcctctgccactcccaaggagacgacccggatgccccgagcggcccatccgacgatctcttgctctacatcacccagtcgtactcccacttcttgtcgggggacgacgccgccgtcgaaaccgtcgacgaggagtacgcctccaaagcccggatgaccggtgaggcgtacgttgcaacggctcgtgccctggagaaggaggctgaggaactggagacccaggtgaataagctcatctcgggtccctcgcggcgggaagcactggagtcagagaaggaggccttcaatgctgatattcacaagttcgacgcagtggtgaatgcttggaaaactaagttcaatgaaagggaacaatcgtttggggatttggagaaagagttggaggcaaaagtgtcggacacccagcgcgctgctgctgaaattcaggatctattgaaacaagtggatgctcagccggtgaatgtgaaggatgtggatagaatgcgtagggagatgcaggctattgaagatgacattgccaacgccgagaaggggaaaacagcactggaggataaggtctgggaacttgaagctaagctggttaccaagcttgaggagcttgagaggcatgctgagcagtgcaaccaggccctcaaaaagttgaaacctactgttgcttttcagtacatgatagattcaaaaggatcttctcctgctgagatgctaggtactggttacaaaacagtactaaaacctgcacttctggctcatgctgaggagaacaaaaggatctgtctctcaaatcttgaaaacttaaatgatctacagaagcagctgcaaggaaatgctaaggttctagaggaggaaaggaataatatttccagtctccaggaaaaaaatgacgaagtcagtccatcttttcaagcactacattacattttatagcatatagagtaaacttgatctgaaattattttgtccttactcttctatttgtattggccaaatgatctacccatcacatttttgatcggaatataaaacttcatcagggaattgctgcagttcccattttttt

SEQ ID NO: 94539 - DNA, 888 bp, Zea Mays
ccgaacctgtcgaaaagcccatccgcgccgcgcgtaataaagacgcgcgcgggcgtccacgaaacgaacgccaacgcctcaaccacctgtggtggcttctcctctccccgctcccctcctgccccttcccttcgtcctcagatccgccgatcccccgcccctgcgcctccgtctcatgatctctgcgcctctgcgggtgccggcgccgaaggctgccgccgggggttcgttcctgctcggcgcgtcctccgtcgagtccaatcccaatcccaagcccagcaggatccgctgcgccgccgccacgctgtacgaggtcctgggcctgcgcgccggcgcgacgggccgggagatcaaggccgcgtacaggcgcctggcgcgggagcggcacccggacgtggcgcacgcgcccggggccgccgccgagttcgcccgcctgcacgacgcctacgccacgctctccgacccggacagccgcgcgcgctacgacggcggcggcgccgcgcccgcggcggcggtggcgaggcgcccctggagcggcgccgtctacggccggccccgacgccgcacatgggagacggaccagtgctggtagtagagagtagagaggcacagccaagagccccacgcgcttcttgtctgtctgtagaatagttagacctcctgccgccagccatgcggccatggcggctcaccttggactttttttttggtttcggtggccatccatgtagcgtgatttttcgttttccttcctccacttgcccttgtacctgtgtgctgtggtcttgacttcttgagatgtaaatactagtacttgatgagatggttggaggagtagccgccctgcctctgttaattctaaataatccaagctgttctctcctaata

SEQ ID NO: 94540 - DNA, 1347 bp, Zea Mays
aatcgaaacagctgcaacaacccgaccggactcgacccaacccaacccaacccgtccataaccccaccggcccctccgcctcgcctgtcccaggctccccagctcaggtcctcacgccacgcacgcacgagccggagccgagggcgcgcccatccggacccagacagagctcgccggcgcctgcgcctccaccgttcggcaagcgggagggagatgaggggttcgtcgcggaggccggtggccgtggtgatggcctgggtgcgtcgccagccgcccaaggtcaaggccttcctcgccgtcgtcgcggggatggccgcgctcgtcttcatccgcttcatcgtccacgaccacgacaacctcttcgtcgccgccgaggccgcgcacgcgctcgggatcgccgtgctcatctacaagctcaccaaggagaagacctgcgccggattgtcactcaagtctcaagatttgactgccttatttctggctgttaggctgtattgtagttttgttatggagtatgacatccatacaattctagatacagctacacttgcagctactctttttgttatttacatgattcggttcaaactgaggtcgacatatatgctggataaagacaactttgccttgtactatgtggtattgccctgtgctgtgctagcgctacttgttcatccttcaacatcgcacaacattgtgaacagaatctgctgggccttctgtgtttatttggaagcagtttcagtgttgccccagttgcgcttgatgcaaaataccaagattgtggagccgttcacagctcattatgtgtttgcgctgggtgttgcaaggtttcttagctgtgcacactgggtccttcaggttttggacacccgaggcggattgttgactgcgctgggctacggtctgtggccttcaatggttctcctctccgaaatcgtccagacattcatccttgcagatttctgctactactatgtgaagagtgttttcggcgggcaactggtgctgcggcttccgtccggggtggtctgaaaaactgcagcgagaaagaaaagcatactgttcgtcccttctgtgttagatcatacaaagcgacagtcattgtgctcctagcgcccaaacttttgcactcgtaaagtggattagcagagggccgttaattttttttttcagttgtaaactgtttacgtgaatgctgtaccgataccgtgataccgtctgactttttcatccatgctagagttgaagcaggtagcatccacatcgagttgtcgcattttcagactagagatcagattctccgatgccagtgactgtttatctttcattctagtttttcttgtg

SEQ ID NO: 94541 - DNA, 360 bp, Zea Mays
atgcccgctcgccacgacgttgcgttcatccctatgacgtcgcagccagcctacagtctggtcgcgataaagcctgctatggaggacagctcatcatcctcacaggggcagctcgcgcaggcgcagccttggcagcaggaggagccaggagccccacgctccagttcccacacgacgatagtcgcgcccgcccactcgctcaccgccgccccactaagggcccctgctcaccctcttcggattgttcatgcaatgggatttattcacagagatctcaagtcagataatcaattaagattgctgactttggaattgcttggatcgaagtggaaacataaggtctcgtttggtttggagtga

SEQ ID NO: 94542 - DNA, 98 bp, Zea Mays
ctttttcaggtatcttcctatagaatgctttgacctcagcaaaacacatatgtgtatatataatttatcgagatattatatgtccccgttgcaacgca

SEQ ID NO: 94543 - DNA, 342 bp, Zea Mays
agcttacttgcggaatagctggttatgattaccagtctgttaggagatggacaacattcaagaggctgggttatggccttgtcgagtgtgagaaagtaaaattctattttgtccttttcaaattattggacttttccccgtttcatgctgatgacctatatccaacttaccatcagaatttatgacacagatctttgttccagtgcatagaaatgcacattggtgcacatagatatgacaatgcactggttccggatggccttccctatgaaattgttggagttgagccaggttatatatggtttcagccaaacctatcctggcgaattttcagctctatgt

SEQ ID NO: 94544 - DNA, 87 bp, Zea Mays
tgttcatttgtggagcaccggaactacaaggtcatttacatgctctacatgttccaattcttcctcgtcggtgttggcagcgatgag

SEQ ID NO: 94545 - DNA, 568 bp, Zea Mays
aaccaacgcggcgtaatcatggcgagtagaaagcctttttgacctgtaaagcatccgtttccaggatgaggttgtcaatgcccccccgcctgctgacctcgtggatctcgacatctcaggatgcccatgatcaaactacgaacacgagctttggcctaaaaggcaagaacatctctgagcgtgagtggtcgccggcgaagtgcgcgaagccggagagagacctcgtcggctcctggtatagggcggcggcggaggtagcccaggccagccgtagacagggaagcccacgcacgcgagggagagtaggtggtggtgggccgctgagccggactggacgggattgggctgccaggccaaagctaacgacgctcgctccccgctcttggtgcgtcatggtcgttttcgtcagtgcggggtgcggggtgcctcgccgtcacatgactcgcggggacgggtggtgggagttcgggttacccgaaaatttcgggtcgggtaattcgggtatttaaaatttcgagttttaagaattgatatctgaaattacaacgggttttacaatacccaaaaa

SEQ ID NO: 94546 - DNA, 193 bp, Zea Mays
gaaattcaaaatgacatgaactaactatcggttctctagcgtaagggtcaatatcaaccagtcatgttccaatatggtcggtactgctcgagccgatctatcggcaaccacaccgatcaaccaaccaaaccgatcgacgttaaggccaaactgaaccgggccatgccatcacatcaccggtcggtatggacgt

SEQ ID NO: 94547 - DNA, 577 bp, Zea Mays
cgttgtaatatataataataaaaataaataattatcttgtcaagagatcactcgttgtacaaatgtgtttattttgatgtacacataataatttctaatatatgaatatcttggcagcattccgaataactcctcagctcggggttccgcctgaagaagcaggagctacagtagctgcggaatcttctactggtacatggacaactgtttggactgatggacttaccagtcttgatcgttacaaaggacgatgctatcacatcgagcccgttcctggggacccagatcaatatatctgttatgtagcttatccattagacctatttgaagagggttctgttactaacatgtttacttccattgtgggtaacgtatttggtttcaaagccttacgcgctctacgtttggaggatctacgaattccccctgcttattcaaaaactttccaaggtccgcctcacggtatccaagttgaaagggataagttgaacaagtacggtcgtcctttattgggatgtacgcgacaatatttgtattaataacaaagaaagtatgtcatgattataatttaaacggg

SEQ ID NO: 94548 - DNA, 2406 bp, Zea Mays
ctaccgcaccaactcttttaacccccttcctctccagggaacgagaccagaatcccccgtcgacgcgcacgcgcagagctccgcatccgcaccggccgccggcggcgtggatggggaagctctccgccctgaagcgggaagcggtcggagtggactaggcgctcggtgacttcctagtttagaagcggtaggtggaggcgatgcggggcggggcgatgaaggccctgcggcgatccagcacctcctcggcgccatcgccaagggtgccgtcttccccgcggtcttattcgtggatccaccgccggtcgcttctcgttacctcgccggcctcgccggcgacgtcctctgtgtctgaatcggcgaatttgcccgcggagggttcggattcagcgccagcgtcagtggtggcagcttcctcgtcgccctcgctggctgcttcgtctccgaacatggaatgtacatttcattctaggggtggaattaaatctccgtggtctcgaagaaaaaggaaacgggcgcttacttgtcaacactggaatcgtctattttcagcaaatgggaagcttcgtgatgggggaagaaagtttctaaagaaggttcgcagtggggggattgaaccgggcataagggctgaagtttggccatttctgcttggagtctatgatttgaacagctctgaagaggacaggaatactatcaagataaagaaaaggaaagaatatgaaaaattgaggcgacagtgccaccgcatcctgcattgtaatagagaaaatggtctgaatgttataaatgagttcatgaacgaggacttttctgatggggctgaaggttcagagtcaccatattcaaatggtgttagtaagagggtttgtgtgatgcccaaagaattgaaatctttaggcagtaaggcagaagaatcagagagttctaactgggatgctgtgaaatgcatagatgaagacataacctctgttgatccatgtttggtagaatcagaatcttctgaatctgagtcttcctatgaagaggaccctgatagaacacctgtctctaccaatatggaagagaactgtggtcccaaaccaaaatttgcccggaccgcttcatctaagtcggagattattatttcagacagaactcctgaggattttgccacatggcagcgcattatacgtgtagatgctattcgagcaaatacagaatgggttctgtttgcccgtaaccaggctgaagtctctaaagagaaagcgctgcagtctgcaatatctgtcgggttgaaagattttgaccatttagagccttacatgatctatcatgctgcacgattagttgcactgcttgaggcatatgcactttatgatccagagatcgggtactgtcaaggaatgagtgatctcttgtcaccaataattgcagtcatggaggaagatcatgaagcgttctggtgctttgtgggtttcatgaggaaagccagacacaacttcaggcttgacgaggttgggataaaaagacagctgaaaaccgtctcgcagatcatcaagcgcaaggattcacacctctacaggcacctgcagaaacttcaggcggaagactgcttctttctgtaccgaatggtggtggttctcttcaggagggagctcacttttgagcagactatgtgtctgtgggaggtcatgtgggctgaccaggccgcgatacgagctgggattggaaggtccacttgggcaaggataaggcttcatgccccgccaaccgacgacttgctgctctacgccatcgcagcctgcgtcttgcagaagaggaagctgataatcgagaagtacagcagcatggatgagatactgcgggagtgtaatagcatggccgggcagctagatgtctggaagctcctagatgatgcccaccacttggttgttgaccttcatgacaaaatctgatgcgactgccttcctcagctatgtttttgggtagagtatgcagacatgaacacattttccgaggtgtatttagtaagctgttgtgtactgttcatcacccggaataaaaaaaaactttcatgggagtacatgtagagaaccttgtagcttcaagtgaggacgaagttgtcttccactttggttaagctgataaaccattggatagcgcaatggtttattcaagccatccatagttaaaacttcatggaaaattttgttcttgcttctaatgtctgtccttggcagaaacaacattttccatgaagttttttacaggaaagttaagttcccagattttgggtgtaatgtgtagtaataatgaaatcacagcagtttctttcatcatgtgtagtaatgtactccctctgttttattttagttgtagctggatagtgcaaaattgaactatcaagcgacaactaaaaagaaa

SEQ ID NO: 94549 - DNA, 646 bp, Zea Mays
cccccttcctctccagggaacgagaccagaatcccccgtcgacgcgcacgcgcagagctccgcatccgcaccggccgccggcggcgtggatggggaagctctccgccctgaagcgggaagcggtcggagtggactaggcgctcggtgacttcctagtttagaagcggtaggtggaggcgatgcggggcggggcgatgaaggccctgcggcgatccagcacctcctcggcgccatcgccaagggtgccgtcttccccgcggtcttattcgtggatccaccgccggtcgcttctcgttacctcgccggcctcgccggcgacgtcctctgtgtctgaatcggcgaatttgcccgcggagggttcggattcagcgccagcgtcagtggtggcagcttcctcgtcgccctcgctggctgcttcgtctccgaacatggaatggtggggctatcctgtccggatttctcctcgtgctgcatgggtcgcttcaaaatggggaataattgttggctacttgatatttcccaacaacgattcgcgcacttattcccaaaattatgctgttctggtagcacagtggaagtggtagtttgttcggtactattattcttataagatttgctttagtctcttagattaaaaaaaagctaa

SEQ ID NO: 94550 - DNA, 80 bp, Zea Mays
gggggaggggcttagtgtttttcatttggttgagcatatacagaatctaccaaatgtgggcttgtaaatgttatctagca

SEQ ID NO: 94551 - DNA, 1476 bp, Zea Mays
ggccacgtggagaagtccagaaggagcgggcccccgcgacccagccgtccatcatgatctcgacggctacaaatgaccattatttaccaattggctcgtctcttttcccaccaacacctccaaacctcctctctatttccaatttccacgccgccgccaacatgaccacctcagccgccgcctccgccaccgccgcgttgtccaccccatcctccgtcaatccccatcgatcgtcttctgcgctcaggctcccagcgtccctccgccgatcccatcccaacagattcttatcgtcgtcaccctcgcgctctccactcgtgccggtctccgccatggcctctcccgccgccgccggtgagacgtcctccaggaagaaactcatcatattcgatgcggaggacgaccttgcggcgtcactggccaagtacacgtctgagctgtcggcgaagttcgcggccgagaggggcgccttcaccgtcgtgctctccggcggctccctcgtcaaggccctcaggaaactagcggagccgccgtacctagaggcggtggattggagtaaatggcatgtgttctgggtggatgagagggtggtgcccaaggatcacgcggatagcaactacaggctcgcctcagatcagttcctctctaaggtgccgattcctgctgaccaagttcatgccatcaatgacgaactgtcatccgagggggctgcaggggactacgaaactcgtttaaagcagcttgctaagaacggtgtgatcgaactgtcgccggtgtccgggttccccaagttcgaccttatgcttatggggatggggcctgatggccacgttgcctcactcttccctggccaccctgttgtcaatgaaaaccagaagtgggtcacctttgtcaaggactcaccgaagccgccgccggagagaataacgttcactttcccagtgatcaactcgtccgcacacatcgcacttgtgatcaccggtgctggcaaagctggtgctgtgcataaagcactttcagaagggcaaagtacatcagatttgctgcctgtcgagatggtttctcttcagaacggggagctcgtttggttcactgacaagccagcggtgtcaatgttgtcgagcatctgaagcccacgattgtataaatttgaagctttaatttgatgggattcatacacgattgggccttgttcggttgcatggtgattggaggggattagggatgattaactctctttctatttaattttaaatagtaagggacttaatctcctctaattctcctcaatctagttttaaccaaacaaggtctttatggaaatctattcggttcggcatggaactctgaggtgtcgatttcggggaaatttgtcttggattccattttgtacccactaataattatttagacccccgtatatttccctttactttgagaagttggaatctaattaatggagcagactattatttt

SEQ ID NO: 94552 - DNA, 586 bp, Zea Mays
atcgtttttgtatgcatgatttcttcagatgcgaggctagatacgaggctagggcggatgtggtggccaccacgagctgtaagaagctcgtcgtggacatgcactatgaggcctgaatccaggccatcgtcagctaccacggctccgtccttggggagagggtgaccaagcagcaagcttgaaccatgtcgttgaccagggaccagtacctgcaggtaaagtcatgcatgtttggtaccagtactccatgcatgaattttattttatcttctgatatacactttacgtgtttactttgtagatgattccacattagtgcgccacacatcctctatgctgggagcagatggtggataggtggtgttcgcctgagtgggacgaggcgcacaacgctagccgggaacggcgtatgctgaagcaaggtccctcccaccaccaaggcagtcggagtctgggtcaatatgccgaagcatggtcggcgtcacatggtggccggccttgctccaccttctcggcctatgctatggcccataagggcaaggcggcgtccgacgtcacctacaacccggatgacgggcccgaggcc

SEQ ID NO: 94553 - DNA, 1859 bp, Zea Mays
agatatagcactcgctgctcgccttggtcccaactacccgctccctgtccagcgtccagcgtgcaaccaacacctcccacgagtccgcgacgcgtcagcgtcaccgtccgtcgtcgcaaacgagcccagtggcgattcgctttcgaaccgcactcgccctcctccgttctcttctctccctcctcctatagttggcttctcgcaaccctctgctttcgatcagctttctccgctccccatttccctctccaactccaatccatggcctccacggatcgctccacgccggcggaggacgagcaacagcagaagcgcccgtctctcttctcgccgtaccagatgccccgcttccgcctcgcccaccgggtggtgctggcgccgatgaccaggtgcagggcgcccgacgcggtcccaggccccgcgctcgcggagtactacgcgcagcggtccacggacggcggcttgctcatctccgagggcaccatcatctcgccgtccggccctgggttccctcgtgtccctgggatatacaatcaagaacagactgatgcatggagaaaggtggttgatgctgttcatgccaagggagctatctttttctgccaactatggcatgtaggccgagcttctcaccaagtatatcagccgggtgctgctgctccgatatcctcaactgataagccaatatcatcaagatggaggatactgatgcccgatggatcctatggcaagtatccaactccgaggcgcctagccacatccgagataccagaaattgttgagcaataccgtcaagcagccgtaaacgccatcaaagcaggtttcgatggcatcgagatccatggcgcccatggctacctcatcgatcagttcctcaagggcggtatcaacgaccggactgacgagtacggtggctcactctccaaccgttgccggttcctcctggaggtgacccgagccgtggtctctgcgataggggcagaccgcgtcgcggtccgagtgtccccggccatcgaccatctcgacgcctacgactccaaccccctgcagctcggcctggccgtggtggagcgtctcaacgctctccagcaggaggccgggcggctggcctacctccacgtgacgcagccacggtacacggcgtacgggcagacagagtctggccagcacgggagtgccgaggaggagagccggctgatgcgtgccgtgcgaggtgcctaccgtggcacgttcatgtgcagcggtgggtacacgcgggagctcggggtcgaggccatcgagtccggggacgctgacctggtgtcctacgggcggctgttcatcgctaatcccgacctggtggagcggtttcggcgcgacgccccgctgaacaaatacgtgcgcaagacgttctacacgccggaccccgtcgtcggttacacggactacacattcctcggccagcctaaggcacgcatgtgatttgattattagtgcgttgccgtaattataagaggcggagtattgtttgtatgttgtgacttgagaaaacaagcaaacatctgggtaatgccgcgattgttacgtattcctactatatatgtgttaccaatattcgggcctacagattgtatcttgataaccactggcagatctagaattttactatatgatatgctatttaatctagaattttattgtaggataatgccatttaaaatttacatatacattggatcaagcttcaagacaattagcaaaatatttttacaagataattagcataatatttttctatgttaaacatttttagatgtctttttattctttttataattgtgtgtatatatataatataaagtctattaagaatctaatgt

SEQ ID NO: 94554 - DNA, 887 bp, Zea Mays
agatatagcactcgctgctcgccttggtcccaactacccgctccctgtccagcgtccagcgtgcaaccaacacctcccacgagtccgcgacgcgtcagcgtcaccgtccgtcgtcgcaaacgagcccagtggcgattcgctttcgaaccgcactcgccctcctccgttctcttctctccctcctcctatagttggcttctcgcaaccctctgctttcgatcagctttctccgctccccatttccctctccaactccaatccatggcctccacggatcgctccacgccggcggaggacgagcaacagcagaagcgcccgtctctcttctcgccgtaccagatgccccgcttccgcctcgcccaccgggtggtgctggcgccgatgaccaggtgcagggcgcccgacgcggtcccaggccccgcgctcgcggagtactacgcgcagcggtccacggacggcggcttgctcatctccgagggcaccatcatctcgccgtccggccctgggttccctcgtgtccctgggatatacaatcaagaacagactgatgcatggagaaaggtggttgatgctgttcatgccaagggagctatctttttctgccaactatggcatgtaggccgagcttctcaccaaggtacgttaatagtacgtgcaaattgccacaaaacaaatatgtttcacgattccgtaattcctcagaacttacattgcattgttaaaaatttctagaggccacattatatctgccttgaatgaagttttagtcctccactgaaataatattcagtcggaaaaggttttcttctaatgtaatctaaggatgatctagtcagggtcagtggggaccagaaagtttctggcttggaattggacagttactgatt

SEQ ID NO: 94555 - DNA, 664 bp, Zea Mays
gcggcaccgctattaataaaaaatctgacgacgtcctccttctcctgctccctccaacggacttgaccactaaaagctaagcacacccccggccatggcgctcgcgtccacctccgccaccgcgcccgctgccgtgctcaagaccccgttcctcggcgccaggcgcgcgctcgccaatgccaccgcgcccaagcccgcgccgcgcgctcctcgccgtcgccgcggccgccgccaagaagttgtggatccccgccttcaagagcgacgccgagttcatcaacccgccctggctcgacggatcgctccctggcgacttcgggttcgatccgctggggctgggtaaggacccggcgttcctcaagtggtaccgggaggcggagctgatccacgggcggtgggcgatggccgccgtgctgggcatcttcatgggccagccgcgagcgaagtaggaggcttatttattgacggcgggtgcgcgatttggggactgcggacgcgcggtaatggggagaggaggagaaggaggtggcttaggggctgcggacgcgtggaccttccattgatgcggatgaggaggctctggcgatggcagacagggcagagcgtggcgatggcagggggcgcagggcgcaggacgcggaccttccatccacgtcgtcgctcc

SEQ ID NO: 94556 - DNA, 1039 bp, Zea Mays
aattccactcgccgcggaaaccttccttctgggcctcgtccggtcgtccgtcccttcgcgcccctgaaattgtccgaccgcgtggcgactcgggtcggacggatgccggtcgacgtcgaggcggcgatggccccgccccaggcggcatcggcctgcagctcgtcgtcgataggcagggacagcgacgagtgctcgccgccggggaaggaggaggaaggggagggggaggtgcagagcgcgtacgagggaggaggagggggcagcctcgctgggttggaggcattggaggaggcgctgcctattcggcgcagcatatccaaattctacaatggtaaatccaaatcatttgtgtgcctgaaagaagctataacattttcaggctctgcaaaagacattactaagtcagagaatgcatactccagaaaacggaagaatctctttgcctacatcatcatgtatggaaattcacatgaaccacgggcagctcaagtttatgaaactgccgcccctaagaggcatgctagtttgagtagaaactctttggtgactttggctagcagcagttccaggagcagcagcagtatcagcattgaagagcatgaactgcccgagcatcttgattctccgcgttcacctgatggttttatatccgcaccacgatctggctcttgcgtgcctgatgcatctgtgcctaggtcattgtcaatgatggacttgcatcgtctgaataggtcaagttcctcagttcgtctcaaagatgggaaataggaaatacgactggacttggatccagaggattttctatttctttttgtcatcttttgctcgaggtttctagcaccatcttctctaatagaactaaggatggcatggaggtttctggataaataagtgatcacttagtttggcgaggggtatatatgtgtttgtaaaatagttcttcactccattgtaattagcatataatgtactaatatgaatgcctctactcatgtgaccatcttcagctgtaaattaacaaatacctttttatgccgtt

SEQ ID NO: 94557 - DNA, 453 bp, Zea Mays
aattccactcgccgcggaaaccttccttctgggcctcgtccggtcgtccgtcccttcgcgcccctgaaattgtccgaccgcgtggcgactcgggtcggacggatgccggtcgacgtcgaggcggcgatggccccgccccaggcggcatcggcctgcagctcgtcgtcgataggcagggacagcgacgagtgctcgccgccggggaaggaggaggaaggggagggggaggtgcagagcgcgtacgagggaggaggagggggcagcctcgctgggttggaggcattggaggaggcgctgcctattcggagaaattggttctttgggggaatctgtgaagaagcagctaatttgctttctttggagtattcccatttgatttctagattactctgtgggtgtgattctgccgcttctttctacaaatggtacactgctacgttttgcactcaatga

SEQ ID NO: 94558 - DNA, 1311 bp, Zea Mays
atggttatcccagcttttatgtgtctgttagtgttctcttccgtggaaagcctactgctttcactttgtagtatccataatgagtctgatgtagcagcagttgatgccccaataccagctgaaactttacctgatacttcccatgatatgagcatgcctgctgttcctgaagttgacaaatttgtgaagcatgaagaatccacaagtgccaccctcagtcctgttgtagaaacaggaaatggtcatactacactgttgatggaagcaaaatcacagcattcgcgaggtaatgttgctagccatgctgttgggttatctgaatcctccagccagcccaccgtttctactgtttgcaagtcaacagccggccatattcgtgctgatgaggatatgaggcagaggtcttgtgatactaatgaatcttgcggtgcattaccaagttcctccaatcctacagttgaacctttgccttcaaattctctggggaatgctattgttgatggtatgtcacaaggaagtgctgaaatggactattcagatgacgatgttaatactgtttcacgaattccaactacaaataagcctcatgatgagtcaatggggaatgtcgcaatcagcaaggatggtatcaatactaataataacttaagcatagagctaaagaaagaacatgatagtgatctgcatcaagattgttcatctatgacaaataaggttactattgatggtgacaagtgtattaaaacaaaagttggtgttttcagccatgcaggtcagcaggggctccagaatgaggtttctgctagcgaaaactctaaagacaaacgatctttgaattctgagaagaatactccagtaaataatactgacaatagcatgcaagatgctaagactgctgcaggctccagtaccacagatctccagaagtcatcagctttgccaaaatctgcttctcctataatgcaacctactaagcaacctcctaagactttagatagctgtcttgggaagactagaagcccagatataaagtcagagatgtctcaaaatggtatgcaagctgggagttgtagtgagaaccatgcaaaacttgctgctttgaagacagagcatcagaatgaaagtgaagagctttgtttgatcgaggcgtttctttctattgttagtaatttattagatttcaagttcggctccaaggtggagatcaccgccactcttgttgatcccgtgtgcattgttcaagcgcaaagcaaatttgcctaccacatcaagttctaccccaatctacaacaatcactgttcttcaggtga

SEQ ID NO: 94559 - DNA, 2554 bp, Zea Mays
cgtgggattgaattgagcccccccaagatcagaattggagcagcgggttttggtttcctgcttggtgccgctgattggagtacgcttcttttgtggtggttgagaggctgctcggcttccgccgaccatgtccgtgccggcgatagccgtgtacaccagcccgcccggcgccgtctacgcgccgccggagctcgagtccagctcgcgcggctcggcgccgtgcgcggccgcggcgtccccgtcagcgccgagctcccaccgccacgcggccgtcgcgggcggcttgtcctgcctattttcgtccccgtccgcggccccgcgggcaacggcgcacgaggagctcggcgcgctctggcacgacagatccgatgagccgccctccgtcgccgggggcttcggcggcgggggctactcgtacccccagtcgtcgccgtcgccgctcaagctgcgggaccacctccaccgcagcccggtgtctctgttccacacccctgcctcctccccggcgtccaggagcccctcggtttcctggctcgctggccgtgagcgcgagcgcctcttctctagcttcgtgcgcaacgcgcttggctcctgcattgactacgcaccggtcaccagcttcccgctgggtgtgcgccccgcggccactggtgtcgacgccgcggagctggccttcgagcttgacgaaaacctctctgaggcggagccgtcctgcgaacctgatgctcatgaactcctcgccggcgcccaggctcgccaccacatcttccgcgacgagcttgtcgtcaaggccttcaaggaggccgagcgggcacaccgtggccagaagcgggctagtggtgatccatacttgcagcattgtgtggagactgcggttcatctggccaatattggtgcaaacgcaaccgttgtgtctgctggccttctccatgacacaattgatgattcgttcatggactatgatcatatcttcaggatgtttggtgctggtgtggccgatcttgttgaaggggtttcgaagttaagccatttgagcaaacttgctcgggacaacaatactgcaagtaggactgttgaagctgatcgcctgcatacaatgtttcttgcaatggctgatgcacgagctgttcttataaagttagcagatcgtctgcacaacatgaatacgatagaagctttgcctttggttaaacaacaaaggtttgctaaagagactatggaaatatttgtgccattggccaaccgattaggaattgctagctggaaagaccacttggagaatatttgcttcaaacacttgaacccagaggagcacaaggagctttcctctaaacttctgatgtcttttgatgaagcacttcttacatctacgcttcataacttggataaaagccttagagatgaaggcatttcatatcacagtctttctggaaggcacaagagtttgtacagtatatactccaagatgataaagaagaacttaacaatggacgatgtccatgacatccatggtctacggcttgtggttgaaacagaggaagattgttatcgagcacttgacatagtgcacaagctgtggccccgagttaccggaagatttaaagactatatttgtcatccgaagttgaatgggtatcggtcgctgcacactgtcatcatgtgtgagggtgtccatccatttgaaatccagatccgaacaaaggaaatgcacctacaggctgaatatggattcgcagcgcactggaggtacaaagaaggtggctgcaggcattcctttgtgctccaaatggtggaatgggcgaggtgggtgctcacatggcaatgcgagacattgagcaaagagcgtccctcgtctttgagcagttctgttggcataaggccaccatgcccttttcccctgcattcggaagattgctcctactcttacagccgacagtgcaactatgaaggccctatatttgtcatcatgcttgaacatgacaagatgtctgtccaagagctcccagccaactcgactgtagttgatctaatggagcgagtcggggccaacagtccgagatggagcccttgcagcttcccactgaaagaggagctgcgaccgagggttaaccacaagcccataagcgacccaaataggaagctcagcatgggcgacgtggtggagctgacgcctgcgctccctgacaagtcgctgtccgagtaccgggaggagatccagcgcatgtatgagcggggagggtttgcgctcgccaccacccctagaagctgacaccatcgtcgccatgttaacctgctgctgtacaatacacctgtaaatacgaactaatccttgcagcagagaaatcccagatgaacaaaccccccaactgaattggctaatggtgcggggtttgatccaggacgctgctgtgtgtaacgctttttacaagttgaaatgtggccaagttcctccgaagattcatgagaaacatgaagtacttgtgtccttgtacgcttttggtttggtttcaatgtttcatttggactggatcaagtccgacctcttccgcgctct

SEQ ID NO: 94560 - DNA, 542 bp, Zea Mays
gtacgcttcttttgtggtggttgagaggctgctcggcttccgccgaccatgtccaatgtttcttgcaatggctgatgcacgagctgttcttataaagttagcagatcgtctgcacaacatgaatacgatagaagctttgcctttggttaaacaacaaaggtttgctaaagagactatggaaatatttgtgccattggccaaccgattaggaattgctagctggaaagaccacttggagaatatttgcttcaaacacttgaacccagaggagcacaaggagctttcctctaaacttctgatgtcttttgatgaagcacttcttacatctacgcttcataacttggataaaagccttagagatgaaggcatttcatatcacagtctttctggaaggcacaagagtttgtacagtatatactccaagatgataaagtatgtctttttttttgtttacattatctgcagttcagtaaaatgtcagtatatatagttggcattcacaatccatgctcttaactgtgcttatgattgcttacaggaag

SEQ ID NO: 94561 - DNA, 408 bp, Zea Mays
tcttatggctccttgaatttgcagtagtctgcctgtacctattggttgaagaagagctgacccccactttatcaacagttgctcaacaatggacactggctgcctgtcatctatgaatattactggagctagccaggcaagatcttttgcggggaaacttcctcctcagagatgttttgcgagtagtcactatacaagctttgccgtgaaaaaacttgtctcaaggaataaaggaaggagatcacaccgtagacatcctgcctcgcaggttgtctgcaaggattttccaagaccaccactagaaagcacaataaactatttggaagctggacagctctcttcattttttagaaacaaagaacgccccagtaagccgttgcaggtcgtggttgctggtgcaggtctgac

SEQ ID NO: 94562 - DNA, 518 bp, Zea Mays
gtgatactggtgtttgaggttcagtaacttgagttgctaaaggtcatgtaattcttattgtcccatattactaattgcaaatagtataccatatgtatgtgataggtattagatttacaaagaaggataggaaaatttctagctgttatttttttacttgtactaatttgtatatacgtatttcagaagacactctacatacgtagaatttgcagactgattaaaaattataggttactagaccatcaaataaaaacctatataatctttagtcaaatatatatgagaaaactttagtacaaatatataagaaaaaaatgggatggagaaactgataattcgaagggatattccatttggaaaggtgagttttcattctcctttgatattatattctaacagcagcatttgggtaatgttggcacactatgtatctgatttttatgcctttgccacactgcaggtgtttttggaacatgtagatgtcgagggctcgaccaaagcaaagacggtgatgc

SEQ ID NO: 94563 - DNA, 78 bp, Zea Mays
cttttcttttgttgtcttgaatacaacgggttgcacctcgggtgtggaggtggcgtcttgctccaagttgacaatgtg

SEQ ID NO: 94564 - DNA, 798 bp, Zea Mays
gtgttgatgattcacaaataaacaagtccttgcagggttacatgacgcagttacgagcagcgccgacagagaaaccagcaacatataactacaacaaggggaacatcaacacaagagatgcctacaaagggcgagcgtgcaagcctaggaggaggtgaacttggtgacggccttggtgccctcagagacggcgtgcttggcgagctcgccggggagcacgaggcgcacggaggtctggatctcgcgggacgtgatggtgggcttcttgttgtagcgcgcgagcttggcggcctcgccggccagcttctcgaagatgtcgttgatgaaggagttcatgatggacatggccttggacgagatgccgatgtccgggtgcacctgcttcagcaccttgaagatgtagatcttgtacgtctccacgctcttcttgcccttcttcttgccacgcttgccctcgccgccctccttgccggcggacttgcccgcggggacccgcttctccgccttgggcttcttcccggcggtcgtcttctccgccgcgggctcctcctccgccggcttcttcgccgcgggcttcttctcggccttgggcgccatcggtgccgcggatcgctggcttcaagcggcgtgggccgttggtgcttcttccaacggacggtcgcgatgcggtttttacgcggatcgctgacatggcggataggtgggcgggagaaagacggagggaaatgaatgcttttcgtcgccatcgcgccgttgccaaatcgaacgaagctttgaattcctgcaagctggtgactc

SEQ ID NO: 94565 - DNA, 88 bp, Zea Mays
ttatttttgttttcatattttttggtcgggacgaaaacgaaaacgaaaaccaacggtcgaaatacgggatcggaagtgtcggttactc

SEQ ID NO: 94566 - DNA, 492 bp, Zea Mays
aaaaaggacatggccttgccgttcttcgtcgccttctccggcatcctcctcgtgggcaggtacctcccctccgcgcttcccgcgaacgcgcgcgccgtcctcgcgggcaacgacgtgacgccggcgacccgcgccgcgatgtgcgccgtctcggtggccttcgccggcctcgtgctgctggtatccagcatgccgcagtgccccggcggccgccagggccagggccagcagcggcagtgtccggcggaagtgacgacggaggtgagggcgctgtgcttcaactccgccgcgatgttcctcggcatggtcctcggtggcgccgccgtggcgctgcacccgctcgcgcggcggcgaccgatcgtcgacgtggccgtcgaacatctgacctcgttcactgagaccatcgcgatcaccgcgttcgcgcatgacgttcgcattttcttcaaggttgtcgggaacacaagacgttcagccggcgctgtaaatctgtaa

SEQ ID NO: 94567 - DNA, 529 bp, Zea Mays
aacaaggatcggtaaaacatccgctaaaacatagtgtttgtccggcgatcgctaaatgtggcgtttctctctccatcctctatccatgcgcgcgctcgatattttcgtacaagtcgccagcaatgctacggcagttactcatccaccaccgtgctatggctgtcgggggcggagcttccacgccacggtggtgcagctcgaggaccaacaagcagggatggaggccctcgacgccatggccgtgggggcagagcttcgatgctgcggcagcgtaggtagtagcctcggatgcgacctccgcatcagcgttctcgagccaacaggggaggccgccattgttgccggggaaggcctactatgacggccaggtggagtagcttgcgaatgcaacgatgtgggcaaatgcagcgatggacatcgcgtgtgcgagcagctaggccgccaacagtgatatgtgccaaatgctggacgacgcatgatacatgtttgatgaaatggtcagccgacgtctagtaccagcttttgttcc

SEQ ID NO: 94568 - DNA, 1620 bp, Zea Mays
gaaaatagggaaaaaacaataaataaaatatcttcatttgtggcttgatattccttgaccccacgcattgcattcccccctgggaagaaaacagactcacatgaacagcgagaagaagtacactgtagtttttcttgaacgtttgcttcgtgtactaattatatcttgtcctggtcgtctcatactccacatttggactgttcacacatagctcagattccatttacattcctgtttgaggttgcaggataagtggtagctagtgtatcaggaaaccaacataatagtaatacagtaggtgggtcctgtgcagttcttctttctcttttttttttgaaaaaaggtactattgaacagtaatattatagttgcgtgtgtctttgattacgatgttttgctcacaaagttgctactgctttccaataattcttgacagcgtcaacgagtttgtcagtgcaaagaccgacccaatgataccagtgtatgaattcttaacttgattctctcatgccaggccagcagaaccatggcccatggttccccttatcagtgtctctttctctctctctcttttttggctgactttgctgcttgcagaagcaaaaggagacatggatcttgcagcttctcgcggtggatcagatcaaaattgcgcacatgcttttcatgcctgtgctgctggtgccactgcttgccgaagcccaatgcgccaagctgcttcagctgttcttgttgcacctgccgcgacacgcagtgctgtactccgatctgccgctgttcaaagaccccttcgtgcagccccggctgctgcacctgcagccttcccagctgcagctgcaagacgccaccaggctgcggccattgccgaccccagtgcagcagctgctgctctagtggttgcagctgcgcggactgcccgtgctcctgctcctgccccccgtgctgcagctgccccggcttcttctcctgtgaggggtgctcggctggctgcctcggcgctctcaaccggtgtctcggcggcctgtcgtcgtgctgcagtgagatgcgaccttcctgctgcaagtgccagtcgtcgtgctgcgaggggggttcgtcctgccgcggcaccggcacgggagcgtgctgccgcggttcgtgcctcggtgccccggcgtcgtcgtgcccggagtgctcctgcggctgcgtgtgctcctgctccaggtgcaaaggaggatgccgctgcccgtcctgtggtagtaatccctgctgtcccggtggatgcttgtgctagatcagagtattatattactactagctagtgtgtctgttgctcttcttttcctgttgtggatgatttggcgtttgatttggatggaacctcgctagtgcataatattcactgtcatgaattaactttgacgcccgtcgccactgcgccagctgcgtacgtaacggaaattgatttagatctaatttcaaaattaaacaataatctgaaaagattagtatcacgaaccttgtagaacagttagatgtcctcgtaatggcctcgtaatggtctagatgaatcaaaacactagtaacaattgaaaacaaccagaatcaagctaagaatgtaattggtcaacaaataaaaaggaa

SEQ ID NO: 94569 - DNA, 1340 bp, Zea Mays
agactctctctctctctctctcaggcacattcccctggctggacccgcgctagctcgcggccgcggcagctagatagtagtagctctccagcccatagcttaggtcggtcgccttgtttcgtagggtctggttcggccgttggtcgataagtcggcgggcgatgggggaagcgccgcagcccaagtcgccgccgaggtacccggacctgtgcggccgccgccgcctgcagctcgaggtgcagatcctcaaccgggaggtcggcttcctcgagcgtcaacgagtttgtcagtgcaaagaccgacccaatgataccagtaagcaaaaggagacatggatcttgcagcttctcgcggtggatcagatcaaaattgcgcacatgcttttcatgcctgtgctgctggtgccactgcttgccgaagcccaatgcgccaagctgcttcagctgttcttgttgcacctgccgcgacacgcagtgctgtactccgatctgccgctgttcaaagaccccttcgtgcagccccggctgctgcacctgcagccttcccagctgcagctgcaagacgccaccaggctgcggccattgccgaccccagtgcagcagctgctgctctagtggttgcagctgcgcggactgcccgtgctcctgctcctgccccccgtgctgcagctgccccggcttcttctcctgtgaggggtgctcggctggctgcctcggcgctctcaaccggtgtctcggcggcctgtcgtcgtgctgcagtgagatgcgaccttcctgctgcaagtgccagtcgtcgtgctgcgaggggggttcgtcctgccgcggcaccggcacgggagcgtgctgccgcggttcgtgcctcggtgccccggcgtcgtcgtgcccggagtgctcctgcggctgcgtgtgctcctgctccaggtgcaaaggaggatgccgctgcccgtcctgtggtagtaatccctgctgtcccggtggatgcttgtgctagatcagagtattatattactactagctagtgtgtctgttgctcttcttttcctgttgtggatgatttggcgtttgatttggatggaacctcgctagtgcataatattcactgtcatgaattaactttgacgcccgtcgccactgcgccagctgcgtacgtaacggaaattgatttagatctaatttcaaaattaaacaataatctgaaaagattagtatcacgaaccttgtagaacagttagatgtcctcgtaatggcctcgtaatggtctagatgaatcaaaacactagtaacaattgaaaacaaccagaatcaagctaagaatgtaattggtcaacaaataaaaaggaa

SEQ ID NO: 94570 - DNA, 1451 bp, Zea Mays
atatcccagactctctctctctctctctcaggcacattcccctggctggacccgcgctagctcgcggccgcggcagctagatagtagtagctctccagcccatagcttaggtcggtcgccttgtttcgtagggtctggttcggccgttggtcgataagtcggcgggcgatgggggaagcgccgcagcccaagtcgccgccgaggtacccggacctgtgcggccgccgccgcctgcagctcgaggtgcagatcctcaaccgggaggtcggcttcctcgagcaagagatacagggactcgagcgcattcagcccgtctcgcgatgttgcaatgagataagtggtagctagtgtatcaggaaaccaacataatagtaatacagtagcgtcaacgagtttgtcagtgcaaagaccgacccaatgataccagtaagcaaaaggagacatggatcttgcagcttctcgcggtggatcagatcaaaattgcgcacatgcttttcatgcctgtgctgctggtgccactgcttgccgaagcccaatgcgccaagctgcttcagctgttcttgttgcacctgccgcgacacgcagtgctgtactccgatctgccgctgttcaaagaccccttcgtgcagccccggctgctgcacctgcagccttcccagctgcagctgcaagacgccaccaggctgcggccattgccgaccccagtgcagcagctgctgctctagtggttgcagctgcgcggactgcccgtgctcctgctcctgccccccgtgctgcagctgccccggcttcttctcctgtgaggggtgctcggctggctgcctcggcgctctcaaccggtgtctcggcggcctgtcgtcgtgctgcagtgagatgcgaccttcctgctgcaagtgccagtcgtcgtgctgcgaggggggttcgtcctgccgcggcaccggcacgggagcgtgctgccgcggttcgtgcctcggtgccccggcgtcgtcgtgcccggagtgctcctgcggctgcgtgtgctcctgctccaggtgcaaaggaggatgccgctgcccgtcctgtggtagtaatccctgctgtcccggtggatgcttgtgctagatcagagtattatattactactagctagtgtgtctgttgctcttcttttcctgttgtggatgatttggcgtttgatttggatggaacctcgctagtgcataatattcactgtcatgaattaactttgacgcccgtcgccactgcgccagctgcgtacgtaacggaaattgatttagatctaatttcaaaattaaacaataatctgaaaagattagtatcacgaaccttgtagaacagttagatgtcctcgtaatggcctcgtaatggtctagatgaatcaaaacactagtaacaattgaaaacaaccagaatcaagctaagaatgtaattggtcaacaaataaaaaggaa

SEQ ID NO: 94571 - DNA, 1400 bp, Zea Mays
atatcccagactctctctctctctctctcaggcacattcccctggctggacccgcgctagctcgcggccgcggcagctagatagtagtagctctccagcccatagcttaggtcggtcgccttgtttcgtagggtctggttcggccgttggtcgataagtcggcgggcgatgggggaagcgccgcagcccaagtcgccgccgaggtacccggacctgtgcggccgccgccgcctgcagctcgaggtgcagatcctcaaccgggaggtcggcttcctcgagcaagagatacagggactcgagcgcattcagcccgtctcgcgatgttgcaatgacgtcaacgagtttgtcagtgcaaagaccgacccaatgataccagtaagcaaaaggagacatggatcttgcagcttctcgcggtggatcagatcaaaattgcgcacatgcttttcatgcctgtgctgctggtgccactgcttgccgaagcccaatgcgccaagctgcttcagctgttcttgttgcacctgccgcgacacgcagtgctgtactccgatctgccgctgttcaaagaccccttcgtgcagccccggctgctgcacctgcagccttcccagctgcagctgcaagacgccaccaggctgcggccattgccgaccccagtgcagcagctgctgctctagtggttgcagctgcgcggactgcccgtgctcctgctcctgccccccgtgctgcagctgccccggcttcttctcctgtgaggggtgctcggctggctgcctcggcgctctcaaccggtgtctcggcggcctgtcgtcgtgctgcagtgagatgcgaccttcctgctgcaagtgccagtcgtcgtgctgcgaggggggttcgtcctgccgcggcaccggcacgggagcgtgctgccgcggttcgtgcctcggtgccccggcgtcgtcgtgcccggagtgctcctgcggctgcgtgtgctcctgctccaggtgcaaaggaggatgccgctgcccgtcctgtggtagtaatccctgctgtcccggtggatgcttgtgctagatcagagtattatattactactagctagtgtgtctgttgctcttcttttcctgttgtggatgatttggcgtttgatttggatggaacctcgctagtgcataatattcactgtcatgaattaactttgacgcccgtcgccactgcgccagctgcgtacgtaacggaaattgatttagatctaatttcaaaattaaacaataatctgaaaagattagtatcacgaaccttgtagaacagttagatgtcctcgtaatggcctcgtaatggtctagatgaatcaaaacactagtaacaattgaaaacaaccagaatcaagctaagaatgtaattggtcaacaaataaaaaggaa

SEQ ID NO: 94572 - DNA, 1207 bp, Zea Mays
gaaattaaccaccaaatcgagttgaccggcggaagaaagagttggcttccccgtcaagtcacaaccacccagagactcaccagtcaccaccccagggccagccgcacgtttagccgggctaaacaaacacgggcgcacaatcggaactcgctgcactgcttggaatccaacgagccaatcattcaaatcctcccgggaaccgcgttgagcagggcacggtcgattggatctagggtgagggtccgtcgccgaagaaactcgcaggcggtcacgaggaggcggcgggggagggcgggggagatggcctcggaggagatgacggcgacggaggtggctgcgctgctggacttgaagccgcacccggagggcggcttctacaccgagaccttccgcgacggctccatcacgctcaccacgtcccagctcccgccccactacaaggtaaaccgtgctgttagcaccgcaatctatttcctacttcccgcagggagtgtttcccgtctccaccgcattccctgtgctgaaacctggcacttctacaagggagagcctctcacggtcttcgagcttcacgacgacggtcacattgaccttactgtcattggcccacaccttgaggcaggccagcgcccccagtataccgtgccaccgaacgtgtggtttgggtcgttccccacactagacgtcgagtcgttcgcatctgatggcagcgttcttgtcaagtctcggaagagggaccctgagctgcattactcccttgttggctgcacctgtgcccctggcttccagtacgaggattttgaaatggccaaatttgaggacgtgagatccatcgctcccaaggctgaacctttcctcaagtttcttattccctctaccgattaactccagagcagcctcagatgattgtggatgggttctcagcgactttctatactgcatactgtacggatggtgtttctagtgtgattccatgagagttctgctttcacgacagtgtagacagtaaactgtacctttgtggtggcaccggttgaaacgtttggtgcattgaaacagaataacagctggtcttgatgttgaatagcaggtgcttttgcaaaaccctgaaaccgtactaggatgctgggagcataggaggatctgataaggtttcacgtgattaaattcaaccgttcatggctctcgatcgtgcagagcttctccc

SEQ ID NO: 94573 - DNA, 747 bp, Zea Mays
atgcagacaggcagtaagctaattgttccagaccagtatgacgctgttatatcggcagaacttccagataagaacagattcccagaactttttgatatggtagtcaaacacatgatgcatggcccatgcggacatctcaacatgcaaaatacatgtatgaagaatggtagttgcaagtgtcactatccacgactatttggtgagacaacgcttcagggcaaagactcgtaccccatttacagaagaagagatgacggacaaaaagtacgagtaagggggcatgacttggacaaccgttgggttgttccttataatcctactttattgaggatgtatgactgccacattaatgtggaggtttgctcaagcattaaggctgtgaagtatatatacaagtacattcataagggtcatgatagggcatctgtcactgtgatcgacgttgatggtggtcaaagtattaacgagattgagaacttcagagatgccagatgggtatcaccacaagaggctttatggagaatatatagtttcgatctgcatggtatatctcccccagttctgcaactacagctccacttgcctggcatgcatcttgttagttacaatataaatgatgatatgcgtcaggtcttaaacaaggataacattgacaaatcgatgttaactgagtactttagagcaaatcagttgtttgattgggcatcaaactacttatatagggagttccccgaggtggcaaggtgg

SEQ ID NO: 94574 - DNA, 1285 bp, Zea Mays
cgcctcgccgatgccgtgagagggatactctcggagttcgagaacgccgtgctccgcgacccgcccaagaccgcggtgcctggcggtaccatccacccgctcactcgctagcgctcgtctttctgctgagggcaatgagctcgcgccgtccttggccgacctcgagctccctgagcttgagaaccagttaccgcttgcctctcacattgtctggatcattgttgttcttgaacacaacctggagggcaaggcggcactctacaaggatccagctctctcgcatctgttcatgatgaacaatgttcactacattgtccacaaggttaaagattcgccagatctctggagcatgatcggtgataattacttgaaacggcttactaccaagttcacaatggcggccacaaactaccagcgcacctcatggttgaagatcttgaattgtttgcgtgatgaggggctccatgtaagtggtggcttttcgtcggggatatccaagtcggcactgcgggagcggttcaagtccttcaatgctgcatttgaggatgcgcatagggtgcagtcagggtggtgtgtgccagacaaccagctgagggaggagctcaggatctcaattgctgagaagctgctgccagcataccggtcattccttggcagatttcgacatcatatagagaacgggaagcatccagagctctacattaagttctccgttgaggaccttgagatagctgtgagcgatttctttgaaggtgttcctccttccccacataacaggaggaaatcacatggatgagggacttttacctcaggtattcaactggctgatgttgctatttattcttttattcttcacaaagaagctggttctggtatttgggctcgatttcttctgtcctgatagatgtgagtataaatttggtggtcttcaatcagagatggcaaatatgaatacattttgggatctttctgaagctgtcaatcggcccagtgatccctactctgtaagagaaggtgttcatttggtacactataattatataaattttgcaagtagcatgtccatatagaaaattctttcagcaacgttggatagttggaacccatggcatttttgcccctgttttgcaccagcttctgttacccttttcattgttaacaattatcaaatgggtctacgctttgtggattagatgtaaaaagatttctacgactctcatgtaccacatatttttgtaatatgataatatcacgctgttgcaaattcaaaagaaaacttcaagtc

SEQ ID NO: 94575 - DNA, 2747 bp, Zea Mays
ggataaaagaaaaggaaaaattggaaatgtcgtgggttcgtagctctcgcttcctggtcgtcgcgagtccaaacaaaaagaagttcacaatcaccgcgagcacgcagaaatgaacggaggcttgcgcttgcctgtatcgcgcgaccggagctgagcagcagcacagagtggagccagctcgcttcgcctcctcggtcgcctccacttctatatcacttccccgtctggccccttccccgtgcgccaccgcgcacaatcacacgcgcgcgcccacacgtgcggcttcccggattcgcgccgccgcgccagagccagccaggccagcttcggatcgaggaagaggaggtggcgaaggtgaggagtcaacccagcttccgagccatggacggatcggccgcggagctggaggcggcggagcgggtggtgatgcggtgggactcatcctcggcgggcgccggcgcggacgagccgatgctgttcgacggcggcggggaccgggccgaggcggacaggttcctccgcgccgtcgacgatctgcgtcggctcgcgccgccgtcgcccgcggcagtcggcagcccgcgccgcctctcgtcgtcctcggtggcggcgagcggcgccgtgcaggtcgctatggcgcggctcgaggacgagttccgccacgtgctgtcgacgcgcgccctcgacctcgagatcgaggcgctcgccgacctcagctcgctctccatcaacagtgaccgcaccaactcggcctcctccgccgacctccccgccgctgacgaggacgactccgtgtcctcctccatcggccgccgcagcaccgcctaccgctcgctccggagcatccgcgagatcgacctgctacccgacgacgccgtcgcggacctccgcgccatcgcgtcccgcatggccgccgccgggtacggccgcgagtgcgcgcaggtgtacgcctccgtccgcaagcccgccgtcgacgcctccctgcgccggctcggtgtcgagcgcctcagcatcggcgacgtccagcgcctcgagtgggacgcgctcgaggccaagatccgccgatggatccgcgccgcccgcgccgccgtccgcggcgtctttgccagcgagcgccgcctctgcttccacatcttccacgaccttcctatctccaccaccaccatctccgccgcctcagcgtccgccacgcacgacatccctttcgccgaagccgtcaagggcgccgcgctgcagctcttcggcttcaccgaggccatcagcatcggtcgccgctcccctgagaagctcttcaagatcatagacctccacgacgcgctctcggacctcctccccgacgtctccgacatcttcgccgcctccaaggtcgcggagtccatatacgtgcaggccgttgagatccggtctcgcctcgccgatgccgtgagagggatactctcggagttcgagaacgccgtgctccgcgacccgcccaagaccgcggtgcctggcggtaccatccacccgctcactcggtatgtgatgaactatagcagcctcatttgcgactacaaggtcacgctctccgagctgatcatatcacgtccatcagctagcgctcgtctttctgctgagggcaatgagctcgcgccgtccttggccgacctcgagctccctgagcttgagaaccagttaccgcttgcctctcacattgtctggatcattgttgttcttgaacacaacctggagggcaaggcggcactctacaaggatccagctctctcgcatctgttcatgatgaacaatgttcactacattgtccacaaggttaaagattcgccagatctctggagcatgatcggtgataattacttgaaacggcttactaccaagttcacaatggcggccacaaactaccagcgcacctcatggttgaagatcttgaattgtttgcgtgatgaggggctccatgtaagtggtggcttttcgtcggggatatccaagtcggcactgcgggagcggttcaagtccttcaatgctgcatttgaggatgcgcatagggtgcagtcagggtggtgtgtgccagacaaccagctgagggaggagctcaggatctcaattgctgagaagctgctgccagcataccggtcattccttggcagatttcgacatcatatagagaacgggaagcatccagagctctacattaagttctccgttgaggaccttgagatagctgtgagcgatttctttgaaggtgttcctccttccccacataacaggaggaaatcacatggatgagggacttttacctcaggtattcaactggctgatgttgctatttattcttttattcttcacaaagaagctggttctggtatttgggctcgatttcttctgtcctgatagatgtgagtataaatttggtggtcttcaatcagagatggcaaatatgaatacattttgggatctttctgaagctgtcaatcggcccagtgatccctactctgtaagagaaggtgttcatttggtacactataattatataaattttgcaagtagcatgtccatatagaaaattctttcagcaacgttggatagttggaacccatggcatttttgcccctgttttgcaccagcttctgttacccttttcattgttaacaattatcaaatgggtctacgctttgtggattagatgtaaaaagatttctacgactctcatgtaccacatatttttgtaatatgataatatcacgctgttgcaaatt

SEQ ID NO: 94576 - DNA, 1341 bp, Zea Mays
acccgacacgcgggtttctctcgttggccccctcacgtccgtgcccaccaccatcgctcgtcggcgtcgtccccctctttctctctcctgtgccccggccaagaaggcaaggctgcctgcctactggttggacctggacgaaggaggacgagaggctcgctcgtcgctggcgcctggcggttggtacgtgcgcgcgcgatggacaggggaacggtggaggacctcatacggcggttgctggacgggaagaagcacaaggcgacggggaagaaggtgcagctgaccgagaccgagatccggcacctctgcgtcaccgccaaggagatcttcctctcccagcccaacctcctcgagctggtggcccccatcaacgtctgcggtgacatccacgggcagttctcggacctgctgcggctcttcgagtacggcggcctgccgccgacggccaactatctcttcctcggcgactacgtggaccgcggcaagcagagcatcgagaccatctgcctgctgctggcgtacaagatccggtacccggacaacttcttcctgctccggggcaaccacgagtgcgcctccatcaaccgcatctacggcttctacgacgagtgcaagcgccgcttcagcgtccgcctctggaagatcttcaccgactgcttcaactgcctgcccgtcgccgccgtcatcgatgacaagatactatgcatgcacggcgggctctccccggacctggacaacctcaaccggatcagggagatccagcgccccgtcgacgtccccgaccagggcctcctctgcgacctcctgtggtccgacccggaccgcgacagctccggatggggcgacaacgaccgcggcgtctccttcaccttcggcgccgacaaggtcaccgagttcttaaacaagcacgacctcgaccttgtctgccgcgcccaccaggtcgtggaggacggctacgagttcttcgccgaccggcagctggtgaccatattctcggcgcccaactactgcggcgagttcaacaacgccggcgcgctgatgaacgtcgacgccagcctgctctgctcgttccagatcctcaagccgtacaggggcaaagcacaaacggagtgacgacgacaggctgcgaccgagacacaggaaggagacgtcgattagaggcttcgtttaggttgcaaggagagtatgcctgcgcgtcttgcattcctctcgcaattttttttttgctccccctccgagagctgtcgatcaagtccgcagttcttctgaatcttttgcatgtatgtaactgattcaatacgtgagtgtctgtatatataaaagactatagtttctaaactg

SEQ ID NO: 94577 - DNA, 1461 bp, Zea Mays
acccgacacgcgggtttctctcgttggccccctcacgtccgtgcccaccaccatcgctcgtcggcgtcgtccccctctttctctctcctgtgccccggccaagaaggcaaggctgcctgcctactggttggacctggacgaaggaggacgagaggctcgctcgtcgctggcgcctggcggttggtacgtgcgcgcgcgatggacaggggaacggtggaggacctcatacggcggttgctggacgggaagaagcacaaggcgacggggaagaaggtgcagctgaccgagaccgagatccggcacctctgcgtcaccgccaaggagatcttcctctcccagcccaacctcctcgagctggtggcccccatcaacgtctgcggtgacatccacgggcagttctcggacctgctgcggctcttcgagtacggcggcctgccgccgacggccaactatctcttcctcggcgactacgtggaccgcggcaagcagagcatcgagaccatctgcctgctgctggcgtacaagatccggtacccggacaacttcttcctgctccggggcaaccacgagtgcgcctccatcaaccgcatctacggcttctacgacgagtgcaagcgccgcttcagcgtccgcctctggaagatcttcaccgactgcttcaactgcctgcccgtcgccgccgtcatcgatgacaagatactatgcatgcacggcgggctctccccggacctggacaacctcaaccggatcagggagatccagcgccccgtcgacgtccccgaccagggcctcctctgcgacctcctgtggtccgacccggaccgcgacagctccggatggggcgacaacgaccgcggcgtctccttcaccttcggcgccgacaaggtcaccgagttcttaaacaagcacgacctcgaccttgtctgccgcgcccaccaggcaagcctccctgttcctgtgtcctgcactcctgcttgcccatgtgcttccacaaccagcctgacagatcgactcacagttcatttcttgccatggcaaattggcaatgccattgtgccaacaacaggtcgtggaggacggctacgagttcttcgccgaccggcagctggtgaccatattctcggcgcccaactactgcggcgagttcaacaacgccggcgcgctgatgaacgtcgacgccagcctgctctgctcgttccagatcctcaagccgtacaggggcaaagcacaaacggagtgacgacgacaggctgcgaccgagacacaggaaggagacgtcgattagaggcttcgtttaggttgcaaggagagtatgcctgcgcgtcttgcattcctctcgcaattttttttttgctccccctccgagagctgtcgatcaagtccgcagttcttctgaatcttttgcatgtatgtaactgattcaatacgtgagtgtctgtatatataaaagactatagtttc

SEQ ID NO: 94578 - DNA, 3589 bp, Zea Mays
gctttcgcatcgtcctcttggctggaagcgtccgcggctcggcgcaccgaatcccaaccaccggtagtgccgcatatacatcgccctgccgctcggcccggctcgcgacaagcaagctgatcacctgagcaagctcggtgaggccaagcagagcggcgctccagttccagccaggccccggagatatgcagatgcggcggtgagggccgggccggcagcagtggtgcctagctagaagcgtacgtaggggcgggcccagccatgtgggcgccgtcgcgggggtcgtcgtcggggagcgggcgaaggacctggcgccggcgcatcgcggactacctcgccgacgaccagaccgacgtgtcggacaatgagtccttcatcacggcgcacagcgacgagcacgccgccccggcgtccggcgccgggggaatgctgccggcgttcctcgcggaccagggcgacctcgtggaggtgatgctggagctggacgaggagtccatggtggtgcgcagcgtcacgcccaccgccgccgcgctgtgcgggcccacgtcgctgcccctgcccggcgcgcggagcctgagccggtgctcgtccacgtcgtcgcggattcgccggaagttcgcgtggctgcggtcgccgtcgccgcgccccccggccgcgaccgcggcgtccgaccagcaggtggtggtgcgggaggcggcgctggcggcccgcgagcggcgccgcgcccaggcccgcctggaccggtcgcggtccggggccaggcgcgcgctcaagggcctccggttcatcagccgcaccacgggctcctccgacgccgacgccggcgccggcgccgggctctggcgcggcgtggaggagcgcttcaacgcgctcgcgaccgacggcctcctcgcccgcgacgacttcggcgactgcatcggtacgtacgttcgtccgaacaaacaaacaaagcagcctccgtacgtctgttgctacgggagccatgaacgacgacatcgacgccgatcgtccgttgcagggatggtggactccaaggagttcgccgtgggcatcttcgacgcgctggcgcggcggcggcgccagaacctggagcggatcagcaaggacgagctctacgagttctggctgcaaatctccgaccagagcttcgacgcgcgcctccaaatcttcttcgacatggtggacaccaacgtggacggtaggatcacgagggaggaagtgcaagagctgatcgttctgagcgcgtcggcgaacaagctgtcaaaactcaaggagcaggctgaggagtacgcgtccctgatcatggaggagctcgatccggagaaccttggctacatagagctgtggcagctggaggcgctgctcctgcagcgcgacgcgtacatgacctacagccggccgatgagcagcggcagcgcggcgcagtggagccagggcctgagcggcggcgcgggcgcgggcgggcagccgtcggcgcagcagcagcagggcgtcgcgtcgcggtggcggcggtggagcccgcgtcgcgcggcggcgcgggcgcgcgtggcggcggcggagagctggcggcgcgcgtgggtgctggcgctgtgggtcgcggccatggcggcgctgttcgcgtggcggttcgtgcagtaccggcggtcggcggcgttccgggtgatggggtactgcctccccacggccaagggcgccgccgagacgctcaagctcaacatggcgctcgtgctcctccccgtgtgccgcaacacgctgacgtggctccgctccacctgggcgcgcttcttcgtccccttcgacgacagcatcgccttccacaagatcatcgcgacggcgatcgcgctgggcatctgcctgcacgcggggaaccacctggcgtgcgacttcccgcggctgatcgcgtcggcgcccgaggagtaccgtctggtggcgcgcttcttcgggcgggacaggcccagctaccgcgggctcctggcgggcgcggagggcgtgacggggatcgtcatggtcacgctcatggccgtgtccttcaccctggccacgcggccgttccggaagcgggaggaggccagcagggacaagaagaaggcggcggcctgcgcatgcaggggcgtcccgctcgccggcttcaacgccttctggtactcgcaccacctgctcatcgtcgtctacctcctgctcctcgtccacggctggttcatgttcctcgtcgacaagtggtaccagaggacgacgtggatgtacatttctgtgccgctggcgctttacgtcggggaacggacgctacgggccttccgatccaaggcctacgcagtcaagattctcaaggtgtgcctcctgccggggaacgtcctgaccgttaccatgtcgaagccctacgggttccgctacaggagcgggcagtacatattcctccagtgtccaacaatctccccgttcgagtggcaccctttctccatcacctcagctcccggagacgactgcgtcagcgtccacgtccagaccaggggcgactggacacaggagctcaagcgcatcttcgtcgagaactacttcacgccgtgcgtgcccagacgggctgccttcggggacctaggcgcggtggaccacaagaccaagagcccgccgaggttgctggtcgacggcccctacggcgcccccgcgcaggacttcaggaactacgacgtgctgctcctcgtcggcctcgggatcggcgccacgcccttcatcagcatcctcagagacctcctcaacaacatcaagctggccgacgagctcatggacctggcaatggagaccggccgggccgaggacagcgccagcaacctgagcgcgtcgacggcgagcggcggcggcaacaagaggagggcgtaccgaacgacctgcgcccacttctactgggtcacgagggagcctgggtcgttcgagtggttcaagggggtgatgaacgaggtcgccgagatggacaataagggtgtcattgagctgcacaactacctgacaagcgtgtacgaggagcgagacgcgaggacgactctgctgtccatggtgcaggccctcaaccacgccaagcatggcgtcgacattgtgtcagggacaagggtcaggacacattttgcaaggcctaactggaaagaagtatttacgaggatagcgtccaagcacccaaattctacagtcggggtattttactgtgggagacctacacttgccaaagaactgaagaaactgtcacttgacatgagccacagaacgggaacccgatttgatttccacaaggagtacttctgatggaaaatacaagtgcccctgatttcttttagtactagaagatacagataaaaaaattcacaaattttgcgtagaagcgaactgatcctctttcacagtatgtaaatgtacatggtataaagcagagagtagttagaaacgtttttttttctttcttaaccaaatgggagggtgaaaatatgtcctgcgctttcagacagccattggttactgcagatataactgtatagatcatatcattgtatgctaagcatgcaagagacttgaggccaacaatctgaatgcgtatcactcaatt

SEQ ID NO: 94579 - DNA, 116 bp, Zea Mays
tatagtaataactctcgcatatataagcaccggccgttaaccattacatgtggccgtctggttggcacgcctgctcagctggccatacgtatcctaaaccaaaaaagaaaaaaaaa

SEQ ID NO: 94580 - DNA, 702 bp, Zea Mays
atgctgccacagacacacgcgcacaacattcagaagaacgcaaacatgccctctgctagctcggttgttgcttattggcgattgatctgttctaactcagcggtccaacgagctgatcaccaccctgtcgtagacggtggggctcctgggcccgacggccggctccggcccgtcggagaccttggttttccggcggaacctcctccagacgtccgccttgggcggggtagctgcggcgagcggcgagtcgggcgtgctggccggggaggacgggacggaggaggagctgtaggactcgacggagagcgacggcgggcgggcgatggtgatgctgcgcgtcaccgccggcgccggcgccggcgcgggagccaggatggacgacgacgaggaggaggagggggagaaggaggagtacttgcggagcttgccgaggccggagtccggtcgcgggccggccaccgtctcgtcccagagctgatcgaggaggcccattccggccaccaccagacccggacggacgcgattggttggctggcccctgcgtgccttggacgacgtatgcgctgcgcgcgcgtcgcgttgtcttgtcacgtcgcggcgagtgagggacggacgagagagaagagaagacgggcttgggttggcccggctgccgtgccgtgccgtgcctggatctggagcagttgtgggtggggcggatga

SEQ ID NO: 94581 - DNA, 1065 bp, Zea Mays
ctcatctcagctcaggcattggcttggctgactaagcgaatgacgagaaagagactggttgctgctggtcatatcatgcgtacccttgggccttggataagaggtacccagttgcagagctgcggcgtcaacattgtacaactgatgaatgaagaatgaaatactgacctggaccatcgctcttcgtaatccgttattcagtacgagtaagtatattaaaagtcgaactcgagttgaacaacaattcagggagggaacacagggcgtgtttgcgagactgcttggccagctcggctcgttcaactagttcaggctgaggctagcctgtctcagctactgcaacttattttgtttgcgcacttataccatacgagcctggctcagacgagctggtgtttgtcacccagtatacagccgggctagaagactaaaactacctaaacatgaaatacttgcgccacgagcagccaggctcccagaaaacagaccctgatctcgttcctgtggagccaggctgagaggctaaatttgtacacgcacagctagactcccaagcaggccaggcgacacaaacacgggagctgcagcccgagagcgcagccagactgctgggccatggcggcaaacacatccacaaccgctgcagttggaacgcaaaaggtttccaggcgagcagaagaaaatgcacagctacatcgtagcatcacacacacacaaaacactgctactactaccagtacgaggtggtgcttgggataattacagaggggaggagtacttgcggagcttgccgaggccggagtccggtcgcgggccggccaccgtctcgtcccagagctgatcgaggaggcccattccggccaccaccagacccggacggacgcgattggttggctggcccctgcgtgccttggacgacgtatgcgctgcgcgcgcgtcgcgttgtcttgtcacgtcgcggcgagtgagggacggacgagagagaagagaagacgggcttgggttggcccggctgccgtgccgtgccgtgcctggatctggagcagttgtgggtggggcggatga

SEQ ID NO: 94582 - DNA, 956 bp, Zea Mays
cctgccacactcggcgccgcgcctataagtagcgcgcatgcgccggcgcagcactgcacccacggctcgagctcgcagcgacaggcacaggcagcaaggctggtttccttcctcgtcgaacgtctgccgctgctcgcgatggccggacgcggaggaggtagcaagagtagcctgtacgcggcgctgggcgtggccagcgactgctccgacgccgagctgcgcagcgcctaccgcaagctcgccatgaaatggcacccggacaagtgcgccggcgcagggagctccggcggcggcgcggacgccgccaaggccaggttccagaagatccagggagcgtacgccgtcctgtcggaccccaacaagcggatcctgtatgacgtcggggcctacgacggcgaaggcgacgatgacggcgccggggagatcctcggagacattctcgaggccatgagccaggcaggccctgccgccgacaacggcaagggggagagcctggaggacctgcagcggcagttcgaggagctgttcctgaggccgtcgccgtcgtccttctcgccgaacgacgcagctgggaagtcggcttccaagagtaggcctgctgggaggaaatagacaggacactgcggcgaataggtcggtccagctactcctgttccagataagctacgacctacgaggtaccgatacctggccaggagcccaggacagcgacctgcgacggcgacgaggctgccagtgctgcacgctcaagtacatgctccgagttgtagctactactgtagatcggcacggcagtcgccagaatggtaccataaggcggccgtacgcacacacgcatgaacgctgtttttaccatctcaggttcgctgcaaaatttccagcgtgttctctgtaaaatccctgcatgattgctataaagaaattcttcgtgggtactaataaatggagtgctcagt

SEQ ID NO: 94583 - DNA, 1087 bp, Zea Mays
cctgccacactcggcgccgcgcctataagtagcgcgcatgcgccggcgcagcactgcacccacggctcgagctcgcagcgacaggcacaggcagcaaggctggtttccttcctcgtcgaacgtctgccgctgctcgcgatggccggacgcggaggaggtagcaagagtagcctgtacgcggcgctgggcgtggccagcgactgctccgacgccgagctgcgcagcgcctaccgcaagctcgccatggtcggtgacggtgacctcgccacccctgattctgttactgactgcttcccctgtccgccggttgctctgtttcggtcgtaaacccgacgacccggctgctctgctgagtgctgactggtgttgttaccgccccgtgctggtgggcagaaatggcacccggacaagtgcgccggcgcagggagctccggcggcggcgcggacgccgccaaggccaggttccagaagatccagggagcgtacgccgtcctgtcggaccccaacaagcggatcctgtatgacgtcggggcctacgacggcgaaggcgacgatgacggcgccggggagatcctcggagacattctcgaggccatgagccaggcaggccctgccgccgacaacggcaagggggagagcctggaggacctgcagcggcagttcgaggagctgttcctgaggccgtcgccgtcgtccttctcgccgcagaacgacgcagctgggaagtcggcttccaagagtaggcctgctgggaggaaatagacaggacactgcggcgaataggtcggtccagctactcctgttccagataagctacgacctacgaggtaccgatacctggccaggagcccaggacagcgacctgcgacggcgacgaggctgccagtgctgcacgctcaagtacatgctccgagttgtagctactactgtagatcggcacggcagtcgccagaatggtaccataaggcggccgtacgcacacacgcatgaacgctgtttttaccatctcaggttcgctgcaaaatttccagcgtgttctctgtaaaatccctgcatgattgctataaagaaattcttcgtgggtact

SEQ ID NO: 94584 - DNA, 1290 bp, Zea Mays
cctgccacactcggcgccgcgcctataagtagcgcgcatgcgccggcgcagcactgcacccacggctcgagctcgcagcgacaggcacaggcagcaaggctggtttccttcctcgtcgaacgtctgccgctgctcgcgatggccggacgcggaggaggtagcaagagtagcctgtacgcggcgctgggcgtggccagcgactgctccgacgccgagctgcgcagcgcctaccgcaagctcgccatgaaatggcacccggacaagtgcgccggcgcagggagctccggcggcggcgcggacgccgccaaggccaggttccagaagatccagggagcgtacgccggtaactaatccgctttccattttgaatcatactcgactctacgcgttacttttgcttgtaggttgggtagctctttttaagagaattgtcatgtatgtacgtacacgtagtcgtcggccaagtatattttgcagcttgcacttatttggtgatgtggtttttaactgacctggccagtcctgtcggaccccaacaagcggatcctgtatgacgtcggggcctacgacggcgaaggcgacgatgacgtacgtacgttgtacggcatgcgcatttgcatctgcattttcccagtttggcaggagagtgtttgtttaattttccacgtgtggcagggcgccggggagatcctcggagacattctcgaggccatgagccaggcaggccctgccgccgtaagaactcagtcagcagccgttatcgaaacgatctatcctccacacagaactaatcttgacgacgtgcacatttcgctcacgcgcaggacaacggcaagggggagagcctggaggacctgcagcggcagttcgaggagctgttcctgaggccgtcgccgtcgtccttctcgccgaacgacgcagctgggaagtcggcttccaagagtaggcctgctgggaggaaatagacaggacactgcggcgaataggtcggtccagctactcctgttccagataagctacgacctacgaggtaccgatacctggccaggagcccaggacagcgacctgcgacggcgacgaggctgccagtgctgcacgctcaagtacatgctccgagttgtagctactactgtagatcggcacggcagtcgccagaatggtaccataaggcggccgtacgcacacacgcatgaacgctgtttttaccatctcaggttcgctgcaaaatttccagcgtgttctctgtaaaatccctgcatgattgctataaagaaattcttcgtgggtact

SEQ ID NO: 94585 - DNA, 1059 bp, Zea Mays
aaaggaacggactctttattattattaaagcaaccaattaatataagtttttgcattgaaatgtacatttgtggacaccgacgtcgtccaggctccagaaaatcttaaagacaaaaggaaattccagatgggaatgtctattacacacgaccgaggtaattattaattcgataaaatggaatgaaaaaaataatgcaaaaaatgtctgttacacgaccgaccgaccgaccgaagaaattagaggaaatggaacggaatccagtcgagacgacggagagacgaaagagcagcggcggccttgggctgcatctgcatgcaatgcatagacggtggtaaactacaagcaatcacaatcaaattaacagcgacggatccaagtaaatctgcagtggcctcttggattagcaccgacgccgccgccgccacgacgatccttctacacccctagggaccgagacgcgcagaatcatcgggtttaccgcggctatgatgagcagcgcttcagcaacacgcgtagtagtcgacgagctcgtcgagggactccggcggcgggtccgcgttctccagcatccacagcaggtgctcgaacagcacgacctcgcagccgaccaccacggtgcccgccgccgctcccccgccgctgcggtccacgagggtccggaacagcgggtggcccacgagctcctcggcgatcaggtaccggcgccgcgacttgcccacgtacaccgggtgcaggcccttgggcacctcgtccgcgccgtggaacgacgacgccccgccgccgctggagacggcgacgacggcgccgtcgtcgtcgtcgccgtggctggccgccggcggcgcgcgcgcgatgcggctcgacgagtgccacctccttatcatgcaccgcagcttgcccagcccgcccttcgccattggctagctgctactatcctcctccgcagcgcctctttctctttggatgggacgcggtcgtggtagccaacgacccacccacgaaattcacagagagggtttagcgagaggactcgggagcgcggttctcatgattgggaaggc

SEQ ID NO: 94586 - DNA, 1027 bp, Zea Mays
gtcagctttggaatgaagcgtgccattgataatatactaaaatgagttgatcagtgaaattctttgacatctagccgagaatttttgtttggttatcaataattcactctcattcatgtgagatattgtgctctgcttatttattgatagctgacactggtcacccaggagcacgagatgagcgcgttgatgtacttagtactgtgaaatcaaactggaggaggctgcaattctgcattacacctacaaaaaattctcaaacctaacctcaagaagggatagatgtggctgcaaaccaactaaagaagatgtgaagcaatgttttatcttggaatttgaccgtttggtaccgggaacatgttgcatggaccgatagagacaccaacttgaaacttttaaggaaggatgtattaacacatatatatgtgcccatggcattcatcggtggcctcaaggaatccgacgtctatcaatgcaataacatcagcgaaagcacaataaaaaacaaagtcatcaaacatgggtctcggaaacaaggaccacatccggctaaactgaactgctggtcagtccaaattggaaggcggtcacgggaaggtgcaggtaagcgtcagaaagatcctagaaatggttgatgcccaggaaggagcagcgaggccgccaatgtcgcccccaggttttcttgagctggctgaaagcaccactgccttttcatgacattatgtgaggcattgtttgagtattgactgaggttggtttaaccatgcgtgatacatgcagccttgagcatacagtgagtcactcaacaactttggcgaaagcccagatgttttcttgcagtttttgaaaaatattccgcgccctgatttcatgattgtgtgccatcgcaacacacgggcaactggctattatatatataagttatcatggtattatatggtcccgttgcaacgcacgggcactcacctagttattttatatgtgtatagtaggatttaggagatgatttaggacttgtttggttatt

SEQ ID NO: 94587 - DNA, 821 bp, Zea Mays
caggccatagaaatttggaacatcatctcaaatggtggttacttgtatatttgcggtgatgccaagggaatggctagagatgtacacaaaatgcttcatacaatagtccaagagcagagatctttggatagctccaaaaccgagagctatgtaaagagcatgcagatggaaggcaggtacctccgtgatgtatggtgacacatcacctcaaataagccatagctctagcgtgtggaagtaaagctggctttgcgtgtatgacatgtctaatgccaacctaattgtcagctttggaatgaagcgtgccattgataatatactaaaatgagttgatcagtgaaattctttgacatctagccgagaatttttgtttggttatcaataattcactctcattcatgtgagatattgtgctctgcttatttattgatagctgacactggtcacccaggagcacgagatgagcgcgttgatgtacttagtactgtgaaatcaaactggaggaggctgcaattctgcattacacctacaaaaaattctcaaacctaacctcaagaagggatagatgtggctgcaaaccaactaaagaagatgtgaagcaatgttttatcttggaatttgaccgtttggtgagctagcttttctttcttttgttgtatctgcatatcatctattttttcatgtggatacaggaaactgtcacgagtggagccaatttcatttttttatagtgtgcatgtagtatattttttaactgtaagtggatgactggttgtagctattgcgtgccttatacaaaacacagaaatgtttcgcatggt

SEQ ID NO: 94588 - DNA, 805 bp, Zea Mays
ttcctcgttattccatcaccagttcaccaccgtcttcctcaactcttcctctcctctctcttctgcaccatctggtgtgtgtgcgcgttactcgccgcgtcgatcgaagaaagaggcgcacgggagcgagctacgcgaagcaaggcaatggcgaagggcgggctgtccaagcttcggtgcatgatcaagaggtggcactcgtccagccgcatcgcccgcgcgccgccgtctcccggccccggtgaggacgaccgctgcgccgcgcgcggcgcgtcgttccacggcgcggacgaggtgcccgagggcctgcacccggtgtacgtcggcaagtcgcgccgccggtacctcgtcgccgaggagctggtgggccacccgctgttccagaccctcttcgaccgcatcggcggcggcggcaccggggcagcggcggcgggtaccgtcgtcggctgcgaggtcgtgctgttcgagcacctgctgtggatgctggagaacgcggacccgccgccggagtccctcgacgagctcgtcgagtactacgcgtgctgagacagagtcatagagcctcgccccacgccgccagctcggccgtgacgcagcgcggcccgacggtggtggaagtggaatggaagctagcttagcacggagctgctgtatcatttcgttcggcattcttgtgtgtatgtagggtagggtagatttgtgataaatggcaaatgcggggggctaaaacgcccgattgattcgcttcgctaatgtatcctcggtgtcgacgctaatttgctaatggaaaataatttgcggctac

SEQ ID NO: 94589 - DNA, 1068 bp, Zea Mays
ttctccccccatcttcttcttcttcttcttccattcttccttcctcccctgttcttgtacttgaattcggcgcgcgtctggtgtgttagccaggcctcgccccatccgaagtccgaccgaaggagggagagagagagaggcaacaatggcgaagggcgggctgagcaagctccggtgcatgatcaagaggtggcactcgtcgagccgcatcgtctcccgcgccccgtcgccatcatcagcccacgacggcgccacctccggcgacgcgcactgcgcctcgttccacggcgcggacgaggtgcccaagggcctccacccggtctacgtcggcaagtcgcgccgccggtacctcgtcgccgaggagctcgtgggccacccgctattccagaccctcgtccaccgcaccggcggcaccaccgggggagcggcagcaggcaccgtcgtcggctgcgaggtcgtcctcttcgagcacctcctctggatgctggagaacgccgacccgcagccggagtccctcgacgagctggtcgactactacgcttgctgagtcagtgctgactgctccgacttggaagcctcccgaatcctccaagccgcgcgcgggggtaaatcatgcatccttcagttctgatgttttaagtagggggagagtagaggaaccgatgttgcagctcatggacgacgacgctgctcttttggctccgttgatttggttcgattgacatgagttactagtatagttttgttttatcttcgctacttcgtcataataaagagtctggacgagtgcttctatgttcgttgaaatgcaaaaaaaaaattctgtcaattcaactcttctgtacgatacatcgttctactactcgcattcttgtttctatacagcactcttgtttcccggggaggcgagagagaggcgagagagagggggccaccggcagcggtgtgagggagggcagcggcggagcgaggggagatgaggcggcggtgggtcgcaaggaggcaggggttactgtacgtgacagatagaagaaaatgatctaaataatattgattattacatttaaa

SEQ ID NO: 94590 - DNA, 1372 bp, Zea Mays
gccagttgtagggaagggccaagggaaacttcaagatagtatggcgaagaactatcgagagcgccgcttaaagagggtgatgaagatagatgagggagaggacgactttgaagctgattaccaagcattctctaagaagtacgatgagaaggatgagtgccactataagttcatggctttattaccattcaagaatggtcttcctaatgtctcaccgccaacaaaagagaaagttggacttcattttgccatgaaagatgttgtgattagtcaaaaaccaaccaccaccaatgaaggtatcattgtaaggccgaagtgcaagcgaaagaccccatataggggcatccgccgacgcccttggggaaaatgggctgcagaaatccgcgatcctacaaaaggtgttcgtgtttggttaggcacgtataaaacaccagaagatgcagctagagcatatgacgctgaggcccgcaagattaggggcaataaagcaaaggtgaatttccctaatgaaccaccaaacatggtgagcaattcaccaaaactaattgttactgcaatgactacaatggctatcccagcagacaagttgaatgccaatgaattgatgtgccataaaaactactcaaatgaggattttttctcaatggtgaactttagtggaaacaatggtaactttatttctactgcggcctttggcttacaatgtatcaaaaagcctcgtgttccttatggcatcccaaggattggtgagtgttcaaatcaaaatagaatgacatatggtttaagtaatggattgggcaatgaagctagtaggaacctgaatggatgctctttcttaccacaagctggcatgccaattttcattcaacctacttttgatggcccttcaaggatgataggaagaaatgatggcgtgattgttcctactttgactaatgcaacacccatggctggtgttgatgctgcgaaaaagatgaatcaagagcctattttccaagagatggaaagtgaagatattccttctattttgcaaggtgatgtcagtgaggacgtggcagctgagattagtatgtgggagttttatgacaacctattagataataaggaaaattgatggatcttgacatcatgcatggtccatatggcttctttcttgatgatactagcaagtggttcgaagcatgcatgatggggatggggatgtagtcgcaaatggcatattcattttataatgtcaagtaaatgcagccgtgttatccatgtgtatcagtttggactgtttatttatgctttgttgtaagcttacaggcaacggaacctgattgacattgtgggtgttattgtaatgtaatgataattttcaagccttact

SEQ ID NO: 94591 - DNA, 571 bp, Zea Mays
atggatgggaacaaagatctagctcagagggagaggatttcgaggataggatcgcgcctacaacgatggggcacagggggacaagttatggtggaggaggaacgaaccgtggatggaagtgcaccgtggttgcagacgcggtttgcggatctgccgagctggcgcggagggagaggatttcaccgtggatggaagggtgctgtggggcaggcacgatttgcggataatcccgagcggactgccttgcacggaggaagggggagatctgcttgcatgctctcatggatggaagggggccctgcatgtgcggggcgaggtgctccatcgttggaagggccccctgcctgtgcggggcgagccatggatggaagagccccctgcttgtgcttgtggacaacttggacgccgaggagttggaagcagatggttgaatggccggtggaagggatcacggcgtagcgtctatggaaggttctggaaggggaaggaggaatttcaggcgcgggggcatggaggatttcggggagcggcatggaggaattcagggagcggcgtcgatggaaggttctag

SEQ ID NO: 94592 - DNA, 962 bp, Zea Mays
aaatatccatcgctcctctccccttcaccacttcccccctcatctctctccgttcattccctctctcatgcgtgcttgggttgggttgggtttgggtatagacagttcttgcagtccacaccacctcaagtgagggggtgaccccccaccctcctccctagcgctcctcaccgccatgctgccaagaaggcagagcatcttccacctcggggaggagggtggcgccgccgccgtgcaccaccgcgtcagcgtcgtcggcgcggcctcgtcgtccatggccatgggcggcggcggcggccggcgtgctcgcgagcgtgagcgcctcgtcgtggggctccagatcctggtgcaccaccacggccggcacgggcacggacacgcgcacgcggcgaacgtagtcctgaagcagatggtgaggccgcgcgccgccgctggctcgcgccacggccacggcagccacgccttctcgtgcagtttcctcaaggcctgctacctctgcaagcgggagcttagccctgacaaggacgtctatatgtatagaggtgaccaggggttctgcagcgaggagtgccggtggcagcagatcctggtggacgaggcgcgcgagcgcgaggcggcggcggtgatgagcaacaaggagctgcagcggcgagcgcaggcccgccaccacagcccccaccgcacgcccatgcccatccgtggcaggccgccgaggaagacacttgccgtagcctagctagcaggtcctctgtctgctgaggaggacaaaggaatcaatcatggcgcatgacgaggagcactggtactactagctagtacgggtctactggactgcgtgggtaaaaaaaaattaatcatctcttctaatcaccgagtggactgctagagaccagacgacttgcttgtgttgtcatcatcaaccaataatcaatcaagctgcaagtatatattatataccagaa

SEQ ID NO: 94593 - DNA, 2735 bp, Zea Mays
gcactacacagctactcgaagtcgaagctcgatccttcctcgagaactcgttcgctcgctacgtttccctccgcttgccgagtgctgcgcgggagcacgcgcccatggcgacgccgccgccggcggcgacggcgtccgcgcttcccaagtctggggcggtatccaagggctacaactttgcatccacttgggaacagagcgcgccgctcacggagcagcagaaggccgcgatcgccgcgctctcccacgccgtggcggagcggccattcccgcccaacctggaaaaaagttcagggaaggatgaaggcttggctgttcccgagaaagaatctgctttggaggaggccggtgcaatagatgcagtcttggtgaatacacatcagttctacaagtggttttcagaactggagtcagctatgaaatctgagactgaggaaaaatatcgactttatgagaatacattacaggagcgtgtcaacacatgtgacgtaatccttaagcaggttgatgatacattgagcttatttgaagaactgcagtctttgcactcaagcgttgccacgaagacaaaaactttgcatgatgcttgcgaccaacttttggttgagaaacaaaggctgatcgagtttgcagaggcacttcgaagcaggctcaattactttgatgaattagaaaatgtatcaagcagcttttactctcaaaatatgaacattggaaatgaacagtttcttccactgttgaagcgccttgatgattgtatctcgtatgttgaaaacaacccgcaatatgctgaatctgctgtttatttggtcaaatttcgccaacttcaatctcgtgcactgggtatgattcgctcacatgtgttgtcaatacttaaaggtgcttcatcccaggttcaagctgcaattcgaagcagcgattctggcaaaaacattgtcacagagggtgtggaggcatctcttatctatgttcgcttcaaggcggctgctagcgagctaaaaccaatattaggtgaaattgaaagtagatcttctaggaaggagtacgcacagattctttctgagtgtcacagtttgttctgtgagcagcggctgtacttggtacgaggcatggtgcagcaacgaatcttggagtttgcaagaaaagaggccttgccttctttgacaaggtctggctgtgcctatctgatggaggcatgccagtttgagcaccagctttttgcccacttcttcccagcatctgctgctgatgtttctagtatggctcctttaatggaccctctgtgcacctacttgtatgatactctgaggcctagactgatatatgaaggaaacattgattctctttgcgaacttgttgatattctgaaagttgaagtgctgggggaacaactaagcagacgcggtgaatcagtagccggtctccgtccaatattgcaaaggatacttgcagatgttcatgagcggctagcattttgtgctcggactcatatccgtgaagagattgcaaatttccgtccttctgtcgaagatctagattatcctgggaaacttgaacgacctgtggatatgtcttcaagtgctactgttggtgacaactcagacatatatataacatggtacagaccattggagaaaacagtttcatgcctttcaaagctatatcgctgcttagagccttctgtcttcactggattagcccaggaagctgtagaagtttgctcaacatctcttcagaatgcaagcagggttatctcaaagaaagcaaccccaatggatggtcagctttttctgattaagcacctcctcattctacgagaacagattgctccatttgatattgagttctctgtcacacataaggagttggatttctcccatttattggatcacctaagaaggattctcaggggtcaggtctcattatttgattggtccaggtcaacatcactagctaggaccttttctcctcgtgttttggagaaccaaattgatgccagaaaagagttggagaaaagccttaaagctacctgtgaagagtttataatgtccataactaaattagtagttgacccaatgctttcttttgttactaaggtaactgccgtcaaagttgcattgtcctctggtagccagggtcagaaattagattcagttctagcaaaacctttgaagactcaagcttttgcttctcctgataaagttgctgagctagttcagaaggttgccgctgccattcaacaagatttgcccaaagtaatgaccaagatgaggttgtatttgcaaaatccatctactcggatgatcttattcaaacctatcaagacaaatatagttgaggctcatatacagctgcattcccttctgaagtcggagtactctagtgaagaaatgcaatccatcggtatgttgccgatacctgacctgcagtctcagcttgacagccttttgtagtttgcatacaccatacagcggcgctgctgtagtccatgttgacgttgcagtgcagttctttcaagtaacgcaagtaaagttgttaccacaatttcgaacctctctaccatatcgttgttgtaacttttcattgtttatattgaaaaatggaaatggaacgcctcccatgattcatgtgattgtggacaatctggaagtttgaactcatatcctgtggtgacttatgtatattgtacacgcacgttgtttcctcctctgaaattgactggaatagtttcaaca

SEQ ID NO: 94594 - DNA, 2519 bp, Zea Mays
gcactacacagctactcgaagtcgaagctcgatccttcctcgagaactcgttcgctcgctacgtttccctccgcttgccgagtgctgcgcgggagcacgcgcccatggcgacgccgccgccggcggcgacggcgtccgcgcttcccaagtctggggcggtatccaagggctacaactttgcatccacttgggaacagagcgcgccgctcacggagcagcagaaggccgcgatcgccgcgctctcccacgccgtggcggagcggccattcccgcccaacctggaaaaaagttcagggaaggatgaaggcttggctgttcccgagaaagaatctgctttggaggaggccggtgcaatagatgcagtcttggtgaatacacatcagttctacaagtggttttcagaactggagtcagctatgaaatctgagactgaggaaaaatatcgactttatgagaatacattacaggagcgtgtcaacacatgtgacgtaatccttaagcaggttgatgatacattgagcttatttgaagaactgcagtctttgcactcaagcgttgccacgaagacaaaaactttgcatgatgcttgcgaccaacttttggttgagaaacaaaggctgatcgagtttgcagaggcacttcgaagcaggctcaattactttgatgaattagaaaatgtatcaagcagcttttactctcaaaatatgaacattggaaatgaacagtttcttccactgttgaagcgccttgatgattgtatctcgtatgttgaaaacaacccgcaatatgctgaatctgctgtttatttggtcaaatttcgccaacttcaatctcgtgcactgggtatgattcgctcacatgtgttgtcaatacttaaaggtgcttcatcccaggttcaagctgcaattcgaagcagcgattctggcaaaaacattgtcacagagggtgtggaggcatctcttatctatgttcgcttcaaggcggctgctagcgagctaaaaccaatattaggtgaaattgaaagtagatcttctaggaaggagtacgcacagattctttctgagtgtcacagtttgttctgtgagcagcggctgtacttggtacgaggcatggtgcagcaacgaatcttggagtttgcaagaaaagaggccttgccttctttgacaaggtctggctgtgcctatctgatggaggcatgccagtttgagcaccagctttttgcccacttcttcccagcatctgctgctgatgtttctagtatggctcctttaatggaccctctgtgcacctacttgtatgatactctgaggcctagactgatatatgaaggaaacattgattctctttgcgaacttgttgatattctgaaagttgaagtgctgggggaacaactaagcagacgcggtgaatcagtagccggtctccgtccaatattgcaaaggatacttgcagatgttcatgagcggctagcattttgtgctcggactcatatccgtgaagagattgcaaatttccgtccttctgtcgaagatctagattatcctgggaaacttgaacgacctgtggatatgtcttcaagtgctactgttggtgacaactcagacatatatataacatggtacagaccattggagaaaacagtttcatgcctttcaaagctatatcgctgcttagagccttctgtcttcactggattagcccaggaagctgtagaagtttgctcaacatctcttcagaatgcaagcagggttatctcaaagaaagcaaccccaatggatggtcagctttttctgattaagcacctcctcattctacgagaacagattgctccatttgatattgagttctctgtcacacataaggagttggatttctcccatttattggatcacctaagaaggattctcaggggtcaggtctcattatttgattggtccaggtcaacatcactagctaggaccttttctcctcgtgttttggagaaccaaattgatgccagaaaagagttggagaaaagccttaaagctacctgtgaagagtttataatgtccataactaaattagtagttgacccaatgctttcttttgttactaaggtaactgccgtcaaagttgcattgtcctctggtagccagggtcagaaattagattcagttctagcaaaacctttgaagactcaagcttttgcttctcctgataaagttgctgagctagttcagaaggttgccgctgccattcaacaagatttgcccaaagtaatgaccaagatgaggttgtatttgcaaaatccatctactcggatgatcttattcaaacctatcaagtatggatatccatcccacatatgcgtacaccatctttttgccttccagttttttcaagaaatatcaaggacttgtgagctttagttcaagaattaggtttttgagccaaaatcagcatattattttttactatgctcataattcagcacaaaaggtctaacttgtctaaatctcaaaaatcaaacaaaatgtttt

SEQ ID NO: 94595 - DNA, 220 bp, Zea Mays
gattttttgtttctatgcatgcaattcatttcctttcattgcacatttttttcatcataaattcgtgtgcatacagttggtaacagatttttacgtagtataccgaattgcataattatctacacagtgtattatatttagtctcagtatatatcataaaatggtccttacgcgtctagctgcatggctgttgcagcgatcctaaatttatggaggaaat

SEQ ID NO: 94596 - DNA, 369 bp, Zea Mays
gctgatatactacgtgaatacaacattccagtcattgattacccccgtcattttgagggttgtcctgtgcttcctttatctcttattcagcatttccttcgtgtatgtgagcactggttatccagtgggaccaatcagaacattatattactccattgtgaaagaggggcgtggcctttgttggcttttcttttatcttgtcttctcatctacaagaaactgaacagtgctgagcataaaactctggacattatttaccgtgaggcacctaaagggttcctacagcttttttctgcccttaatccaatgccatctcaactccgttacatgcagtatgtagccagaagaaatatatctccacagtggcct

SEQ ID NO: 94597 - DNA, 961 bp, Zea Mays
aacgcacgagacaaagggcctcacgctttccacatcgacacaaaaaccaaccgccgccacctccctccgctcgcgctagctgtgtgcgttccttgcctgccacaactccagcacttggagtcttcgacgacgacgatgacgacgacggcaggggaggagaaagagaaacaggcgggcgggtcatccatggagacggaggaggagacgacgcccaaggcgaagaagcggccgcagtcgctactcgggagcctgcgggaggcgatcaccaaggtccggttcctgctctcctccagcgcgacgcggtggatgctgctcaggtccctggcccgcggcggcggcagcggcggcgccccggcgcggcgcctcagcttcgacgcgcgaccgggcctgctcgacaccatcgccgcgtcgccgacctcctcctgcagctccaggacctccaggtcggccagcctgggcacggcgaccacccggaccctgtcgcgggccagcagcgccgcgtcgccggaggccctgacgagggcctcgtcgtcgtccggcggccgctccccggcgtcgtcggccggggacgacgacgtcgaccagcgcgccgagctcttcatcgccaacttctacaggcagctgcggatggagcgccaggtctcgctgcagctgcggtacgtcagggggaacagctgggacaggacccctggcgcaactccttctcctgcttcttccaggggatgatccgtagattgcgtagcgaaataagaatttgcaaggtagagatcctttcctttcagagcgcgcggtgacgcgatttagatgggtatcctctttttttttcctccatcgtttctgcacattcttttttttttgggtgctgaatagtactgtacagtttatgatttgcttggactcatgatcgagagtgtaataaatacaaaaaaaaagagagagagattgggattacagtctgtaa

SEQ ID NO: 94598 - DNA, 433 bp, Zea Mays
cccgctccgatgctccgccgtctcgcttctccatctccacgccatgcatgtcgcaggccttgcctttgtggctttatttgtcgcccatccctcgtcgccggcggccatccgggacgcgggagctcgcggcgcctgatggggcggacagcggcgcaggaagaagcaggagcttgccatcacatgcgtaggcgttggccctgcatcagccgaccaagtcctctgcacctccgtgctccgtgctgagcctaccgctagcagcagcaacaggtctcggtaataccattgcttaggaaaaacaagtgatgttttctatcattagagttcctctcattacaagagagagtgatgtgctacaaaactgttgtcacggtgggacttggtcgtgattaacagcgatcatcgcaatgaagccgtgtctattttatattttcat

SEQ ID NO: 94599 - DNA, 1603 bp, Zea Mays
atctgcattgcccatccccgcactcctctcctcctagcgacccgatcacccacacgcgaacgccatgggagaagccctgataggcaggctggaggcggcggtatcccggctggaggcactcagcgctggggcgcgcggcggcctgtcctacactgcatcagcgcaggaggacccggcgatcgtggccttcgacgatcttatcgccagcgcgctcggcagagtgtccgcggccgccggcaagatcggggcggacgtcgcagaggtgacgagattggtggagaatgcgttcttggttgggaaagaccttcttgccaggaccagccagacacaaaaaccaacaatggagtcagtgacgacttttatggggcctctgaacgaagcgatcttggaggccaacgcattggtggagcggacgagctcgatctatgccaaccatctaaaagcagcagccggtagcctggccgctttggcatggattggttacaccggcaaaggctgcggtatgcctcttccgattgctcatgtagaagagagctggcaaatggcagagttctacagcaataaggtacttgtggaatacaaaaataaggaccctgatcatgtggagtgggcaaaagccctaaaagagctgtacattcccaatttacgtgactacgtgaagaggtattacccattgggtccttcgtggcaaccgccaggaagcgcagccaacaaggcaccttcagctccgtctgttcctcctccatgtctttccatctcttcagcctcgtcgtcccaaccaaaatctggaatgtcagctgtctttgctgaaatcagctctgggaaaccagtgacacaaggcctcaggaaggtaactgatgacatgaagagcaaaaatagaacagacagaacaggtgttgtggctgctgaaggaaaagagactcgcaattcacctccctttagttcaactaaaggtcctgctaaactggagctccaaatgggccgcaaatgggtagttgagcatcatgttgggaacaagagcttgaccattgaaggttgtgataccaaacagtcggtgtatgtatacggatgcaaggattgtgtgctgcaagtcaaagggaaagtgaacaacataacaatcgacaagtgcaccaaagtgggagtcttgttcaagggggttgtagcggcttgtgaaattgtgaactgtagcagtgcagaggtccaatgtgagggctcagttccgactatatcaatagacaacacatctggctgccaactttacttaagcaaggaatctttagaggcatctataacaacagctaaatcaagtgaaatcaatgctcttgttccagatgcaaacagtgacggtgactgggccgagcattccttgccccagcagtacattcacgcgttcaaagacggacaatttacgacatctccagtgtctcattctggggcttgattgtctgcacggctgccatttcttatttccttttgtttacatcagctagcttattacctgccatctggacttatattttgtagttagcaaggtaactagatattagaacgggtcaaaattttcttcttcctccttattaataattaaatcctataatctaga

SEQ ID NO: 94600 - DNA, 639 bp, Zea Mays
atgagctacctcagagaggtcgggatgtatatggggcgattgccttccgttccctgtgtggctatcatccacgagggagccactgttttcccttattgggggatcaggaggaatccagcttcgaggctggagtcagctggtgcagggcatttggggtctgaggcccttcacggcgcaaaattccgcctttttgagaggcaggggtcttccgacgttgtccacgaggcagctaaagcgggatttgaaaccaaaagggtagtacatgccccacaatccacacccgaggcaaggcgtggtctcacaatggcccaattcggtcccattaaggcaccgctaccagaaagcgatggtgaaggctctttgtcaaggccctcaatagaggtagaagtgctagaggatctttcacgcgtggaggatcatcagcaggctcttaacgctgagcattccagtctgtgcgctgccattgacatagtgcatgaccatctaatgattccgtggccggaggaaatgttcgcccagatctctcgaatggcgcttatcggtgactgcatttgtgagctagaggctaacacattccggctcgagtcaaccatgcactggtccttacttgacctcattatgaggactcgatcaagctag

SEQ ID NO: 94601 - DNA, 299 bp, Zea Mays
cgcgattcccggcgtcctgtcgtcgatgcccctgtttcccatggcgatttccctaggaattcctttctgttcgacgccaaaccatccctctgttttcctccctcgcgcgggccacgaactcgttgtttgccgcgcgcacgaatttattctgctcgccacagcgtgttgtcgaactcccgcaccatcatcgcctctgtcacaagctcgttagccataattaatttgaccgcgtcagcacacgactgtggtcatgttcatcgaattcgccaacgctttgtggccgattcgactatcgtcgc

SEQ ID NO: 94602 - DNA, 428 bp, Zea Mays
cctggccgccgctcactgccggtggagatatttgtttccgggccgccgtcgtcatccaaacgccgctcaagccgccgctgttcctcgccgttatccgctcagccggccggatacaaatccagtagcgcccagccccagccgttcttcctcctctgccgcgccctctggttcggattccgatggccagcagttgaagctcccaagccgcgtccctggcgtcttcctccctggctcctactctttcaagcgtggagccctctgctcgccacggtccttccgtagctcccaaccgatttccctgcgtgctcctcccgtgcagctcgccgaggcttctgctcccagcgtagtgctcctctttcctccaccgcgccggacctccctgctctctgctccctcgcggcaggccggcaacttcctatctctctgct

SEQ ID NO: 94603 - DNA, 124 bp, Zea Mays
caaacggagcaccgagcgaaaagttatgcccgttttatggaaggtacctcaagttatggttttccaggacacaaattggtaggaaccgtagcggcggctatagagcacaggggcacaaacctcc

SEQ ID NO: 94604 - DNA, 366 bp, Zea Mays
atggagtcgctggtctacgcggcggtagtggtcgatccggagcaaggagaggtcctccacccaccagtcctcccggcagcgcgcggcggcgcagtcgcacgtctccaggtgtgccaggccggagaccagctgctccttacccgcgctggcggcgacggcgtcgacgcagcgggccaccagcccgacctgctccgccacatgaccgtcgcacctacgcagcacctccagcgccccgtccaggctctgcagtgccacctcggccaggtacgcctccgcccgggccacgaggttgtccgcgtggtggtcctccgtcacgcaccgcagctgcgccacgttcgccgcggttatttcgagggacaaaattga

SEQ ID NO: 94605 - DNA, 211 bp, Zea Mays
tttgagttcatgtaacttattttagagacttgagctcacaaactttctcttagttggtctctgtatggtggaattatgtcattctataatctctgttcgttcattcagtcgttgtgaactctcttctaatcgctcacttcattgaccgtgttgtaccaagacatattggatggagtaaacaataacatcagttagccaaatcaaaaaaata

SEQ ID NO: 94606 - DNA, 953 bp, Zea Mays
cacacaccattacattacagcaaagcagagcagggcgaaagccgccgagaagctccgaggaccggcagcgacgacaggtcaggggaagcaagagcagcaccagcagcagcagaaacaatgaggccaggaggagcagggttcaacgcgacggcggcggcgaaggtcgcggccgcaccagcagtcgccgccggcagcgccgccgcgcattccgcgtggcactcgccggtgccgtaccttttcggcgggctggccgcgatgctgggcctcatagccttcgcgctcctcatcctcgcgtgctcctactggaagctctcagggtacctggagggtggcgccggcgagggcggttccggcgccggcgccggcggcgacaagccagcggcctcggacctgccgccgccggtctgggaggagaagatactggtgatcatggccggggacgtgaagccgacgtacctggccacgcccatgtccagcagggcctcctccttcggggaccgcagcagccagggtggcgagcaggaggagaaggagaagagcaaggtgcaacaacaagtcgccatggccagcgtcgtcaaggacgccgaactgaacggtgagcgcagcgagagccggcggagagaaggagaggagcgccatatccctgaggtgtgatccccacttctgaaagaagttagattaggtcttgtctcgggttttccatcggtggagtggaatcgtgatggccagaacgtaacagggcagagcatttttttcttcttcttggtttgctcagagaagctgagcgcttgcgcttttgtgacgctgtaaacccgtctccgagacaaaccccgacccaagcaaaattttgtgggggctgtaaatttttgcattgatgaatcttcagaacgggactgacgcggccgtaattttgctcggttacatgtaacgtacacgtacgtcgcctttgatgg

SEQ ID NO: 94607 - DNA, 334 bp, Zea Mays
ctatgcaggtacttttcaggggcacatactggatgagacaatggatgctgctgctaaaggaagaagaaaaattacaagtaaagcagggatacaggctgcttgaagttgcaatgatgcaaatctttgctaaaaatggttggaactttagtaatcgattgtgcttgtaatctgtaatgttgtggtggcatctatgtttcgagtatggttttgttcctgtttgaacccagtatttttgatgtattggacagctatatgcccagtatttttgatgtattggacaactatatgcatattgtcatgcagaggctggaataatcaagttattcccttttct

SEQ ID NO: 94608 - DNA, 3444 bp, Zea Mays
ctataccaaattttcggggacaagatgaagctggttttatggcatcagttttttctcttcttcgtgttagtttcaacatcacagggtatgagttcagatggcctagctcttcttgctctgtccaaaagcctcatactaccaagtcccataagaaccaactggagtgattctgatgcaactccctgtacatggagcggtgttggttgcaatggaaggaacagagtcatctctctcgacctatcatcgtcaggtgtttcgggttctataggacctgcaatagggcgtctgaaatacctgcggattctcatcttatcagctaacaacatatctggtttgatccctctagaattgggagactgcaatatgcttgaagaactggatttgtcccaaaacctgttttctggcaatataccagcatcattgggcaacctcaagaaattgtcatcactgtcactgtaccgcaactccttcaatggaacaataccagaggagttgttcaagaaccagtttctggagcaagtgtacctacatgacaatcagctcagtggttcggtgcccttatcggttggtgaaatgacaagccttaagtcactgtggttacaggaaaatatgttgtctggagttttgcccagttcaattggaaactgcaccaagttggaggatctgtatctactcgataatcaactgagtggcagtattcctgaaaccttgggtatgatcaaaggtctcaaggtttttgatgctactaccaatagtttcacaggtgagatctctttcagttttgaggactgcaagctagaaatattcatcttgtctttcaataatataaaaggtgaaattccatcatggctggggaactgcatgagcttgcaacaacttggatttgtcaataatagtttgtatggcaaaattccaaattctcttggcttattgagcaacctcacatatcttttactttcacagaactccctttctgggccgatcccacctgagattggtaactgtcagtcgctgcagtggctagagttagatgcaaaccagctggatggcactgttcctgaagaatttgcaaatttacggagtttgtcaaagctctttctttttgagaatcgcctcatgggagacttccctgagaatatttggagtatccaaaccctcgagagtgtcctactttatagcaacagattcacagggaagctaccttcagtgttagctgagctgaagttcctaaagaacatcacactgtttgataatttcttcactggagtcataccacaggagctaggtgttaatagccccttggtccagatagatttcacaaacaacagttttgttggtagtatcccaccaaacatctgttcaagaaaagcattgagaattttggacttagggtttaatcatctcaacggtagcatcccatccagtgttgtggactgcccaagtttgaagcgagtcattttacaaaacaataaccttaacgggtctattccacaatttgtaaactgtgcaaatctaagttatatggacctaagccacaattccttgagtggtaacattccagcaagcttcagcagatgtgtaaacattactgagataaactggtcagagaacaagctttttggagcaataccacctgaaattggaaacttagtgaatctgaaaagacttgacctctcacacaacatattgcatggttcgatccctgtgcaaatttccagttgctccaagttgtactcacttgatttgagttttaactcattgaatggttcggccctccgcaccgtaagcaacttgaagtttctgacacagctacgattgcaagagaatagattcagcggaggcttgcctgattctctctcacaattggaaatgcttattgagctgcaacttggtggaaatattcttgggggtagtatcccttcgtcattaggacagctggtgaaactgggcacagccttgaaccttagtagcaatggcctaatgggtgacattccaacacaattgggtaatttggtggagttgcaaaacttagatttttcatttaataatctcacaggaggccttgctacattgagaagtctaggctttttgcaggccttgaatgtttcttacaaccaatttagtggaccagtcccagataatcttctgaagtttctgagttccacaccatattcttttgatggaaacccaggcctctgtatctcctgcagcaccagtggctcttcttgcatgggagctaatgttttgaaaccttgtggtgggtcgaagaaaagaggagtacatggccaattgaaaattgttctcatagttctcggttcattatttgtgggaggagttcttgtacttgtactgtgttgcatccttctgaaatctcgagattggaagaaaaataaagtcagtaacatgtttgaaggttcctcatctaaattaaatgaggttacagaggccactgaaaatttcgatgacaagtatatcatcggtacaggtgctcacggaactgtttacaaggcaacactgaggtcaggggatgtttatgctataaagaagcttgcgatttctgcacacaaaggttcatacaaaagcatggttagagaactgaagacactgggtgaaattaagcacagaaacttgataaagctgaaagaattttggttgagaagtgataatggattcatactgtatgattttatggaaaagggcagcctccatgatattctgcatgtaattcagccagcaccagctttggactggtgtgtgaggtatgacatagctcttggcaccgcccatgggttagcatatcttcatgatgactgccgccctgcgatcattcaccgtgatattaaaccaagaaatatactgctcgacaaggacatggtgccacatatttcagattttggcattgcaaagcacatggaccagtcttctactactgctccacagaccactggaatcgttggcactattggatatatggccccagaattggcgttttccaccaagagcagcatggagtctgacgtgtacagctacggtgtggtgctactggagctgttgaccaggaggacggcggtggatcctttgttccccgacagcgcggacatagtcggctgggtgtcgtccgtgctggacggcaccgacaaaatcgaggccgtctgtgacccggccctcatggaggaagtcttcggcacggtggagatggaggaggtgcgtaaggtcctgtcggtggcgctccggtgcgcggccagggaggtgagccaaaggccctccatgactgccgtcgtgaaggagctgacggatgcgcggccagcctctgccagcagcggcagccggtcgttgtccaagtcgagggaagggaaaccgggattgcaatccagcagcagcgcgtactggcagtaggatttctgaattttattctgcggagctgttacggcctccgggacacca

SEQ ID NO: 94609 - DNA, 84 bp, Zea Mays
tcgttcctgctgtctgcctgccttgtctgttgcattcgcatctgcctggtagttctcgggttgctggcagcgcgggctgtcaaa

SEQ ID NO: 94610 - DNA, 87 bp, Zea Mays
ggtggtatcaaaagtattagatcgaagtattcaatagtggtaactaacaatctaggtttagtcagattcatttgctctgcgatcagc

SEQ ID NO: 94611 - DNA, 700 bp, Zea Mays
tttttgtggccccgtgttgcgttctcctgttcaccccgcgtcgtcttcgctctcacgatccctcggcagtcggcgacggctgggcgaccgccacttccgccttctcttcctactgagcgtctccaggcacgcttctgaattcggagttgccagcattcgctcgaggtgccggaccagatctcaccatcatgcaggctagcgatagattcaacataaactctcagcttgagcatcttcaagccaaatatgttggtacagggcatgctgatttgtctagatttgaatgggctgtaaacatccagagagacagctatgcctcttatattgggcactatccaatgctagcatattttgccattgctgagaatgaatcgatcggaagagaacgttacaatttcatgcagaaaatgctgcttccttgtggcctccctcctgagagagatgaagattgaggagctgttgcatagtttcagtgtttccaatgaccatttatgagattgtaacctctatggtactatgtgccatttgtgttaaagctcgtatgcctttgacttgtcttgcatcggtctctatcgtgatacataaacattcgtaacttgtatgcattgtaaacgaaatgctggttatgcccctttgtcatgtttttgtgatgcgttctcacaatgtgaaagaaaatttagtcgaagagattgatggctgc

SEQ ID NO: 94612 - DNA, 254 bp, Zea Mays
tttttgtggccccgtgttgcgttctcctgttcaccccgcgtcgtcttcgctctcacgatccctcggcagtcggcgacggctgggcgaccgccacttccgccttctcttcctactgagcgtctccaggtactccaccccttctacctgctgtgcgaaaccgagcacccaaaccctaacttaaactttttttgttcggatctggtctaataacaaatatatgtacattcatactgacctttttgcaaaaaaaaaaa

SEQ ID NO: 94613 - DNA, 627 bp, Zea Mays
atgtcgaggaacttacctgaaggttctgtctatatctgttccattccagtgtgccgaccaacagcaacgcataccctccatgaaggggaatggggctggtatcccaaaatcacaggaaaacagactggcaccaaatccagattccatcagatagaggggaaatccagattccatcgtggcttcttgtttggatatgaacctgcctcgctccgcgagatctccgagctggcgcaggatcccgacgaggcccgcgacggcgacgccctcgagcagcgcattgggctcctcctcctcccccgcggcagcggaagctccgccgccgtagaggccggggtcccccagccccacctcattccgcacctcgaacctgaccagcggcatcgccctccgcgctccttcgtcacagcctcggcctcggcagccgacgccccctcctcatgcacccgggccgttgcgcgctgcgctgtgctcgccgacgcgacgccggtattctggtgctggcgcggtgtgggagggagcaggtgtcgtgcgcctggttgccacccaccaaggaggcgacaccgttcttgctgccgccaatgtgagcttgtgtgcctcctcacagagccactcaccattgcatcgtag

SEQ ID NO: 94614 - DNA, 732 bp, Zea Mays
acaccaccacaagcctaatacagctcaacacttgctaaaactagagagagagagagccagacagacagacagacacagagagatagagtccatggtgacactagcaggaaaaggagggagaaccagcagagggatggtgtcactgaggagaaggcggccgttccagctcatggtgctgaggcggctgcgggagctgaagaagatcgtgccagcgggcgctcgccgccggaaggcagacgtcgacgtggtgctccggcggaccgccgagtacatctgcgcgctggagctgaaggtggcactcctccggaggctctctcacatgtacggtgtgtagcctgtgccgccggtcacccacgccattgcctgccaccaccccaccaaagtagtagcccctatatatgcgattggttattggtcacatatggtcatatggacgtgcgtgtgtgtgtgtgtctagctagtagttaagatctggctgggaagaaagccagcccccggcccgttgctccagctctgagtgcaagagagagagagagagatgctttcgctgctggtggctgtgtcaataggctggaactggaagtaagaacgcatttcatttgttttctatgcatgtgtcggatcggagtgtgtggtatggatttttgtttttgttttttgcctagctcttcagctccttgttgttattattgcttatcatcgatcgcctataagactatatgcactacagac

SEQ ID NO: 94615 - DNA, 1133 bp, Zea Mays
cctcctgagctgagtcccttccctttcccccggtccagtggcggacgccctagccaggcaccacaggccacagcctgggctgccccactgcccctgtcgccgtcgggcaagcgccgtccaacctgtgcgtcaccgcctccgccttcagtttcgcctccagcaggggcgccgcgtggggtattcggttcgtcgtcgaggagagagagtcacttctgccgagggagcagggatggagccggtcgtggggatcgtggtgtcaaacaagatgcagaagtcggtggtggttgcggtggaccgcctcttccactataagatgtacaaccgctatgtcaagcgcacctctaagttcatggcacacgacgaggctgactcctgcaacattggcgaccgggttaggctggacccttctaggcccttgagcagatataagcactgggttgttgctgaaattcttcgcagagctaaggtatatgttccaccagctgcaacagcgtccagtcagtccagtgaacataatagcaaatctcaaaaggctggtgttgctaccaaatgatccatatgcagttactcaagcaagatgcagctatggctttttttcttcttctgtatgtttgtttggaatgtggatgccatgtttagccatggaagaaaaaatagcacgcagccaccatcttcgcttaatttagtttgttctcctgtggtgtcctccctttaatggtagccatcgaggatataattaccatattcaacaagaccagtggatactatatcggcagttgtctttgtatttgcatgcatggttggcaggtgtctaatactgctgaaatgagcaggcggaaagatccgaagagtaaagggttgtttggttcttggctacctgtctttaaactttaaggttaataagtcaaattgaagaactaaccttagatagaaaaatttagttgaactataacaaattagacaccacaccaaacaggccctaaaatgctgataataatctatatgaactggttgtctttgccgtgttcatattcgtactatcaggtggatgaatcgttttctgtgctgtttgctgcatactcgtaaattcatggtgatgtgcaatcaagattcggaaagtagacctcgatttc

SEQ ID NO: 94616 - DNA, 741 bp, Zea Mays
agatagagatagagctgatctattgggccttgggcccatctggcgcccccctctagccagccttggccctattgcgcctaacataggtctggccatacataacagattaactatttgcattgcatctaagactccctagtctctttatctgtttattgggagctagcgttcctttgaactaaggttctgttgaagtccattcacgataaattagttttcctctcagaactctttttatgatggctgtatactgttctttcaggttaggctggacccttctaggcccttgagcagatataagcactgggttgttgctgaaattcttcgcagagctaaggtatatgttccaccagctgcaacagcgtccagtcagtccagtgaacataatagcaaatctcaaaaggctggtgttgctaccaaatgatccatatgcagttactcaagcaagatgcagctatggctttttttcttcttctgtatgtttgtttggaatgtggatgccatgtttagccatggaagaaaaaatagcacgcagccaccatcttcgcttaatttagtttgttctcctgtggtgtcctccctttaatggtagccatcgaggatataattaccatattcaacaagaccagtggatactatatcggcagttgtctttgtatttgcatgcatggttggcaggtgtctaatactgctgaaatgagcaggcggaaagatccgaagagtaaagggttgtttggttct

SEQ ID NO: 94617 - DNA, 606 bp, Zea Mays
cctcctgagctgagtcccttccctttcccccggtccagtggcggacgccctagccaggcaccacaggccacagcctgggctgccccactgcccctgtcgccgtcgggcaagcgccgtccaacctgtgcgtcaccgcctccgccttcagtttcgcctccagcaggggcgccgcgtggggtattcggttcgtcgtcgaggagagagagtcacttctgccgagggagcagggatggagccggtcgtggggatcgtggtgtcaaacaagatgcagaagtcggtggtggttgcggtggaccgcctcttccactataagatgtacaaccgctatgtcaagcgcacctctaagttcatggcacacgacgaggctgactcctgcaacattggcgaccgggtcggtaattattgctgcatcgtcgtatccgccccttcctcgttctgatgctgtaaggctgtgaaaattggcgatgcttagactggtgtcaatttgttattggatagtcctaattgttagctactcggcgcctggggtttttgggtaggcgaactatttttttagagttccgcatctctagcatcgcactcgggaattaggaccaagcgttaaag

SEQ ID NO: 94618 - DNA, 254 bp, Zea Mays
tccttttggactcaaccacaaaggattcgtttaaaccaattaacaaactcttgcttcgattttctggggtacctttcaagtgtaccaataaatactttgttagtaaggaatcaaatgttggagaattcttttctaatagatactcgaatgaaaaatttgataccacagtccttgcaactccccttgtcggatccttattaaaagctccattttgtactggattggggcatcctattagtaaacccgtttggact

SEQ ID NO: 94619 - DNA, 113 bp, Zea Mays
gtttagaaaaagttttagaagtcctaattcacccccctcttaggcgtcacctgtttccttcctggcaccagagtataggttgtaccatgtgtgccgactaagcatgcgactcc

SEQ ID NO: 94620 - DNA, 1523 bp, Zea Mays
ccgctgctcaccccgtcctagacgcgaggcgacgacgcctccctatccctctcctccgcaatggccaggccccgcaagaacggcggtaccgacgaggatgatgctaacgccgccacgggagccaccgggaagccgaagaagctgatgaagcgggcgcggaggaagagcgagagcccctccccgcgcagctccgcgtaccgcggcgtcacacggcaccggtggacggggcggttcgaggcgcacctgtgggacaaggacgcccgcaacggctcccggagcaagaaaggcaagcaaggcgcgtacgacgacgaggacgcggcggcgcgcgcgcacgacctggcggcgctcaagtactggggccccgccggcaccgtcctcaacttcccgctgagcggctacgacgaggagcggagggagatggaggggcagccccgggaggagtacgtcgcgtcgctgcggcggcggagcagcggcttcgcgcgaggggtgtccaagtacaggggcgttgccaggcatcatcacaacgggagatgggaggcgaggatcgggcgcgtgttaggcaacaagtacctctatctcggcacttacgcaacacaagaggaggcggcagtggcgtatgacatggcggctatagaacaccgcggcttcaacgcggtcaccaacttcgacatcagccattacatcaaccactggcatcgacattgccatggcccctgcgacggcagcctcggcgcgatggacgtcgcaccgaacgtctcgctcgaactagacctactcgagtgcccggccaccgtcggcctcggcctcgaggagaccacgggcgacgatgaattccacaaccgcgaggactacctggggcaccttttcggcgtgcagcagcttcccgacgagatggggccgccggctcatcagatggcaccagcatcgtcggcgctcgatctggtgttgcagtcgcctaggttcaaggagctgatgcaacaggtttccgcggcgggagcctccgagaccaacggcggcagcatgcgtagctcgccatcaacgtccctgtgttcgttctcgccttcgcctctggagctgccatcgccgccgctacagcaacctactgaattcatcgatggcgcgccgccgcggtgcagcttcccggatgacgtgcagtcgttcttcgatttcaagaacgataacgacatgagcttcgtctacgcggaggttgacacattcctcttcggcgacctaggcgcatacgctccgccaatgttcgacttcgacctgtacgagtgatcaggatccgactgccagcgttccaagacgccagtgttgttaaaatggcttcataatttttgtttatgatgatgatgagatgactgctatcaaggtttacttgaaagaggtaggattagttatttattctcgcccttttttcaaatagctagaagaggaaaatatgcttctctttttttcttttttccctaaaaggctcaaaggtgtatacaagtcgtcacgaagaactaattgacattgatgac

SEQ ID NO: 94621 - DNA, 2088 bp, Zea Mays
gtcttaaggcaaattacaaacattgaataacaatctgtcttttaccaagatggcagaaaacgatactgttcagttacagagagcaatattcgcccagtacattatgatgaaaaggttatttatggagttagaagtggaaagagaagcttcagcaactgctgcaagtgcggccatgtcaatgatccgaaagcttcaaaaagagaaggatgcagaaagaatggaagcatggcaatacaagagaatagctgaggaaaagattaaccacactaacagagcactggatattctgaaggaggtcgtggagctgaaacaattggagatctcgtatctgaggtaccaattgcaggtgtgtaaacagaagctactggatgctggcattgacgattgtgacgttgcagatgagacaatagatagtgataaatctctgtttggaagaaataacatggagaatctttgtcataaaatcaaaagaaattcctctctgccaacgttgcagttgaataaacagtgtacagatatggacatcaagaagaatggtggagtaccatccgcaaggagcaggctgactgatgacggttgtgagcagatttcaatagatgttatggctctcgagcccaaggaaagcttcgcaacagatttgaactttagaggaaagcatggtgaagaagcacattctccaagaagtggaagtgaatctcagactttggatgaccctccgtgttgttcctcattctcagtggtgagtcatcaggcagatatatgcagtgatggagcagttcagaccagggaagacaaagaatgtacagtaaaccatgatcaactcaaggattcttgtgtacatgagtctgagacttcggatgagcctccgtgctcttcctcgttgtcagtggtgagtcaccaggcagatatatgcagtgatggagaagttccgaccagggaacataatgaatgtgcggtaaaccatgatcacctcaaggattcttgtgtacatgactctgagacgttggatgagcctccgtgctcttcctcgttctcagtggagagtcaccaggcagatatatgcagtgatgcagcagttcagaccagggaaggtactgaaattggcgaactggtagctcatccattaagcgaagtcgacccactccaaactccaaagagaagcaacaaagcaactgattcctcgtgtactgggagtgaaataacaacagtagaggaacctcaactgtctcccaggggtgtcaccaaagcgcgaggcccccgcaacctgtctaggttcgctgaaacaagaaaggttgggtcgatgaataatgtggataggcatgtgcgccggagctccgggacttactcgccacgagcagccggtgttgagcggaccatgtcgaagctgaagcgcgtgcaaagcgagaagatggtcgagctaggcgaccctaggactggcagagaacagatcatcatgctgaaggaggtctacgagcagctccgtatgatagagtcacatatgagaccttctggttcccaggaaagcccccgaagtgccacgtcgttagattccgttatggaggcagctctgtccttctccctatagtcgggtcaggcaagcatgtcttgaggctatgtaccacaattcaagcggttggaaattagacgcccaaggttgtgtgtttggttgccggccgagattagccacaccaaactgtggcggcccctgaagcttagcgatggcgcgctgtggcgggcaaccaccaaatgttcagcacatttttaggacatcagtgcaaaaaaaaaagaatgacaggcatttgatgtgtgctcagtacagcgaaatactgggagtttttttatgtgtgctcagtacgctgtaatctgatcctgtgcaaaacatgcatatattgtatgctatgtagttcactgtggtctgcgcagttgtagaagttatgtactatgtatgtgttcatgaagccaagtagtccagcagagacaggagaccggtatctcatgatcgtggctgtagacaagtgcttcttgacaaccagttagatctctctcttgacaaatcagagcacctggaggcattaaaaaaagccacac

SEQ ID NO: 94622 - DNA, 1175 bp, Zea Mays
acgaataactcataacgccctctccgtccccgaccagaatcgtcacttcctccggctccggcgatctcctccaccgccgttgtcagcggtccggccgagatggggagcacttcctctatgctcacccaatacgatatcgaggaggtccaggaccattgtaaccacgcattctcgcagcaggagatcgtgtcgctgtaccaccgcttctgccagctcgaccgcaacggaggtggcttcgtctccgctgacgagttcatgtcggtacctgagttcgccgtaaatcccctctcccagaggctcctgaggatgctggatggtctcaacttcaaggagtttgtagcatttttgtcggcttttagcccccgcacaagcctacaggaaaagattgaatttattttcagggtttatgatactgactgcaacgggaaggttgcttttgatgacatcttaagcatcttgcgagatctgacaggttcatttatgacagagcaacagagacagaaagtcttgactcatgtgttagaagaagctgggtacacaaaaaattcacatttcacactcccagactttatgaagattattggcaattctgagctcaagatggaggttgaagttcctattgactaaaaaccaaataagtatcatctagttgtatcgtgatgtgttgccgagagccccagacctgtatgttcatttgtgttgaattaagtctatggtgtatttatatccttgtaaatcaaatcatgatcatagatgtaattaaggaaacaaatgtacctgttatttggaggattagttgacttgcgctgatactccttaaggcttgtttggaagtaaggatattggaggagattgagagctgatttggtgaccagagaattggaaggattcatagggaggaatccttcgcaattcaaaattaaatagcaagaagattcctctctcatggatcctctctaaatccctagtcctaaaccagtcctgagggagctagaatcacttactatttaaaattgaatagtaggagattctagatctctcaatcccctacttgtgctcttaaacaagccctaatacttgttatacgccatgtgatagtccggataatcatattgatgtatggttcaccgctacacacattatgtcggaaaaaacagatgatcaagtcatcactg

SEQ ID NO: 94623 - DNA, 654 bp, Zea Mays
ataactcataacgccctctccgtccccgaccagaatcgtcacttcctccggctccggcgatctcctccaccgccgttgtcagcggtccggccgagatggggagcacttcctctatgctcacccaatacgatatcgaggaggtccaggaccattgtaaccacgcattctcgcagcaggagatcgtgtcgctgtaccaccgcttctgccagctcgaccgcaacggaggtggcttcgtctccgctgacgagttcatgtcggtacctgagttcgccgtaaatcccctctcccagaggctcctgaggatgctggatggtctcaacttcaaggagtttgtagcatttttgtcggcttttagcccccgcacaagcctacaggaaaagattgaatttattttcagggtttatgatactgactgcaacgggaaggttgcttttgatgacatcttaagcatcttgcgagatctgacaggttcatttatgacagagcaacagagacaggtttgtactctggatttccggttccttcttgggttatcacacgacatagcaattcttgcatgggcatgaactgctagctagtttcagctgagaagttatctcagtaaaacataatgccttttgcaaggagtttatctgcaaattatctttttctcct

SEQ ID NO: 94624 - DNA, 778 bp, Zea Mays
ttgtttacctcaacgttagaactgtcctgtgaaaagaggcaagtgaaacagccatactagacacaacatctaagattatatatacatgtacattacttggggcccttccaaaaccggaggcccggtgcgaccgctccacttgcccccctccaggaccggccctgactacaaagcaaaacaaaataggatatgggttcttttaagaaattggcttggctgcataaggagctcagccctgagccgctggatcttgatcgaaggcccagattcactcccaccgaaggggtacgaggacttctaatcggagttgtccactacataatcaatggatgatcgtgcttcttcttcatccaacgcttggacacagcagacgatgtaaacttcagtggtgctgtcatcggcgctcggcccaccaatgatctagggctctagtctgacggttactatacacaacagggagcagagacaaaagcgaacacaatagagggatggctcaccattgctaagagagacgggagccccatccacgactcgacgcagatcgactacaaaccatggactccggcgaggtgcgcctctgccctggatgtcccttgcactcgatcaagccctacacacgactccgcactccctggcaaatccttctagccatcttcctcggccctccttcttaattgtggatggcgacggaagcttgaagcgacgacgcggcgaaaccctctcttctctccctctatgtcgaggatggtggcttggtgtatggaagtatcgactcgat

SEQ ID NO: 94625 - DNA, 714 bp, Zea Mays
ctaagctctctgctcccctccggctttccgtttccgctactgacggggcgacgcgctcggctcttcgccccttctccgcaggcacgggatgccttctacgcgtgcatagagaagcacgcggacaaaaagcccaccgagatcgccaccatgggtctcctctaccccgccgactgcaaaaagtcccgcgccgacttcgtcagcaactgccgccccacctgggtcaagcacttcgaccggcagtactgcgccaagaagcgggtgcagaggttgctcgacggcgatggggaccgccggggccccatgtcgctgccccagccctacaccttcaagcaataggtagtcttcctgtggttcagatcttggtattcagctcaattggatcagtgctacgttggtgtctagatgctatagtattggtttcaggctttgtgtcatttagctggatgcatatgtgatgtgtaccagtacattgctctgaatgctaatggatgagcgaatctgtatgtggatttatcaatatcaggatatccctcattggcaattgagttgcattacttttcttctgatggcatgcagattgccagaatccttattgaaacctttcgtccttatttcaactttcaattgatcaatgcagggggtaaaaggatattgttgtgtcattgatttttttgccaggttgctggaatgcagtcaaccatcatagcttaaata

SEQ ID NO: 94626 - DNA, 798 bp, Zea Mays
tgtgtcctttcccctcccgcaagcgaaagccccaaacaaatcccccgcacgcctccgcagccgacgatgaccaccgccgcggacgccgacgtcgacgactaccaccactccgacggattcgtcatgtccgacgtcctcgccaagggccgggaggcctgctacaaggcacgggatgccttctacgcgtgcatagagaagcacgcggacaaaaagcccaccgagatcgccaccatgggtctcctctaccccgccgactgcaaaaagtcccgcgccgacttcgtcagcaactgccgccccacctgggtcaagcacttcgaccggcagtactgcgccaagaagcgggtgcagaggttgctcgacggcgatggggaccgccggggccccatgtcgctgccccagccctacaccttcaagcaataggtagtcttcctgtggttcagatcttggtattcagctcaattggatcagtgctacgttggtgtctagatgctatagtattggtttcaggctttgtgtcatttagctggatgcatatgtgatgtgtaccagtacattgctctgaatgctaatggatgagcgaatctgtatgtggatttatcaatatcaggatatccctcattggcaattgagttgcattacttttcttctgatggcatgcagattgccagaatccttattgaaacctttcgtccttatttcaactttcaattgatcaatgcagggggtaaaaggatattgttgtgtcattgatttttttgccaggttgctggaatgcagtcaaccatcatagcttaaata

SEQ ID NO: 94627 - DNA, 1842 bp, Zea Mays
accgctataaaagctgggcgccgcagagctgactctcctcgccacccaaaagccaccgcgatcccgtgcttccttctcgcacctgcggatctactctccgcacctgcggatctaccccccggcgaaacaagcgccccgacgcctcagggaatgcggagcgatgaggcggcgctcaggcactgacgtcgccggtcagcgcgagctgcgcggcgaccgaacctgccatcgcaagcacgtcgaggacgggtagactcgtccatccttccttcctcctgttagtcgtcgtagggtagtttgcactttgcagatagctagctagtagttaggggatcaggcatgggtgagggcgaggcggaggtgaagggcggggtgctgcagggccgctacgagctcggccgcgtgctgggtcacggcaacttcgggcgcgtccacgcggcgcgggacctgcgcaccgggcgggccgtggcggtgaaggtgctcgacaaggacaagatgctgcgcacgggcatgatggagcagatcaagcgcgagatcgccgtcatgaagcgcgtgtcccaccccaacatcgtggagctccacgaggtgatggccacgcgctccaagatctacctcgcgctggagctcgtccgcggaggggagctcttcgcgcggatcgtgcgcgccgggcgcgtcaaggaggacgtggcgcggcgctacttccggcagctcatacacgccgtggacttctgccacgcgcggggcgtgtaccaccgcgacctgaagctcgagaacctcctcctggacgacgcggggaacctcaaggtcgtcgactttggcctcagcgcgctggccgaccacgcgcgcagcgacgggctgctgcacacgctctgcggcacgcccgggtacgtcgcgccggaggtgttccggaacaagggctacgacggcgccaaggctgacatctggtcgtgcggcgtcatcctctacgtcctcctcgcagggtcgctgccgttcccggacgacaacgttgccgccatgttccggaagatgagccgcggcgactaccggtgcccgccgtggctgtccacggaggcgcgcaggctcatccccaagctgctcgaccccgaccccgacacccgcatcaccatcgcccagctcgtcgagacgccgtggttcaacaagccgtccgtctcgaggtccgtcagagccgccgccggcgcaaccgagccgccggccgagcctgcctcctccgcaaaggacggcggcgacaaggacgagccaccggagacgatgaacgcgttccacctgatctccctctccgcggggttcgacctctcaccgctgttcgacgtggaaggcggtccggcgagggggccccgggagggcggcatgcggttcgcgacgcgggagcccgcgagcggcgtcgtctcccgtctcgaggaggtggccgcccgcggcggcgggcggatgcgggtgaccaagagcggcgcccgcggcgttcggctcgagggcgcggagcgcgggggccgcaagggccggctagccgtggcggccgacatcttctgcgtggcgccgtcggtgctcgtcgtcgacgtgaagaaggacggcggcgactccctcgagtaccgctccttctgcagcgaggagctccggccggcgctcaaagacatcgtctgggcggccgacccccagcccgccgtcgtgtgacgcccgtgctgccgcctgcccgctcattgtttctggatcgtagtggtgccatagtttagtcagtgtcagttccatttccaaagtgattgcgtcactgttctcgattcgataatgatgtgagatctactgtttgtgggggggggggggggggggcgtcaa

SEQ ID NO: 94628 - DNA, 1586 bp, Zea Mays
accagatccgcccccgttttctcgcctcgcggtctcgcccctcgcacccgcccctcagctcccatgggctctcgccgtcgctgacactggggcccaacgctctcccccgcgtccgcgcccgcctcctccccctcaccctcctcctcctcttgttgcctccactgactctagccgaccgcccccgcccaccgacatcggaagccctagctgctgcaggaactgccctgccggcccgccgctcctccgctcgaagcgtctccggtttcttggatgcaccggctgctccgatggctgcccttccgcccgccgcagaggaccccgacgccgtggagatccgtgaagtttgggcgagcaacctggaggaggagttcgcagtgatccgcgccgtcgtcgacgtgtacccgtacgtggccatggacacggagtttcccggcttcgtggtgacgccgagcgccgagtaccggttcacctgcgaccgcaactacgccgccctcgagggcaacgtcaacgtgctcaagctcatccagcttggcctcaccctctccaacggggcaggcgcgctcccgccgtgcggcacgggtgggaggcgctgcatctggcagtttaacttccggggcttcgacccgcacaccgacccttctagcagcgactccatcgatctgctccgccgcagcggcatcgacttcgacctctttgcggctgagggggtcgattccacccgcttcgccgagctgatgatgtcgtccggagtcgtgctgaacgacgatgtccagtgggtgaccttccacagtggccacgacttcggctacctcctcaagctgctcaccggacgggaaatgcccaacaccttggatgagttcctgaaactcaccaagaccttctttccggtgatgtacgacatcaagcatctcatgaagttctgtggcggtggcctatatggcgggctgagcaagcttggggagctgctcaagattgagcgtgttgggatcagccaccaggctggatctgattcgctgctgaccctgcagtgcttcatgaagctcaagcagttgtatttaaaggagtctgttaagttgtatgatggtgtgttgtttgggcttattcctggggaagtggagatcaaacctgttgctccacccattgaatgagttatggtagttcaataacaagattctgaatgataaaaatggagaacagagcctaccatcagtgaatatatagctgatctgatgatttctggtgcttgttatgatatgccttctctcctggttaattctccccattaaccacttgaatgtgtgtttctttgtgttttgtgctcatattgctaggttacctaatagttaacatcaacatttgtttgaaatcaagtagcaaatgctgctgtatcaagcccctgaaagtttctacatcttctgtatttgtcagtgagttagcttgcttgtatttgtcagtgagttagcttgctcatctgcatgaactagcactatattattcgtaaaaagcatacatcaagagatatctctttgtatgttctttgtaaccttatccatcaccatgggaaaaagataagggattgaagctaa

SEQ ID NO: 94629 - DNA, 1011 bp, Zea Mays
aaaaccacagccgcgacgccgacgcgcaccgaacaacagctccgagaacgtatcgcccacaatcctccacgtctaccgcaatctgtcactatagcctgcgcattcgcatccgggcatccggcatcccaccccacccacctccttcctcttcccgcccgctaaaacccacgccaccgccgcgcgccgccggcagcgcaagggacgcacgatggccatgcaggtggtgcgcaacctcgacctggagcggtacgcggggcggtggtacgagatcgcgtgcttcccgtcccggttccagcccaagacgggcaccaacacgcgcgccacctacacgctgaacccggacggcactgtgaaggtggtgaacgagacgtgggccgacgggcgccgcggccacatcgagggcacggcctggcgcgccgaccctgccagcgacgaggccaagctcaaggttcgcttctacgtgccgcccttcctccccctcatccccgtcaccggcgactactgggtgctccacatcgacgccgactaccagtacgcgctcgtcgggcagccctccaggaactacctctggatcctttgcaggcagcctcacatggacgagtccgtgtacaaggaactggtggagcgtgccaaggaggaagggtacgacgtgtcgaagctccgcaagacggcgcaccctgacccgccgccggagagcgagcagagccccagggacggcgggatgtggtgggtcaagtccatctttggcaagtagccttgtggtggtgggtggcagcgcgggtgctgccgtgccgagcaggcgagcgcacgcaagagatgcctgtgaccgtcggttccgcgtgtacattcagcactagctggggattaagttggttcgttgttgctgtcgcgatctgcaaatggcgaaaagtgtgcttgtttcttgcccgtctgtattgtatcgaactttgagcgaatgtttcagtttgctgcatcatttgtttgtcatgtgctgaattccctgcttgaccg

SEQ ID NO: 94630 - DNA, 1021 bp, Zea Mays
agaacgtatcgcccacaatcctccacgtctaccgcaatctgtcactatagcctgcgcattcgcatccgggcatccggcatcccaccccacccacctccttcctcttcccgcccgctaaaacccacgccaccgccgcgcgccgccggcagcgcaagggacgcacgatggccatgcaggtggtgcgcaacctcgacctggagcggtacgcggggcggtggtacgagatcgcgtgcttcccgtcccggttccagcccaagacgggcaccaacacgcgcgccacctacacgctgaacccggacggcactgtgaaggtggtgaacgagacgtgggccgacgggcgccgcggccacatcgagggcacggcctggcgcgccgaccctgccagcgacgaggccaagctcaaggttcgcttctacgtgccgcccttcctccccctcatccccgtcaccggcgactactgggtgctccacatcgacgccgactaccagtacgcgctcgtcgggcagccctccaggaactacctctgggtgcgtgcgaattcctctctggcctccgtccgtctatccctcgccgaatcgtgcctgtctgcctaccaatccccctgtgtttgtgtgtgcagatcctttgcaggcagcctcacatggacgagtccgtgtacaaggaactggtggagcgtgccaaggaggaagggtacgacgtgtcgaagctccgcaagacggcgcaccctgacccgccgccggagagcgagcagagccccagggacggcgggatgtggtgggtcaagtccatctttggcaagtagccttgtggtggtgggtggcagcgcgggtgctgccgtgccgagcaggcgagcgcacgcaagagatgcctgtgaccgtcggttccgcgtgtacattcagcactagctggggattaagttggttcgttgttgctgtcgcgatctgcaaatggcgaaaagtgtgcttgtttcttgcccgtctgtattgtatcgaactttgagcgaatgtttcagtttgctgca

SEQ ID NO: 94631 - DNA, 1501 bp, Zea Mays
agaaataaccacgagacaccacttcctagcttcccttcccctcggctgccctcaaaaccccctcaaaatcctccgaaccccgccgccgacgagcgagctatggcgctggcgcggcggctgctccgccttactccctacctcggcacgctctcgctcccaccccccaactcgcatctcctccggaatcgcacctatatctctgacatgcgccgctctgccttcgtcgaccgcttgctccgttccgtacgctccgagatctccttcctcgataactccgccccgccaccgccaccaccgcctcctaagccattcaccattgaggaccgcccgggcgagcagtgggcccgcctgcgccgcgtgttccctgcggccgagggggaggaagaggaggtcagggtggacgccacgttggtcgacggcgcgctccctccctcccgctcgggcgcggacacgggcggcccgcccagaatgcatatcagtgttaaggttgaggtctccaaggccgcgcggcctggagtggcgctcaccttcgagtgctccgcgtggcctgacgagatggaggtgcggagggtctttcccgtccgccgcggcgggcctgccccagtgcagcagtacgtcggccgccaattcaggcttccaaagtccactgctcccctccagacttccaatccagcacgtgggaatccaatctcgagttccaggcttccagcacgcgcgaatccagttcaccgacggactccagacttcatccttcaatctccagcacgcgcgaatccagtttttttcgtcggcatgagttcatcttctggagagtttggtcgtcgccgtcaggataatgttgaggtgatcttcccagaatcacaagttgtgggcagcggcaatccatcttctgttgcggataacacagttcttgcttcggcatcatcagcctcagccgctgcagattctgcagctctcgttgataaggctattgcaaagttgcctgctgatgttcgtgcacacgcaactggtatctgggacttgtagtattaataactatgagttggatgaggaaatgcaaagtgccgtacaagactacctggagaaaattggagtgaatgatgaccttgctgcatttttgcacgcctacatggaaaacaaggagcacactgaactgatcagatggctgaaaaacgttgagtgccatatcaagaagtgaacattctagtcgggttaatactttgtcctacagcacttgcagatgcagcttttgatcgcaatcttggaactttactaggccccatttaaatccttagaattgattaagctcatattgttgtatgagaaatatcacgcctacatggaaaacagggatcatactgaacttatcagatgactgaaaaacgtagtgccatatcaaaaaaaattgcattctagttgtgttaatactttgtcaacttaagggacgacgtaattttttttaagttaagttactgtagggagggcctacaatatttttatt

SEQ ID NO: 94632 - DNA, 1095 bp, Zea Mays
agaaataaccacgagacaccacttcctagcttcccttcccctcggctgccctcaaaaccccctcaaaatcctccgaaccccgccgccgacgagcgagctatggcgctggcgcggcggctgctccgccttactccctacctcggcacgctctcgctcccaccccccaactcgcatctcctccggaatcgcacctatatctctgacatgcgccgctctgccttcgtcgaccgcttgctccgttccgtacgctccgagatctccttcctcgataactccgccccgccaccgccaccaccgcctcctaagccattcaccattgaggaccgcccgggcgagcagtgggcccgcctgcgccgcgtgttccctgcggccgagggggaggaagaggaggtcagggtggacgccacgttggtcgacggcgcgctccctccctcccgctcgggcgcggacacgggcggcccgcccagaatgcatatcagtgttaaggttgaggtctccaaggccgcgcggcctggagtggcgctcaccttcgagtgctccgcgtggcctgacgagatggaggtgcggagggtctttcccgtccgccgcggcgggcctgccccagtgcagcagtacgtcggccgccaattcagtgagttggatgaggaaatgcaaagtgccgtacaagactacctggagaaaattggagtgaatgatgaccttgctgcatttttgcacgcctacatggaaaacaaggagcacactgaactgatcagatggctgaaaaacgttgagtgccatatcaagaagtgaacattctagtcgggttaatactttgtcctacagcacttgcagatgcagcttttgatcgcaatcttggaactttactaggccccatttaaatccttagaattgattaagctcatattgttgtatgagaaatatcacgcctacatggaaaacagggatcatactgaacttatcagatgactgaaaaacgtagtgccatatcaaaaaaaattgcattctagttgtgttaatactttgtcaacttaagggacgacgtaattttttttaagttaagttactgtagggagggcctacaatatttttatt

SEQ ID NO: 94633 - DNA, 111 bp, Zea Mays
caaaactcacaacatgaaagttgtagatctcttttttctatttcttttagatatatggatagcctgttttggataacaaaagtgggagataatgaccccgaacatagactg

SEQ ID NO: 94634 - DNA, 1835 bp, Zea Mays
actgcccaatttaaaacatgaattctcatttcttttttccttaattcctacggaaatcgacaaatccgtatgaggacgtcgatcggtacaagatccaaaatgggggacacaccttggacctacatatgtttgccgaagcgaaccgtgcagcggcaagccggcgaacccagcagtgctgggctgtgcttcatctcacttcaccgcgcccggacggcgacgccttggattcgcactgcaagtctgctgtctgcagcacatcgcacgcatcattccaatcgactcccgtctcgtctcgtagcgtccgaagcgccacgccagcaccgcggcgccctcgcttgcgatgcccagcccgatcgccgcttgcttccgctgcgccgcggcgccttcgtcgggcgccggcgcggcggggcccagcctgacgacctccgtctacgagacccacctcggcctcgtcgcgctctcctggtcccgcacctcgctcggcctctccctccgcgccgtactccgcctgtcgcccccgccatcgcccggcttctcttcggcgtcgggagcgggctacctcgacgacgacgcggacgaggagactctcgccttccgcgtccgcccatggctcctctggcgctggcgcggctccaagcggttccgcgctgacgaccgcatcgtcgacttggcgtgggacctctcgcgcgcgcgcttcccgggctccgggtcccccgagccgtcgtccggcttcttcgtcgccgtcatcatcgacggcgagatggtcctcgcggtcggggacctttccgatgctgcctaccggaggacccgggcccggcgcccatccgggccccgcccagtcctcctctcccggagggagcacgtttcgctacgcgacgcgggcgccggccgaggccgcagccacaccacctgcgtgaccgtccagggtaaggaacgggagatctccgtggatctcgtggcccgcggccttggcacggacagggtcgccgccggcagggagaaggcgaaggaccgggctgacgtaggcatgtcggtctctgtcgacggcgagcgagtgctccacgtccggcgcctgcgctggaagttccgcggcagcgagcgtgtcgaccttgggggcggcaacggcgtccaggtctcctgggacctccacaactggctcttccgtccgcgcgagccaggtcccgcggaggcatcgacgcacgcccacgcccacgcggtgttcgttttccgcttcgatgtctccagcggcggcgaggatttgggtaaggatccctgcccggacaatgccacagggaggaacacggacgtcgtttggggaggctacctcgcgcggtggagacaacgggactggagcgagacgggcagcaacgccgagaggaggaagggcagggggcggaggctggccaaggagagctcgtcgtcgtcggcgtccgtggcatcctcgacggcgtcgtgggccagtggctccacggtgatggactggggcagccccgaggaggccgagatgcagcgcggcgatggcttgacgctgctgatctacgcctggaagagctaacaccggcgacggcggcatagttccgatcaattggcggtgattataaattttctctggattgttgtagtttgcagtgttcttgtgcagttagagtgaactgagcttgaattacagtagcgcaactgctgagtggaacgaacaattagtgttgattttttttccattacaacaacaatttcttccatgtattagcaattaatgaatgaaacgaaccaaacagcaaatctatttgcctatcaatcagggcaatggctcaggatattttgagcagcttggaatc

SEQ ID NO: 94635 - DNA, 1157 bp, Zea Mays
aaaaaaataaaatcgaatgcccctccgtcttcctccccttttgttctcccacaacgaactcggggctcgcacccagaagggagagaactcgtcgcgacgaggagagaagaacctgaggtggtcccgaatcagacgcggaagagggtgggttcaggagcaagccagcctgccgccaccatgaggcgcgcctcgaagaaatccttgtcgtctgccgcgaccgctagcgctggccctactaaagcagtttccaaggaagtagaacggattgatcaatttttctatacttatgccgataactcatctgtcatgattgacccagaaggcattgaaacactctgttctcaccttgaagttccccacaccgacgttaggattctaatgttagcatggaaaatgggctgtgagaagcaaggttattttaccttggatgaatggagagctggtttgaaagctcttcgagcagacagcatcagtaaactgaagaaagcatttcctgaactggttcaagaggttacaaggccgtcaaatttccaggatttctacatatatgcatttcgttattgcctcacagaggataagaagaagtgtatagaaataccagttgcttgtgagttgctgaatctagtattaggcttgcagttccgccctcaggttgacaagcttagtaattacctcaagtaccaaaatgactacaaggtgataaacatggatcagtggatgggatttatgcggttctgtaatgagataaacttcccatcacttgacaattatgattcagaccttgcttggcctttgattctagacaattttgttgagtggctaagagaaaataaaagctagatcttctattcatgtggtggtgaagttgtcattcaaaatgtaatattcaagaattttctgcaccctggaggatgccgattcggcttgtttccggttgcttcggtggaggctgctcccagaaaatttaaagccttctcatgtcatcttttgattttgcatatttttaaaactggaaacggtctgcatctgtctgtaaaatttgtatcaggatgctatatttaatggccatgtcatgttaatcagtcttggtagagttttaagatcttgcaagttgcaaatatttccatagattataaataaaaagaaattaactggcg

SEQ ID NO: 94636 - DNA, 1238 bp, Zea Mays
aaaaaaataaaatcgaatgcccctccgtcttcctccccttttgttctcccacaacgaactcggggctcgcacccagaagggagagaactcgtcgcgacgaggagagaagaacctgaggtggtcccgaatcagacgcggaagagggtgggttcaggagcaagccagcctgccgccaccatgaggcgcgcctcgaagaaatccttgtcgtctgccgcgaccgctagcgctggtgcggaacaagtaaatgaaaaacaaaacagaaaaagaaaaggagtcagtacaaacctgaccagcaggaaagcacaacgtggccctactaaagcagtttccaaggaagtagaacggattgatcaatttttctatacttatgccgataactcatctgtcatgattgacccagaaggcattgaaacactctgttctcaccttgaagttccccacaccgacgttaggattctaatgttagcatggaaaatgggctgtgagaagcaaggttattttaccttggatgaatggagagctggtttgaaagctcttcgagcagacagcatcagtaaactgaagaaagcatttcctgaactggttcaagaggttacaaggccgtcaaatttccaggatttctacatatatgcatttcgttattgcctcacagaggataagaagaagtgtatagaaataccagttgcttgtgagttgctgaatctagtattaggcttgcagttccgccctcaggttgacaagcttagtaattacctcaagtaccaaaatgactacaaggtgataaacatggatcagtggatgggatttatgcggttctgtaatgagataaacttcccatcacttgacaattatgattcagaccttgcttggcctttgattctagacaattttgttgagtggctaagagaaaataaaagctagatcttctattcatgtggtggtgaagttgtcattcaaaatgtaatattcaagaattttctgcaccctggaggatgccgattcggcttgtttccggttgcttcggtggaggctgctcccagaaaatttaaagccttctcatgtcatcttttgattttgcatatttttaaaactggaaacggtctgcatctgtctgtaaaatttgtatcaggatgctatatttaatggccatgtcatgttaatcagtcttggtagagttttaagatcttgcaagttgcaaatatttccatagattataaataaaaagaaattaactggcg

SEQ ID NO: 94637 - DNA, 1020 bp, Zea Mays
aaaaaaataaaatcgaatgcccctccgtcttcctccccttttgttctcccacaacgaactcggggctcgcacccagaagggagagaactcgtcgcgacgaggagagaagaacctgaggtggtcccgaatcagacgcggaagagggtgggttcaggagcaagccagcctgccgccaccatgaggcgcgcctcgaagaaatccttgtcgtctgccgcgaccgctagcgctggccctactaaagcagtttccaaggaagtagaacggattgatcaatttttctatacttatgccgataactcatctgtcatgattgacccagaaggcattgaaacactctgttctcaccttgaagttccccacaccgacgttaggattctaatgttagcatggatgaatggagagctggtttgaaagctcttcgagcagacagcatcagtaaactgaagaaagcatttcctgaactggttcaagaggttacaaggccgtcaaatttccaggatttctacatatatgcatttcgttattgcctcacagaggataagaagaagtgtatagaaataccagttgcttgtgagttgctgaatctagtattaggcttgcagttccgccctcaggttgacaagcttagtaattacctcaaggcaatggattctacttttttatgtggttctactcatcctttcttcatgaagactcggtgctcaattgacatgctatatttggactgtgtttcagtaccaaaatgactacaagataaacttcccatcacttgacaattatgattcagaccttgcttggcctttgattctagacaattttgttgagtggctaagagaaaataaaagctagatcttctattcatgtggtggtgaagttgtcattcaaaatgtaatattcaagaatgtaggtgactatatatatcattgtttacatttgtaagaccattttttgcccacctacttgtatatactgtcagtaatgcaaacttaggctccaataaacctactatttcacctctta

SEQ ID NO: 94638 - DNA, 1011 bp, Zea Mays
aaaaaaataaaatcgaatgcccctccgtcttcctccccttttgttctcccacaacgaactcggggctcgcacccagaagggagagaactcgtcgcgacgaggagagaagaacctgaggtggtcccgaatcagacgcggaagagggtgggttcaggagcaagccagcctgccgccaccatgaggcgcgcctcgaagaaatccttgtcgtctgccgcgaccgctagcgctggccctactaaagcagtttccaaggaagtagaacggattgatcaatttttctatacttatgccgataactcatctgtcatgattgacccagaaggcattgaaacactctgttctcaccttgaagttccccacaccgacgttaggattctaatgttagcatggaaaatgggctgtgagaagcaaggttattttaccttggatgaatggagagctggtttgaaagctcttcgagcagacagcatcagtaaactgaagaaagcatttcctgaactggttcaagaggttacaaggccgtcaaatttccaggatttctacatatatgcatttcgttattgcctcacagaggataagaagaagtgtatagaaataccagttgcttgtgagttgctgaatctagtattaggcttgcagttccgccctcaggttgacaagcttagtaattacctcaagtaccaaaatgactacaaggtgataaacatggatcagtggatgggatttatgcggttctgtaatgagataaacttcccatcacttgacaattatgattcagaccttgcttggcctttgattctagacaattttgttgagtggctaagagaaaataaaagctagatcttctattcatgtggtggtgaagttgtcattcaaaatgtaatattcaagaatgtaggtgactatatatatcattgtttacatttgtaagaccattttttgcccacctacttgtatatactgtcagtaatgcaaacttaggctccaataaacctactatttcacctctta

SEQ ID NO: 94639 - DNA, 1092 bp, Zea Mays
aaaaaaataaaatcgaatgcccctccgtcttcctccccttttgttctcccacaacgaactcggggctcgcacccagaagggagagaactcgtcgcgacgaggagagaagaacctgaggtggtcccgaatcagacgcggaagagggtgggttcaggagcaagccagcctgccgccaccatgaggcgcgcctcgaagaaatccttgtcgtctgccgcgaccgctagcgctggtgcggaacaagtaaatgaaaaacaaaacagaaaaagaaaaggagtcagtacaaacctgaccagcaggaaagcacaacgtggccctactaaagcagtttccaaggaagtagaacggattgatcaatttttctatacttatgccgataactcatctgtcatgattgacccagaaggcattgaaacactctgttctcaccttgaagttccccacaccgacgttaggattctaatgttagcatggaaaatgggctgtgagaagcaaggttattttaccttggatgaatggagagctggtttgaaagctcttcgagcagacagcatcagtaaactgaagaaagcatttcctgaactggttcaagaggttacaaggccgtcaaatttccaggatttctacatatatgcatttcgttattgcctcacagaggataagaagaagtgtatagaaataccagttgcttgtgagttgctgaatctagtattaggcttgcagttccgccctcaggttgacaagcttagtaattacctcaagtaccaaaatgactacaaggtgataaacatggatcagtggatgggatttatgcggttctgtaatgagataaacttcccatcacttgacaattatgattcagaccttgcttggcctttgattctagacaattttgttgagtggctaagagaaaataaaagctagatcttctattcatgtggtggtgaagttgtcattcaaaatgtaatattcaagaatgtaggtgactatatatatcattgtttacatttgtaagaccattttttgcccacctacttgtatatactgtcagtaatgcaaacttaggctccaataaacctactatttcacctctta

SEQ ID NO: 94640 - DNA, 1306 bp, Zea Mays
aaaaaaataaaatcgaatgcccctccgtcttcctccccttttgttctcccacaacgaactcggggctcgcacccagaagggagagaactcgtcgcgacgaggagagaagaacctgaggtggtcccgaatcagacgcggaagagggtgggttcaggagcaagccagcctgccgccaccatgaggcgcgcctcgaagaaatccttgtcgtctgccgcgaccgctagcgctggtgcggaacaagtaaatgaaaaacaaaacagaaaaagaaaaggagtcagtacaaacctgaccagcaggaaagcacaacgtggccctactaaagcagtttccaaggaagtagaacggattgatcaatttttctatacttatgccgataactcatctgtcatgattgacccagaaggcattgaaacactctgttctcaccttgaagttccccacaccgacgttaggattctaatgttagcatggaaaatgggctgtgagaagcaaggttattttaccttggatgaatggagagctggtttgaaagctcttcgagcagacagcatcagtaaactgaagaaagcatttcctgaactggttcaagaggttacaaggccgtcaaatttccaggatttctacatatatgcatttcgttattgcctcacagaggataagaagaagtgtatagaaataccagttgcttgtgagttgctgaatctagtattaggcttgcagttccgccctcaggttgacaagcttagtaattacctcaaggcaatggattctacttttttatgtggttctactcatcctttcttcatgaagactcggtgctcaattgacatgctatatttggactgtgtttcagtaccaaaatgactacaaggtgataaacatggatcagtggatgggatttatgcggttctgtaatgaggtcatgttttaaatattacatatgttgcagcatttcatttgttttaaatttaaaacaatagctcaaccttgtaatcctctttgcaatatttaatatttttttattctgtcattgacacttggcatttgctttttcgcagataaacttcccatcacttgacaattatgattcagaccttgcttggcctttgattctagacaattttgttgagtggctaagagaaaataaaagctagatcttctattcatgtggtggtgaagttgtcattcaaaatgtaatattcaagaatgtaggtgactatatatatcattgtttacatttgtaagaccattttttgcccacctacttgtatatactgtcagtaatgcaaacttaggctccaataaa

SEQ ID NO: 94641 - DNA, 2777 bp, Zea Mays
gtgggtctgaggcccattacaatagaggcattacaatagagcatacagttacgctaacagtatcaaatgcctttgaaatctctagcttcaaaaggatgtatggttctttacttttatgtagggtctgagcaagctgctgcacaagtaagaaattgttgtgaatattcctcctaacaaaggcgctctggttgttagaccagcttaggcagcagggtgccaagcgataagcaaaaatcttggttaccaactttgcaaagcttgagttttaggacttgagctttacaagatgagtttacagcttggacttgatcagatcccatctgaggaaaaggatctccagttttggcacttgaattatcaccattgtcgaatagccaccctaaaatcaaagtatttaatttcttctgtgactgctaaaaggttgaaataacttttctaaaagaaaattgcttgtccatgggagacccctgggcattttttagtttataagttagcaaattacatcctgattggtgattggctaggaaaactagctaaatcagtttccagggaggtaaccacaaattgctgagtcctggatttgagcacaggtggccttcctctcaactgggaagtactttctaatttccttttcagatgtagatgtaatatttccaagaagtacaacccttttccttttttccttgcaccaaaccttttgtaactttgttcccagataccgggttctcggtcttgttagaagtatattactaaacaatctatctgcctacactgcattgttcagcagatgctggattagataaaatgtgattttaacaagtactccctatgttccagtttattaggtggtagtgcatttttgagaaagggcagattgttaggcggcatacatagcaaggcattgcattataaattcctgtggaagaaacacagccgttttatccgacccgatccaacaagtgaatgcaatgcaccagatcagtgtggcacctggcgtgaattaaatcttgctcacactctggtgtgtgtactcttagcgcctttaaattgggtgtggagggagtgtatatgggtgcaaaaataacatagctttgtacaagtaaacaaacatggttggacatcacttttacctaagatttttattgaggactaactgtctctgcttcttacatcctagactgaaaattttccattagatgtccacattgccttggaatgtattgattgtgctatctctttcagcatcaacatgggaaataaggactttgtatacatcaggatcatcgagtccaaaatgtgttgttactcttatgttggagattgctccaagtttttggggcagatggaagagaaggcactcaaattttgacaaaagcatcccttttgctttgctcagccaagtagcaggtataagagagtacttcgcagccaatccagccttgacatctgagctgccttcaacagtagtgaagtcaaaagcatctgaaactttgatcatccagagtgaacatgaagattctgaacttggtgatgaattttatgatgcacttactagaggtgaatccttcgaagatggggatagtgatgatgatgatgatgccacaactccaaaggctagaaaagtaaagttgaagaatgtgtcatgggctattgcaggcttggctttaaagacaactaaagctttggttgagacaagtgaattggttacaaattctagtccagttactgttgaccccagccacttccatggcacccttcatagagcgaaaactcaaaatgatcaaaattcttggagtgcacctggtggggagaagtttatgatcagagggaagacttacttaacagattatcacaaggttgttggcggtgatccacttctagagctacttgcggtcgattggttcaaagttaatgaacgctttgattcagttgccttacatcccaaaagccttgtgcaatcagaagctgcaaagaaacttcctttcatattggttataaatttgcaggtgccagcgaaaccaaattataacttggttatgtactacgctgcagagagaccagtgaacaaagattctttgttgggtagattcattgatggaactgatgcataccgagatgccagatttaaacttataccaagcattgttgagggttattggatggttaagcgtgctgtaggaacaaaagcttgccttctgggcaaagcagtaacgtgcaattatcttcgccaggataactttctggagatagatgttgacatcggttcatcatccgttgcccggagcattattggtctagtattgggatatgtcacaagcatagttgttgatcttgctattcttattgaggccaaggaagagaaagagctccccgagtacattctgggcactgttcgtctgaaccgtgtgaatcccgacagtgctgtatcaatctaattacgtttctagccgatctatgcaaatttactcttatcctcttttattctgagagaaacagcgtggcattttgaaaatgtgaaatagcattactatttgctgatccccaatcgagggtaacatatgtaaattggcatgaggcatgactacgtgacgcctttcgtaaatagaataaatcaatggttatgtaatattaatatcccatatacgcgtgtcataatctatgtggcttaaaagtggcatcaagtcatctagtttcctgtgttaacttcttattccttaggtagtcagacattaacagtgtgtttggtttgaggaatgaagtgatccatctttttctca

SEQ ID NO: 94642 - DNA, 663 bp, Zea Mays
tttgaagctttttggcccaaattggaaggattccaggatgtcatccaggaggtttgggattctgtggcagctgtaaactgccctttcatgactctgaatttgaaactaaaagccacagctaggaagctgcaatcttggagtgggaagcatgtgggacatgtgaggactcagttggctttggcaaaggaaattctgcatagactagaaatagcgcaggactgcagagctttatccttggctgaaatctggttaagtaatttgctgaaaaagcactccctgtttttatcttcacttcaacggaccattgctagatcgagatcgaggatctcttggcttaaagagggggatgctaataccaaactctttcatatgcactctcgacatcgaaaaaggaggaattttgttgcacaactggtgaatggagaccagattctcactagtcatgatgataaagcagttttggtggacaatttctacgccagactaattggtgaatgtggggatagggagcagactattaatctggaggcgttgcacatgccaactttcaatcttgcacaccttgatgagcctgttacagagcttgaactttggaatacaattaagagtttacctaatgacaaggccccaggtcccgatggtttcactgggcgcttctataaa

SEQ ID NO: 94643 - DNA, 129 bp, Zea Mays
atgtgtttccccgtttcgtcgtttttcggttctcctttggctttgtctcccttttcttttctttgggggttgagctctgaggttttcatatggggtttcatctctagcctaccccaacgtgcttgggac

SEQ ID NO: 94644 - DNA, 849 bp, Zea Mays
gttggaccctttcccactttacccccgcccttcaccgtcggaatccacccccactcgcgctgtgtcctgcgggagatggccacggccgcgaggctgcctacggttccaccgtcggctgcggcgggagatgtctccgaggtggagctctcggaggcgggatcgccggacctcggcagccggagcagcggtagcggtagcgggggcagcggccggagcacggcggagtactccgggtgggtgtaccacctcggcgtaaactccatcggccacgagtactgccacctccgcttcctcgtcatccgcgccaaattcgtcgccatgtacaagcgggacccgcacgacaacccgggactcgaacctatccgaaaaggtgctgttagtcacactctgatggtggaggagcttggtcggcggagggtcaatcatggggatgtttatgttctgaggttgtacaatcggttgaatcaaacaaagaaaggagagatagcatgtgctactcctggtgaagcccggaaatggattgaagcatttgaacaagctaaacaacaggcagactatgatctgatgagaggggttaactggaacagattgcagaatgaaaatgagattaatcttgatggtcatcgtcctcgagttcggagatacgcacaaggcttggggaaatttgtaagaattggtaaagggccagaaatgctccttcgtcagtcttcagatcttcaaggccaagaaattgttaatacgaactttggaggtgatactggagacgcatttgaagcacatgaatggagatatgttcggacatttaacggtatcagaatttttgaagatattagtattacaaacccaaag

SEQ ID NO: 94645 - DNA, 676 bp, Zea Mays
ttacaggtttacagctccaaattctgttggaccctttcccactttacccccgcccttcaccgtcggaatccacccccactcgcgctgtgtcctgcgggagatggccacggccgcgaggctgcctacggttccaccgtcggctgcggcgggagatgtctccgaggtggagctctcggaggcgggatcgccggacctcggcagccggagcagcggtagcggtagcgggggcagcggccggagcacggcggagtactccgggtgggtgtaccacctcggcgtaaactccatcggccacgagtactgccacctccgcttcctcgtcatccgcgccaaattcgtcgccatgtacaagcgggacccgcacgacaacccgggactcgtcggtttccccgatccattgcactcttccctccctctgttttgtttctgatgcgtgtgatggctgcgccgcatctcgtggattatgcgttgaagcttgacagagttgtgcgggttgggtccctaactcaaagctgtggggtttggtacattcggttggtggctagttgaaagcctgaaaccgcactttgcgggatgctggactcactggttgttggcagcatttgcaaatgcttcattgtttagttgattttgaaacctgttggtttgttgaatattagatgaaattgccaagtaa

SEQ ID NO: 94646 - DNA, 1653 bp, Zea Mays
tttttgcgacttgcttgtctttcattaatctcatggtgtggtccggtgttgtttgagatccatggaaattacgaacccgaggaggcgtcctttgatattgaatcaccagctaccgctccgttcttgtacgatggttcctgaggatgcaaaatggtgagttgaatttgattcacctgcgtgctgttttgctgcatggtggtggtggagaggaagatgcagccattgccgccgcctgagcgccggagggtcgttcgtttcgtggtcttcatggccgtctccctcctggccctgttctgctgggctctcgtcaattccaggatcaacgtcgccatgccttactctgctttcgtgatgcgcgatgtcgacaagacgcccgcattcacaggcctagaagacaggcagaggcaccccgccggcgacccagcgtggacctcggcggcgccgcaggccgtgccggtgaccagtaacgtcacggcgggctcggtgaaattgggtgatccggtgctccgggagccgctggcaggagaagcggaacgggaacggagcgagaggtgcgacgcggacagcgcggcgctcagggtgtatatgtacgacctgccggcggagttccatttcggcatgctcgggtgggaacggaaggggaagctggcgtggcccgacgtccgcgacgcccacgccgcgccgcactaccccggcgggctcaacctgcagcacagcgtggcgtactggctcacgctggacatcctgtcctccgccctgccgcccggcagcgacgtggtcagagacaggccctgtgtcgccgtcagggtgacgaacgcgagcctcgccaacgtcttcttcgtgccgttcttcgcgtcactgagctacaaccgccactcgaagctccgccgcggggagagggtgagcaggaacagggtcctgcaggccgagctggtcaagtacctgatgcggaaggaggagtggaggaggtggggcggcaagaaccacctcatcgtgccgcaccaccccaacagcttgatggaggcacggaagaagctcagcgccgccatgttcgtgttgtctgacttcgggaggtactcgccggacgttgccaacctcaagaaggacgtcatcgcaccgtacaagcacgtcctccgctccttaggcgatggcgactcgccatcgttcgagcaacgtcccatcctcgcatacttccaaggggccatccatcggaaagctgtaagtcctttgttctgttctcgtgattcccttcccggaagcttttttgaggtatgagcaggccggccggcgtttcagggcgggaaggttcgccagaagctgtaccatctgctcaaggacgagcgcgacgtgcacttcacctacggcagcgtccggcagaacggcatccggcgcgccaccgccgggatgtccacgtcgaagttctgcctcaacatcgccggcgacacgccgtcctcgaaccggctcttcgacgccatcgtcagccactgtgtcccggtcatcatcagcgacgacatcgagttgccatttgaggacatgctcgactactcggagttctgcgtgttcgtgcgctccgccgacgccgccaagaagggattcctactacggctgctacggggcatatcgcgcgaggagtggaccaagatgtggatgaga

SEQ ID NO: 94647 - DNA, 113 bp, Zea Mays
gaagagaaggatacaaccacaaagtattcaaaagacaattttattccttttacataccaatgatgcagtattcttgaaaagtacgttggagcttaggctctaacaaaacatac

SEQ ID NO: 94648 - DNA, 100 bp, Zea Mays
ggagaacaggtgagtgtaaactcatgaatgtctggtcaggtaatcactattcactcacaatcctacatgttctttactatgattgtttcataacttcttt

SEQ ID NO: 94649 - DNA, 267 bp, Zea Mays
atgggaagctcggctgcatggtcgttcaggtcacgtgtggtggtcggatatcttcttcggagcacgctggagaaaagggtgtccccggcggtcacgattgatggactacgggaaaggaattccttaccggagctactctgcatggtccggtatcggagtgagtgcatgaataaaaccatttccaagtatgacaacatcaaacagatccaacgattacctgataatgccttttggaaacttaacctaacccgtaatgcctcagaatag

SEQ ID NO: 94650 - DNA, 291 bp, Zea Mays
atgggtgagggcagagagaaactcggcgagctggagggcataggtgagctggaggccgagcgccggccagggagttggcgagctggaagatggagcactcggctgtccggcgagcagaaccaggcacacgcggcaggaaaagaatatcagcgagagagggagagcgatgggaattgggaaggatgccgagggagatggaaacgacttgctgtggatgacgctgggagacttcagaaaaatcaacgaccggatagaatccaaggctcgtggcctggtgtccacgtacggtga

SEQ ID NO: 94651 - DNA, 2274 bp, Zea Mays
tcaaggtagtcgatgcatcaaagggtttccaagcaactcctataacctaatgcacatttcgctagacttaaagtgtgtaaaaattatttaaaaacacaaggaaggagttgcatgtaccggggcttgcctggaataaacactatgttagtgtttgttagatgacgtccaattggcagccaaccttttgggttggcacttgttcagtttatccatcttcagtttcgtccatcagcttcaccatgcggagtagtccacccgttacgtcatcttggggtcgacttggctcgtattccgcctcacgtgattaattatcgtacctaaatgaaatgcataatgcacatgtatgaatataagaagaactagcacaatactagacaatgttacacggtcgaggattacacactactaacaagtcattagaaccaattacaggaaacgccagctgtcgatataagacgaactataatattcacgcttcttatttcatcagatctaattctaacagcaaaccatagcgaaccatttataagcaccctatctctcttaactagagcacaacgtctaaactcagactaaaactagaaaccattccattagcttctagaattactattctcagctattatgcataagacccactaaattaaatatttcatttatccttagtctaacgagtagaacattattatacaacataaagttctgtgaaactgctttcctaattattttgggtaaccctaaccaagacaaaaaataaaaataaacatttaatcacgactactaatctaactaatcaatatctgactatgacatttaccgatcagcaaacacagaacataacggctatcgcaacaggtcatcgacttcataccaacaaatgaaatccgtcatacgcaatactaacagcacgtatcggctagtcgttagaaacacaagacttattctgtgtaatattaattcgaccatacttcggatatgaaacaccaatttaatcctcctcgcataacctacgtctttgaacctaaacttagctacatgacattagcaaacatctaatacaatcacaacacatctacatcctgacacgaaaattatcgcaattaatatactaaaccaataaatccatcgaacacatttatacatcaaactagctagcgaattaacaaaccgactcactaatgctaatttgactcagaagtcgtggaaacaacaacaagtcccggttcaaacgattcatcgaacacctggcgtgcaagtgaactaaatggaatcaaacgtgcttaacgcaaactgtgatgccccgtagggaatgaacctacacgcaaacatacaaaggaaacaaacatagcgctaaataacgctgcttgaacttgcgaagatctccagctatacgcagatcatcggcagcgcgtcacgatgaactccaaaaacaacgacggcgatgacacagagcgcggcgcgacagactagggacgccgcgatgggcagcgagtacagaggagaacgacaggctcaacggcgaacgacgcgacgacgggctcaacggcgaacgacacgacgaccagctggaataccagggagccgagcgcgaggaagctggaggttcggcgagcaaatcaccagggaattatggcgagaccgtaacaccacgacgacgctgtggacaagtcgagaacacaggatgcgaaggcacgattggtggcgtcctgtggctaaagccagcgagctgcgaaggacgcagtccggcacgcgcagctaaggcgtacggagcaggggtgccgggcacgtgtgcgcggcaacgcacggcccaacgagcaaagacggcgcgacggccatgggaggcagaaaaggagcgcgcgcagggagcaaggacagccagctcggaccggcgtatcgagctcgaggaagacgacggaaccaccacctgcgcacggcggccatggacgagcgcgccagggagcagcaggagggcggccaagcgccatgggtgagggcagagagaaactcggcgagctggagggcataggtgagctggaggccgagcgccggccagggagttggcgagctggaagatggagcactcggctgtccggcgagcagaaccaggcacacgcggcaggaaaagaatatcagcgagagagggagagcgatgggaattgggaaggatgccgagggagatggaaacgacttgctgtggatgacgctgggagacttcagaaaaatcaacgaccggatagaatccaaggctcgtggcctggtgtccacgtacggtga

SEQ ID NO: 94652 - DNA, 983 bp, Zea Mays
agcacaatactagacaatgttacacggtcgaggattacacactactaacaagtcattagaaccaattacaggaaacgccagctgtcgatataagacgaactataatattcacgcttcttatttcatcagatctaattctaacagcaaaccatagcgaaccatttataagcaccctatctctcttaactagagcacaacgtctaaactcagactaaaactagaaaccattccattagcttctagaattactattctcagctattatgcataagacccactaaattaaatatttcatttatccttagtctaacgagtagaacattattatacaacataaagttctgtgaaactgctttcctaattattttgggtaaccctaaccaagacaaaaaataaaaataaacatttaatcacgactactaatctaactaatcaatatctgactatgacatttaccgatcagcaaacacagaacataacggctatcgcaacaggtcatcgacttcataccaacaaatgaaatccgtcatacgcaatactaacagcacgtatcggctagtcgttagaaacacaagacttattctgtgtaatattaattcgaccatacttcggatatgaaacaccaatttaatcctcctcgcataacctacgtctttgaacctaaacttagctacatgacattagcaaacatctaatacaatcacaacacatctacatcctgacacgaaaattatcgcaattaatatactaaaccaataaatccatcgaacacatttatacatcaaactagctagcgaattaacaaaccgactcactaatgctaatttgactcagaagtcgtggaaacaacaacaagtcccggttcaaacgattcatcgaacacctggcgtgcaagtgaactaaatggaatcaaacgtgcttaacgcaaactgtgatgccccgtagggaatgaacctacacgcaaacatacaaaggaaacaaac

SEQ ID NO: 94653 - DNA, 75 bp, Zea Mays
gacggaggcgctgagtcaggcgacggaggcgctgagtcaggtccgctgagttatactctctcccccacctctttc

SEQ ID NO: 94654 - DNA, 1051 bp, Zea Mays
gccaagttagcgtcaccgtcacgcacgcagaggccagaggccacccaacagggtacagctgctgaggagctagcttagcgtcggggaaccgaggcatggggaggccaccgtgctgcgagaagggtggggtgaagaaggggccctggacgccggaggaggacctcgttctcgtctcctatgtgcaggaccacggccccgggaactggcgcgccgtgcccacgaacaccgggcttatgcgctgcagcaagagctgccggctccggtggaccaaccatctccgcccgggcatcaagtgcggcaacttcagcgaccaggaagagaagctcatcatccacctgcaggcgctgctcgggaacaggtgggccgcgatcgcgtcgtacatgccggagcgcacagacaacgacatcaagaactactggaacacgcacctcaagaaaaagttcactagaacgggcgctgctggcgccgaggcgaggagcggcagatgggccgcgcccaggggacagtgggaacggcggctgcagacggacatccacaccgcgcgccaggcactcagggaggcactgtcgctggaccccgcgcctctgtccacaaagcccccggagcaactgccgcagccgacggcgcccgctagccaggcgacgtcgtacgcttccagcgccgagaacatagcacgcctgctggagggctggtggtcgatgcaccccggcgccgcgggaaaggtgtcgtccgggtcgaggtcctcctccgtctccgtctccgtgttctcggacgacgatggcgtaatatctgcgagcaacagcggtggcacagcggcagcgcgcacgccagaggcgtcgatcaggatgaccaaggctgacggcgagggcaccgcggggccggggccggggccatcgttctcaatgctggagagctggctgctcgacgacgccatgggacatggcgacacggggctcgtcaccgtgccgatgggcgacccgtgcgacttcttttagaccggatcggagagcccgtggcaagtatggagaaacaaaataaaaagttcagtaat

SEQ ID NO: 94655 - DNA, 95 bp, Zea Mays
gccatattggaaacatatctatacgtagctcactctgttgctatagatccgtcgatcttcatgcaaacaaacacgtatttgctcttgttctaaac

SEQ ID NO: 94656 - DNA, 1591 bp, Zea Mays
ccttatccgcacagtcacacggtttaatcgaatggcttcgccgtcgtgtttcctcttccgcccccgtccgccgctgtgcagccgccgccgccgcagcagcagcaggtccctctacctcctctccaagcagagcctgcaccgacttccctcaccaagaacatgccgccgtccagtggcagagcagctcgtcctgcggtcgctgccgcccggtaacggcaggcggatgggggcgacgggcttcgcctgctactgttcctacgacaccgagaacggactgcccacgccttcaccggacaagggaaaaagctcggatgagtggccaatccttcgccggtgggatgttccatgggagtggccaacgatttctctcaccatggtggcatgtgcagtaagacagctttcttttgacagggatagctgagcaatctattttggagcaactaggttttcgagctggggagacaactctagatgagaaagcagagatactcttcttgggacaacttagcacgacggtagttgtacttggagttatatttggcatgaccaatacctttcgaccattctcagatgatatatttcgctatgaattcaatgaaccacttaagctgcaaaacggatggcttctgtggtctgcaatcggcctgtttgttgcaatagttgctattgctttagcaggtgctgcaatgacatttctgaatggtgaaacaccacagagagagacagactcgctggtccttttgttgccgctgattggctcgtcaaacatcagcactgcctgtttgctgggcatcactgggattttggcacccattctggaggaaactgtgtttcgaggatttcttatggtatccctgactatgtggtttcctactccatatgctgtgcttatgactgctgcagtgtttgcctttgctcactttacaccaggagaatttcctcagcttttcgtgcttggtgtggtcttaggattttcatatgctcaaactcgcaaccttctaactcctattgcaatacacgctgtctggaactctggagtaatattgttgctaacttttcttcagatgcaagggtatgatatcagggagattttgcaggcatcttgaagatttaacgcagttagattaatttcatcctgtgttttcttgtgtcagagagggtcttgcaagttacggaactacttgtgctctgctcaaagggacattttcacgaaagtgactattttaagctgaattacggaggcatcggcaaaggtgtagaaactctgttggggttacaacaatggttctcacctacatatagaagatccttgttttcctttgtcttttctatgttagttagatccatttcccttttcccagtggtcatttatctatcagactgggcaaaagcatctcatgactcatgaggctgggcctgggatactatttccatcatcaacataaaagacaaagtttatgtataccagagtcgtcttaatgacggtgtttctgttcacttcgccgtttgtgtatgattgcagagaactgtgactgataggaacatcaagactgtataattaatcagcaaccgtagttggtgtcttacctgt

SEQ ID NO: 94657 - DNA, 1656 bp, Zea Mays
gggataaccagataaaccgttgaagagagtctgagcgggtctcgccaaactgcgccccctctttcaattccttatccgcacagtcacacggtttaatcgaatggcttcgccgtcgtgtttcctcttccgcccccgtccgccgctgtgcagccgccgccgccgcagcagcagcaggtccctctacctcctctccaagcagagcctgcaccgacttccctcaccaagaacatgccgccgtccagtggcagagcagctcgtcctgcggtcgctgccgcccggtaacggcaggcggatgggggcgacgggcttcgcctgctactgttcctacgacaccgagaacggactgcccacgccttcaccggacaagggaaaaagctcggatgagtggccaatccttcgccggtgggatgttccatgggagtggccaacgatttctctcaccatggtggcatgtgcagtaagctttcttttgacagggatagctgagcaatctattttggagcaactaggttttcgagctggggagacaactctagatgagaaagcagagatactcttcttgggacaacttagcacgacggtagttgtacttggagttatatttggcatgaccaatacctttcgaccattctcagatgatatatttcgctatgaattcaatgaaccacttaagctgcaaaacggatggcttctgtggtctgcaatcggcctgtttgttgcaatagttgctattgctttagcaggtgctgcaatgacatttctgaatggtgaaacaccacagagagagacagactcgctggtccttttgttgccgctgattggctcgtcaaacatcagcactgcctgtttgctgggcatcactgggattttggcacccattctggaggaaactgtgtttcgaggatttcttatggtatccctgactatgtggtttcctactccatatgctgtgcttatgactgctgcagtgtttgcctttgctcactttacaccaggagaatttcctcagcttttcgtgcttggtgtggtcttaggattttcatatgctcaaactcgcaaccttctaactcctattgcaatacacgctgtctggaactctggagtaatattgttgctaacttttcttcagatgcaagggtatgatatcagggagattttgcaggcatcttgaagatttaacgcagttagattaatttcatcctgtgttttcttgtgtcagagagggtcttgcaagttacggaactacttgtgctctgctcaaagggacattttcacgaaagtgactattttaagctgaattacggaggcatcggcaaaggtgtagaaactctgttggggttacaacaatggttctcacctacatatagaagatccttgttttcctttgtcttttctatgttagttagatccatttcccttttcccagtggtcatttatctatcagactgggcaaaagcatctcatgactcatgaggctgggcctgggatactatttccatcatcaacataaaagacaaagtttatgtataccagagtcgtcttaatgacggtgtttctgttcacttcgccgtttgtgtatgattgcagagaactgtgactgataggaacatcaagactgtataattaatcagcaaccgtagttggtgtcttacctgt

SEQ ID NO: 94658 - DNA, 1732 bp, Zea Mays
cacacggtttaatcgaatggcttcgccgtcgtgtttcctcttccgcccccgtccgccgctgtgcagccgccgccgccgcagcagcagcaggtccctctacctcctctccaagcagagcctgcaccgacttccctcaccaagaacatgccgccgtccagtggcagagcagctcgtcctgcggtcgctgccgcccggtaacggcaggcggatgggggcgacgggcttcgcctgctactgttcctacgacaccgagaacggactgcccacgccttcaccggacaagggaaaaagctcggatgagtggccaatccttcgccggtgggatgttccatgggagtggccaacgatttctctcaccatggtggcatgtgcagtaagacagctttcttttgacagggatagctgagcaatctattttggagcaactaggttttcgagctggggagacaactctagatgagaaagcagagatactcttcttgggacaactgtacagatctaagttcctatctctattagcacgacggtagttgtacttggagttatatttggcatgaccaatacctttcgaccattctcagatgatatatttcgctatggtaaaggtttggtcttgctacgtttgtgttcattttcatgttcttttttatacattggccacacgttagttcctttccaaagattacctaatttaataagaggactgtacaagatgttaaagtgtaattaaattacttaatatctaatatggatatctgtgttcaatagtgtctctttccgtttgtactatggttgcattgtggtaattcaggttgttctgaacaatggtctagtgttgtttgtattctttaactttcagaattcaatgaaccacttaagctgcaaaacggatggcttctgtggtctgcaatcggcctgtttgttgcaatagttgctattgctttagcaggtgctgcaatgacatttctgaatggtgaaacaccacagagagagacagactcgctggtccttttgttgccgctgattggctcgtcaaacatcagcactgcctgtttgctgggcatcactgggattttggcacccattctggaggaaactgtgtttcgaggatttcttatggtatccctgactatgtggtttcctactccatatgctgtgcttatgactgctgcagtgtttgcctttgctcactttacaccaggagaatttcctcagcttttcgtgcttggtgtggtcttaggattttcatatgctcaaactcgcaaccttctaactcctattgcaatacacgctgtctggaactctggagtaatattgttgctaacttttcttcagatgcaagggtatgatatcagggagattttgcaggcatcttgaagatttaacgcagttagattaatttcatcctgtgttttcttgtgtcagagagggtcttgcaagttacggaactacttgtgctctgctcaaagggacattttcacgaaagtgactattttaagctgaattacggaggcatcggcaaaggtgtagaaactctgttggggttacaacaatggttctcacctacatatagaagatccttgttttcctttgtcttttctatgttagttagatccatttcccttttcccagtggtcatttatctatcagactgggcaaaagcatctcatgactcatgaggctgggcctgggatactatttccatcatcaacataaaagacaaagtttatgt

SEQ ID NO: 94659 - DNA, 1862 bp, Zea Mays
gggataaccagataaaccgttgaagagagtctgagcgggtctcgccaaactgcgccccctctttcaattccttatccgcacagtcacacggtttaatcgaatggcttcgccgtcgtgtttcctcttccgcccccgtccgccgctgtgcagccgccgccgccgcagcagcagcaggtccctctacctcctctccaagcagagcctgcaccgacttccctcaccaagaacatgccgccgtccagtggcagagcagctcgtcctgcggtcgctgccgcccggtaacggcaggcggatgggggcgacgggcttcgcctgctactgttcctacgacaccgagaacggactgcccacgccttcaccggacaagggaaaaagctcggatgagtggccaatccttcgccggtgggatgttccatgggagtggccaacgatttctctcaccatggtggcatgtgcagtaagctttcttttgacagggatagctgagcaatctattttggagcaactaggttttcgagctggggagacaactctagatgagaaagcagagatactcttcttgggacaactgtacagatctaagttcctatctctatgtaaaaactttatttgtaccatagttttcagtttaatttgtgaatatgctgcatgctctgaatatcttgtgtcagagtgacattacttgccattttctgtttctgcaagtgcagtagcacgacggtagttgtacttggagttatatttggcatgaccaatacctttcgaccattctcagatgatatatttcgctatggtaaaggtttggtcttgctacgtttgtgttcattttcatgttcttttttatacattggccacacgttagttcctttccaaagattacctaatttaataagaggactgtacaagatgttaaagtgtaattaaattacttaatatctaatatggatatctgtgttcaatagtgtctctttccgtttgtactatggttgcattgtggtaattcaggttgttctgaacaatggtctagtgttgtttgtattctttaactttcagaattcaatgaaccacttaagctgcaaaacggatggcttctgtggtctgcaatcggcctgtttgttgcaatagttgctattgctttagcaggtgctgcaatgacatttctgaatggtgaaacaccacagagagagacagactcgctggtccttttgttgccgctgattggctcgtcaaacatcagcactgcctgtttgctgggcatcactgggattttggcacccattctggaggaaactgtgtttcgaggatttcttatggtatccctgactatgtggtttcctactccatatgctgtgcttatgactgctgcagtgtttgcctttgctcactttacaccaggagaatttcctcagcttttcgtgcttggtgtggtcttaggattttcatatgctcaaactcgcaaccttctaactcctattgcaatacacgctgtctggaactctggagtaatattgttgctaacttttcttcagatgcaagggtatgatatcagggagattttgcaggcatcttgaagatttaacgcagttagattaatttcatcctgtgttttcttgtgtcagagtatgttattatcaaacacagtaaatacgcaatgatagaaatacattctttagaaaaccctttgccaaggtgtatttagaattgatgcataacatctaagtaaaaaacttagattttccttgaagtgctttaatatattactgtgctgtgtgaagttgaaatttagagctttagaagaaatcgtgctatgtataatcatttacttcaagacaatcaaataacagaagccagttctgtgataa

SEQ ID NO: 94660 - DNA, 2049 bp, Zea Mays
gggataaccagataaaccgttgaagagagtctgagcgggtctcgccaaactgcgccccctctttcaattccttatccgcacagtcacacggtttaatcgaatggcttcgccgtcgtgtttcctcttccgcccccgtccgccgctgtgcagccgccgccgccgcagcagcagcaggtccctctacctcctctccaagcagagcctgcaccgacttccctcaccaagaacatgccgccgtccagtggcagagcagctcgtcctgcggtcgctgccgcccggtaacggcaggcggatgggggcgacgggcttcgcctgctactgttcctacgacaccgagaacggactgcccacgccttcaccggacaagggaaaaagctcggatgagtggccaatccttcgccggtgggatgttccatgggagtggccaacgatttctctcaccatggtggcatgtgcagtaagctttcttttgacagggatagctgagcaatctattttggagcaactaggttttcgagctggggagacaactctagatgagaaagcagagatactcttcttgggacaactgtacagatctaagttcctatctctatgtaaaaactttatttgtaccatagttttcagtttaatttgtgaatatgctgcatgctctgaatatcttgtgtcagagtgacattacttgccattttctgtttctgcaagtgcagtagcacgacggtagttgtacttggagttatatttggcatgaccaatacctttcgaccattctcagatgatatatttcgctatggtaaaggtttggtcttgctacgtttgtgttcattttcatgttcttttttatacattggccacacgttagttcctttccaaagattacctaatttaataagaggactgtacaagatgttaaagtgtaattaaattacttaatatctaatatggatatctgtgttcaatagtgtctctttccgtttgtactatggttgcattgtggtaattcaggttgttctgaacaatggtctagtgttgtttgtattctttaactttcagaattcaatgaaccacttaagctgcaaaacggatggcttctgtggtctgcaatcggcctgtttgttgcaatagttgctattgctttagcaggtgctgcaatgacatttctgaatggtgaaacaccacagagagagacagactcgctggtccttttgttgccgctgattggctcgtcaaacatcagcactgcctgtttgctgggcatcactgggattttggcacccattctggaggaaactgtgtttcgaggatttcttatggtatccctgactatgtggtttcctactccatatgctgtgcttatgactgctgcagtgtttgcctttgctcactttacaccaggagaatttcctcagcttttcgtgcttggtaattgttacatctgtaataggcataaaaccacaaataatgtgcaatatctaaatcttagtatcttaacatagttagactaaacacactcaaaacatctcaaagtcatatatagtatgtagaattattgtgttaccatgatctgtcattttttgctggctatgtttccttcatctattttatgtgcacaggtgtggtcttaggattttcatatgctcaaactcgcaaccttctaactcctattgcaatacacgctgtctggaactctggagtaatattgttgctaacttttcttcagatgcaagggtatgatatcagggagattttgcaggcatcttgaagatttaacgcagttagattaatttcatcctgtgttttcttgtgtcagagtatgttattatcaaacacagtaaatacgcaatgatagaaatacattctttagaaaaccctttgccaaggtgtatttagaattgatgcataacatctaagtaaaaaacttagattttccttgaagtgctttaatatattactgtgctgtgtgaagttgaaatttagagctttagaagaaatcgtgctatgtataatcatttacttcaagacaatcaaataacagaagccagttctgtg

SEQ ID NO: 94661 - DNA, 1782 bp, Zea Mays
gggataaccagataaaccgttgaagagagtctgagcgggtctcgccaaactgcgccccctctttcaattccttatccgcacagtcacacggtttaatcgaatggcttcgccgtcgtgtttcctcttccgcccccgtccgccgctgtgcagccgccgccgccgcagcagcagcaggtccctctacctcctctccaagcagagcctgcaccgacttccctcaccaagaacatgccgccgtccagtggcagagcagctcgtcctgcggtcgctgccgcccggtaacggcaggcggatgggggcgacgggcttcgcctgctactgttcctacgacaccgagaacggactgcccacgccttcaccggacaagggaaaaagctcggatgagtggccaatccttcgccggtgggatgttccatgggagtggccaacgatttctctcaccatggtggcatgtgcagtaagacagctttcttttgacagggatagctgagcaatctattttggagcaactaggttttcgagctggggagacaactctagatgagaaagcagagatactcttcttgggacaactgtacagatctaagttcctatctctatgtaaaaactttatttgtaccatagttttcagtttaatttgtgaatatgctgcatgctctgaatatcttgtgtcagagtgacattacttgccattttctgtttctgcaagtgcagtagcacgacggtagttgtacttggagttatatttggcatgaccaatacctttcgaccattctcagatgatatatttcgctatggtaaaggtttggtcttgctacgtttgtgttcattttcatgttcttttttatacattggccacacgttagttcctttccaaagattacctaatttaataagaggactgtacaagatgttaaagtgtaattaaattacttaatatctaatatggatatctgtgttcaatagtgtctctttccgtttgtactatggttgcattgtggtaattcaggttgttctgaacaatggtctagtgttgtttgtattctttaactttcagaattcaatgaaccacttaagctgcaaaacggatggcttctgtggtctgcaatcggcctgtttgttgcaatagttgctattgctttagcaggtgctgcaatgacatttctgaatggtgaaacaccacagagagagacagactcgctggtccttttgttgccgctgattggctcgtcaaacatcagcactgcctgtttgctgggcatcactgggattttggcacccattctggaggaaactgtgtttcgaggatttcttatggtatccctgactatgtggtttcctactccatatgctgtgcttatgactgctgcagtgtttgcctttgctcactttacaccaggagaatttcctcagcttttcgtgcttggtgtggtcttaggattttcatatgctcaaactcgcaaccttctaactcctattgcaatacacgctgtctggaactctggagtaatattgttgctaacttttcttcagatgcaagggtatgatatcagggagattttgcaggcatcttgaagatttaacgcagttagattaatttcatcctgtgttttcttgtgtcagagtatgttattatcaaacacagtaaatacgcaatgatagaaatacattctttagaaaaccctttgccaaggtgtatttagaattgatgcataacatctaagtaaaaaacttagattttccttgaagtgctttaatatattactgtgctgtgtgaagttg

SEQ ID NO: 94662 - DNA, 1098 bp, Zea Mays
atggcttcgccgtcgtgtttcctcttccgcccccgtccgccgctgtgcagccgccgccgccgcagcagcagcaggtccctctacctcctctccaagcagagcctgcaccgacttccctcaccaagaacatgccgccgtccagtggcagagcagctcgtcctgcggtcgctgccgcccggtaacggcaggcggatgggggcgacgggcttcgcctgctactgttcctacgacaccgagaacggactgcccacgccttcaccggacaagggaaaaagctcggatgagtggccaatccttcgccggtgggatgttccatgggagtggccaacgatttctctcaccatggtggcatgtgcagtaagagtgacattacttgccattttctgtttctgcaagtgcagtagcacgacggtagttgtacttggagttatatttggcatgaccaatacctttcgaccattctcagatgatatatttcgctatgaattcaatgaaccacttaagctgcaaaacggatggcttctgtggtctgcaatcggcctgtttgttgcaatagttgctattgctttagcaggtgctgcaatgacatttctgaatggtgaaacaccacagagagagacagactcgctggtccttttgttgccgctgattggctcgtcaaacatcagcactgcctgtttgctgggcatcactgggattttggcacccattctggaggaaactgtgtttcgaggatttcttatggtatccctgactatgtggtttcctactccatatgctgtgcttatgactgctgcagtgtttgcctttgctcactttacaccaggagaatttcctcagcttttcgtgcttggtgtggtcttaggattttcatatgctcaaactcgcaaccttctaactcctattgcaatacacgctgtctggaactctggagtaatattgttgctaacttttcttcagatgcaagggtatgatatcagggagattttgcaggcatcttgaagatttaacgcagttagattaatttcatcctgtgttttcttgtgtcagagtatgttattatcaaacacagtaaatacgcaatgatagaaatacatt

SEQ ID NO: 94663 - DNA, 1572 bp, Zea Mays
caccctatcccccacactcaccctccgcaccggatcccgtcatcacctccgagcggcgcgccgggccggcatccaactcgccgccgacgcgccgcgccccagaacgagccgccggaacgatctccctaacccccgatgcgccgtcctattgcccgcggcgagcccaaggggctgaggaagggatatacgcatgggttgcagcaaattatgctttggggactcttgggggtgatccaaacgacaccactgggattattgaacttggtggggcttctattcaggtgacacttgttactggtgaacctgtgccaccgaagttctctcatatgcttaagtttggtgatgtctcatataacctgtacagccacagttttttgcatcttggtctgaatgtagcatatgaatcactccatgacttgctcagctcacctggccttagatcaatggccacacatttgatttctcaagctaagtacaaagatccttgcactccaaggggatttacacgcatagcaggatcagctaaacttcctgttggtgttcttgagccgaaggttgaatacagaccttttgctcattctgcggggaacttctctgagtgtagatctgcagcactaacactactgcaaaaaggaaatgagggatgtacatatcatgaatgccgccttggagcagcatttgtaccagagttggaagggaaatttttggcgacagaaaacttttaccatacttcaaagttctttggtctgagttcgaagcccttcctttctgatctgatggtggctggggagaaattttgccatggggattggtcgaagattaaaaataagtacagttcttttgatgacggacaactgcttcttttttgcttttcctcagcatatattattgctctactgcatgatacgcttaaaatgccactggatcataaaaggattgatgttgtaaaccaaatccatggcgtgcctgttgactgggcattgggtgctttcattgtgcagacgacgatgaacagaacagagtactcagattcatcagtttcatatctaaacagctatgactctcctggcttggttccgcttctgttcattattgtggttgtatttacagcattgtccattctaaggtggagaaaacctcgtctgaagacgatctacgatatggagaaaggcaggtacatcataacaagggtcagccaatgagtcgcgcacatcagcgttgggagtgggtggactttctgcagcggagcactattgaccatgtatgtagattttcctaaattgatttcttacttagtggccaactacctccagcatgttgccttgcggagtcaacttgttgagtttgagcagcaacccctgtatatgatagaaggatgcgggttgccgtggcatttgtgcatgttcagtgttgtatgtaatgttgctaaactgttgttgatgtaattagaattttgtgcatgggcatccatccgatgatgtaatcctgagataaccatgtgtctaatgatcgattgaagttctctgccatggatcatggatggcagggcagctgtatctttgtttcatgtca

SEQ ID NO: 94664 - DNA, 1483 bp, Zea Mays
caccctatcccccacactcaccctccgcaccggatcccgtcatcacctccgagcggcgcgccgggccggcatccaactcgccgccgacgcgccgcgccccagaacgagccgccggaacgatctccctaacccccgatgcgccgtcctattgcccgcggcgagcccaaggggctgaggaagggatatacgcatgggttgcagcaaattatgctttggggactcttgggggtgatccaaacgacaccactgggattattgaacttggtggggcttctattcaggtgacacttgttactggtgaacctgtgccaccgaagttctctcatatgcttaagtttggtgatgtctcatataacctgtacagccacagttttttgcatcttggtctgaatgtagcatatgaatcactccatgacttgctcagctcacctggccttagatcaatggccacacatttgatttctcaagctaagtacaaagatccttgcactccaaggggatttacacgcatagcaggatcagctaaacttcctgttggtgttcttgagccgaaggttgaatacagaccttttgctcattctgcggggaacttctctgagtgtagatctgcagcactaacactactgcaaaaaggaaatgagggatgtacatatcatgaatgccgccttggagcagcatttgtaccagagttggaagggaaatttttggcgacagaaaacttttaccatacttcaaagttctttggtctgagttcgaagcccttcctttctgatctgatggtggctggggagaaattttgccatggggattggtcgaagattaaaaataagtacagttcttttgatgacggacaactgcttcttttttgcttttcctcagcatatattattgctctactgcatgatacgcttaaaatgccactggatcataaaaggattgatgttgtaaaccaaatccatggcgtgcctgttgactgggcattgggtgctttcattgtgcagacgacgatgaacagaacagacattgtccattctaaggtggagaaaacctcgtctgaagacgatctacgatatggagaaaggcaggtacatcataacaagggtcagccaatgagtcgcgcacatcagcgttgggagtgggtggactttctgcagcggagcactattgaccatgtatgtagattttcctaaattgatttcttacttagtggccaactacctccagcatgttgccttgcggagtcaacttgttgagtttgagcagcaacccctgtatatgatagaaggatgcgggttgccgtggcatttgtgcatgttcagtgttgtatgtaatgttgctaaactgttgttgatgtaattagaattttgtgcatgggcatccatccgatgatgtaatcctgagataaccatgtgtctaatgatcgattgaagttctctgccatggatcatggatggcagggcagctgtatctttgtttcatgtca

SEQ ID NO: 94665 - DNA, 1270 bp, Zea Mays
caccctatcccccacactcaccctccgcaccggatcccgtcatcacctccgagcggcgcgccgggccggcatccaactcgccgccgacgcgccgcgccccagaacgagccgccggaacgatctccctaacccccgatgcgccgtcctattgcccgcggcgagcccaaggggctgaggaagggatatacgcatgggttgcagcaaattatgctttggggactcttgggggtgatccaaacgacaccactgggattattgaacttggtggggcttctattcaggtgacacttgttactggtgaacctgtgccaccgaagttctctcatatgcttaagtttggtgatgtctcatataacctgtacagccacagttttttgcatcttggtctgaatgtagcatatgaatcactccatgacttgctcagctcacctggccttagatcaatggccacacatttgatttctcaagctaagtacaaagatccttgcactccaaggggatttacacgcatagcaggatcagctaaacttcctgttggtgttcttgagccgaaggttgaatacagaccttttgctcattctgcggggaacttctctgagtgtagatctgcagcactaacactactgcaaaaaggaaatgagggatgtacatatcatgaatgccgccttggagcagcatttgtaccagagttggaagggaaatttttggcgacagaaaacttttaccatacttcaaaggattgatgttgtaaaccaaatccatggcgtgcctgttgactgggcattgggtgctttcattgtgcagacgacgatgaacagaacagagtggagaaaacctcgtctgaagacgatctacgatatggagaaaggcaggtacatcataacaagggtcagccaatgagtcgcgcacatcagcgttgggagtgggtggactttctgcagcggagcactattgaccatgtatgtagattttcctaaattgatttcttacttagtggccaactacctccagcatgttgccttgcggagtcaacttgttgagtttgagcagcaacccctgtatatgatagaaggatgcgggttgccgtggcatttgtgcatgttcagtgttgtatgtaatgttgctaaactgttgttgatgtaattagaattttgtgcatgggcatccatccgatgatgtaatcctgagataaccatgtgtctaatgatcgattgaagttctctgccatggatcatggatggcagggcagctgtatctttgtttcatgtca

SEQ ID NO: 94666 - DNA, 2053 bp, Zea Mays
cccatgcggaccggaacggtcaattatccctccactgcccgccacaccctatcccccacactcaccctccgcaccggatcccgtcatcacctccgagcggcgcgccgggccggcatccaactcgccgccgacgcgccgcgccccagaacgagccgccggaacgatctccctaacccccgatgcgccgtcctattgcccgcggcgagcccaaggtacaaaccctagctctagctcctccctccgcagccgccccaaccaagatgggcgcccataggcgacaacccagctcccaccgccgcgttgccggcgccctcacgctcctcgccgcgtccgcgctcgcgcttcttctcctagcatcccgccgggttcccccgacctacggcgtcatcatcgacgccggcagcacggggagccgcgtccacgtcctcgcctaccgctccacggcgggactcccgcagctggactgggcacgcatggcctcgatgaaggctaccccagggctatcgtccttcgcggcggacccacgcggcgcggggctgtctctggcgccgctattggagtttgccaggcgccgtgtgccgcgggagagctggggggaaaccgaggtgcggctcatggccactgccgggctgcggctgctcgattccgcagtggccgagtccatcctgcagtcttgcagggaagtgcttcgggggtcggggttccaatttcaggacgaatgggccaccgtgatctcaggggctgaggaagggatatacgcatgggttgcagcaaattatgctttggggactcttgggggtgatccaaacgacaccactgggattattgaacttggtggggcttctattcaggtgacacttgttactggtgaacctgtgccaccgaagttctctcatatgcttaagtttggtgatgtctcatataacctgtacagccacagttttttgcatcttggtctgaatgtagcatatgaatcactccatgacttgctcagctcacctggccttagatcaatggccacacatttgatttctcaagctaagtacaaagatccttgcactccaaggggatttacacgcatagcaggatcagctaaacttcctgttggtgttcttgagccgaaggttgaatacagaccttttgctcattctgcggggaacttctctgagtgtagatctgcagcactaacactactgcaaaaaggaaatgagggatgtacatatcatgaatgccgccttggagcagcatttgtaccagagttggaagggaaatttttggcgacagaaaacttttaccatacttcaaagttctttggtctgagttcgaagcccttcctttctgatctgatggtggctggggagaaattttgccatggggattggtcgaagattaaaaataagtacagttcttttgatgacggacaactgcttcttttttgcttttcctcagcatatattattgctctactgcatgatacgcttaaaatgccactggatcataaaaggattgatgttgtaaaccaaatccatggcgtgcctgttgactgggcattgggtgctttcattgtgcagacgacgatgaacagaacagagtactcagattcatcagtttcatatctaaacagctatgactctcctggcttggttccgcttctgttcattattgtggttgtatttacagcattgtccattctaaggtggagaaaacctcgtctgaagacgatctacgatatggagaaaggcaggtacatcataacaagggtcagccaatgagtcgcgcacatcagcgttgggagtgggtggactttctgcagcggagcactattgaccatgtatgtagattttcctaaattgatttcttacttagtggccaactacctccagcatgttgccttgcggagtcaacttgttgagtttgagcagcaacccctgtatatgatagaaggatgcgggttgccgtggcatttgtgcatgttcagtgttgtatgtaatgttgctaaactgttgttgatgtaattagaattttgtgcatgggcatccatccgatgatgtaa

SEQ ID NO: 94667 - DNA, 873 bp, Zea Mays
caccctatcccccacactcaccctccgcaccggatcccgtcatcacctccgagcggcgcgccgggccggcatccaactcgccgccgacgcgccgcgccccagaacgagccgccggaacgatctccctaacccccgatgcgccgtcctattgcccgcggcgagcccaaggggctgaggaagggatatacgcatgggttgcagcaaattatgctttggggactcttgggggtgatccaaacgacaccactgggattattgaacttggtggggcttctattcaggtgacacttgttactggtgaacctgtgccaccgaagttctctcatatgcttaagtttggtgatgtctcatataacctgtacagccacagttttttgcatcttggtctgaatgtagcatatgaatcactccatgacttgctcagctcacctggccttagatcaatggccacacatttgatttctcaagctaagtacaaagatccttgcactccaaggggatttacacgcatagcaggatcagctaaacttcctgttggtgttcttgagccgaaggttgaatacagaccttttgctcattctgcggggaacttctctgagtgtagatctgcagcactaacactactgcaaaaaggaaatgagggatgtacatatcatgaatgccgccttggagcagcatttgtaccagagttggaagggaaatttttggcgacagaaaacttttaccatacttcaaaggtccaattctttctctaccgttgggggctttcagaaaggggattaaatttgaacatactgcatgcataatgataggagtcttctcttcggatcaagattgtccattttcttttatgttcagtattctacaatcttt

SEQ ID NO: 94668 - DNA, 834 bp, Zea Mays
cccatgcggaccggaacggtcaattatccctccactgcccgccacaccctatcccccacactcaccctccgcaccggatcccgtcatcacctccgagcggcgcgccgggccggcatccaactcgccgccgacgcgccgcgccccagaacgagccgccggaacgatctccctaacccccgatgcgccgtcctattgcccgcggcgagcccaaggtacaaaccctagctctagctcctccctccgcagccgccccaaccaagatgggcgcccataggcgacaacccagctcccaccgccgcgttgccggcgccctcacgctcctcgccgcgtccgcgctcgcgcttcttctcctagcatcccgccgggttcccccgacctacggcgtcatcatcgacgccggcagcacggggagccgcgtccacgtcctcgcctaccgctccacggcgggactcccgcagctggactgggcacgcatggcctcgatgaaggctaccccagggctatcgtccttcgcggcggacccacgcggcgcggggctgtctctggcgccgctattggagtttgccaggcgccgtgtgccgcgggagagctggggggaaaccgaggtgcggctcatggccactgccgggctgcggctgctcgattccgcagtggccgagtccatcctgcagtcttgcagggaagtgcttcgggggtcggggttccaatttcaggacgaatgggccaccgtgatctcaggcatgtaacatagtaaaactgtgtgacttattttccgttttgatgacttgctttggaaatgtgtggatctggagctcttgcatttgatgtgatgct

SEQ ID NO: 94669 - DNA, 552 bp, Zea Mays
tagaaagccgggaactcgatccggttgccgcagggcctgccgctggggaggacggggcagtcgacgaagctgtcgccggcggcgtcgacgcagaagtagagctggtagagctggctgttgccggcctcgtcgcggttgcactccacgtagggctcgaagccggtgccctggcggatggcgcccttgatctggctcagcgtgtagtagccgccgtcgggcttgacgccggcggaggtgagcgcgccgaggactcccagctggtcgcggaggcgcagcgcggcctggaagtagccgtgctcgtcgaagacgtcggctgcgcaggtgccgtgcttctcccactcgtggccccagaagcgcagcccgtcgttggacgggcacgccagcgtcggccacttggcgcggaggctgctcagcaggtcgctcacctggaacgtacagcgttgtcggggctgcagttctgcgggtacgtgccgtcgtcgcggttgggccagaggccgtggatcccgaagtccgccgccggcttgccggacttggggtagcagcagctctgct

SEQ ID NO: 94670 - DNA, 1846 bp, Zea Mays
ctccgtctccgtcggttcgtcgggcgcaatagaaaaactaccgaacgcgccgccgctcctgccccgtatctataccaccgaaggcgaggaaggggggccaaggacgagcgctttttcgtgcccgctggccattgccgctgctcacgagcctcccgccccgcgctgccctgccctctgcggctctgccccaacgagccccaggagagccaggtaaaggagccgtcaaaagcccccgccgaggagagcacgcaaggacatggcgtcaaccgttaccttcagcctaattagcacccaagctgggttgatccataagccaaggaaccttggagccacaagctacgctggcttaaaggtgccgagctttggctctgaatcatcattcttgggtaggaacgcatcccttcgggcggctgttactacaaggattgtgcccaaggcaaagtctggatctcagatatcgccacatgcatcttacaaggtggcgctgctcggtgctgctggtggcatcggtcaacccttgggcctattgattaagatgtctcccctggtgtccgagctgcatctgtatgatattgctaatgtcaagggagtcgctgcagatctcagccactgcaacacgcccgctcaggtacttgacttcactgggccctcagagttagccagctgcttgaaaggcgtggatgttgttgtcatccctgccggggtcccaaggaagccgggcatgactcgtgatgacctttttaacatcaacgcgagcatcgtcaagtcacttgttgaggctgtcgcggacaattgccccgaggcgttcatccatatcatcagcaacccggtgaattccaccgtgccaatcgcagcagaggttttgaagcagaagggcgtctacaatctcaagaagctttttggggttaccaccctggatgttgtcagggctaacacatttgtggcgcagaagaagaaccttaagctcatcgatgttgatgtcccagttgttggtggccatgctgggatcacaattctgccgttgctatcaaagaccaggccgtccgtcaccttcacagatgaggaagctgaggagctgacaaagaggatacagaatgccgggacagaggtggtggaggcaaaggctggtgctgggtctgctaccctgtccatggcctacgctgctgccagattcgtcgagtcgtctctccgcgccctggccggtgaccccgatgtttacgagtgcacatttatccagtccgaggcaaccgatctgccattcttcgcaacaagagtcaagctcggcaagagtggtgtcgaatccatcgtttctgccgacctcgagggagtgaccgagtgcgaggccaaggcgcttgacgcgcttaaggccgagttgaagggaagcattgagaagggtgtcgccttcgccagcaaacagcaggaggctgctgcatctgtttgaagtgaagcaagtgaattggatgtccacaagagaataaagggacaatggtcttgaatggcttttaagttttgcagcctagagttttttgttttgttttggtgtcaacgtgtaggaggaagacgcagagatggttgctgttgctgttagtttctaattactacgcggggactggacatccatgcccccccaagttatcgcatgtttctaaaccaggccctgcttaacaccacatatctattttttttctactcttgtattgtggttctgtttgtagcttgttcgagtttacgaactacaaagaagctaataaaaacacttgtattgaaagtgatgtgctccacctccaggtttgcattgtcgtattttgctacttttcaacagaaaagccctggcttcattggctac

SEQ ID NO: 94671 - DNA, 1986 bp, Zea Mays
ctcgcacagccgcaacttcccaaaaacaatctaggcgctcgcgtccgtacccccatagaccgggtccacgcgcgcacgggcgggcgggaatccccctccgttgtttcctaggccgcaccgcagtcgccctcgccgcctccgtctccgtcggttcgtcgggcgcaatagaaaaactaccgaacgcgccgccgctcctgccccgtatctataccaccgaaggcgaggaaggggggccaaggacgagcgctttttcgtgcccgctggccattgccgctgctcacgagcctcccgccccgcgctgccctgccctctgcggctctgccccaacgagccccaggagagccaggtaaaggagccgtcaaaagcccccgccgaggagagcacgcaaggtcagacatggcgtcaaccgttaccttcagcctaattagcacccaagctgggttgatccataagccaaggaaccttggagccacaagctacgctggcttaaaggtgccgagctttggctctgaatcatcattcttgggtaggaacgcatcccttcgggcggctgttactacaaggattgtgcccaaggcaaagtctggatctcagatatcgccacatgcatcttacaaggtggcgctgctcggtgctgctggtggcatcggtcaacccttgggcctattgattaagatgtctcccctggtgtccgagctgcatctgtatgatattgctaatgtcaagggagtcgctgcagatctcagccactgcaacacgcccgctcaggtacttgacttcactgggccctcagagttagccagctgcttgaaaggcgtggatgttgttgtcatccctgccggggtcccaaggaagccgggcatgactcgtgatgacctttttaacatcaacgcgagcatcgtcaagtcacttgttgaggctgtcgcggacaattgccccgaggcgttcatccatatcatcagcaacccggtgaattccaccgtgccaatcgcagcagaggttttgaagcagaagggcgtctacaatctcaagaagctttttggggttaccaccctggatgttgtcagggctaacacatttgtggcgcagaagaagaaccttaagctcatcgatgttgatgtcccagttgttggtggccatgctgggatcacaattctgccgttgctatcaaagaccaggccgtccgtcaccttcacagatgaggaagctgaggagctgacaaagaggatacagaatgccgggacagaggtggtggaggcaaaggctggtgctgggtctgctaccctgtccatggcctacgctgctgccagattcgtcgagtcgtctctccgcgccctggccggtgaccccgatgtttacgagtgcacatttatccagtccgaggcaaccgatctgccattcttcgcaacaagagtcaagctcggcaagagtggtgtcgaatccatcgtttctgccgacctcgagggagtgaccgagtgcgaggccaaggcgcttgacgcgcttaaggccgagttgaagggaagcattgagaagggtgtcgccttcgccagcaaacagcaggaggctgctgcatctgtttgaagtgaagcaagtgaattggatgtccacaagagaataaagggacaatggtcttgaatggcttttaagttttgcagcctagagttttttgttttgttttggtgtcaacgtgtaggaggaagacgcagagatggttgctgttgctgttagtttctaattactacgcggggactggacatccatgcccccccaagttatcgcatgtttctaaaccaggccctgcttaacaccacatatctattttttttctactcttgtattgtggttctgtttgtagcttgttcgagtttacgaactacaaagaagctaataaaaacacttgtattgaaagtgatgtgctccacctccaggtttgcattgtcgtattttgctacttttcaacagaaaagccctggcttcattggctac

SEQ ID NO: 94672 - DNA, 2128 bp, Zea Mays
gaatttgccccgtcaggatgccctccgattcgtccgtaggttaaattctcaaaaaatcttaattttatcaatgcgatgggccgtcggggtaactcttgtgcactctgcatgccgttttagtatggcgttattattctgaaatacccttggacaagcgacctgtgtgtccagtgtccaccacccgtgaggacaatgcaatccagagacctgaatctgtctctgtccgccctccccaccgtttccaggacctggtggagacggagtgccagaggtggaagagcaaaggcgtgaacataaagtacgaggtgagggggaaccggaaggggtacaaggccggcgcgctcaaggaaggactgaagcacgactacgtcgcagactgcgaatacatcgccatgttcgacgccgacttccagcctgactctgacttcctcctcaggactatcccgttcctcgtgcacaacccggagatcgccctcgtccaggctcgctggaagtttgttaattctgacgagtgtctgctgacaagattccaagagatgtcgttggactaccatttcaagtatgagcaagaggccggctcctcggtgtattcattctttggcttcaatgggacagctggtgtctggaggatctcagcgatcgatgatgctgggggctggaaggaccggacgacagtggaagatatggacctggctgtccgtgcgatgctgcagggatggaagttcctttacgtcggcgacattaaggtcaagagcgaactgcctagcacattcaaggcgtaccggtttcagcagcacaggtggtcatgtgggccggcgaacctgttcaagaaaatgatggtagagattttagaaaacaagagagtgtcgctgtggagtaaaatccacctatggtacgatttcttcttcgtcgggaaagtcgctgctcatacggtgacattcatctactactgcttcgcgatccctgtgtctgttctgttccctgagatccagatccctctctggggagttgtctatgtcccgacagtcataaccctcttgaaggctcttggcacaccgagttcctttcacctggtgatcctctgggtcctgtttgagaatgtcatgtcgttgcaccggattaaggctgcagtaagtggtcttctggatgctggtgggcgagtcaatgagtgggttgtcactgagaagttgggcgacaccagcaaggcaaagcctggcaccaatggatcagacactgctgtaaaggtgatagatgtgaagctaacagaaccgcttgttccgaagctagtgaagaggcgagcaagattttgggagaggtaccactgctcagaacttttcgttggaacctgcataatcctgtgtggtttctatgacctgctttttgcaaataagggatactacatttttctcttccttcaaggcacggcgttccttgttgttggttttgggtatgtcggcacactacctccttgcactgcataagctgtcatggacaactgatattacctgctcaccagaaactgagcaagcaaagctcctctctcctgcacatatcaaactcttgaattcaatgatagttgagcaatgttcccccatcagtcttggcctgacatgatccaccgccgagaaggttgttcagatatcgccgtcgttctcctgtcagtgttggtcagatttgagccaaaccattctttattgtcagaaggccattcaaatagtgtcaccattgcaaattttataataacggtgtttaccgaagcatcatgaaaagaaaaatgattggtgcagcagcatttcgttcgcattccatagagatgcagttcacatccagtatttttttttggaaatctagtgttattactcagagttcagatccataatggaagattgttggcttcctcagttcataacctgtgtaggcttaaaacttgtagatgtaaattgttattaacactaatattttttattgaatccgggtattattgaaatgcaagtgtagcatgcatttcttttcctgtaagaagccaaagatgacttctgagtaacacgtctaatcagacattttacttgatgtggcacatggaatagtggatctattttaactatgtagcagcaaccatttggtcata

SEQ ID NO: 94673 - DNA, 1370 bp, Zea Mays
caaagctcaagtttttgagcgacactactgttgtttcatcgtctaacgcctgctgctgacctgaaaagcttctcgccgttacagttcctttcacctggtgatcctctgggtcctgtttgagaatgtcatgtcgttgcaccggattaaggctgcagtaagtggtcttctggatgctggtgggcgagtcaatgagtgggttgtcactgagaagttgggcgacaccagcaaggcaaagcctggcaccaatggatcagacactgctgtaaaggtgatagatgtgaagctaacagaaccgcttgttccgaagctagtgaagaggcgagcaagattttgggagaggtaagtttacctattatcatcattaggccttgttcggttgcaagtgaatcagagagagaggattaaatccctttccatcaattttgactagcaaataatttaatcccctctaatctctttcgatccacttctaaccgaacaagcccttaagagtttctcaaagttagcataacactagtgcaggttttatgcatttatgagaatgtgcataacactagtttagtttttatgcatttatgagaatgtgcataacactaccgtactactttttatgcatttatgagaaattgagaatgtgcatagtgttgattgcatactttctagtgtctccaaatgcttataagcaatattatctatatcaggtaccactgctcagaacttttcgttggaacctgcataatcctgtgtggtttctatgacctgctttttgcaaataagggatactacatttttctcttccttcaaggcacggcgttccttgttgttggttttgggtatgtcggcacactacctccttgcactgcataagctgtcatggacaactgatattacctgctcaccagaaactgagcaagcaaagctcctctctcctgcacatatcaaactcttgaattcaatgatagttgagcaatgttcccccatcagtcttggcctgacatgatccaccgccgagaaggttgttcagatatcgccgtcgttctcctgtcagtgttggtcagatttgagccaaaccattctttattgtcagaaggccattcaaatagtgtcaccattgcaaattttataataacggtgtttaccgaagcatcatgaaaagaaaaatgattggtgcagcagcatttcgttcgcattccatagagatgcagttcacatccagtatttttttttggaaatctagtgttattactcagagttcagatccataatggaagattgttggcttcctcagttcataacctgtgtaggcttaaaacttgtagatgtaaattgttattaacactaatattttttattgaatccgggtattattg

SEQ ID NO: 94674 - DNA, 2405 bp, Zea Mays
ggctcgggcgccaccactagtagcttagcacgcgccatatatctaataagccggcgctgctgtacgtcgcttccgccatctacttgctagcagctatctaataggccggccgggcagcgcgaaacagcagcgggagctcagctcgctcgctcgctcgtctctgccgccccgcccgtcgcggtcgtcgcgcgagaggggtggccatcatccatgggcggcgtccgcggccacagcagcgccgccggcgtctctgaggaggcggcggcggcggcggcttgggtgtgggccgcggcggatctccccgtgcgcgtggactgggcgggcgcggcggcgcaatgcgcgtccctgtgggcgcacgcgcgggcgctgctggtcgtgccggcggtgcggctcctggtggccctgtcgctggcgatgacggtgatggtgctggccgagaagctgttcgtctgcgccgtgtgcgtcgccgtgcgggcgttccggctcggcccgcaccggcggtaccgctgggagcccatcgccgccgccgccgccgccgtggggtaccccgtggtgctggtgcagatccccatgtacaacgagcgggaggtgtacaagctgtcgatcggggcggcatgtgcgctggagtggccgccggagcgcttcgtgatccaggtgctggacgactccacggaccccgttgtaaaggacctggtggagacggagtgccagaggtggaagagcaaaggcgtgaacataaagtacgaggtgagggggaaccggaaggggtacaaggccggcgcgctcaaggaaggactgaagcacgactacgtcgcagactgcgaatacatcgccatgttcgacgccgacttccagcctgactctgacttcctcctcaggactatcccgttcctcgtgcacaacccggagatcgccctcgtccaggctcgctggaagtttgttaattctgacgagtgtctgctgacaagattccaagagatgtcgttggactaccatttcaagtatgagcaagaggccggctcctcggtgtattcattctttggcttcaatgggacagctggtgtctggaggatctcagcgatcgatgatgctgggggctggaaggaccggacgacagtggaagatatggacctggctgtccgtgcgatgctgcagggatggaagttcctttacgtcggcgacattaaggtcaagagcgaactgcctagcacattcaaggcgtaccggtttcagcagcacaggtggtcatgtgggccggcgaacctgttcaagaaaatgatggtagagattttagaaaacaagagagtgtcgctgtggagtaaaatccacctatggtacgatttcttcttcgtcgggaaagtcgctgctcatacggtgacattcatctactactgcttcgcgatccctgtgtctgttctgttccctgagatccagatccctctctggggagttgtctatgtcccgacagtcataaccctcttgaaggctcttggcacaccgagttcctttcacctggtgatcctctgggtcctgtttgagaatgtcatgtcgttgcaccggattaaggctgcagtaagtggtcttctggatgctggtgggcgagtcaatgagtgggttgtcactgagaagttgggcgacaccagcaaggcaaagcctggcaccaatggatcagacactgctgtaaaggtgatagatgtgaagctaacagaaccgcttgttccgaagctagtgaagaggcgagcaagattttgggagaggtaccactgctcagaacttttcgttggaacctgcataatcctgtgtggtttctatgacctgctttttgcaaataagggatactacatttttctcttccttcaaggcacggcgttccttgttgttggttttgggtatgtcggcacactacctccttgcactgcataagctgtcatggacaactgatattacctgctcaccagaaactgagcaagcaaagctcctctctcctgcacatatcaaactcttgaattcaatgatagttgagcaatgttcccccatcagtcttggcctgacatgatccaccgccgagaaggttgttcagatatcgccgtcgttctcctgtcagtgttggtcagatttgagccaaaccattctttattgtcagaaggccattcaaatagtgtcaccattgcaaattttataataacggtgtttaccgaagcatcatgaaaagaaaaatgattggtgcagcagcatttcgttcgcattccatagagatgcagttcacatccagtatttttttttggaaatctagtgttattactcagagttcagatccataatggaagattgttggcttcctcagttcataacctgtgtaggcttaaaacttgtagatgtaaattgttattaacactaatattttt

SEQ ID NO: 94675 - DNA, 564 bp, Zea Mays
gtccgccattccattccatgtcagtctacggcaccagaggcaagcgcgggaacgccaacaaaatcattgttacgaacacaaggttaatttgacctttgtggttcgggttgatgataagtaattgttaacatgagtattgctttgatgtaagtcatggactaaccatagtacgagattatgtgtatatgtatccatgtctctcggcttgtggtgtgcagtatagaaacggtggtcgacgtcgaatgcgaagatcatgtgagttcgtgccgatgggccaggagcgtcgaaggacgagcactgggtcttgatcgaggaattgaagaagctagaagactaaccgtggtgactgacacttgggacacgcaccagcccaaggaccactacgtaaaaaaggctcaaactcaaaggggacgtggccatctgtgacactggttaaaaacacgtcactattttttcgcagtgacatcttttttaaaaatgggtcactaataactatgttcatgtgacatctattacaaaaatgtgtccctatcaaaatatggtaataacttagtgacatatttt

SEQ ID NO: 94676 - DNA, 1513 bp, Zea Mays
catccatccatacatatgccgctgcccgctgcaggtggagacggaatatctccgagcggtgctctggtggagtcacacgaaaggaaccgaccggccgcctatctataagagcccccgcgcagctcgcagtggcatctggcattcgatcgatcaccttgctgctgctgctgctgctgtcgctggttggccaggagcacaccagctgcttgctgtgtcgccgtcgtagaagcagccgcgcgctgtcgtcgtcgtctcgtccgcgacgcgaccactccggcggctgctgctgcctctcatgctggccacgccaccgacgcttttgtgataccatacgaagcgccgcggcgggcacgttggagatgtcgtcgctgggtgggcaacagcagcacgggcgcggcgacgaggccagggcgcggctcaggtggacgcgccagctgcacggccgcttcgtgctcgccgtggcccagctcggcggcgcggacaaggcgacgcccaagtccgtgatgagggcgatggccgtgtcggggctcacgctgtaccacctcaagagccacctccagaggtaccggctggcggtgagccaaggcaccgcgtccccggtgggcgagggcgacaacggaggtggcgccaacgagcggtcgtcctcctcggagagccagctggacgagtacgacgacggttccgtggccgacctgcatggtgattcttccgggagcatggcggcgcgggtgcagagagaggcgaaaaggaagcggcatgagcagatgcagatcgaggtgcagcggcacctccagctgaggatcgaggcgcaggggaggtacatgcagtccgtgctgcgccgggcgcaggaggccctcgccgaccacatactgggctcgccggccaccggcgcggaggcagagctctcggagctggcctccgcggtggagaccgggaccgggtgcctgtcctccacttcctgctgctccacctcgccttccccgatgcgccaccgctccgccgacagctgcgtgacgtcctcctcctcctcctcctcctcggaggccgagagccaggcccccgccggcgccaacacgtgcgctggtacgcgcgactgctccgtcgagcggccggtgcagggcgaggagagtacattcctgcagaggcacgaggacgaggacgaggcagaggaagccgacgttggagctgcagctgcagctgaggacgaggacggcacttcgtcagagattgatctcaacaggtaggcgacgaagatcctgatcagaagcatctgtgctgcatgtgcccagcatcggatgattggcggggtggccttcaaggttgggacttgcttgggagggggcaggcttttgagcaacgtctgctgctgaaacagctggctacatacactgcaagtctgcagcgaccacactgctcttcattccataatatatgatatacataatattccaatttatgcaaatggttcttctgcttcatgtatgtacccctgtgaaaaatcatggcttgaact

SEQ ID NO: 94677 - DNA, 1969 bp, Zea Mays
cgccatgtatctatcttcacttgaaagcaaactttcgtgtgccgacaaagccttgatgctgcagaggagaggcagcgtttgctcgtgagagtgtgagacggtggtggtggggctccgagggaggacagaatccaatccaaggcgcaagcaggcgagaagggtcaaagaagtgaaagcaaaagcagcaaacaattggggtggtgagtggtgacatggaggatgcaaaagaagatgctgccatggtgccatggccaggcctggccctggcccccagctgcctcacgcgccatattcccttgccttgcccgccgattcgaccccgggcgtatccatccatccatacatatgccgctgcccgctgcaggtggagacggaatatctccgagcggtgctctggtggagtcacacgaaaggaaccgaccggccgcctatctataagagcccccgcgcagctcgcagtggcatctggcattcgatcgatcaccttgctgctgctgctgctgctgtcgctggttggccaggagcacaccagctgcttgctgtgtcgccgtcgtagaagcagccgcgcgctgtcgtcgtcgtctcgtccgcgacgcgaccactccggcggctgctgctgcctctcatgctggccacgccaccgacgcttttgtgataccatacgaagcgccgcggcgggcacgttggagatgtcgtcgctgggtgggcaacagcagcacgggcgcggcgacgaggccagggcgcggctcaggtggacgcgccagctgcacggccgcttcgtgctcgccgtggcccagctcggcggcgcggacagtgagttcctctcatctaagtcgtccgcccacgaactcgcagccagagcctgtccagtcctttctttgaccgcttgcttgaatgctactactaccgacgtcggctttcgttaccaaaacattgcagaggcgacgcccaagtccgtgatgagggcgatggccgtgtcggggctcacgctgtaccacctcaagagccacctccagaggtaccggctggcggtgagccaaggcaccgcgtccccggtgggcgagggcgacaacggaggtggcgccaacgagcggtcgtcctcctcggagagccagctggacgagtacgacgacggttccgtggccgacctgcatggtgattcttccgggagcatggcggcgcgggtgcagagagaggcgaaaaggaagcggcatgagcagatgcagatcgaggtgcagcggcacctccagctgaggatcgaggcgcaggggaggtacatgcagtccgtgctgcgccgggcgcaggaggccctcgccgaccacatactgggctcgccggccaccggcgcggaggcagagctctcggagctggcctccgcggtggagaccgggaccgggtgcctgtcctccacttcctgctgctccacctcgccttccccgatgcgccaccgctccgccgacagctgcgtgacgtcctcctcctcctcctcctcctcggaggccgagagccaggcccccgccggcgccaacacgtgcgctggtacgcgcgactgctccgtcgagcggccggtgcagggcgaggagagtacattcctgcagaggcacgaggacgaggacgaggcagaggaagccgacgttggagctgcagctgcagctgaggacgaggacggcacttcgtcagagattgatctcaacaggtaggcgacgaagatcctgatcagaagcatctgtgctgcatgtgcccagcatcggatgattggcggggtggccttcaaggttgggacttgcttgggagggggcaggcttttgagcaacgtctgctgctgaaacagctggctacatacactgcaagtctgcagcgaccacactgctcttcattccataatatatgatatacataatattccaatttatgcaaatggttcttctgcttcatgtatgtacccctgtgaaaaatcatggcttgaact

SEQ ID NO: 94678 - DNA, 2163 bp, Zea Mays
cgccatgtatctatcttcacttgaaagcaaactttcgtgtgccgacaaagccttgatgctgcagaggagaggcagcgtttgctcgtgagagtgtgagacggtggtggtggggctccgagggaggacagaatccaatccaaggcgcaagcaggcgagaagggtcaaagaagtgaaagcaaaagcagcaaacaattggggtggtgagtggtgacatggaggatgcaaaagaagatgctgccatggtgccatggccaggcctggccctggcccccagctgcctcacgcgccatattcccttgccttgcccgccgattcgaccccgggcgtatccatccatccatacatatgccgctgcccgctgcaggtggagacggaatatctccgagcggtgctctggtggagtcacacgaaaggaaccgaccggccgcctatctataagagcccccgcgcagctcgcagtggcatctggcattcgatcgatcaccttgctgctgctgctgctgctgtcgctggttggccaggagcacaccagctgcttgctgtgtcgccgtcgtagaagcagccgcgcgctgtcgtcgtcgtctcgtccgcgacgcgaccactccggcggctgctgctgcctctcatgctggccacgccaccgacgcttttgtgataccatacgaagcgccgcggcgggcacgttggagatgtcgtcgctgggtgggcaacagcagcacgggcgcggcgacgaggccagggcgcggctcaggtggacgcgccagctgcacggccgcttcgtgctcgccgtggcccagctcggcggcgcggacagtgagttcctctcatctaagtcgtccgcccacgaactcgcagccagagcctgtccagtcctttctttgaccgcttgcttgaatgctactactaccgacgtcggctttcgttaccaaaacattgcagaggcgacgcccaagtccgtgatgagggcgatggccgtgtcggggctcacgctgtaccacctcaagagccacctccaggtaccgtacatcccgcctcggcctccggcgaattgttcgtctcttgattgatgatccgtgcgccgctcaactctgcctcctgatcgacccttcgatcatgtggtccacaccacaccacactgtcactgctgctgcagaggtaccggctggcggtgagccaaggcaccgcgtccccggtgggcgagggcgacaacggaggtggcgccaacgagcggtcgtcctcctcggagagccagctggacgagtacgacgacggttccgtggccgacctgcatggtgattcttccgggagcatggcggcgcgggtgcagagagaggcgaaaaggaagcggcatgagcagatgcagatcgaggtaaacgatgggtcggtgtcggtcgatcaccattccgagctcgtggtttctgatcaagctgctgagctcggttcattcatgcatgccaggtgcagcggcacctccagctgaggatcgaggcgcaggggaggtacatgcagtccgtgctgcgccgggcgcaggaggccctcgccgaccacatactgggctcgccggccaccggcgcggaggcagagctctcggagctggcctccgcggtggagaccgggaccgggtgcctgtcctccacttcctgctgctccacctcgccttccccgatgcgccaccgctccgccgacagctgcgtgacgtcctcctcctcctcctcctcctcggaggccgagagccaggcccccgccggcgccaacacgtgcgctggtacgcgcgactgctccgtcgagcggccggtgcagggcgaggagagtacattcctgcagaggcacgaggacgaggacgaggcagaggaagccgacgttggagctgcagctgcagctgaggacgaggacggcacttcgtcagagattgatctcaacaggtaggcgacgaagatcctgatcagaagcatctgtgctgcatgtgcccagcatcggatgattggcggggtggccttcaaggttgggacttgcttgggagggggcaggcttttgagcaacgtctgctgctgaaacagctggctacatacactgcaagtctgcagcgaccacactgctcttcattccataatatatgatatacataatattccaatttatgcaaatggttcttctgcttcatgt

SEQ ID NO: 94679 - DNA, 121 bp, Zea Mays
ccgtttcaacgatttccaccggcactagtttttttggttccacgttttcaccgacattgtgctctctcaaatttaaatactaaaattatgtataaatggtgattcaaactatgcctgttag

SEQ ID NO: 94680 - DNA, 1503 bp, Zea Mays
agcatcccgtccgtccgatccgtccgcacggcgtatctccgccgtcggccgcagccggcgtctcctggccacacccgccgccccggcccggcaggcggcagtttaatacaaaccaggcttgctcgtggcggcaaaaaaccaacgtgcttgatctccctccgccactccatccatctcctcgctcccagtccccgggaagcatggcgtccgtcaccgcccgcgccccggtagcggcccttcgcccgtcgtcggcatcgctcaagtcgtcgtcggccttccttggccactctagccgcctcggccgcaccgcgtctcccacgaggcgcagcctcaaggcggaggccaagggcgagtggctccccggccttccctccccctcctacctcgacggcagcctggcgggtgacaatggcttcgacccgttgggcctggcggaggaccccgagaacctgcggtggttcgtgcaggcggagctggtgaacggccggtgggccatgcttggcgtggccgggatgctcatcccggaggtgctgaccaaagccgggctgatcaacgcgccgcagtggtacgacgccggcaagtcggagtacttcgcgtcgtcgtccacgctgttcgtggtcgagttcatcctgttccactacgtggagatccggcggtggcaggacatcaagaaccccggcagcgtcaaccaggaccccatcttcaagagctacagcctgccgccgcacgagtgcggctacccgggcagcgtcttcaacccgctcaacttcgcgcccacgctcgaggccaaggagaaggagctcgccaacgggaggctggcgatgctggcgttcctgggcttcctgatccagcacaacgtcaccggcaaggggcccttcgacaacctgctgcagcacctgtctgacccatggcacaacaccatcatccagaccttctccggttgagtcgaggtcgaggagggatacgatccatcgctggtgagctgatatggactggaaggcaaacattgaaaccttaagttcctttctggatcagtttgtgtgtgttgttaatctatctggagggtacagattcgggccgtgttgcaatgcatgcatggtctgaagggagcgagggctgaggagtgactggtatgtacattagctgaaggggatattaagggtagagatcgtttgatcagtatcatctgtatatccccatgcatggggtttcgttttgtgcgcttacttctggcttgccagcgtatggttcaatgtggaaacacatgtattagtacgagaactagtagacttataattaatataaatcaagcacgtacgacttctagctaaaaacaactcaacctactcggaagccctgagaatggtaagcaaccacattagggcttgttcggttattcctatcccatgtggattggatgggattgaaaaaaattgtgaaagattttgacttgtttggaattgaaacccatccaatcccacccaatccacatggattgagagc

SEQ ID NO: 94681 - DNA, 1777 bp, Zea Mays
ctctctccccaccattcagctgccgctgcccccgattgagccgccgccgcctcagattcgccgtcgccacctcagattcgccgccgccgccgccgatttggacgctgtcgccggcgattcagcctccgccgccctggatttggcctccgccgctcccgattcggcgctgccaccctgaaacagcgccgcccctttcccttcccctatgccctatgccctcttgctgcttctcacctaggcgacggggacgccttggatccttcgggcgcctggacgcctaggcgacgcctttaaaacaagggtcttctctgtattaaatattttctgatgtacagtagctaccttgttaattcatgcctccagcatgattctccgttgtgctccatctgtttgttgcttgaccttgcgccttgttattctgccatttggttgaggatagattaatcctcaattgtctgacaattgttcacgtctaatttaggttttttcggcatttgggtttgttcacaagatagctacttttgagaaagcagctggtttccaggcacttatccagtatactgatgccccaactgctcttgaagctaaaaactcattggatggaagaagcatcccaaaatatttacttccagaacatatcggtgcctgccacatgcgcataaccttttctgcgcataaggatttgaatatcaaatttcagtcgcatcgcagcagggattacaccaatccttaccttcctgtgaaccaaacagcaattgaggggattgtgcagcccacggtgggccctgatgggaaggtaaaggagcctgagagcaatgtacttttagcatcaattgagaacatgcaatatgctgtgacagtggatgttctgcacactgtgttttctgcttttggagctgttcaaaaaattgcaatgtttgagaagaatggtggaatgcaggctctaatccaatatccagatataactaccgcagccgttgctaaacaagctttggagggacactgcatatatgatggtggttactgtaagcttcatctgtcatactctcgtcatactgatctcaatgtaaaggcacatgatgagagaagcagggactacactctttcagaccctaacgtgcagctgcaagctgctgcacaaacgccagttctaaggtctccgggagtggcatggcagaacactgcatcagtaccagctgctcctttttatgcaagcacagcgacttcaactcctattggagttggacaggtggctgcttggaatcctaacatgcaggcagggagttttgcatctgcatcgactgcataccccaaccaaccattaatggccaactccatgcctcactatcctgctattggatcgagttccggtgccccaccagtagcatttcaggcttcgcagcagatgacacagtatagcatgccccctggtgctccgccgcacgcaccaccagctggccaatcgatttactacccgaagtaagcggttttggttcaatattatcagagagcaatcaggcattgttacctgcgacaattgtggtccgcaaatgcaatcttgcgaattttgcaagtgcgctgtagcacttgtaacttgcgagcgcccttcgcaagaatgcatcagcgtctgctgtgtctgtaaaactgtcaaagatagtgtttacctattagcttgcatggtatattggtggtgagatatgttggagtagttttgatgcctcaagaatctcttacgcatcttttttttttaaaaaaaactgcgctttgcttttggtct

SEQ ID NO: 94682 - DNA, 1730 bp, Zea Mays
ctctctccccaccattcagctgccgctgcccccgattgagccgccgccgcctcagattcgccgtcgccacctcagattcgccgccgccgccgccgatttggacgctgtcgccggcgattcagcctccgccgccctggatttggcctccgccgctcccgattcggcgctgccaccctgaaacagcgccgcccctttcccttcccctatgccctatgccctcttgctgcttctcacctaggcgacggggacgccttggatccttcgggcgcctggacgcctaggcgacgcctttaaaacaagggtcttctctgtattaaatattttctgatgtacagtagctaccttgttaattcatgcctccagcatgattctccgttgtgctccatctgtttgttgcttgaccttgcgccttgttattctgccatttggttgaggatagattaatcctcaattgtctgacaattgttcacgtctaatttaggttttttcggcatttgggtttgttcacaagatagctacttttgagaaagcagctggtttccaggcacttatccagtatactgatgccccaactgctcttgaagctaaaaactcattggatggaagaagcatcccaaaatatttacttccagaacatatcggtgcctgccacatgcgcataaccttttctgcgcataaggatttgaatatcaaatttcagtcgcatcgcagcagggattacaccaatccttaccttcctgtgaaccaaacagcaattgaggggattgtgcagcccacggtgggccctgatgggaaggtaaaggagcctgagagcaatgtacttttagcatcaattgagaacatgcaatatgctgtgacagtggatgttctgcacactgtgttttctgcttttggagctgttcaaaaaattgcaatgtttgagaagaatggtggaatgcaggctctaatccaatatccagatataactaccgcagccgttgctaaacaagctttggagggacactgcatatatgatggtggttactgcacatgatgagagaagcagggactacactctttcagaccctaacgtgcagctgcaagctgctgcacaaacgccagttctaaggtctccgggagtggcatggcagaacactgcatcagtaccagctgctcctttttatgcaagcacagcgacttcaactcctattggagttggacaggtggctgcttggaatcctaacatgcaggcagggagttttgcatctgcatcgactgcataccccaaccaaccattaatggccaactccatgcctcactatcctgctattggatcgagttccggtgccccaccagtagcatttcaggcttcgcagcagatgacacagtatagcatgccccctggtgctccgccgcacgcaccaccagctggccaatcgatttactacccgaagtaagcggttttggttcaatattatcagagagcaatcaggcattgttacctgcgacaattgtggtccgcaaatgcaatcttgcgaattttgcaagtgcgctgtagcacttgtaacttgcgagcgcccttcgcaagaatgcatcagcgtctgctgtgtctgtaaaactgtcaaagatagtgtttacctattagcttgcatggtatattggtggtgagatatgttggagtagttttgatgcctcaagaatctcttacgcatcttttttttttaaaaaaaactgcgctttgcttttggtct

SEQ ID NO: 94683 - DNA, 973 bp, Zea Mays
caacaggccacctagtccaacgagccccattccaattcggcaattcccatttccccttcccaacaggccaaccccctctacctatctttttcctcagcaaccgtgctcggttcctcctccctcgaaacggctcccacccccgcgccgcgataagaaaacccaccaaaccctaaccctagcagcggtgccacaaccgcccgcgttcccggccggagaggaagccgagccagcaaggatgccgcccgggtcggcgacgcaatttcggtacacgcagacgccgtccaaggtgctgcatcttcggaacatgccatgggagtgcaccgaggaggagctcgtcgacctctgcaaacccttcggccgggtcgtaaacaccatgtgcaacgtcggcgctaaccgcaaccaggcattcgtcgagtttgcagatcaaaaccaggcaatttcaatggtgtcctattatgcttcatcttcagaacctgctcaagttcgtggtaaaactgtatatatccaatattcaaacaggcaagaaattactaacaataaaggcactggggattcttctggcaatgttctacttgtcacttttgaaggtgttcagcctaatgatgttaccatagaagttattcatttggtaagttttagtatctatatgtatgtatgaatgtattcacttaaatggctgagcagcttcctgcattgcttgggctgtaaaaatatattttacttcttctcaaagcatgtctgtgcttaatatgaagtaattctcctacaaatgtatctatatgtaggagaaatcttttttcacttgatatacatcttctcaaagcatgcctgtgcttaatatgacctattgatgatgcatgacccatatctttccatctattgaaaactcagtaaaattatcttaaaacacgcaaaattactgtttgattgcactctgttaattgaggacgtatatcctgcttccttgcaagaa

SEQ ID NO: 94684 - DNA, 873 bp, Zea Mays
atggctcccggagccagagacaactctgatcccgcctcttatatccacacggtaattaaatatcccatctgcgggcgtagttcatgggtcatggcgcaagtgcagcacctgatagagaggtgcatgacgttcgggatgagcatggaggagtacatggaggcgctggcgaagcgcgccgacgtccagcccgtggtcacctccacagtgtggaaggagctggagaataccatggtgtccgtggtgcccattaggtggccgaggagcagggacgaggtctggaaggccaacataccgcacccatgccttaccgctgagaagtcagaccagcggtggatggtcgtcaatggcgataagatcaacttccctggcggtggcaccgacttccacactggcgctggcaagtatattgtgcaccttgcgcagatgctgaattttccaaatggtacgctcaacaatggagggaacatcaggaatgtgcttgatgttggctgtggggttgccagcttcggcgcttaccttctttcacatgatgtacttgcgacgtctcttgctcccagcgacgtgcatgaaaatcaaatccagcttgccctcgagagagggatctcggcagcccttggtgtgctgggcacaaggaggctgccatacccaagccgctcgtttgaaatggcacattgctctcgttgtcggattgactggctacagaaggatggggtcttgttgctggaagtcggtagggtattaaggcctggaggatgttttgtgtattcatcaccggaggcctatgctttggaccccttcaacaggaagatatggagacagatgagtgaccttgctcgaaggatgtgttggcgagttgcatctaagaagaactag

SEQ ID NO: 94685 - DNA, 263 bp, Zea Mays
ctctagcttgtcgaggcgtgaagctccccacggaccatgctgccctccaacgcgactgccggctaaagctcgccgcatggccttgtggccgcgtcctcctcttcttcggcggtcgcagcggtcacggccctcctcgacaccctcctctctgtctcccgttcctgcggcggcgctctccctgcctcgccggctcgatggagccgcccagcatgcacaacggccgcggccccgccccccacgcgtcggcgccttctcccacaccg

SEQ ID NO: 94686 - DNA, 1134 bp, Zea Mays
atggggcgatcgccatgctgtgagaagattggactgaagaaaggcccgtggacaccggaggaggatcagaagctgcttgcctacattcaggagcacggacatgggagttggcgagcattgcctgtgaaggcgggtgagtattctaccatcttcccaatgaacattgttcgtgagatctcgaccaacagtcttgcaggcttgcagaggtgtgggaagagctgcagactgaggtggacaaactacctgagaccggacatcaagaggggcaagttcagcttgcaagaagagcagaccatcatccagcttcatgctcttttaggcaacaggtggtcggccattgcaacccatctaccaaatcgcacggacaatgagatcaagaactactggaacacacacctcaagaaaaggctggccaagatggggatcgatcctgtcacccacaaatctatcagtggcactcgcattggcaccacaaacgacaaatcaaccaaggccgccgcaagcctcagccacatggcacaatgggagagcgcccgcctcgaggctgaggcacggctggctcgagaatcgaagatacggacagcaacgccaacaccaactgctctccatgcgcagccaacgatactacctgcctctgctgcttctccatgccttgacgtgcttcatgcatggcagggtgcaaagatagacctggagtctccaacctccacgctgacgtttacagggagtaatagtggaacgctgccaacccccaggaccaatagactagacgtatcagaaagcaactgtgcagtgtggcatcagaggagtgatgacttggaggatgaagaaaacgattggcagatcttcagcaagcaccaattgctggaactcgacagcaaggagagggaagaggacttcattggttgtgaggagccgtggttctcagagatggctggggttggagctggcttcactggcatgctgcttggtgtatccaatgagcatgatgcatcagaatgctggggtgagtccaataatggccaaactgagcgcagcaaccaagcatcagatgaggaggacaagaattattggaatggtgtccttgacatggtaaactcagagctgacacccaagtcgcctccatttgtctag

SEQ ID NO: 94687 - DNA, 488 bp, Zea Mays
gcctcgattgtggtcgctatgttatattacagctcaaggattgtatagatgagcatggatatcaaggatggattttctacaattgtctgaagcacaagcaaaatggctatggacgtaccatctagcgatgggaggaagactatccagacatgattaataagatacaaaagaaacatgaaagtttggaggatgcaatagagaagaaaattggattgaagaattgtgaacaagtgttgcagatcactattttagttggattatgaaagaaataatccagttactgaagatcattgcttttttgtgtgttttcttattagtgtgcaatgtgtaccatgtggtgcataattgggcaccttatgtttatgaatctgtgtactgtgatgaaatgtgtctggagtctaattttctgaacttgtgtatctaaattatgaaactctaatgaagatgttttatatgaatttgtttatataaagtcaacactgaatccc

SEQ ID NO: 94688 - DNA, 985 bp, Zea Mays
atcaacatcatcattacgtctacctgcagcttctgctttcctttatgccgtcgaccgcgatgtcttgggacgggtacggcgcgcagatcttcctcgccgacatgtcgttccaccaccaggataccctggaggcggtgttccagcagcctgcagagacgacgctcctgcaggcgccggcgggggagaaggagctgcccagcaacgggtcgccgccggtggtggatgacgccggcgtccaggccgcggccgtactacggaagcggccgttccggacggatcgccacagcaagatccgcacggcgcagggcgtccgcgaccgccggatgcggctctcggtcggggtcgcgcgagagttcttcgcgctgcaggaccgcctcgggttcgacaaggccagcaagaccgtgaactggctcctcgcccagtccaagccggccatcgaccgcctcgtcgacgccgccgaccaggcggctgtagtcacaggaggaggaccgacgctggtgaaggggagaggggaggggagcaactcaagcacttgctgtttgacggactcgagggaggagctggccacggagaagggaagaagcagagccggtgacgccggtcttgattggccaccgcctcttattgaagaacacggctgcggcgagctgggatggatcatgtcggaggcaacagcaacgccggagcaggacgggctggagtgctactaccagtattgcctgcagctcgaggagttgatgagatgcaacggcggaatgccaaggtgatttcttgtatgctatgcaaacgacatgcataaaacattgtatataggtgatttccattacgttgctagctacatagtacaaataaatcaactgggttctatatcaatcaatagtcatgagcccggggttgtgttatccacttttggttaatggcaagtaataatcttatcctaattagctagtgctgtttgtcaattattcatatatactcgtgctaa

SEQ ID NO: 94689 - DNA, 316 bp, Zea Mays
cctggagccaacaatgtgtgttcaacagaagttcttgaggatgaaagattattgtttatgaattgattaaggcaatggatgttattcttgctattcattggtatgtcgtggtgctctttctcaagccaaatttcagcttcaacctgttcattaacaaacatccagaagctattcttctctttttccaaatatcgttagataacacttgttgccatcagggtcagtgcagatgagctctgtaactcagcctaaattggaggctagagcatgttctgatcaagacaacatatagttaagaactggcaacgtgtgttcg

SEQ ID NO: 94690 - DNA, 580 bp, Zea Mays
cgttgcaacgcacgggcactcgcctattacctcagatgaactcaatacactgccgacgccacctgatctagggtttagcggagtgccctcgcgacgaagcgagggcccgatccatccagatatgtatttgggggcagcaagctcgagacaacaactgcatagcatgcaagagcttgttggttgagggtcataccgatggtgctcttgcaagttatgcagttgctgcctcaagcttcctgcctccctttgccaaagctagtaagatggggaaagctttcaattaacataaatgagagtgactggacaaccaaatgggtcaactttagcatagggattacaactacaacgaaaagaacaaaatcttttgcttcaaaggaagctggggtttagtagagttgaaacccaagtacccaacaagagccaaataattaaagaaaataagaatgcagcaagcagtcagatcctacagggacatgtagacacaatatcgttttgtgagctataagcttgtaagaagtcttctttgggttggaaactattaatggttcaagagaaattttctccacattctagagaaaaa

SEQ ID NO: 94691 - DNA, 897 bp, Zea Mays
tattattttagattgagtacatcagctcgctggttgcttacattttcttggtccctagagctactcacctcgctggttgtttacatttccttgttcctgggatccactttcctaaaatgaatctgttttaatcttgtaactggaactggtggatattttgatagggaaattacgatgattgatttctagatttgagtttcagattttttttgcttgtactggcctcttgagattggaagactggcgttgttgtgggcttgtggcataggcttcctttgtgggtctttttctcatctgatgtaaacaatattttttagtctggtaacggtgcaaaggcaaatggggcatcatcacatatctaggtcgtattttcgacagacagatataaaacggagtgggaatgcctcgattgatatcatgtccaagttcttcaagctgatggtggtaggtgttttgctttgctactttctcattgttgaagttgtctccatgttgtattcactaaagaacccctatattatttattttggaacaaacctttttaatggtggattagactgattcggtgaggtagctgtgcttttatggattgaggttggtttggtttggatctaagcccattagcagctctcattttgtgctgacaggttgccaaattacaatttaaagtacctgattagctgatttgctatgtactatgacatttaagtatttaacgtatcgataagaaattggttgttttattagttagtagtacttggattgattcacatgcaacattaataccatcatgtttaatgttctgtaacttcctgccatcatgtctgaaatagaaaataatctccatggggcttttagatcgtcaaaccaagtttggaaacaagaactccagtttgg

SEQ ID NO: 94692 - DNA, 1389 bp, Zea Mays
gaatgcaagcttagttaatcaagcagaatttggaaaacagttaccaattgggaagaccagcagtataaattgaagctagatgtgatgatgagaaatcacttcgtatgtctcaaatgagcttggcgaagagatttggctaatccagatcttttgttgcctccactctgatggaatatggtggtgctcctcagtctacaactccagaatctattctttcagttttatatttattgttgttattgctcagttttggttacacaagtttgtgttcctgcaggttttggatcctgaaggagaaagcgggtcctaagggaggaagcagagcaattggagctcgaactggagatgcatagagagttaagggagtagatgctgcaactcttgtggcctacgctcgagctgaagccagattagtgatgaggggggcagttgtccttgctgctaagcatgcaaaaacaatggtcgggaagccattgttgtatggaataggtaccctgttggtcatgtcgctgaggacactgtatggagtgggttgtgtttttggcgcacggtggttcctctacatgacaagcgtatctccatcgctgcaaattgagtttgtaagtggtccgaaacaactaggtagctactagctattgagtatttaggagtcaatgcttaatgatatttacttaatgcttaattgcttatcgaagtaagaaccctgttttttgtattgacatggtggtgctctttaggagagaagccaggggtaaaaaacaattagttctgcagattttattttatttcgatcagttgtgagagtttcttacaattggatgacattgctttgtagaaagaaaatacaaggtattttttagtaggaaagagttgcattttctgtgctcatatacagctttgccgttcgttttctaaaatgttgaaaaggatcatgtcattggtgtaacactcctgtttgtcttaattgaagaagtggtaccaacgagatgtcatttcctatcataattttatctgatgcatatgttgtagtagagctctcagcaattgattcctctcataaattggtggctagagctcgtgtggccctctcatcggatttggtgtctgagccctcgctagatctcgcaccctcatcgaagccctcattggattcgacaccctcactggaggttgcaccgcaatgggatctaggaaccgtagacagcctcgaccacccacgtggattgttgcctctgtggatgagacgcagcgccaaggggccagaggaaactacgtgatgaacctcacatcacagctcatgtcatggttctgagacaacccgtggccgccggcgcgccaccgccgggacgtgagttcgtcggagcgtcagcgagtcgctacaacccaggt

SEQ ID NO: 94693 - DNA, 1231 bp, Zea Mays
aaccccgcgctccacttacgtgactcgcgcgcgacacgcgagcaggaggttgagacgaagacccgccgccaccggggatggcccaagcgccgccgcgacctagggagcgaggatgaggagctcgaggaggtgcgccgcatgcagaggattcctgcaaggaggagaacatggaggtggtgcccgtagtagtaggggaaccgatcaagagcactggcgaggggaagaaatagaagaagcactatgcttccttggagtaccacgtcaacagcttggagctgcttgcattgaccacagaggcacaccggagcatccggcgaggacctgcacgcttgaaaccgacgacgaggccatgccatctttgcatgccccgcctttttacacggtgacacagtgttacatgggcaagtggggaattgcatattgtgtcaagggtggtccagaaaaagagctaaaagcaatgcagtacttggagagaagagagtgtgagtatgaccagaagatatccattgatttctacaaggaaggagatcccttgaaaccagctgtgatgggcgtcttagtgttcgtttccactccagatccaattggcaacaagtactatcttggccctgctcctttgcagaatatggcaaggccacgaagatgattcgatcatagagcttgcaaacaaggtgaggaaggtgctcaacagaacaaaggagaccaaaatcactgcgatgcagggcgcgtgaactcttctactacctcaagggtaagcaggtggactatggcgaggagcacagcaaggcttgcggccacaacaggtttgggagaatatatcacacaggtcactatcctgtttgttatgagcacaacccagtgcattttgtggggcactctgctggcgcgcaggttgtgagggtgctgcatcagatgcttgccgacaagagggatggttcatgtgagctggagtacaggattagagcacccaaattaggaattagtcatgcctatcatcccgcttgagacgaaggatgagcttgggctgcttcatccagcattcaaggctgtgaagacttccacatgataattagaaatctggtgacaacagaagtttgggttggggtcatgggatggatatctttgttgtaatgtgaggtgttaggagaattatgttatgcttatttattggcataagttatgtcttacacgtacaaatgagttaatggatgaactcaagttattggttcaa

SEQ ID NO: 94694 - DNA, 971 bp, Zea Mays
acgtgactcgcgcgcgacacgcgagcaggaggttgagacgaagacccgccgccaccggggatggcccaagcgccgccgcgacctagggagcgaggatgaggagctcgaggaggtgcgccgcatgcagaggattcctgcaaggaggagaacatggaggtggtgcccgtagtagtaggggaaccgatcaagagcactggcgaggggaagaaatagaagaagcactatgcttccttggagtaccacgtcaacagcttggagctgcttgcattgaccacagaggcacaccggagcatccggcgaggacctgcacgcttgaaaccgacgacgaggccatgctggggaattgcatattgtgtcaagggtggtccagaaaaagagctaaaagcaatgcagtacttggagagaagagagtgtgagtatgaccagaagatatccattgatttctacaaggaaggagatcccttgaaaccagctgtgatgggcgtcttagtgttcgtttccactccagatccaattggcaacaagtactatcttggccctgctcctttgcagaatatggcaaggccacgaagatgattcgatcatagagcttgcaaacaaggtgaggaaggtgctcaacagaacaaaggagaccaaaatcactgcgatgcagggcgcgtgaactcttctactacctcaagggtaagcaggtggactatggcgaggagcacagcaaggcttgcggccacaacaggtttgggagaatatatcacacaggtcactatcctgtttgttatgagcacaacccagtgcattttgtggggcactctgctggcgcgcaggttgtgagggtgctgcatcagatgcttgccgacaagagggatggttcatgtgagctggagtacaggattagagcacccaaattaggaattagtcatgcctatcatcccgcttgagacgaaggatgagcttgggctgcttcatccagcatt

SEQ ID NO: 94695 - DNA, 991 bp, Zea Mays
aaccccgcgctccacttacgtgactcgcgcgcgacacgcgagcaggaggttgagacgaagacccgccgccaccggggatggcccaagcgccgccgcgacctagggagcgaggatgaggagctcgaggaggtgcgccgcatgcagaggattcctgcaaggaggagaacatggaggtggtgcccgtagtagtaggggaaccgatcaagagcactggcgaggggaagaaatagaagaagcactatgcttccttggagtaccacgtcaacagcttggagctggtgagcccatggcttgttcctcctgcccttccctcccctcccctccctgctcccccgactctgcgcggatctggtactatctagcccatagagccgtgttggacaacacaaccacgaccacaaggcatcgctgtggagcagtcggagccatttgtgatgcccccctcccgcttgcattgaccacagaggcacaccggagcatccggcgaggacctgcacgcttgaaaccgacgacgaggccatgctggggaattgcatattgtgtcaagggtggtccagaaaaagagctaaaagcaatgcagtacttggagagaagagagtgtgagtatgaccagaagatatccattgatttctacaaggaaggagatcccttgaaaccagctgtgatgggcgtcttagtgttcgtttccactccagatccaattggcaacaagtactatcttggccctgctcctttgcagaatatggcaaggcaaattgctacaaccaatggctctactggctataatagggattacctgttctcaatggagaaggcattagccagcattagccacgaagatgattcgatcatagagcttgcaaacaaggtgaggaaggtgctcaacagaacaaaggagaccaaaatcactggtgccaatgcttccctgaaatcacatgcccattatgttttttattatgatttggtatcttctccgtgtctgtgaacaaga

SEQ ID NO: 94696 - DNA, 1212 bp, Zea Mays
atggattcagtagactccatagccgacaaggcaattggaaggatgcaagagattgcggacaagattttttcggtagcgagggaaacaatccgtcctggacgcgggttgacctcatttgacgctaccaaacttcgtgtagcattggaggacatagcttgcatgctggagcaagactctctggtgttgcaagagaatttggacatcgtgaacaatatggacaagtctggcaaagtgattgcaaagtgggatagtagagcaacaaaaatttacacagaaatttgtgtagaagaggtcaatgcacggaacaggccacaacaatttctaaatgccgaagggtatgctaacctcataaggaagtttaaggaacgcactggtcgcacttacaccagggatcaaatgaagaataggtgggactccttaaagagaatgttcacccagtggaaaactcttaatgaaagggctacaggtcttggtcgagaccctcatactggttctatcagtgctccagatgagtggtgggctaagcaaattgaagcaatgccagggtgtattatgttcaaaacaacctccctagagaatgaggacgagctaaaggttatgtttggacccattgtctacacaaatgaaagaacccttgttcctggcgtcgaggatgcaaattcatcatctgatgatcatgtcgaagtcactttaggtgggggtgaaaacagcacacctgacccatgctcaaatgcgactgggaagcgtaaggtgcgtcatgattctcctgaaccaaagaagaaaaaggatacgagggaagagtacatgaaacgactagtggaggcatttgagtcgcgttcaatgaccactaacaagtccatcacctctgctgagaccgaccctgttcgtgttgaggttattgcgcagttgcaacaagtgatcgatgatggttcaccagaaggcagcgacctacatttttttgtcactcatctgttgattgagaaaaagtatagagatatgtgtgaccctgctgcacacacatatgatcatgacatggatgacagagatgcacaattgcttgttgccctatatgctgtagacatttggggcaggccttccagtgaggtttctagaagaacaatggttgaaacaggtgagagtagtagtaacacatctgatgagttagacatgagtgcatttcgagatggaattgctaatgcattagtgtcgtag

SEQ ID NO: 94697 - DNA, 553 bp, Zea Mays
ggatgattttcgcctcggctgtgttaacagaactctgcccaagaatcgtcgaccaccgcgcacatcacctgttcgacgaaacgctccctcggacagcatatgtgttcgaccggtctacaagggcgacgggtcagccgccagccgccgcgaggttcgtgctgatccgagagctgcacccgctgggcacggagatgacacgggctctgtcgactgccaactgccatgccgccatggagatgacacacggacggacgagtggtctgtgtgccgacggatcaacgtatggttttgcatttgggcgggggcagcaagctagaggcggcaactgcataacttgcgataaacttgttggaccatggtgtgctgatgattttaccgcaagttatgcagttgctgcctcaagcttgctgcctccctttgccaaacctgtaggaataagatgaagttcatccgtataggtatagaaaccttccatagccatgtatcctatatttaccatgagatgaaacagaagcaatgatgcaagaatgcaattttctccctctattctaaa

SEQ ID NO: 94698 - DNA, 1206 bp, Zea Mays
gttccgggcacgcctctaaagtctatacagcctcgaatccatcccggccgccgctcctgggggatactacagcgagccgaagcggggatggcggagatccctgtgatcgacctgcgcgtcgccggctcggcggccgaggagtccgcgcggctgcgggccgcgtgcgagcgcctgggctgcttccgggtgaccggccacggcgtgccctcggtgctcctggcagagatgaaggccgccgtgcgcgcgctcttcgacctccccgacgacgccaagcgccgcaacgccgacgtcatcaccggcagcggctacgtcgcccccagcccgaccaacccgctctacgaggccttcgggctcctcgacgccgccgtgcccaccgacgtcgacgccttttgcgcgctcctcgacgcgccgcccaacatcagggagaccgtcaaggcctacgcggagaagatgcacgatgtgatcgttggcgtcgcccgcgagctggcgtctagcctggggctagtcgaggagcactcgttccaggactggccgtgccagttccgcatcaacaggtacaactacacgcgggagacggtgggctcctccggcgtgcagacccacacggactcgggcttcctcaccgtgctccatgaggacgagtgtgtcggcggcctcgaggtcctggacccgggcaccggcgagttcgtgcccgtggaccccgtcgcgggctcctttctcgtaaacatcggcgacgtcggcacggcgtggagcaacgggaggctgcacaacgtgaagcaccgggtgcggtgcgtcgcacccgtgccgcgcatctccatcgccatgttcctgctcgcacccaaggacgacagcgtgagcgcaccggcggcgttcgtggacgcggaccacccgcgcaggtacaaggtgttcaactacaacgactatcggaggctcagactgtccaccggcgagcacgcaggcgaggcgctcgcacggatggcggcgtgacgtggctggagctgcaaattggattggaagccgagacaagccgttagttatttaccatgcccgtgcgttcaccgcacacaatcatattcaaaagccataaaataaaaaataattttaatatcagtcaacatatggtttaaatatcatatggagtacaatattccgaatttttttttgtaatttagtctgtcttttgaaaaaaatgcacatctagacctc

SEQ ID NO: 94699 - DNA, 945 bp, Zea Mays
tggaaacagaatgaatgttggaactataagaggaggggcaaatgctttcagacttgacgcactgctgaagctgtcagatatacgtggagctgacgggaagacaaccctcctgcactttgtcgtccaagagatggagcgatcgcagggatcaaaggcttcagataagcccagtggaacttctggatcttgtcaagccacactggcagaaagagaagggtgttcggaaatgggaacagaatttgtttcagagttaagtaatgagcttggcaatgtcaagaaggtagcaagtatagatttagataccttgaaaagttcaatctcgaatctatcacgtggactggctcgattgataaggcttgtcgggaaggaccttacctgcaatgacaggaaccagaatttcctgcagtgcatgagatcattccaaactcatgcagagaataccatgctggaactcaaggttgacgaagctgaggtcctacagcaggtcagagaactcacagagtattatcatggagaggttggcaagaacgagtgcaacctcctccatatatttgtcatcatgagggattttctcggtttgctagatagggtgtgccgagaaatgaggggttcaaagcacatgcaacctctgaacatagtgcttccactcaggtgaatacgttcatgatcagacttcacattaaccagttggacattaacaaattaacatttttgtggaactgtgtgtatagttattggcttaatgatgggtttgtatcagttatggagagtttgtacacatgcagaattgtattaggatgatgatgtgttttggttgcatggttttcaattcattgaatatactcacaagtcacaacttaatgctgaccatgttattgttctggagcatcctatataacctgtactcttgtatgttttcgttttgctaataaatttaaaaaaaaa

SEQ ID NO: 94700 - DNA, 2658 bp, Zea Mays
atgggcctggcggtgaagcgcgtcttcctcctcgtgctcctcctgctcagcttcgaggtcctggagggggctctcctccgcctcgtgacccacgaggtcagtgccgtggcagtgacccgtgatgccggtcctgggttcgtctccaggttcaggatgctgctggcaggactggaccgtcatgggtcgcgacacccacaccggagacatcgaaagggttctgcacctgcagctccagcacctgcaccggcaccggcaccggcaccggcaccggcaccggcaccggctccagcaccggttcaggttcaggaaggaagagctgctccgactccgactcccgctcctcctcctcctcctccccacgagagccatagactaagaaaccccagccacattgccccagtgaggagcgtggcgcgcaggctgggaggtggaggtcacgccaggctccccacagctgccgtcgtcgccctggctgttgccggagcgtgtctgcttctcctcggagttgcaatggcggcagcagcagcagcagcgtcactcaggcgatcgaggaagctccacaaaaagcccttcaagctgttctctcatggatcgagagctcacaggccaacttgtgtcaccgtcaaggttagctcgcatcctagtgcagatctgctttgcccggcctctgctgtacagtcccaggactacccatccctcaaggaatctacagagtctaagaccttacctgttcttcccactccatcaataagtgcagagctgatcataggcgaatacgctctgaaaaccagcaccaacttgcagtctgatgaagctgctgatgactccttccgctcgttgccctcttctcattcatcaggtgcctccattacggagtcgccactgcaaatctgtgataaacctatcacagatccgtctccgcccgattcaccttctagctcatcgtaccgatcactgtcaccagactgtagatctcctttctgcccaaagaccactttcacagctcctagtgccatttgccatcttccagaaaaccaaaacgaggagaaaactgcaacggctactgacaactcaggacatcctgaagctctaaaggtcgagcaggccaatgcaaagatcaggtatctaccgtcaggatgtaattccaattcctgtgcttcagaggccacaccctccgaaacaaatccagcgtccagggtttcaaatacagacgtcaatttagatccaaaggaatcgatgcggaacgaagcaaagtccaaagcgcccggagcaacaagtacgcccaaaacaccaccaccccctccaccgccaaccaagcctacttcaagtcttaataaaggccagagctctggccagcctccgttgccacctccactgccggttcagttacaagtcggcacagatgggttaccccttccaaggctgaaacctctgcactgggacaaagtaagggcagctccaaaccgctcaatggtgtggaatgacattaagtccaattcctttgcgtttgaatttgatgaacagatgatcgagtcattgtttgcatacaactttcaagggcaaacaaaaaacgaggaccccaagagcaagattctagctaccagcaaacatgtcatcgagcaccacaagcttcaaaatactaccatactcttgaagaccttaaacgctagcactgaacaagtctgcagctctataacggaaggtgctggactgtccacccaacaactggaagcgctggtcaagatgagaccgtccgaggaagaggagaagaagctacttgattatggcggggataccaacatgttggatccagcagagaactttgtcaaggtgctgctgacaataccgatgtcatttccaagaattgaggcgatgctgtacaaggaaacttttgacgacgaagttgcccatctcaggatgtcctttgcactgattagaggagcctgcagcgagctcaggtcgagcaaattgtttctaagattacttgaagcggtactcaagactggaaacagaatgaatgttggaactataagaggaggggcaaatgctttcagacttgacgcactgctgaagctgtcagatatacgtggagctgacgggaagacaaccctcctgcactttgtcgtccaagagatggagcgatcgcagggatcaaaggcttcagataagcccagtggaacttctggatcttgtcaagccacactggcagaaagagaagggtgttcggaaatgggaacagaatttgtttcagagttaagtaatgagcttggcaatgtcaagaaggtagcaagtatagatttagataccttgaaaagttcaatctcgaatctatcacgtggactggctcgattgataaggcttgtcgggaaggaccttacctgcaatgacaggaaccagaatttcctgcagtgcatgagatcattccaaactcatgcagagaataccatgctggaactcaaggttgacgaagctgaggtcctacagcaggtcagagaactcacagagtattatcatggagaggttggcaagaacgagtgcaacctcctccatatatttgtcatcatgagggattttctcggtttgctagatagggtgtgccgagaaatgaggggttcaaagcacatgcaacctctgaacatagtgcttccactcaggtga

SEQ ID NO: 94701 - DNA, 2667 bp, Zea Mays
atggacgaggtagcgacagcggccctggcggcggcgaggggacggtggacgcagtgggaggaggtggtggtgtccaacgaccgcggcagtcgtcttgtgcactactacctccgcggcaacggcgaagcgaaggagctagctgtggtggggcgggagcggagcccacgtcacatgtcgtacgctgtgcaggggcggttcctccgcgcgctcgcagctgccgcgggagcggtcgccgtcgcgtcgtcgccgtcacggtcgcccctggcggctgctgtggcggacggcggcgctccgaggaggtggcggtccaggcgggaggtcgtggagtggctgtcctccctcgtttccgattttgatgattttgagcggggattggcgcgtttggtcctgtttttggctcgatttggtgttaccttttgcgtcgaaatcgcgcttgttcttggtccgattgaaggcggttcatgttctggctcacttctcttcgtgtttggtgcgttttatgccgtggaacatcactctagccttatttggccagaagagccaccatgtctagccatatttggttatagttatggttcctcaatggctaacaggtgcaatggggattcatatgatgacagtgttattaactgcagtcaagttaccgtttcgaaggatgtttcttctagggaagcttcgaatgacttcacatggttgggagcttcatggaaatgccaacgaagtttgaagcactacaaatctttctgccgtagaggaattactatctcggtgcatagttttgtatacattatgggtgaagagatgaagagacttattgcttatgtggaagatctctatgaggatacaaattcctgcaacatggtcaaggtacaatggtttggcaaagctgatgaggttggtgttctgttgcccatggattttgatgacagggagattttcttttctctgggtcgtcaagatctcaatgtagtatgtattgatggattggctgcagtcctgagtgcccagcactacgagaagttcaagagtgatactagatacagcttgtggcaaccttatttttgctatcggcagattgataatggtgaagccaagccttttgatgtcacacagctacaaggctactggagccaggaagtacttaggaccatgttcaatgcaacttcctgtctgaaggtgcgtttcaaggtccctaaatctggacccaattcagatggagggctgaagaggaagcgtgatgcattcaacaatgatgctaatcgacagaagttcatttgttctggtgcttttacttctaggttttatggtgagaacatcgaacacttgtgtcctggttgccatgtggaagtactatctcaagacagtggcataaagataaaatcaagggtgcgctacctagaacttcaggatgctgatgagactggaaacttggaggagtgggttttgctaacacgaattgcgaaacctgatcaactgggtgtacgtttccttggaaggccaatggttcgtccacagcatgtggaagaaagcaaggcctcgtgctttgatgttggagccattgttgatgcgtggtggcatggtggctggtgggagggaattgtgttgtgccagggaggcagggggcgcctacaagtttattttccaggagaaaagcgaatcactgaatttggtgaagatgaattgaggtattcccttgagtgggttggtaacaaatggaatcctttgaagggaagaaaagatatcgcacacaagctgacctccactgcagatcgtggaagtgaatatttgattgggaaacaagatcatctgaattttgatgtgcttctaaaaccagaacctcaactagagggacttcaatatgacaaacggggtattgagaaatcttcagtcaccaccatctcacgagatcagaaacgtgtcctggccgacctgactaatgatttgaagttagatagcttgaggtggaggccaagaaagaggagtagaagatctggctcaagaaagcagtcggatacaagcagtggaagcagcagcggggacatggacttgtccagccctggccctagtgggttttgtcaacttaatttagtgcccgacgatgagacatgcaagagcagtggagagcagccttttatgggcgtgcctgtgcaggcccctaaatccgactgcctccctcttcatgcccctaaattccgggcgtacgctatccagccgacggatcagccatccatgcgcggtgaaacctctgcgttctctgttgtccgagcgttagcgactgcgtctctcgtggcggagccctcgagccgccgtgcttcgtcgtcgttggcgaccaagttgggagagaagaggtcgtgggtgggcgggtcaggcggtggcccgcttcgagcacttcgaagcgaggaggagggtcgcgtcaagagggcgaccgaggttgccgcagtcgaggcggttcctcggaggagaatcgccattgcgaaatgcctacgttgtccaccgccgtcgttcaaggttgttggcgacaaaaggaagcggagctcgtcgccaccgtcttcatcatcctcgattcgctcctccgcactagatctgagcagagaaaggtacgatcttcgatttcgtttgcggatctgttcgattcaatttgcactctattttgtgcgctttttctag

SEQ ID NO: 94702 - DNA, 1854 bp, Zea Mays
actgtgattggcggtagcccatcgacgacacgagatatcagctgcctcagatctcgtcggtgggtgccaatcacattcttcgacagtttgtcgatcgtcgtcaagacatttcaacagctagctagcctgcctataaaatgcgcgcgcacgaacctctgtagcacaaatggacctgtgagaaagcaagaaataaagatatatacacacatggctactacgggcacaacatctatgccagcacctgtgtttcaccccacggtgtggggggactacttcatcaaatttgtcccagagccattgcaggtttcagatgaaacgatggcagagagaatcaggcatttgagagaggaggtaagtggtatgttccaggcttgcaagaacgttgtggacaaaacgaacctagtagacgtggtacaacgtcttggaatagatcaccatttcgaggaacagatagccactgccctagccagcatccacagcgctggattattcaatagctcaagcctacacgaggctgcccttcggtttcgcttgcttaggcagcaggggttttgggttcctgcagatgaacttgtcaagttcatcaagaacgaagacgggagctttatcgatggtataaccaatgacccaaagggcctgttgagcttatacaacgcagctcaccttgttactcacgacgaggggacgacgacacttgaagatgccatcgcatttgcaaggcagcatctggaagctgctagaagatgtagtctcaagtcccctctagctgaacaagtcggccgtgcccttggtatcccactgccaaggaccttaaagagggaggaagcaatagcttttatcccggagtatagctcacaacaagatcaacaagtgtacagccccgtgatactagagcttgccaagctagacttcaacctccttcagcatctccatcaagaagaactcaaggagatttctcaatggtggaaagacctctctggagaaatcggattaggctacgtcagggaccgcatcgtcgagtgttacttttggtcgtatactgtgcactacgagcgagggcaagcgcgtgcacggatgatacttgccaaggtattcatgttaacgtctttgttagatgacacttacgatgtgcatgcaactttggaggaggccagggagctcaacaaggctattcaaagatgggatgagagtgatgtttctcttctacccgagtacctaaagaaattctttgtcaaggtgataagtaacttcagggagtttgaggatgagttggagtcacatgaaaagtatcgtaatgtttacaatattaaagggttccaaacattatccaaacattatctccaagaagcagaatggtttcatcatggctgcactccaagcttcaaagatcaagtgaatgtttctgtcataacggggggcgctcaggtactaagcattggtttgcttgttggcatgggtcatgaggcaaccagagaggcattcgagtgggccatcggtgacactgatgctatatgggcttgtggagaggtgtcacgtttcatggatgacatgtcagcgttcaagaatggtaggaacaaaatggatgtcgccagttctgtggagtgctacatcaaggagcacaatgtccctagcgaggtcgccctggcaaggataaattccttggttgaagatgcatggaagaccataaatcaagcaccatttaagtaccctgctctattcccggttgtgcaacgagttaccagcctagcaaagagcatgacactgctgttcctcgataagagggatgcgtacacatacagcaaggactttcaaacgacactggagacccatttcgtaagacatattccgctatag

SEQ ID NO: 94703 - DNA, 771 bp, Zea Mays
atggcgagggaggagaatgtctacatggccaagctggctgagcaggccgaaaggtatgaagagatggttgagtatatggagaaggtggctaagactgtagatgtggaagagctcactgttgaggagcgtaacctcttgtcggtcgcatacaagaatgtgattggggctcgccgtgcttcatggcgcattgtctcttctattgaacagaaggaggagtcccgtaagaacgaagagcatgtgaaccttatcaaggaataccgtgcgaagatcgaggctgaactgagcaatatctgtgatggcatcctgaagctgcttgactcccacctagtgccttcttctactgctgctgaatcaaaggtcttctacctcaagatgaagggtgactatcacaggtatcttgcggaatttaagactggtcctgagaggaaggaatctgctgagagcacgatgatggcctacaaggctgctcaggacattgcgctggctgagctggcacctacccatccgataaggcttgggcttgctcttaacttctcagtgttctattatgagattctgaactccccagacaaagcttgcaaccttgcaaagcaggcgtttgatgaagctatctcccagttagacacccttggggaggagtcatacaaagatagcactctgatcatgcagctccttagggacaacttgaccctttggacctctgacctcacggaggatggtgctgatgagggcaaagaagccccgaaaggtgaggctggtgacggacagtaa

SEQ ID NO: 94704 - DNA, 1100 bp, Zea Mays
ctggctcgttcaaacttgaccgaacggcagccattacctggtggcgcctcctccttgccggtcggagccggctcgccggcgggtggcgacgctcccgccgctgtcacagggctgctcgcaccacgtgcactcctctccagtacacccaccgagacgcgagacctctaaggctctaacccaagcagattccatgaagatttgtcaactccaattaacagctacacgattttcaaaacagaataattctggcgaggatgacgagctcctttctgaactaaaagataagtgggatgcaatggagaacaagtcctctcttgccttgtatggtgctggagcaatcctcgctgtctggatatccttggtcgtagtgagatctctcgactctgtcccattgctcccaggcatattggagctagtcgggctcagctactctggatggtttgtgtaccgatacctgctttttcaggaaaaccggaaagaattggcgggtgttatcgatgatataaagagaaggattgttggcgatgatgaatagctgtttcctggtttgtaattctatttatctcgccctgtttggttctgaggaattgaaaaataatccaatggtgaagtgagaaagcactttctagctattggttttaattcatggggtccaaacaggctcttgatagaatcttgtaggtttctgttcttaattaatgccagtcagagctacgaggtattggcctttccacatctcttgtgccgtctgcagttgaacatgttatttgcagaatctttttatttagcatggtctagaaaaattcttgtatcatccgtatattccgctgaggtatggccttccacaccaagatgtacctccagtttagcatggtctacaaaaaaaaatattttattctctgcatatgccgctccagttcctctcaaattccctgtgctgccctagccagaagttagccgtcagagcatataattgtaataagatataaaatcatctgaaacataaccggtagcacttttgtcctcacctgctcaaccgagcacctgagtttcggcttttttttaagtaagaaaaaagggaaaatctaaatcgattaaac

SEQ ID NO: 94705 - DNA, 1386 bp, Zea Mays
aacaatgtttttttcccaaccacttgccacttgtgatacgctgacctctgagcagcctcgatctggctcgttcaaacttgaccgaacggcagccattacctggtggcgcctcctccttgccggtcggagccggctcgccggcgggtggcgacgctcccgccgctgtcacagggctgctcgcaccacgtgcactcctctccagtacacccaccgagacgcgagacctctaaggctctaacccaaggttgatctcatctcgtgcactcctctcccttcccctcctctcctagggttagcaagcttgatcccgtgcgcctgcttgggtgtctgaccgcaccggcgccgagatggtagccgctgcggcggcggtgcggccggtgtccttccgccgcctcggtgttctcctccgcgctcctttgccctgcggcctgacaacctcccgcgtcgccgcacctttcccccgccgcacagattccatgaagatttgtcaactccaattaacagctacacgattttcaaaacagaataattctggcgaggatgacgagctcctttctgaactaaaagataagtgggatgcaatggagaacaagtcctctcttgccttgtatggtgctggagcaatcctcgctgtctggatatccttggtcgtagtgagatctctcgactctgtcccattgctcccaggcatattggagctagtcgggctcagctactctggatggtttgtgtaccgatacctgctttttcaggaaaaccggaaagaattggcgggtgttatcgatgatataaagagaaggattgttggcgatgatgaatagctgtttcctggtttgtaattctatttatctcgccctgtttggttctgaggaattgaaaaataatccaatggtgaagtgagaaagcactttctagctattggttttaattcatggggtccaaacaggctcttgatagaatcttgtaggtttctgttcttaattaatgccagtcagagctacgaggtattggcctttccacatctcttgtgccgtctgcagttgaacatgttatttgcagaatctttttatttagcatggtctagaaaaattcttgtatcatccgtatattccgctgaggtatggccttccacaccaagatgtacctccagtttagcatggtctacaaaaaaaaatattttattctctgcatatgccgctccagttcctctcaaattccctgtgctgccctagccagaagttagccgtcagagcatataattgtaataagatataaaatcatctgaaacataaccggtagcacttttgtcctcacctgctcaaccgagcacctgagtttcggcttttttttaagtaagaaaaaagggaaaatctaaatcgattaaac

SEQ ID NO: 94706 - DNA, 666 bp, Zea Mays
atctgaaaagttaaaaccatgtaggttggctgtgagacttctttctactattcaacacgagtttctcaagttcaagttgtccctttgctttgcacacctaaaaggctgttggtagaaccgtggaagatgcacaacttgatattaatagcttgcacagatcaagttgtcctttgtccatgcctgacatgcctaccagatactcaaacagctgactagtgtgctttgtcaaagttagatgcaatgtcctttgcattttgtttaatctgaagaaaattcacatagcttttaaaatgcaaataatttatgttgaatatgccctggcgtgatgatctgtaaaagcagataaatactgatctcgtacatttggtgtatccagattttggttctgacttttttctggcaggaaaaccggaaagaattggcgggtgttatcgatgatataaagagaaggattgttggcgatgatgaatagctgtttcctggtttgtaattctatttatctcgccctgtttggttctgaggaattgaaaaataatccaatggtgaagtgagaaagcactttctagctattggttttaattcatggggtccaaacaggctcttgatagaatcttgtaggtttctgttcttaattaatgccagtcagagctacgaggtattggcctt

SEQ ID NO: 94707 - DNA, 252 bp, Zea Mays
acaacaatgtttttttcccaaccacttgccacttgtgatacgctgacctctgagcagcctcgatctggctcgttcaaacttgaccgaacggcagccattacctggtggcgcctcctccttgccggtcggagccggctcgccggcgggtggcgacgctcccgccgctgtcacagggctgctcgcaccacggttagcaagcttgatcccgtgcgcctgcttgggtgtctgaccgcaccggcgccgagatggtag

SEQ ID NO: 94708 - DNA, 267 bp, Zea Mays
atggacaacgacaagagcgaggtctcgccggcggcgcgcgtccagtgcgagggcgtcgtgttcacggtgacgaagggcaacgaggtggccagggtgaccaagggcggcgaagcgcgcgtggtgctgagcagcgagagctacttcgacgcggacacgtgcacgaggcaccacttcgtggacgtgcaggggaaggccgaggcgatgctgttcttcgtgtctgtgcgcgaggatttgaaccgtatcgtctctgtccggaggttttcttag

SEQ ID NO: 94709 - DNA, 1777 bp, Zea Mays
ctgtcaggattgacttgctcagctcatatatccgtccagtcgtcacatattcacatgcatgcggtctttatatctctctccgcgctgcctcctcgcctcacagagacgttcgccaacgccaaaccaatctcgctcgatcgctacgtctacgtgcagtgcagtgcggggaccgacaacaatcaccatatgggcaactccatgggcgggaagcggcggagggcgagggtgatgacggtggacggcaccacgtacaagtaccgcgcccccgcggcggccggggacgcgctgcgcgagcacccgggcaagggcaaccacctgctggagtcggaggaggtgcggcgactgggcctgcgcgcgcggccgctggacccggacgcgccgctcaagcccgggaagctctacttcctggtggagctgcctccgccgtcgtcggccgcccaccaccatcgccgggcccgggcgccgcagcgcacgtggtccggcgcgctccactacggcgccgtggccggggccggggagcggctggagagcctgatgctggcgcggcggtcggcgtccgacgtggcggcgtcgtcgtccgtcggcgacggcggcgccctgcgcctgcgcgtgcgcctccccaaggccgacgtccagcgcctcgtcgacgacagccgcgacgccgccgacgccgccgagaggatcatgcagctctgcgtcgcccgcgaccagcagcgccgccaccggtccgcgcccgccacgcccctcgccgtgcccgtgcccccggcggtcgtcagcgtcacctcgacgtccagctcgcgcaaagatgatggctccggcggtagcaacaagcccgcggcggcaacaaccggcaagaaagagcactccgactccgatccaggagagtacaacacacaccctcctcctgtcctgtaatttatgtatcaaacaaataccactactccagtagtaggagtactatgcagcatgtatccataccaccatgcgtgcacagtgaaattaatgaaaagatgcgtgtggcgtgtgtgcatatatatggtccagtaatacaagggtcgtttaggcgacggatgcgagcatgcatgcatgtgatgacggggacacgccggtggtggtcacgcagtctactaccagctgtactgtgctcgagatggggcctgggagcgctgtccaattgattaggacgagctgttaaggcgtgctccagagtccagtgtccgatcgggctaacagaccaccatgcaagtcaagggcattgttacagactttcatatcacgaggtaggtgggattagggtttagggtaggaaattaaaaaaaatcccctccttcaccttgctctctccttcactcgatctgtattttagtcaagattagtagagaatccacttttacccgctttcatcccatttcttattaaggatctaataaaatcactcaataatagggtgtagtagaaactaattcaccgattaataacaaagcatgcaaactagaggtcaacgagcaagctagcgatcgtcgttcgtggtgcgtagtaacccgacgccgccggccatgtggttagattctgaaacgaacgcggttgttgtacctagttattaaggtaaatgcatgcagatcatcgatcgtcgagagcatgtggctcgtgtgccaatgtgttcgattaaccacgccgtgggctcgactcgatcaagggccttccacaataactcgttgacatgcagagatatataattaatcgtatacatacagattttattagtaccacactacga

SEQ ID NO: 94710 - DNA, 915 bp, Zea Mays
ctgtcaggattgacttgctcagctcatatatccgtccagtcgtcacatattcacatgcatgcggtctttatatctctctccgcgctgcctcctcgcctcacagagacgttcgccaacgccaaaccaatctcgctcgatcgctacgtctacgtgcagtgcagtgcggggaccgacaacaatcaccatatgggcaactccatgggcgggaagcggcggagggcgagggtgatgacggtggacggcaccacgtacaagtaccgcgcccccgcggcggccggggacgcgctgcgcgagcacccgggcaagggcaaccacctgctggagtcggaggaggtgcggcgactgggcctgcgcgcgcggccgctggacccggacgcgccgctcaagcccgggaagctctacttcctggtggagctgcctccgccgtcgtcggccgcccaccaccatcgccgggcccgggcgccgcagcgcacgtggtccggcgcgctccactacggcgccgtggccggggccggggagcggctggagagcctgatgctggcgcggcggtcggcgtccgacgtggcggcgtcgtcgtccgtcggcgacggcggcgccctgcgcctgcgcgtgcgcctccccaaggccgacgtccagcgcctcgtcgacgacagccgcgacgccgccgacgccgccgagaggatcatgcagctctgcgtcgcccgcgaccagcagcgccgccaccggtccgcgcccgccacgcccctcgccgtgcccgtgcccccggcggtcgtcagcgtcacctcgacgtccagctcgcgcaaagatgatggctccggcggtagcaacaagcccgcggcggcaacaaccggcaagaaagagcactccgactccgatccaggagagtacaacacacaccctcctcctgtcctgtaa

SEQ ID NO: 94711 - DNA, 138 bp, Zea Mays
atgcgcgccaggtgcgcggtcagcagcgacgcgtgcgcggggggcagcgagccgtacttgccctcgatgtacttggagatggcggacttgttcgacccgctcttgtcgtctagaccctcgatcgccgccaggatcatc

SEQ ID NO: 94712 - DNA, 1395 bp, Zea Mays
tgccttataaaggcacgcagcaggacggaactgcactgcacctcgagcaccccccggcccgtcgtctacagtctacagcacacatcgcagcagctcgcgaccatcgtccatccgctcaattgtgatcgatcgagctgcgagcccatcgcctctagctaagctaccatgggtcggcagccgtgctgcgacaaggtggggctgaagaaggggccgtggacagcggaggaggaccagaagctcgtcagcttcatcctcggcaacaggcagtgctgctggcgcgccgtgcccaagcttgccgggctgctgcggtgcgggaagagctgccggctgcgctggaccaactacctgcggccggacctcaagaggggcctgctctccgacgccgaggagaagctcgtcatcgacctgcatgctcagctcggcaacaggtggtcaaagattgcgtcgcacatgccaggacgaacggacaacgagattaagaaccactggaacacccacatcaagaagaagctcaggaagatggggatcgaccccctcacccacaagcccctcccgccgcctgatccgcatccgccgaaggaccaccagagcccaccgcacaccgccacaggtggctcgccggaagcgccgccatctccgtcgccgaagcctccacaggagaagacggcagtaccggtgatgacgccagctagccagcaagaagcaggtgacgatgacgtgccgctcctcagcaactactacccaggcttctgcaccgacgaggtacccatgatggacccggacgagatcatggtgcctctggacgacgggcggacggcgccgccgacgtcgacgattttctcgaccacgaccacgacgtcctactctgcagcctccgactccgtgtcgtcgtccttgagccgcgacgaggacccgctgttcccgctcatggacttggagttccccgacatcgcgttccagatggggctactagacgacatggtcgcgtcgtgggacgactccttggcgcagcagccgctgtcgccatcccctgtctacgacgacgactatgcaaaccagctgcagatcaggagcggcgttgcgtttgaccaggagccagggaacaagattgtgctcttctctagctattaggcagttaacccctttaataaatgagatatgcacctccttacaccttactggtcactgcactaaactagcaaattactccgacacgacggttgttcattctgttaactgcaactgctttctagttatataatcaagatttgttaaaccattccaagatgggtgataatcacataatacgccaaatagcgctagctgttttctatgggtgtgtggtgcctattgcgttttccagtagtaaccatatgtgaggattggactacgaaa

SEQ ID NO: 94713 - DNA, 112 bp, Zea Mays
gacaaagcaaaatgagcctatctaatgttcaagaatcaaccactagaaaacgaggaggatcttcggatcatgtttgggccaattgtctacactaatgaaactaccttaattc

SEQ ID NO: 94714 - DNA, 2296 bp, Zea Mays
caggagttggctgaacttgttcacaaggtccatttgctttgcctaatagcaaggggtagagtagttgacaaggcttgctatgatacactcattcaggcctcagttctttctcttgtaccatgccacttactatggagtcttgttgatgttccaaacctgaaagctgttaacctacgtagtcttgtgagctggttccatcgtactttttgtgtaactgcacaatccactgacaggggatcttttgaatcaaatttggctttcactattcaagatcatgtagggactgctgaagagatttgtgcactctctgtggcattattcagggcactcaacttaccagctaggtttgttacaaatctggatgttgctggactcaagaccgatactaaagtgaagggaacattcagtcaagatgcatctaggctttgtacaagggcactaccatgtggttctccattatctggtgataatgtgattagttctcctgctctactgaaagataattctcaaggtagtgccagcatgaatcaacaaacaggtgatcttggaaaattgaaacagacctcagcatgcaagaggagtttatataaaactttgtcaagcataaaatcagatcatgaaagtagctgtgcttctacatcaaaagataaatcatccagcaaccaatttccttccacttccagtaataatgctgaagtactaaaaagaaaaggggatgtggaatttgagttgcaactggaaatggctctttcagctactgctgctgaaactcaaaataataaactagctactcacatgaatcaattgactgttagcttacaagattctagttcaccattgaagaaattgcgtcaaaatgtggaagctttatccagctcaagtgcagtttggtcaagaagtgctggagctccattatattgggctgaggtatactgtggtgggcaagcatcaacaggaagatgggtacatgttgatgttgtgaataatctcattgatgctgaacagaatgtagaagcttcttctgccgtttgcaagaagcctttaagatatgttattgcttttgctggaaatggagccaaggatgtaaccagaaggtattgcttgcagtggcacagaattgcacaaggcagagtgaattcagagtggtgggataatgttttggcgccactaaaacagatggaactggcagcaacaaacaactatgaagacatggaacttcaaaccagagccctaacagagcctcttcctaccagtcaacaggcctataaggaccatcacctttatgctctcgagaagtggcttcacaagaaccaaatttttcatcccaaaggtccagttctcggtttctgtaaaggacatcctgtttatccaagatcctgtgttcaaacactgcagtcaagacatggatggttgcgggagggcctgcaagtccgagaaaacgagttgcctgcaaaggtggttacacgtccaaagaggactttcaatgcccagtcagttcaatcaagtggcaacgaagatggtctaaaaccaaccttggaactatatggtgaatggcaactggaaccactgcaacttcctcatgctgtgaatggcgttgtgccaaagaatgaacgaggccaagttgatttatggtcagataagtgccttccgcctggtactgtacacttgaggttaccaagattattccaggttgcaaagagacttggcatcgactacgctcctgctatggtcggatttgattatcgcagtggtcggtgccttccagtctttgatgggattgttgtctgtaccgagttcagaagtgctatcctggaggcatatgcagaagaagaggagcagagacgagctgtggagaagaagcaggaggaggctcaagcactctccagatggtatcagctgctctgctccattgtaacaaggcagaggttgaaggactcctacaaaacaccttcacacgggattggtaacgaaggcctgcccgaaaatgataatgtccatagaagcactctcagcagccgatcctcagaaagggaacctagttcaagcaaactgcagacagatcatgaccatgaccatgaatttccaaaggaagaccagagctttgatgaggagaccttcgtgaggacgaaacgctgcccgtgtggtttttctatccaagtagaggagttgtaactttgataccaggaatgcacaagtgcacatgtttaactgtgttaacatatggcccctttcgtccatttgaaagtcggaatccaaaacgtagttttgaatctacttacccatttggatccttgca

SEQ ID NO: 94715 - DNA, 620 bp, Zea Mays
cctccaccaaatccgcccatctccattgatttatgagggaaaaactacggagaaatcggatctgctcccatccttcactctcttgcgtggattggatttgagcttctctccaaggttcccatcaacatgaccaggaaatccttcgagagaaccggcaacaagctttggtctgctatctcgggacagcggcagcgccatgctgtagatgttgctgtccatgatgagtatttcgctgccctgggtaacctccatggagtagggctcgatccccagcttactgtagtcaaggatcttctccacagtgtacccgcactcatatttcaccatcgactttcccccgctcgctgctatagcgttgttgatgatgatgcaaggacgtacaaaagcatctttgcccttcaaaaggcataaagcattgttaaaaacctcgccaaagagcatcttatcgcccatttcatctctataccacccagtaagcttggtcatggctgcattccactcggtcaacctcccaaattggtcatcaccaaatattggaggaattagtgggttctggttgtagatgattgtcttgtaatctccctcaaccccagtaaatttgtccatgagtaacctgtgaa

SEQ ID NO: 94716 - DNA, 1805 bp, Zea Mays
aaagaggaacgaacaagagagagagaaagcactggctctgtagctagctagctacagcgatagcaactcacaaaaaaagcggcaccacacacccacacacaccagaaaacacaagcacaagcaaataagcagcaccgccagcccggccaccaagaactccaagaataaccttcactgccgtcttcgttcgatcccttacgctaacactagctgcttcaggctgcagccaccagccaaaggtagggcgcgcgcgcggcatccatggaggcgcgggcagcgtcggtcccggacctttcgctgcacatcagccttccgagcagcgccgcgtctccgtctcccgccccggggctgggcgctggaggagtagggcgtggtgcgcagccgtccggaggggacccgtggcgccgtctgaacggatccacggcgtcgaccgagctgtcgctctcgccgccgccgccgcggcaggaggcggctgccggggacgtccttccatggcggctccggccgccagcggcgaattactcctcgtccaccgcggaggcaacgttcttgccggtgaccgtgccgcggctttcgttcgacgccgcggcggaggcggcgccggcaaggccaatcaacggagtgcccgtctacagcagcccgcggaccggcgccgcccatccttttcttggcgccggcggcgaataccggcagtgccaccaccacaaggccgccgtggggctatacaatccctaccactcctcgtcgtcgtggccctcgtccctgcggtcgacgacgacggcgccccttggcgccgtggcgccgccggcgtccgaccccacggcgtcgtcgtacctctcgccgtccgcgtaccaccggatgctgtcgagcaccggccggctccacctccagggcgtgctcgccgacacgctccgcggctacggcagcgggcaccaccaccgccagcacttgggcagcctggccgcggcccgctacatgccgaggctcccggcttcccggcgcggcatgcgcgcgccgcggatgcggtggacgagcagcctgcacgcgcgtttcgtccacgccgtcgagctcctcggcggccacgagcgggcgacgcccaagtcggtgctggagctgatggacgtgaaggatctgacgctagcgcatgtgaagagtcatttgcagatgtataggaccgtgaagagcactgataagccgcctgcagcaacctcatcaggagggggagggccgcctgtggacggtggtggcgggtccggcgacgacgaccacccgagcgattggcggcgggctccatcctcatcagctggtcgggacgtcagcccgcaggcgttcactggacaccggtcagcctcctcggacggcgcggcaagccatgcgggcggcgacgttgaatgctcctccgccgacgattccgacggtggcaggccgcgcagtgcttctccgccaaggctgccgccaccaagtgcgtgcaatgcagcagacacccttcattcagttggcgtaccatattccactactgaggatatggagcctgcttgtcgatcagctggcttacaacattcactcaaccatgaaatgagctgccctcctagcctggagttcacgctagggcggccaaactggaatggtgcagaatagcatcaccagcagctagctactagacacatgcatggatatatggcacattattagttcgacacttcatctagactgcttacaacacctgattggtttttgcatctattagaaatttagatagttccatgtttaatccaaaaatatcatatatatagtagatttatgac

SEQ ID NO: 94717 - DNA, 381 bp, Zea Mays
atgaatcggcatgtacatactgcatacctgcacaatgtacaatcatctgatcactataccatacagaacagcattggccgccgtgacaaacgtacacgctgccgaagttcagagctagtatttatgcacctagtgtccgtgaaaaacagaactgccaaaacaagcatgtcgtctaccgtaattcacccagatcgacccgagggcttcttcatacaggacgcaagacgcaaccaactagcctcagtcgacatgcttctgcttcacttggcgggacgcggaataggattggactgccgagctcgtcatgctgatggaatgcttcgtcaggtccatgctcttccttgcggtgaaccagatcatccagaagaacccaacccaacc

SEQ ID NO: 94718 - DNA, 106 bp, Zea Mays
gagatgatcagtcacaaaagcaccacagcgacatcactccagcttgaagcagttcaaaagcccacaactacatcactaatatttcatatcactcccgctattgttc

SEQ ID NO: 94719 - DNA, 2748 bp, Zea Mays
atggaggaactggcggagctcgccgacaccatcctgcagggcaccgcattgctcgcggacgacgacccctccgaagatcgcccgagccgccgcggctcgtccttcctcacggtcgtcgcgatcggcaacgtcggcgcgggaaaatcagcggtgctcaatgggctcatcggccatcccgtgctcgtgagtacagtcctccccctttctttcttttcgcaattgtctgtgttgcctaccggggagaatggcgccacaagagccccaatctgtgtcgagctgcagcgggacgcatcactcagcagcaaggccatcgttctgcagatcgatagcaagtcgcagcaggtttccgcgagttccatcaggcactcgttgcaggacaggttgagtaaggtttccggcaaggggcggccggatgagatcactgtgaaattgtgcactagcacagcccctccattaaaactaattgacataccgggcgttgaccaacggagcacggatgaatcaataagcaactatgctgcacgcaacgatgcaattctactagttatcattccagctcttcaagcgcccgatgtggcatcttctcgagctctaaggattgccagagaattggactcagaaggcccaagaactgcagcggacatccaatgggtagctacaattggccattctgttcctactgcctctgctcagtctgaagcaggttctgaaacaccgccggaagcttattggcaagcagaagttaaaacccttgtatctactcttggtggagctcccgaaagtaagcttgggagagtagctttagttgattcactttctaagcagataaaagcaaggataaaagctaggctgccaaatcttctaaatggtctccaagggaagtctcaagttgtccaagatgaattagcaaagcttggagaacatatggtccaaagttctgatggaaccaaagcaattgctttaggactttgtcgagaatttgaggataagtttctggaaaacattgctgggggtgagggtgccggttggaaagttgttgctagttttgagggaaagtttccaactaggatcaaacaactacctgtggaaaagcattttgatatgaaaaatgtcaaaaaggttgttttggaggctgatggttatcagccatacctgatatcacctgaaaaaggcttaaggttcctcataaaagggcttctcgaattagcaaaagaaccatcgatactccttgtggatgaggttcaccgtgtattgctagacatagtatcatctgcagcaaatgcaactccaggacttggtagataccctgcatttaaacgagaggtaattgcaatagcatctactgctctagatggtttcaagaatgaggcaagaaagatggtcgttgcactagttgacatggagagggcattcgtacctccccaacattttattcgcttagtgcaaagaaggatggaaaggcaacgccaggaggaggagctgaagaaccgctctacaaggaggggccaggatccagaccaaagcagagatacaaccccacaaaaaaattcacatcaaggagagatgaaacaggcatcaaatttacaagttctaggtcctgcaggagaaattattgctggttttttgttcaaaaaacgcgcaaaagcaaatgattggagcaagcgatggtttgttctaaatgagaaaagtggaaaggattgtaatcttgaggataatttagacgatgaagatgctccaagaagttcgaaggattccaaaaaggcaaatatggtagataccggaaaagattctagccttatgttcaagattacccacaagattgcatataaaaatgtgttgaaagctcatagcgctgttatactgaaagctgaaagcatgagtgataaaactgaatggatcgccaagattaagggcatcgtcgacccaaaagggctttctgcaaagaaaccaagcgcttcagaaggcggtgccccagtgaggcaaagccatccagatggttccctaattttccacagatattcatgcatactatccttccaggaaccagtactcaagaaacctgtgaaccatgaagaagagcttcgatggatatcccaggaagtccgtgcatatgtggaagcagtcctcaacaatcttgcaggaaatgtccccaagttaagaccacaatctttgtccaggctttcctgtgtagcaggctgtggttctctgccaagtagagaaagccaaagaagatatgctcagccagttatatacttctataagtcaactatagccattgaattcgaagtgttcgaagtatttctcaccaagaaaaccaaagcaacaaactcacggctctctcatgtggttattagcacgcaaagcttagccaaaatcgaagagctaatccaggaggaccacaacgtgaagcggaagcgtgaaaagttccagctgcagtcgtcgcttctttccaaggtcactcggctgctcagcatccatgacagccggtcgggcagtgctggtctgtcgacagattctgctggatcagctggggcgctgctacctggtgagttgagtttgcatggaaattgctccatcgccaaccgtgtctcttgcgcagagagtagcccgaggaacggcggacactctggtgacgactggagatctgcattcggagctggatcggccagttggtctactggagcagccattgccggccgccgcgtaccgagtcgaggtccgccgccgcctccaccaaatgttggctga

SEQ ID NO: 94720 - DNA, 1739 bp, Zea Mays
atggaggaactggcggagctcgccgacaccatcctgcagggcaccgcattgctcgcggacgacgacccctccgaagatcgcccgagccgccgcggctcgtccttcctcacggtcgtcgcgatcggcaacgtcggcgcgggaaaatcagcggtgctcaatgggctcatcggccatcccgtgctcgtgagtacagtcctccccctttctttcttttcgcaattgtctgtgttgcctaccggggagaatggcgccacaagagccccaatctgtgtcgagctgcagcgggacgcatcactcagcagcaaggccatcgttctgcagatcgatagcaagtcgcagcaggtttccgcgagttccatcaggcactcgttgcaggacaggttgagtaaggtttccggcaaggggcggccggatgagatcactgtgaaattgtgcactagcacagcccctccattaaaactaattgacataccgggcgttgaccaacggagcacggatgaatcaataagcaactatgctgcacgcaacgatgcaattctactagttatcattccagctcttcaagcgcccgatgtggcatcttctcgagctctaaggattgccagagaattggactcagaaggcccaagaactgcagcggacatccaatgggtagctacaattggccattctgttcctactgcctctgctcagtctgaagcaggttctgaaacaccgccggaagcttattggcaagcagaagttaaaacccttgtatctactcttggtggagctcccgaaagtaagcttgggagagtagctttagttgattcactttctaagcagataaaagcaaggataaaagctaggctgccaaatcttctaaatggtctccaagggaagtctcaagttgtccaagatgaattagcaaagcttggagaacatatggtccaaagttctgatggaaccaaagcaattgctttaggactttgtcgagaatttgaggataagtttctggaaaacattgctgggggtgagggtgccggttggaaagttgttgctagttttgagggaaagtttccaactaggatcaaacaactacctgtggaaaagcattttgatatgaaaaatgtcaaaaaggttgttttggaggctgatggttatcagccatacctgatatcacctgaaaaaggcttaaggttcctcataaaagggcttctcgaattagcaaaagaaccatcgatactccttgtggatgaggttcaccgtgtattgctagacatagtatcatctgcagcaaatgcaactccaggacttggtagataccctgcatttaaacgagaggtaattgcaatagcatctactgctctagatggtttcaagaatgaggcaagaaagatggtcgttgcactagttgacatggagagggcattcgtacctccccaacattttattcgcttagtgcaaagaaggatggaaaggcaacgccaggaggaggagctgaagaaccgctctacaaggaggggccaggatccagaccaaagcagagatacaaccccacaaaaaaattcacatcaaggagagatgaaacaggcatcaaatttacaagttctaggtcctgcaggagaaattattgctggttttttgttcaaaaaacgcgcaaaagcaaatgattggagcaagcgatggtttgttctaaatgagaaaagtggaaagcttggatacacaaagaaacaagaggagagacattttcggggtgt

SEQ ID NO: 94721 - DNA, 1636 bp, Zea Mays
acagggccgcagcttgccgatccctagcgacgaagtccactgccgagttgccgactcaccgactccccctcgcaagtcgcaatctccactctccagagtccaaactccactcctcaccgatgatggcctcgcaagcgatggtaccgctgcggcagctctttgtcgacggcgagtggcgcccgcccgcgcagggccgccgcctccccgtcgtcaaccctaccactgaggctcacatcggcgagatcccggcgggcacggcggaggacgtggacgccgcggtggcggcggcgcgcgcggcgctcaagaggaaccgcggccgcgattgggcgcgcgcgccgggggccgttcgggccaagtacctccgcgccatcgccgccaaggtaattgagaggaaacaagagctagctaagctagaggcacttgattgtgggaagccttatgatgaagctgcatgggacatggatgatgttgctgggtgctttgagtacttcgcagatcaggcagaagctttggacaaaagacaaaattccccagtttctcttccgatggaaacttttaaatgccatctccgaagagagcctattggggtagttgggctgataactccttggaactatcctctcctgatggctacatggaaggtagctcctgctctggctgctggttgtgcagctgtgctaaagccatctgaattggcttctgtgacttgcttagagcttgctgatatctgtaaagaagtcggtcttcctcccggtgtcttaaacattgtgacaggattaggtcctgatgctggtgctcctttgtcagcacacccagatgttgacaagatttgcagcgcaacatctcgtcttcttgtccatacaaaaattgctaaagaatttaatgagaagatggttgcatgggccaagaatattaaggtttctgatccgcttgaagagggttgcagacttgggccagttgttagtgaagggcagtatgagaagattaaaaagttcatattgaatgccaaaagcgaaggtgctactattctgactggaggtgttagacctgcgcatcttgagaaggggttctttattgaaccaacaatcattactgatatcaccacatcaatggaaatttggagggaggaagtcttcggtccagtcctgtgtgttaaagaatttagcactgaagatgaagccattgaactggccaatgatacacagtatggtttagctggtgctgtaatttctggtgatcgtgagcgctgccagagattatctgaggagattgatgctggaattatctgggtaaactgctcacagccctgcttctgccaggctccctggggcggtaacaagcgtagtggatttggacgtgagcttggagaagggggcattgataactacctgagcgtcaagcaagtcacggagtacatctctgatgagccgtggggatggtatcgatccccctccaagctgtaaactggcatgaaattttgtttgttccattagaataaatatatctcgatgctatacagaacgaacccgtgtatcaaatggagtatgacattgtgaaaaaggcacatcagcggaacaaatgtcagagttgacaattccctctaatgcaaatagttaactcgcccttgagtaccact

SEQ ID NO: 94722 - DNA, 112 bp, Zea Mays
aatttcaatagtatttcaatcttagactatccgcagcggttccctctaaatttctcccctatatcacttttttgcgtcacatcgttaacatttcatcctctacattattttc

SEQ ID NO: 94723 - DNA, 921 bp, Zea Mays
atggcgatgcactccggaaggtcttcattgcagcgctcgaggtactcgatgaagttgtcgaaggggttggccctcggagtgtggcttggcagtggaggtctcacgccccacgagaggatccgcaggggagatccaaatgtcgatccatccatcaccgagttttgcccacaaatccttctctccactcagaaacgcgcccgcacgccgtttccgtctgcgttagcgtccctgacagcacggtcccaccgctttcatcacctgaacgcgtccctcacctccctttcccaatcgagccccatccctcaagccctagccgccgccagctccaatcctctctgcgccgccagatccaatctgctccgccgctgtcatcgccttcgccacgtcgccgccgccggtgctggtgccgtcagtagcatggattcacgcatgtcgcgggcgagcggctcctccaatggaggacaaggatggcctaggtatggtccagtgtcgctcattcgctgccccaaatgcgaaaggccggagtcgcttgttagactcagatcgaaacggtgggagaacgacaattttggtcgagagttcatgaagtgtgaaagcaagccgcaacaagataaggttcttaaaatatgcaattttttcatgtggatggatgattacgtcaagatgattgaaagggcaggattggtgggtggctcgggagagatgatggtgtctaatatgtgggatgaacgagcggaagatgtgactacgaactggaacaaatttgctgccgaaatgaagaaggtgaatgacaatatggtggagttgaagaagatgaatgccagcatggtcgagttgaagaatatgtttagagttttttatgcttctatgatgtttattgtcttgctttttcttgtgataaactcaaattgtaagcgctaa

SEQ ID NO: 94724 - DNA, 1485 bp, Zea Mays
atggcgaacctgacttcttgctcctccgccgtggtggggtgtgaccgcggctccgcaactccttcgacaaatcccataggcatcttcaagctgcgactcgtcccgccatcgcatctcctcgttttcgcagctgttacgtatccaatcgtcttccatgtactgattagggtatacgttgcatccacaatttgcccaccaactcgggttcttcctcttcaggctccaaccaccactgcaggcaagatggattccgcagactccatagccgacaaggcaattggaaggatgcaagagattgcggacaagatatttgccgtagctcgggaaacaatccgtccaggccgtgggttgacctcatttgacgctaccaaacttcgtgtagcattggaggacatagcttgcatgctggagcaagactctctggtgttgcaagagaatttggacaacgtgaacaacgttaacaacccgggtgacagcagctacgaaccgtcaaccttgtcctcaccaccccccgctgacgactaccttactccagattgggactttgcggagcactttgaaaacttctggggtctagaatatgactcggaccagatgccttcgtttagtgacaatgagatggacaagtctggcaaagtgattgcaaagtgggatagtagagcaacaaaaatttacacagaaatttgtgtagaagaggtcaatgcacggaacaggccacaacaatttctaaatgccgaagggtatgctaacctcataagaaagtttaaggaacgcactggtcgcacttacaccagagatcaaatgaagaataggtgggacaccttaaagagaatgttcacacagtggaaaactcttaatgaaagggctacaggtcttggtcgagaccctcatactggttcaatcagtgctccagatgagtggtgggctaagcaaaatgaagcaatgccagggtgtattatgttcaaaacagcccccctagagaatgaggacgagctaaaggttatgtttggacccattgtctgcacaaatcaaacaacccttgttcctggcgtcgaggatgcaaattcatcatctgatgatcatgtcgaagccactttaggtgggggtgaaaacagcacacctgacccatgctcaaatgcgactgggaagcgtaaggtgtgtcatgattctccaaaaccaaagaagaaaaaagatacgagggaagagtacatgaaacgcctagtcgaggcttttgagtcgcgttcaatgaccactaacaagtccatcacctctgctgagaccgaccctgtccgtgttgaggtcaatgtgcagttgcaacaagtgatcgatgatggtgcacctgaaggcagcgacctacatttgtttgccactcatctgttgattgagaaaaagtttagagatgtatttgcaacactgaagaccaaagaaggaaggaacgcttggctgcgcagtgctttcgagatacatgttaaaaagtcgacttag

SEQ ID NO: 94725 - DNA, 2244 bp, Zea Mays
cacctctctcccgcaatatttaaccgccaaaaaaaaactctccactcctgcacttcacatccacgccacagccaggcagccagccagccaaagttgccagaccccaagctaaaagcagccgccattatttgcgttgcaccaccaaaagcagctgctgctttgctgctgaatagctccggcgccggcgacgcggccggatgggtgccgaacgctctcggcgctggaagctcctgcccttccggtcgctgtccctgccaccgccggcagcatccaagcccaagaacaggccacaggacgtcactgtccctccgccccggacgacgaaggagaagggacaggaggaggtgccggcggacttcctgtgctgccccatccttggcacaccgttggcggacccggtcatcctgccgtcggggcggacgtacgagcgcgcgtgcgtcctggcctgcgcggagctcggcctgtccctcggtcctgacggagtggtggcgggcaacagggacccaccgggcggtggcgttgccgccgctatacccaacgacgcgctccgggcggccgtccggacatggtgcgcgctcgctgatcgcgcggcgcccgtggcgccttcgggcgaggaggcgaaggtggccgtgctgcgcgcggtggcggcaccagggacacagcctccggctaggtcgtcgtcgaatctgtcgtgctcgtcggagggggctccggcgccagcaaggtcggcgtcgaacctgtcgtgctcgtcggagggagcttctgctgcatcaacgtcgtcctcgtcgtcgggtaggtcgtcgagggatatggcgccggtcgaggtgaaggtggtgcgcgggaaggaggcggcaaaggaggaagaagtcgaacacgtgcgtgttgctgacgcagaggaggaggtcgtggcgaaggcggtggaggccggggacgagacggcagtggaggcggcgatggccgcactgcggcgggcgacgcgggagggcgcggcgaggcggcgcgcgctgtgcggtccgcggctgctcgcgtcgctcagacgcgtgctgctgtcctcgcgccacaccgcgtcggcgcgcgcggacgccgccgcggcgctggcgaacctctcgctggagccggagaacagggtgcccgtcgtgcgcgcgggtgcggttcccgcgctcatcgaggtgctcgcgtccgccgcctcgccggccgaggcacgcgagcacgcggcgggagcgctcttcggcctcgccctccacgagggcaaccgcgcggcaatcggcgtgctcggcgccgtgccgccgctcctcgcggcgctcgcggaccgcgaccgcgccccgcgcgcgcgcctcgacgccgggatggcgctgtaccatctctccttcgccgccgtgaaccagtccaagctcgcgcgtgccccgggcgcgtccaggactctgctctccgtcgcgtgcgacgccgccgagccggcgctcgtccgcaggctagccctcatggtgctctgcaacgtggccgcgtgcgcggagggtagcgccgccctgatggatgcgggcgccgtggcgacggcgtccgccatcttatccgaaggagcgtgcaacaccgagctgcaggaatgttgcgtggaggcgttgtacgccatgagcagggggagcccgcggttccgggggctcgccagagcggcaggcgcggaccgtccactcatgctcatcgccgagcaggcgaacgcgggcattgacaaggaggtggttcagacggtgctgcgcacgatgggccgcgacaacagcgacgacgaccacacgtcaggctgcaggaacgacgagagcaactacagcggcagcagtttgcctcaccgccggcgcgtggcaagctggagcgctccgcctgccgcgacaccaccaagttctcatcaatggcgatccgtgtgcattgattaattaggtccatctggtggattacgttgggacaagctttttctcatcgggttgaaatcttgccgtgctttcttcttggcctgtcattttgagtgaatgctgcagtgaactggtgaagaatctggaagacagttatgcagttgaatccagtacggttgtgtgcgtttgtactctgaactgtgctgttactttttgttcctgtcaagttagccaaactgtatataggttcgttgcttcttgcttgcaagatgttccatgatttgttttcgtcgtcgtcaattgcatagtaactttttgcaaatgaaggagcaatgtgtttgctaattgc

SEQ ID NO: 94726 - DNA, 138 bp, Zea Mays
attttttggtcttctttcttcgattgtgaacaaataacatatagaatttgctatgtaaatttatattcttatttttagcattgaggctattaatcttcacaaaaaataaacattaaatctgttctatatctttttaaa

SEQ ID NO: 94727 - DNA, 359 bp, Zea Mays
gttaaaatcggatcgtatatgcttctatagtatcaaaataatttaattatatcaacatataaaagtcatatgttaatagaacagtaatcgatcatgccgcaccgccatagcaacaaagtaatcaacgaagggggtattgagttaagctgaccaagtcaacacaatgactgatctaccaacaactgcatgacatgccacactggctagttacatcgaacaaaccacagcaaacactggtttctagtgcactgtacacctctgctctcgccagtgcaagggctgattcgccacagaagcagcacatctcccctggatgttggcactcagttttcacctcgtctgccttattgattcatcct

SEQ ID NO: 94728 - DNA, 1270 bp, Zea Mays
cgctcggaggacgtttaagcgacgtttaaatgcgtgaaacggacgttctactccattttggtaaaacgttcggacgttttaactcttagtcacgttttgtcgtttaaacgacttttaagcgacgttttaataacaatggtgctgacattgtcatgttttgttattcttcaccaaggatgttatatcaggtttctttattactgattcaaactccacacataaattttactcgctctggaactaatacttttggctctgttcttaattgaatctttttcagtacagcacttcttttgtgtggctgcaaagttctgtaattctagaggagcaagatggatattattatcatcatctcacttgtcattcttttggcactaggagctctctttgtgatcccaaagtcacaaaataaaggtaaatcaaagagaaacgacttaggagctggaacggtaaactcttcatttttagtttgctggttttcttgagcctacaaatgcacgctacaagacattttcccctcatctgcaccataatactgataatattttagatagtttgaagaaatcattcctttttgtttttactgtctctctacattcagacatctaggagctttacgacagaagagatctctaaacattccacaaggaaggactgttggatcattatcaaggacaaggtctatgatgtcactccttatgtagaggaacatccaggcggagatgccattctaaataatgctgggggtgattccacggagggcttttttgggccacagcatggcactagggtcttcgatatcatcgaggatttctgcatcggtcagttgaaggcttcatgatgatgacaggatagtttgtattgaatttattacgggacataaatttgtgagaagctacattttatctatgtttgagcattgcgaccatcgagcatatgaatgccagtataattgttccacaactgttattaggcctgccctgagctgtgatgtaggagatcgttttttttcccctctgatggggcaatgtgagctgttcgaccactggttgttgtgcttgcacatttctgttgttggacaagactgaaacgtttttttcccaattgttttgtttaaatcaggactcgtttctcatgatcacttctgaagggatgttatggttaagatgttgcaagtttgattttaacttggtcgttgaatgcgttttacgatttgttgctctctaaggttaggtggtgtgcaaacatgaaagtgaaacaatttcaagag

SEQ ID NO: 94729 - DNA, 305 bp, Zea Mays
catccagcttgttttcttgcttcctgcaagtcgtttctgtacctttcagttaggctagatgtggtccgtctcagacccaagtgggatttcctgaccggactgtccctgaacatgtatttatgctatcttcacccgattcaaggacacctattgagtgtactatctaactgaacaaaggcacaaaacattgtgcgactgcgaaactcactgtcacccactgtcggtggtggtgaaattgcagatatctctttccactataccgttatatctcaacccaacagaatataatttcaatcgattttgca

SEQ ID NO: 94730 - DNA, 1542 bp, Zea Mays
atgccacactgtcttggtcatgtgtttggtgtttccctaaggttaggccgccacaaattcttaggcatgcgccacaccactcgccacaccaaaaattcgccacaactgcggcgtccaaatcgagcgcctcaactctacgccagacgctgccgcaaaaatctgctcgtcgctgccacaggggggggggagagagaaggcgagggacggtcacctggtaggagctgcgcggcggcaaagacgaggccatggtgggattactggtggggattagggggtatagctgctagatttttcttgtgcgcggtgggggaggtggagctttcttggtcgcatggaactggagttgttccgttggtctggatccgtcgctcctgcgcatggtctgcgcatctcatgctttcttggcctgcgcatggcctgcgcatctcatggaactggagctttcttggcctgcgcatggtcgccgctcctgtggccatcgtgcctgggtgccatggtccctgggtggctgtcgtgcccctgggcggccaggatgccagtgcctgtaccaacttcttggatgctgatttcaggaccaaaattgatatgggcaaagggaaggataaggttgacggtgacaactgtactcgtgagaggaccattctatgggatgaggatcaaacaaagttcatgcttggttggtacatggacttcataaaggatcaacatgccggttttaaggttaaaaaacagcaccactttaagtgtgcagaatcattgaatagacaattcaatatgggggtaacagcaactcaagtggagagacattttaggcattacaaagaaaattggaagttcattgcaacagccttaaacaagagtggtaacacttttgacacaacaaggtctatggtaatcatatcagaatcagagaaggaaaaactaaaggatagagcaaggaggctcctttcaaagcccatcaaattcttcaatgaaatgcaggagttattccttgacagtagtgctgatggatctcttgccatggatgctactacttgcctaaatgaaagtcaacctgtcgatgataatgataatgatgatgacatatgcaatgatgtctccaactatggtcaacctgaggatgacctaggtgatgactctgacactttaccatctcctaaaattccatctcaagttatcgatcagagctcatctagctctggaatcaagcgtccaagaggagatgccataccagtcaaaagagatgtgagaccacggagccgcatggcaaagataggagatgaaatcaacactactttgatggatctccggaacgaacttaaacaaccaccacctccacctattataccttctttgaactctgatgccgaattatggcaaaggcttgaaaaaatgacattgactactgatcaaaaactgatagttgggacatttctagcatcaaaggatcaaaagggcatgcgtggtttcttatccgcttcagctgaaacaacatttcagtcatgggtattcaagtttttgagtgattcaacactactgtga

SEQ ID NO: 94731 - DNA, 942 bp, Zea Mays
actttgctgcaaacgcttctttaagcaatataaactttgttgaacaacgatcgtacacgcatataacatctaaccgacaaaataacctagttgcaaacttgaaactaagacatggttgggagaaagcatcagactaggatgtgcaagatttcttctgtagttccgagggtattattatttgatcagcgtatgcgctactacaccttcaattacagagactacctaacaagttaaacaaagcagcttcagatccgcccaaacataagattaggcaatgatccaaaacctgccaggcaaaactgatatgttatcctccaccgagatggacattgtcgacgaaaaaggctgttgagtcgactgttgagcactctgatgttacacctagccctgaccgtccaaaaggtcagagtaacgaggcctactttcggaaaccggggtcggtgttgtttttacaaagtgaaagggcttccatccctttttcaactaaaaactggatcatgaggtgtgcctttgatgaatagcatacttgacaacctcgtagaaggaaacgacgataccaactgatggaccagcacgtgcaacacgtgggccgacgccggtgaacagccctttcaagcctccagacctgccacagacaacaaaaatataagcgagcagcaaatcagttacgagtatattatatatcacctttatctataccactatataatctatcagttaaaactttgcaaaacccacccaacccaaagcacccccacgcccataacctccactaaatccaacaaacaaattacacctagacttaatacaccatcaaaactagacctgttcaaacgtcgggtcgggttcgagtcgggtcaaggtcgtgggccatttatcattgcccatacccaacccgtgtcgagtgtcgggttggcccgtgtctcctgtttgacgtgtcag

SEQ ID NO: 94732 - DNA, 1641 bp, Zea Mays
agcatccagcaatccgccacgctcgtcgctcgcccggtcgccccctccacccactgccgcttcaactctctcgctccctgtcttctccaaaaccctaaccgccgacggcgatgctctcgacggcttcggtgccctccacctcgttcgccgccgctttcctctcctcccgcgctcgccgccggcgccgcgccccctggctgcggtccgtcgccgcagccgccacgtccggggtgggggacggagaggtggagaggttcgctaccagcagctccatcaccgactacctccgctaccgccgccccgagcttggctgtgccggaggggcaggcggaggcgggctgccaggcggggagctgcagacggcggtggtgcgcttcaagaagcggttcccgtggtcgcttctccaccccttcctccacgttgatttggtttctacagtccacattgcagacaaagagtatatactttgatagactgcagcgagagcttgaagattacgattgtgtcctgtatgaaatggttacaactcgggagaatttgagcaatccgaaaggtccaatggctgctaagaagatgaaatcttcacgcagaggatttagtattattggtttcatacagaaacaaatggctcgggtcctttcgttggattatcagttagactgtcttgattatggcaatgagaaatggcaacatgctgaccttgactatgaaacattcaaacagcttcagagtgaaagaggtgaaagtattctcacgtttgccatagacatgacactgaaatcaaccaaagccttggtgcagccaagtaacatgccagatggccttaacttttggaggtcgaagttactatgggcctcgcgtgtgctaccaatgccacttgttgggctactcgtcatcactgggctgtgtctgccagtggaaaagcaagatgggtttccagagctggaggcattgtccaggctagattttggagctgcactgaagattttcttggcaaagcaactgacatctgaattcacagctgtgcctacacccgttgaggagaaatcagttatcattggggagaggaacagagttgctgccgagaagatccaggaagcaataaacggtgggtacaagagaatagcggtcctctacggcggcggacacatgccagacctgggaagacgccttcgagaagagctggacatggtcccggccgatgtgcagtgggtcaccgcgtggtcaataagaagccgggagatagacagcgaatccctccccttgttgaagacgctggctgaggcttcaggctggcctttgaatagatacgagacgctcgccctgctcatcttctcttcggttctcgcggtggatctttggttctgggaactcttctttggcaccgcggttaattgtgcatctctggctggttcctggattggccagctagcttagcggcacactactatatatagaaatggcagtataaagaaaaatagaacccccccagtttagttttgatttgtccagctgttgctggagtactgcagcaaaccattgtagataagacacttcatttcgatcaaagttgaaacgagattgactgctttctctagtcatgtgattgggttttgctgaatgatgcatgtttgactcggc

SEQ ID NO: 94733 - DNA, 1705 bp, Zea Mays
gtgggcctacgtctcggttatcttcctggacggagagacaggggattaggggaaggccgaggcgaggcagcatccagcaatccgccacgctcgtcgctcgcccggtcgccccctccacccactgccgcttcaactctctcgctccctgtcttctccaaaaccctaaccgccgacggcgatgctctcgacggcttcggtgccctccacctcgttcgccgccgctttcctctcctcccgcgctcgccgccggcgccgcgccccctggctgcggtccgtcgccgcagccgccacgtccggggtgggggacggagaggtggagaggttcgctaccagcagctccatcaccgactacctccgctaccgccgccccgagcttggctgtgccggaggggcaggcggaggcgggctgccaggcggggagctgcagacggcggtggtgcgcttcaagaagcggttcccgtggtcgcttctccaccccttcctccacgttgatttggtttctacagtccacattgcagacaaagaatactttgatagactgcagcgagagcttgaagattacgattgtgtcctgtatgaaatggttacaactcgggagaatttgagcaatccgaaaggtccaatggctgctaagaagatgaaatcttcacgcagaggatttagtattattggtttcatacagaaacaaatggctcgggtcctttcgttggattatcagttagactgtcttgattatggcaatgagaaatggcaacatgctgaccttgactatgaaacattcaaacagcttcagagtgaaagaggtgaaagtattctcacgtttgccatagacatgacactgaaatcaaccaaagccttggtgcagccaagtaacatgccagatggccttaacttttggaggtcgaagttactatgggcctcgcgtgtgctaccaatgccacttgttgggctactcgtcatcactgggctgtgtctgccagtggaaaagcaagatgggtttccagagctggaggcattgtccaggctagattttggagctgcactgaagattttcttggcaaagcaactgacatctgaattcacagctgtgcctacacccgttgaggagaaatcagttatcattggggagaggaacagagttgctgccgagaagatccaggaagcaataaacggtgggtacaagagaatagcggtcctctacggcggcggacacatgccagacctgggaagacgccttcgagaagagctggacatggtcccggccgatgtgcagtgggtcaccgcgtggtcaataagaagccgggagatagacagcgaatccctccccttgttgaagacgctggctgaggcttcaggctggcctttgaatagatacgagacgctcgccctgctcatcttctcttcggttctcgcggtggatctttggttctgggaactcttctttggcaccgcggttaattgtgcatctctggctggttcctggattggccagctagcttagcggcacactactatatatagaaatggcagtataaagaaaaatagaacccccccagtttagttttgatttgtccagctgttgctggagtactgcagcaaaccattgtagataagacacttcatttcgatcaaagttgaaacgagattgactgctttctctagtcatgtgattgggttttgctgaatgatgcatgtttgactcggc

SEQ ID NO: 94734 - DNA, 2785 bp, Zea Mays
ggcggcaatgacgcgccacttccgcgactcctccacctccagtgaccccgctgccgccacgccgccgctgccgcccccactccccgacctcggagtggccctctccgccgccgatctccgcgtcaccgcctacgagcttctcgttgccgcttcacgggccaccggcgccaagcccctcacctacattcctcagcccacgacggcagctagcaagctcaagggcgcgttcggtctcgggtcctcgccgccgtccaaggtcgggagggcggcggtgctggagctggtgcgggtgcggatgggggttacagagcaggccgacgctacgatccgccggctgctactccgcgtcgccgccggacagcttggcagacctgcagaatctatggttttgcccttagagttcctgcagaagtgtaaagcatcagattttcctgaccctctagagtacgaggcttggcagatgaggaatttcaagcttcttgaggctggtgtgctggtccacccacttattcctttaaagaaatcagacattcctgcaaagagaatgcagcgaataatacataaagcatatgttgggcaagttgaagctgggaggaattcagaatccatgcaaatattgcacaacactgtcatgtcccttgcgtgtagatccctttgtgaaacttccaatgagtgtcattgggcagatggttttccctttaatctccatatctacaaaatgttggtggaagcttgctttgatgttgaggaaggcactgtagtagatgagattgatgaaatgatggagctgttgaagaagacttggcctgttttcggagtcactcaaatgctccacaacctttactttacctgggttttgttcaaccattttgtcattttgggccaagaagataatgggttattttctgctatagagaatctattagttgaagttgcaaaagatgctaaaataaccaaagatccagattactgtgatgtattgagctccactttaatctcaataatgggttgggaagagaaaagactgcttgcataccatgaaactttcggtggtagtaatctttattccatgcaatatactatttcaattggaatctcagctgcaaagattctctttgaagatgtatcttatgaataccatagtggaacaaacagagatattgatgttgtgcgcagcaggattgaaacttatataaaatcatcaatccgcactacttttgctcaaaaaatgaaagaggcaggttcaaatcggtcatccagaaatcgtacacctgttctgtctattcttgcaaagaaaacaactgagcttgctattaaggagaaaaatgtatacagtccaatactgaagaaatggcacccctttgctgcaggtgttgctgttgcaactcttcatggttgctttggaaatgagctaaaaaagtttatagttgggcttacagagctcacaccagatacagctcaagtgcttaaggcggctgacaagttagaaaaggatctagttcatattgctattgaagattctatggacgttggtgatagtggcaagtcattgattagtcaaatgccacgttatgaagctggaactgtaatggataatctggtaaaatcatgggcaaaagaacaacttgacaggcttaagatttggactgaccagaagctacaacagcagacttggaacccagaggataaggacaaggataattttgctcactcatctgtggagatgctgcacagaattgaggaaactatggatgcatttgtacgattgtctataccaatccgctctactctgcttgctgatctgacagctggactcgataaatgtctacattattatgtctctaatgtgaaatcgggctgcggaactcggagtagcctttttccgcagctacctcatctgacaaggtgtgacgttggatccaagttattcaagaaaaacgagaaaccacagtttcttatgaagagaggatcacaagttggatcaacaactgggaatgaagcctcgagccttcgtggactatgttttcgaataaataccatttactacatccaaactgaacttgaaaacctgcatatgaagacgaaagaatgcttgcagaaagttgagttatttcagcctgataatgctgatgatctgaacataaactttgggctatcccaggcagcttgccaagaaggaattcgacagctgtgtgagactactgcatatatggtgatgttcaatgatctgagccacgttctcctgaatactctctatgttgggagccctgcgtcaaacaggatcctgcctttgttaaaagagcttggtcctatccttaggattatatctgacacagtgcacaatgaagtgcaaaatcgtctcataactgcattgatgaaagcctcttttgatggcttcttgttggtgcttcttgctggtggaccgacacgtgctttcagctgccaggactaccaggtaatagaggacgatttccgagccctaagaggcttatatttgtcatattgtgatgggctgcctgaggaattagttggcaaggcttcctcggaggtgaagaacattctgccactcctacggacagacacagaaaccctcattgaacggttcaagcagctaatttctgaatcttatgaacctacaaccgcatctaggttcccgatgcctcctgtacctgctcgttggagtccggacaaccccaacacaatattgcgtgtattatgctatcgaaatgacgagatagctactaagttcctcaagaaaacatatgatctgccaaagaccctttga

SEQ ID NO: 94735 - DNA, 1818 bp, Zea Mays
attatttcgtccagacctattaacagacctattaacaacgaggcaagtgggcaaaatcacaaaaaaatcgtgtttcctgtctcggagatagcctctaatttgaaatcagcaaaggagtttcgtggtggcacgacgcacatgcgacggtctcctgtcctgctctgtcccctctggcctccctagcagcttatactttcttattgtactttcttatagtcttccacggccgcagttagccacatctcgccgtcggcgacgagggacagggaggcaggatactcctgtcaggccgcgacgtagccctcctcctcttgctctccccgccatcctctgcttctcgtccacctgggattagatctatttcttggtacctgagcgatcgagtgaaatcgatctagccaaggtgcggcgggcgcggcttattcacgaattttctgtgttctttggaaagccgccatggacgagtggattcgccaagccgaggtgtgggtgcgccaatccgagagctggatccgccagcagcccccggagcagatctatgtcgcggccacggtggtcgccgtcacaatcctgctgcttatcgtagcatcttatctgaaatcctctaaaccaagcaccatagtgctatccgggctcagtggcagtggcaaaaccactattttctaccagcttcgggacggatcatcacatcaaggaactgtgacttcaatggaagaaaacagtgatacttttgtgctgcattcggagcaagaaaggaaaggcaaagtaaaacctgtgcatattgttgatgttcctggtcatgctaggctcaagcccaagcttgatgaagtcctgcctaaagctgctggggttgtctttattgttgatgctcaggatttcttgtctagcatgcaagctgctgcagagtacctttatgacattctgacaaaagcatctgtagttaagaaaaggatccctgtgcttatattctgcaacaagacggataaagttaccgcccactcgaaggaattcatcaagaaacagttggagaaagaattgaacaagcttcgggaatcaaggaacgccatatcttcagctgacatctctgatgaagtccagctcggggtccctggagaggcattcaacttcagccagtgccagaacaaggtggctgttgcggagggtgccggttcaactggtaatgttttggccgtggagcaattcatccgtgaacatgtgagggcgtaggtcgttcttattgttctcagggctccaaatggctctcttgatctaatgaggcaagatgtacattgcgtcaatggggttgcctttcaatgtgactcttcatccggtcctctgaagttgcttaagaagcagtgaggcgcaatcatattctgcactggttcagctgacccatgtttacatgttgcaatgtgtatgcctgacagtcatcggatatgaatagagcatggtataactgtctggctatggttgttttgcacttttgctccgtaagtttttatattttcctgattttcacgtcgtctcggttttaaagtttaaactctttccgttatatagtccggatccctggtgaggtgagactcggtccaagaagggctttggggcacttgtctagaccgctatgatcagatcagatgaaattgttggccaccgtcttgtcccaaggactcgttctaacaattcccataacgctgtcccatctataatactgggaccagtaaactttgcaagacagtttagagtcaatagttatttggtacaaaatttgtctccccttatttagagccaatagtatcagaaaaaaataaaataaaa

SEQ ID NO: 94736 - DNA, 1448 bp, Zea Mays
aattgtcttaatcaaaggttgcgacctcagagtgaagtagaaactcatatacacatttatggaatgtcagctacatacacgaggtggattcatcatggggagtcggcagatacagaagttgagggtatagaggaggatgtcgaaggatatgataatgactttgggataaatatggatgtggacgatgatgtttacgatgatgatcatggagtacctgagatgatcggtgaactgtttgcagcggcagaggctgatggagaagagccaagatttgcaggagttcttggagatgcaaagaaggcacttagtccgggttctagccattcaaaattttcttttatggtgaggatgttgtatatgaagtctcgttatcgaatcagcaatacagcattttcagcaatgatgaagctgatgtccgatggataccctaatagtgagttgccaaaatcatataatgaggccatgcaatatcttaaagaattgggccttggatacgaaaacatccatgtgtgcaagaacaattgtgtgttgtttcggaatgttaatgctaaattgaatgagtgcccagtatgcacagagtctagatggaaagatgaaactggttcgaagcgggttccacataaggttttgaggcattttccactgttgccaaggttgaaaagaatttttgcttcaaaacaaacttcagaggaaacacaatggcacaagaaagtgaggaagccagtcgccaatgtgatgagccatccagctgatggggaagcgtggaaaggactttgaccgaaagtacccaggttttgcaaatgatccgaggaacctgaggctagccttagctaccgatggattcaatccatttggcaacatgagtacccagtacagtatgtggccagtgcttgtgacaccgcttaatctcccaccatgggaatgcgtgaatccaacaaactgctttatgtctttactcatcccaggtccaagatgtccaggaaaggattttgatttgttccttgagcccctaattgaagaactgctgaagctatggaagggtgtcaagacatatgatgcatgtactggtaggaagttcgaccttcgtgctgctgtactatggtgtatacatgattatccagcgctggccacgttatctgggcgaacaacaaaagggtattatgcatgtatttattgcgacaagaatttgttgtctatggcaataaggaacaagttatgctacattggacatcgtcgttaccttaaaaggacacattcatggcggaatagcttggatttcaatggtaagcgtgaaaacaaagttgtgcctggcaggttcactgtggatgaggtcctacaagagctagagaaggtgaaagatgtcagaccagggaagctggaaatctaacttaaataacagaaagtgtagtcgtgacggtccgaatatgtctagccggaaatatagtttg

SEQ ID NO: 94737 - DNA, 2224 bp, Zea Mays
cattgggatgcagcagactgatggttgtgcggcggacgaagtcgcagggaaaccaggaggaaggctagtgcagagaatcagagctgtctgggtgaaagggcaaaggcaagcagcagagggaggccattacgtgtctccttcctccaggttcctctcggggctgccatggatttgctcagcagaggggcggtgttcaaggccctggtgttcctctgcttcatcagatcgtctcaaggaggagatctgaatctccctcccttggtgaaggcaagcaggttccaaagcgaggcatacgactacatcattgtcggcggcggcacggccgggtgcccgctggcggccacgctgtcccacaagtacaaggttctcctgctggagcgaggtgggtctccatatggcaaccgcaacatcacgttgctggagaacttccacatttgcctggccgacgtttcaccgcagtcaccgtcacaagctttcatctccacggatggcgtgataaatgcccgcgcaaatgtcctgggtggcggaacatgtatcaacgccggcttctacagccgggcgaaaccaagcttcgtccagcaagcaggctgggacgcagagctggtgaaccagtcctacccttgggtcgaagagaggattgtccactggcccaaagtggcgccatggcaggctgcgctccgggacgggcttctggaagcaggggtctcaccatacaacgggtattcctatgaccatctctacgggactaaagtcgggggcaccatattcgacgacaccgggcgccggcacacggctgccgacctccttgctgctggaaacgctagcaacctccgggtgctgctccatgctaccgtcgacaagattgtcctcgcaaggaagcacggcggggggaggaagcagccgagggctactggagttcggttcagagacgagaacggagcgcaccaccaggccttcctcacaaggaagaggggtagcgacgtcattgtttccgccggcgcaattggcagcccacagctactgctgctcagcgggatcgggccgaggggtcaactcagcaggcacaacgtttctctagtgcacgccaacgaacacgtcggggaagggatgtcggacaatccgatgaactccatcttcgtgcctatgaagagccccacgaagcagtccttgattgaaactgtcgggataacggacgctggggtgtttattgaagccagcagtggtttcagccagtccgacgatagcatccattgccaccatggaatcatgtctgctgaggttggtcgtcgtcgtcgtcttcttcttttcttcatcttctacatgcatatataaagtctccattcatcgcagattggacagatatctacaattccaccaaagcaaagaagtcttgatcaaatccaagagtacgtgcgtaacaaacatagcctgcccaaagaagtgtttgacggaggattcattcttgagaagatcgatggcccactgtcgactggcagtctggtgctcgccgacaccgacgtcgatagcaaccccagcgtgagcttcaactacttccagcatccacaggacctcaggcgctgcgtctacgggattcagacgatcgagagaatactcaagacaaaccacttcgctaaccttaccgccaacggtgccgggtacccgatggaaacgctgctcaatctgagcgtctcggctaacataaacctgatacccaagcacacagacgacaccacgtccttggagcagttctgcagggacacggtcacaaccatctggcactaccatgggggatgccatgttggcaaggtggtggatcgacactaccgggtgattggcatctccggcctccgtgtgatagatggatcaaccttgttcagttcaccaggaacgaatccacaggccacggtcctaatgatgggcaggtaacgttaactacagaatgaacaaacaactactacatatattattggtattatctgctaatggtgtgtatttgatgatcagatacatgggggtgaagattctaagggaaagattaggacgagcagctggagtataatggactttatccagctcatcaagtatgaatgtgacttaggaggagacaagtatatagtgatttttgaaagcgattcattaaatcgccaaacaaacaaaacaaaattaagccaggggttccatttgtattcttgctgctctcatatatatatgcatggtctatcac

SEQ ID NO: 94738 - DNA, 1001 bp, Zea Mays
aaatcacaaaagcacagctcgcattccttgtgcatgggttttgagcttttgggcgatactagcaatacgcaaaagctcaagcagagctatagcttcggatggcgtttcttctaacgctgctactaccgtggtggccgctgtcgccgtggctcagccccgctgcggcgtggttcatcttcttcaacgccgtcgtcagcgccattgccgtcatgtctaccagcggtagcggcagcggcggcgccggggccacgccgccgtcgcctacgcgcaggctctgccgcagcgggtcgtctatggtcctggatcgcctccggtccttgttcattttttccgtggaggtggagcagctgccgatcgatgaaagcagcagtgctgccgcggcctcgcactgttgctggccagaagcagaggcggcgtccgcgactgagcgcaattcacaggctgcggccgcaacaaccggcgagacggcagcgatcagcagcaccgcgcaaccgagcgcctctgtggcggtggcaacagccgtggtccacgcgccttcggcaccgccaacggaggaggagggcaatgcagagaaggagcaagaacatgatgagtctgctattagcttggacgaggcctacgcgctagcccatcgccatcgcacgaagccgctggcgtcgccgccgtcagcagcagcctctgccaccgctgcgttgccgacggagcacaagaaggtggtggcggactggcggagggtacccaaagcaggggaggcgcttgaggggaaggcggagttgaacgcgcgcgcagacctgttcatccggcagttccgcgaggaactcaagctgcagaggctcaactccgtcctcaaccacacccacgcccttggctaacggcggcgctgtagccggtgtgctacaatgtgcttgctccattgttcacatggccatttttggattaatgtttttttgtaattaattagtttatacagagtatatataagagcaactcgttcgctcggc

SEQ ID NO: 94739 - DNA, 703 bp, Zea Mays
attggacggatcgagctggtactggcacactcgatccaatattttagctagctagcaagcaaagcaagccttgagcttgagcggcggctagcgcaatgggaggcgtggcgtcggagctggtaggagccagcagggagaggcagagcaggaagaggaagcagttccacacggtggagctcaagatcaggatggactgcgacggctgcgagctcaaggtcaggaacacccttgcccgcatgagaggggtggagtcggtggagatcaaccggaagcagcagaaggtgacggtgaaggggttcgtggaggcgcagcgggtgcttaggcgcgcccagtccacggggaagcgcgtcgagctgtggccctacgtgccctacaccaacctctacgtcgcgccgccggtgtacgacaagagggcgccgccgggccacgtccgcagggtcgacgcactcatcgcgcccgccgccggccaggaagagcacctcgccacgctcttcagcgacgataaccccaacgcctgctcccttatgtgatgcctcatgctagctagagccgcctgctccccggccttatgcgatgctagctgcttgcttcatccacgctgtactagcgatgtacatgcattgtttgcatgaaaacgaactgatgctccgtagttacgcagtaatataataatctctatcttttaattaattaaacgacaata

SEQ ID NO: 94740 - DNA, 1433 bp, Zea Mays
cgcacacggcacacacaccttcttcgtccccttcaccccctgccgctagcctctccctcccctcggtcgtagccatggagaccacttcccctgcctcttcacctgggcacacctccctcccagctgctgcaggtaggactaagtagtaaatagccatatacataggttgagtggatcgttaagagacggtagccatatacataggagtactggatagtatacaagaacggtagatacagggcaggggacatgatgctgggaaagagatctgggcgcccgtcgccggcggcgcggcagcacatgcggcggaccacgagcatgacggagttcgcggcaccgcacgtgctggtagacgtcgcggaggaggaggaggacgaggagctgcagctgctgccggcgcacgccgaggccacaggggaggcggccgagcaggaggacccctacgggtgggccatcggcggcgccgcggcggccgggcgcgcggactggctggcggcgtaccgcgcccgcgcggcgccggcactggcggggctacgccggaactcggccgacttctcggctgccgagaccgccgcgttcctccgcgcctgcgggctctgcaaccgccgcctcggacccggccgcgacaccttcatgtacaggggcgacacggcgttctgcagcctcgagtgccggcagcagcacatcacgatcgaggagtggaaggagaagtgcgcgctcgccacgccgccgacggcgccggcgtccgacccggtggtgccgctgccgcccagcggcgcgggctccgacaaaccaggcacgctcgccgccgcatcctgattagtcatgagggagggggtcggaggcgatcgatgatccgactccggctaagctagcagctctggcctcgccaccacacacatcacatgcatattatctatctttctatatatgtaatatgctcagatcactcttgctatgttcatctgcgtgctccaatcatatcattctttttcatggatcggatgtatcatgtatctagctgctagactatgctgaaatgcatgcatgcttttcgtccatggtgcatgcatccaacaatgaactatggatcgcacgcatcacgggacgggagagacgaggcgatttcacgagatcaatccgttggccgatatagaaaaggcctttatttgcatacatgtgctcgtcttcacgagccattttcagttcttcttttcttttcactttctgcgtctcagatgatctatttctttttttcatcagctcagcaaaggtacgccgagttttaatttcccccggtttctatgaaattcggcgttgcaaagatatatagatggttaccaggattggtatgtatttatatgatgttcgtcaccgatgacaacccccccggcccggccacatgatggcatgaataatattttatttatgag

SEQ ID NO: 94741 - DNA, 1358 bp, Zea Mays
atccgacgatgatcccctcgattcgcggcgccctcgcctccaccactccccaaccacccgacgccgacccccctcaattcacgcccccacctgctgcatcggctccctctggcgccccgcctcctggcccagatccgtgcaccccttgccctctccggactcgatgattcacagatctgcccagctgcccaggcacagactaccggcatccggatctcctgctccactgctcgccgccttggggctctccggcgttggctcagcgcgacgagccccccaatagcctagttccggatcccccaaccgcccacgccccacagttcaagcaccggccaccgatgtctgacgaacgagcgaactccccgcggatgcaggaggaggaggtgcaggagcgaccgccgaccgtccgcgtttcaccatccccttctccgatctcaaggtaaccttctccggtgttgaaaccatccgtggccacctggcgagctggtgcccgcaagaggtggtgctgaggcatgaggcggtgggcgtgttcctgacacactgcgggtggaactcaaccatggagagcttgtgcgtcggggtgccgatgctgtgctggcccttcttcgtggagcagcagaccaactgccggtacacgtgcatgaagtggggcgtggccatggagatcggccaggacgttcggcaggaggcggtggaggagaagatccgagaggcgatgggcggggagaagggaatggagatgcagcgccgcgcgggagagtggcagcagactggtctccgcgcgacgcggcccggagggcgctcatacgccaacctcgacaagctggtcgccgacgtgctcctctcgggtggcggcaagagttctcaggagggtttcagttcgcacaccgccactgtccaatgattcggactgaacatggatggtagtacaccaaaagagaagtttgtgtgaatgtcgaggcaaacccataaatcatggagcatgtgatggaatggaaggaccgaaggagccagtggcggaagaagttacttctcgtagtaggcaaaaattggaatatgaaaacctggaagctaagagggaatcataaaagcatatggaggaactatgtataggctacaaagaagcataagaagcatttttatagcagaagccaagtgttctgatgattttgttttttcaattgtgttttctgttattagttcagcatgcacatatattgacatgatttatggcatggcatctgccatctttgttatatttatgacatcgttcttgattgatgtgtgcgacatgaatgatggatttttttaacatcctgaccatcattgtgtcgctcattatcgtattttgtatatca

SEQ ID NO: 94742 - DNA, 125 bp, Zea Mays
ggaaagatcacttacttcgattgtcatcgacactggttgcctagaaaacacccctttaggagcgataagaaaaactttataaagaacaccgtggtcaccaaaggaccgcctaaacgtctgaatgg

SEQ ID NO: 94743 - DNA, 237 bp, Zea Mays
atggcgggatcgccctggctgagcaccactgggcgcaaattcctcttctttgggctatataatgtggactccgtgaccctagccccaggcccccatgggttagacatggtgtctaagccggggatgcagagggagggttcgctgccgtttgagcgtcaagggagagacagagagatctccaccgcgtgcggatactctgattcactgaggttgagccggctggctgttcacgggtaa

SEQ ID NO: 94744 - DNA, 1686 bp, Zea Mays
acaaattgtgtgtgccttggcgtgtcgtggaggccccgggcacgcacgccgcacagtggcatcagctctcagtgcgcgcacgtcaccacaaattgtgtgccttgtcgtggaggccccgggcacgtacgccgcacagggcacacctgctccctccggcctgctctgctcactgctttgattccgcttcggcgcttcgccgcctccggttttctctccgcgcctccagtctccagggacgcaccacctctcccaagtcccaatctcccatggcggcgctgggcacggcgatcacccccgcagcagctaccacggcgccgtgctgctataatcggcatccgcggagccacatcacggcgcgccgtaaccgggttgcctccgcgaggaggcttgacctgtgcgccagctcctcacctgccgtcaccgctcccgacataccagacgaggcgctggtggaacccttggtggcgccggcgccggagacgaagctcaggaagctggcgtgtccaatctgctactaccccctggcgagctcgagcgatcagttggatgatgctaccagtctcgaatgtccaacgtgcaagaaatgctaccccaacaagcaagattactgggatcttacagtgtcagttggttcgacagagtactccgagtccatgccagtggcaacagagttgtttaggactccactggtatcttttctttacgaaagaggatggcgccaaaatttcatatggggtggtttcccaggcctagaaagagagtttgaaatggcaaaaacttatttgaagccaacaattggagggactattgttgatgcaagttgtggaagtggcctgttctcaagattatttattaagagtgggctatattctcttgttgtggcactggatttctcagagaatatgttgaagcagtgcaaccaatacatcaagcaggaaaacatttcagatgagagattagtattggtgagggctgacatatctagactcccttttgtgagtggttcaattgacgctctgcatgcaggtgctgcaattcattgttggccatccccagcttgtgctgttgcagatatcagtagagtccttcgcccagggggaatttttgttgcttcgacattcgtggcagatgttattccaccagctattccagtattgaagatcgtacgcccgtacattagccaaataactggcaacaataccttcttatctgaagtggagcttgaagatctttgcaaagcatgtgggctggttgatttcaaatttgtcagaagtggattctatataatgttttctgccactaaagcatgctaactaagtagcagcaatcgtccagtcgtttatgtcaagactcctcggttttatactgcaaatggtttccttctgtgcattgtgcggttgtgccatttgctctaaaggttgccaactttcctcaagggggtgtggtgtaaatagtgaacacatatattttacttctacttgaccgacctcattatagcatgaaaatatcatattttttgtgtacagcttcatagatctttgcaattatgtaatttaaggcttgtttggaacagctctaccaacctaaaaactgaatctggatatagaatttagttagatccatggtgaagcagctccaatagttaatggagctgatgatggtgtttgttacagctccatctgacca

SEQ ID NO: 94745 - DNA, 1461 bp, Zea Mays
cacctgctccctccggcctgctctgctcactgctttgattccgcttcggcgcttcgccgcctccggttttctctccgcgcctccagtctccagggacgcaccacctctcccaagtcccaatctcccatggcggcgctgggcacggcgatcacccccgcagcagctaccacggcgccgtgctgctataatcggcatccgcggagccacatcacggcgcgccgtaaccgggttgcctccgcgaggaggcttgacctgtgcgccagctcctcacctgccgtcaccgctcccgacataccagacgaggcgctggtggaacccttggtggcgccggcgccggagacgaagctcaggaagctggcgtgtccaatctgctactaccccctggcgagctcgagcgatcagttggatgatgctaccagtctcgaatgtccaacgtgcaagaaatgctaccccaacaagcaagattactgggatcttacagtgtcagttggttcgacagagtactccgagtccatgccagtggcaacagagttgtttaggactccactggtatcttttctttacgaaagaggatggcgccaaaatttcatatggggtggtttcccaggcctagaaagagaggtcatgctgcttaactatgttgtattcatgaggatgttcagtttgaaatggcaaaaacttatttgaagccaacaattggagggactattgttgatgcaagttgtggaagtggcctgttctcaagattatttattaagagtgggctatattctcttgttgtggcactggatttctcagagaatatgttgaagcagtgcaaccaatacatcaagcaggagattagtattggtgagggctgacatatctagactcccttttgtgagtggttcaattgacgctctgcatgcaggtgctgcaattcattgttggccatccccagcttgtgctgttgcagatatcagtagagtccttcgcccagggggaatttttgttgcttcgacattcgtggcagatgttattccaccagctattccagtattgaagatcgtacgcccgtacattagccaaataactggcaacaataccttcttatctgaagtggagcttgaagatctttgcaaagcatgtgggctggttgatttcaaatttgtcagaagtggattctatataatgttttctgccactaaagcatgctaactaagtagcagcaatcgtccagtcgtttatgtcaagactcctcggttttatactgcaaatggtttccttctgtgcattgtgcggttgtgccatttgctctaaaggttgccaactttcctcaagggggtgtggtgtaaatagtgaacacatatattttacttctacttgaccgacctcattatagcatgaaaatatcatattttttgtgtacagcttcatagatctttgcaattatgtaatttaaggcttgtttggaacagctct

SEQ ID NO: 94746 - DNA, 1792 bp, Zea Mays
acaaattgtgtgtgccttggcgtgtcgtggaggccccgggcacgcacgccgcacagtggcatcagctctcagtgcgcgcacgtcaccacaaattgtgtgccttgtcgtggaggccccgggcacgtacgccgcacagggcacacctgctccctccggcctgctctgctcactgctttgattccgcttcggcgcttcgccgcctccggttttctctccgcgcctccagtctccagggacgcaccacctctcccaagtcccaatctcccatggcggcgctgggcacggcgatcacccccgcagcagctaccacggcgccgtgctgctataatcggcatccgcggagccacatcacggcgcgccgtaaccgggttgcctccgcgaggaggcttgacctgtgcgccagctcctcacctgccgtcaccgctcccgacataccagacgaggcgctggtggaacccttggtggcgccggcgccggagacgaagctcaggaagctggcgtgtccaatctgctactaccccctggcgagctcgagcgatcagttggatgatgctaccagtctcgaatgtccaacgtgcaagaaatgctaccccaacaagcaagattactgggatcttacagtgtcagttggttcgacagagtactccgagtccatgccagtggcaacagagttgtttaggtaaagaggactccactggtatcttttctttacgaaagaggatggcgccaaaatttcatatggggtggtttcccaggcctagaaagagagtttgaaatggcaaaaacttatttgaagccaacaattggagggactattgttgatgcaagttgtggaagtggcctgttctcaagattatttattaagagtgggctatattctcttgttgtggcactggatttctcagagaatatgttgaagcagtgcaaccaatacatcaagcaggaaaacatttcagatgagtatgcctttggtcattatgtttagttttgtaccttattcattaggtttagttttgtaccctacttgtcatgtttgacttattaagtctatgtagttagttgttccttcttgtttgtattcatgctttgtagctttgttgtcatgattattgttttattataaaaagttcaaatacaaattgtaatattacacttcttttgtttcaggagattagtattggtgagggctgacatatctagactcccttttgtgagtggttcaattgacgctctgcatgcaggtgctgcaattcattgttggccatccccagcttgtgctgttgcagatatcagtagagtccttcgcccagggggaatttttgttgcttcgacattcgtggcagatgttattccaccagctattccagtattgaagatcgtacgcccgtacattagccaaataactggcaacaataccttcttatctgaagtggagcttgaagatctttgcaaagcatgtgggctggttgatttcaaatttgtcagaagtggattctatataatgttttctgccactaaagcatgctaactaagtagcagcaatcgtccagtcgtttatgtcaagactcctcggttttatactgcaaatggtttccttctgtgcattgtgcggttgtgccatttgctctaaaggttgccaactttcctcaagggggtgtggtgtaaatagtgaacacatatattttacttctacttgaccgacctcattatagcatgaaaatatcatattttttgtgtacagcttcatagatctttgcaattatgtaatttaaggcttgtttggaacagctct

SEQ ID NO: 94747 - DNA, 734 bp, Zea Mays
gcagcagaatttctttattacaaagttacaagttacaacaaatttacattgtttaccggagtaattacaaaagtggttcaaagaaataaactttgaaatgttataaattatttataagtttgaaatatatgctagctcagtgacaatcctcaataagaagtatagaagaggtacttaggcttataagaaggtcgtgcccaccggcgcttaacaccatcaacatcatcacaaatctagtacctgcaacaacatgggttcgaaaaccctgagtacgaagtgtactttcgcaagtcttacccatttaaggaaaaagacgtttaaggaaaaagactctcaaggatatgctttcttttgggaatcaaggttaagcttatcaagattcaaagactcttttgcagaaaagcttactatgagtggatccttaaaaatccattttacttgttaggttaagtaaagttacttgcatctagagttctttctatcctagttcaagcacttggcctatactagccgtcttttatcatccctttagttcactggattgctacgtgtagggcagtgactaagtcttcatatccgagaagtaacggcgatccgaatcgattaatacccagttggggatctccaaccacacgacatatgtagcacttaacccttgcatatgtcaactcgccaccgggtttctcaagaccagattgggttcacgccaaccgagagcacagatacaccaccgt

SEQ ID NO: 94748 - DNA, 639 bp, Zea Mays
atcaatcatgcctatgactaaaatgaatgaacaatctttcttataatacatgccttttgtgtttatgagtaacaccaagatacaaatctgaactcagactgagatggctaatggtacagtggtacagatgacttactattaagtcagcatttccatgaatgtcacttatgcttgcatcaagatatctcccaaggaaagaccaaacatagttgacacagaatgagttcgacatggatgtaatacagtgcatccattgatgagacctcctgaacttcaggatattgagagttggtagcggtatattttcactactcaaactgaatcaccaatgtggattaacttgacactggcttcctagtgatccggtttgttgtctgcatcacttcttataagtatgctgccttattcgagagtcagttcaagttttctagttccatattgccttcctcaagacaagctaggaaacaacctattcaattcatacagtcgcatcctccaggcttgcttcatacatgcattaagcttaggaagaaggaaatgaagcaacctcaagaggacaaaggagctagccaatgcaagacatgtatcttgatgaagtaatcggtctggtgaccttgcccacgataacagagaatcatc

SEQ ID NO: 94749 - DNA, 736 bp, Zea Mays
cgccatggaggagaggcggaggccccgcgggagcgccagcggctggaggcgcccgtcgtcgcgcgcggccggtgctgcgctgcgccgaaaggtgcgggagctgcgccgtctcgtgcccggcggggaggaggcgcccgcgggggccctgcttgtccgcacggccgactacatcgtggggctgcgggctagggtggatcttctcagggcactcgcggccgtctacggagtcggcgtgggcgccgtcgtcgccgacgccgccgacgctgatgcgtgcgcttcatgagttgtttatcaaccactagtagtatagtatgccgtagatttgtgcgtgcatataaacacgcacttgaggattcatgcatgcggcttttagttaatttcaaaaatagcatgcaggcatgcagcccagctcgtcgtcccatgcacgtaccacactggtacgtgtgcgcccatcagtttaacttcatttggagaaatgtttgtgaaattcagaaattgcaggaaagatcgatgttgtctacaattttggattcgttgctatctctctcttcttctttttttctgaaggtatattcatcttattgttgtttaactagccgcaggtttggttctgtccattgatttattattcccgggatctcgatctcggtttgcacctcaagataagctctcttatggatgttccatacaccactctatgcagagaaacaaaatgtttctctttttatttaggaga

SEQ ID NO: 94750 - DNA, 158 bp, Zea Mays
tttttttctttttttttaatttctaaatttaattatcctaattcaaatctgattttaaattttgaaaccatatttatatgcacaaccaaaacaccaacatgagtgcaaatattttacacttatttactccttatttactttgctcaaataagtatttg

SEQ ID NO: 94751 - DNA, 2898 bp, Zea Mays
ccggcctcccccagcacctgcccgcaccgaaggccgaagccgctggattcgccaaagcaataaaaacctttggcggcctctccatcgcaacatttttctcatcctcctcctcccccccgcgccgcgcgaactccgcttccaggtttccggcgtcgcctggccgccttccttaccggcgcgcagctttggatccgtaccgtcgtccctccttccgtcggccgccttttattgcacagcacacccacgttgatgcgcgttcctcccactttcgtggctgccttgcttgcctggtgcctgctcgttcgcggctggcgtcgtccgctcctcacgatcggagctatcgagcggggcagaaggttcggttcggggtccttcttcaacaaggaaagggagcagcactaccaaatgtggcgcttgtttaatgacctgtgggatgtgctaggatccggattcctctcgtccagatttctctgatccagctgtatcgggaatacgggaccatctcgttggtggcagcgaagcagacatccaccaagaccaaggcaccaatccgcctcctgcgcgcgctccatcgctcttatcgttgacgacacgagcggctgccaattcctgggctcgccattggttggtggcctcgggatctgagagaggaagatggacgacgaggattactcgtgggtgcggcggacgcgcttctcccactccgtcgtccgctccaattccgggagggagcagttcggcgcattcgtcgagcagttcaaccgtggggccgcgctcaggcagaagggctccgcctcggggttcaagctccatggcctcaacatggagccagggacgaggttgtccacatcgtcccttccgacgacgagctcgttctgcgcccagcccaagcccaagcctaaggacatgtcatcttcagacgccaagccggggcagcacgccaaggcagtcagcgatcgcccgtcgtcgcaagaggcatcggcgaggaaggaggacgatgccaaggcttcaaacggaaagaaaggaattggcaaactcagcgtggccgtacctcgggtacccgcggttcagagcgcggaggttgagagcccgggagcactcgagttctccttccaccctgacgagcagagcctgaagctgcagagagcgtgctcaagccctgccccgttcccgcggaagaaaacgcccggcgatgatgccctcacgcgcagctcgtcgctaagtgtgctcggcgaggcgcccaagacgaagcagagggcgaggtctcccctcccgtctcgccacgttgctgaagtgtttcaagaggccaaatcagccaccaagaggttctccactccgccgccgccccggagatccgcgtcttctctagagctgaatggttgtcctccagcgccggtgacggtgagggcaccgggcaagctgaagaataggaaggagggccatgccaacgggaggatgaaggttgctgcaactgcactggaggtactcgagaaatggtccgtcgatcgctcccagctgctcattgggcacagattcgcgtccggggctcacagccggttgttccacggaatctacaaagagcagcctgttgctgtcaagttcatcagacagcctgatgatgaggaagatgcagagctggctgctcagcttgagaagcagttccacaccgaggtcgccactctgtcacgcctcaatcatcctaatgtcatcaagctggttggagcatgcagcagtccaccagtattctgtgtcatcactgaattcctttctggtggttctctgcgagcgtttttgcacaagttggatcacaaagctcttcctctaggcaagatcatctcaattagcttggacatcgcacgcggcatgtcatacattcactcgcagggagttgttcatcgtgatgtgaagccagagaacatcatattcgatgatgtattctgtgcaaagattgttgattttggaatagcttgtgaagaagagtactgtgaccctctggcaaacgacactgggacatttagatggatggctccagagatgatgaagcacaaagcgtacggtcgaaaagtcgacgtctacagctttggccttattttgtgggaaatgttttctggaacgataccatatgaagagctgaacccatttcaagcagctttcgctgtttttgacaagaatgtgaggccggccattcctactagctgcccaacaccagtacgtcttctaattgagcaatgttgggcctcgcatccggagaagaggcctgacttctctcaaatagttcagatactggagaagtttaagagtgttcttgacagagatggcacactcgacaatatgccaagctcgatctgtcaggagactcatgatcacaagaactggcttgctcattgggtccaaaggctcaagcatagccagcctgatctctctgggcctcctccgccaaaactgttgtaactattcaccattcagtaccttctcccttccaaaccctgctaatccgataggcaacagaatgcaatttcaggttattttctgtttatagacaaaaaaaaattagtagtagtagtagcacagttagtgtttgcttcgcttcaccacggtgttctctctttcaatcaatacacaagatgtgaatacaaaggttgctaagaatgcatcttcaagggcttgaaatggttgagatcgtcacataagaactcatctgacttttcatgtttatttaatatagcagccttgccatgtgttggctagtaacagagctttctacatgcttggtggcttggtgttgtttcatactgttcacttcttgtgctgcttaaaaatttcggaattctgtgcacttgtggacatgtaaatgtgcgacggaacaaatttgaatcaaatggagtcacttttctcatc

SEQ ID NO: 94752 - DNA, 3146 bp, Zea Mays
acaagccggtggaccaagtattcggtgacgaagctgaggcgaaggagaggaggaagggaagggccacgatcgaagagtgagcgcgtctcgtttgatctgggaattcatttcgtacagtgctaacgactttgatacagaggcataaacaatctagcctaagagaagaacactggaaccatggtttcaaaatcatactcaaatctgctagacctgacctctggagatggatttgactttcgacaaccttttaagtctcttcctcgtgtcgtaacttctcctggtattatatctgacactgattgggatacaataagtgatggtgattcagttggttcagcatcttctactgagaggaaaataatcgttgccaacttccttccgttgaattgtacaagagatgaaactggggtgctttccttctcattggatcatgatgcgcttctcatgcaacttaaagatagtttttcaaatgagactgatgttgtgtatgtgggcagtttgaaggttcaggtagatcctggtgagcaggaccaagttgcacagaagcttcttagagaatatcgatgcatacctacttttctcccatctgacctacagcagcagttctatcatggcttctgtaaacaacaattatggccactttttcattatatgcttccaatttgccttgacaagggtgagctatttgatcgcagcctgtttcaagcttatgtccgagccaacaaactttttgcagataaagttatggaagcaatcaatgcagatgatgacttcgtttgggttcatgattatcatctcatgttgctccctacattcttgaggaagaggttacaccgaataaagattggtttcttccttcacagtccttttccctcctcagaaatctataggactctgcctgtaagggatgaaatcctgaagtcactgcttaatgctgatctcattggtttccaaacatttgactatgcccgccacttcctatcttgctgtagcagattgctaggcctgcattatgagtcaaaacgtggttacattggaatagagtattttggccgaacagtgagcctgaagatcctttccgtgggtgtccatattggtcggcttgaatctgtcttaaaattgcctgctacagttagtaaggttcaagaaattgaacaaaggtataagggcaagatactgatgttaggtgtagatgacatggacatcttcaaagggataagtctgaaatttcttggactggagcttcttctggacagaaacccaaagcttagagagaaggttgtccttgtacaaatcatcaatccagcaagaagcacagggaaggacgtgcaagaagctattacagaagctgtctctgtggctgaaaggattaatacaaattatggttcttcaagttacaagcctgttgtcctaattgatcaccacataccattttatgaaaagattgcattctatgctgcgtctgattgctgtattgtaaatgctgtgagggatggcatgaacttagtaccatatgagtatactgtttgccgacagggaaatgaggagattgataaactcagaggtcttggcaaagacacccatcacacaagcacacttattgtttcggagtttgtgggttgctccccatctcttagtggtgctttcagggtaaatccttggagtgtcgatgatgtggcggatgccttgtgccgtgcaactgatttgactgaatccgagaaacggctgcggcatgaaaagcattatcgctatgtcagtactcatgatgttgcttactgggcacgcagctttgctcaagatctggaaagagcatgcaaagatcattatagcagaaggtgttgggcgattggattcggtctgaattttagagttattgctctttctcctggcttcagaaagctgtcgtcagagcactttgtttcttcttataacaaggcttctagaagagcaatatttcttgattacgatggcacacttgtgccccagtcatcaatcaacaaagctccaagtgaagaagtcatttccgttcttaacaccttatgtaatgatccaaagaacattgtgtttatagtaagtggacgaggacgtgattcccttgatgagtggttttctccgtgtgagaagcttggtctagcggcagaacatggctattttatcagatggagcaaggaagccgcatgggagtcaagctattcaaggccgcagcaagaatggaagcacattgccgaacctgtgatgcaggtatacacagagacaacagatggatcttcaatcgagtcaaaggaaagcgccctagtatggcactatttggacgcggaccatgatttcggttccttccaagcaaaggagctacaaggtcatcttgagagggtgctatcgaatgagcctgttgttgtgaagtgtggtcattatattgtagaggtgaaaccacagggagttagcaaggggcttgctgtcaacaagctgattcacacactggtcaagaacgggaaggcaccggatttcctgatgtgcgtcggcaacgacagatctgatgaggacatgtttgaaagcatcaacggtatgacctccaacgctgtcttatcacccacaatgccggagctgtttgcctgttcagtcggtcagaagcccagcaaagcaaaatattatgtggacgacaccagcgaagtaatcagattgctcaagaatgtaacccgcatcccctcgcagcggcaggatgtcagtgccagccatgggcgtgtgaccttcagaggcgtgctcgattacgtggactaggcaccaccacttagttactcgaaaaattattagctgggaagcatgtaaattccaccgtcttctgcctctcaatggttcattctaggagggtgtgttaatccagaattgtagtgtagcctacatgaatcgtcaccattacacaaacagcgtaaatgtgttcgccgtttcagggttcaggtgatgtgtgtaggcaattttggtagggaaggggggagctgctgctggaggttcgcggtgtgaaagggaggcctcttgttcaaacagtaattggttgtctgaatctgttctcctgctgctatattgatgatcgtgttagttctaaaatttatctgtgggtgaattgcagcacagcattagcgcttgactcgatt

SEQ ID NO: 94753 - DNA, 448 bp, Zea Mays
agagtcgactatggagtccgagaggggcaaaagttatgacacgattgttattagttacttgaagggctcatcgccagcatgcctcacttcaccggtggcgccgcggtacagcacgcggctccgcatctcttcgccctcgacgccgaacatctcggacaggcggccgtacagctcgtcgaacgagcctagcgccgacaggtcgaggttgcggccgaccgtgtcggactcgacgaacaccttgcattgcccgggctcgaacacctgctacttcaagtccacggatggccacgtcgggaactggtccttctcaactgcccgcctcaacctccacctcgccctcctcgctggtgcgtgctgcttctggcgccatctctcctccctcgctcgccggccaatggaaccgcccacccccaccattcgtgctcggtcatgaggaggaacatcggcc

SEQ ID NO: 94754 - DNA, 1651 bp, Zea Mays
aactttagccacaaatttcacccaaaaccaaaaaaataataatcccaaattaaagaaaaggagcagaagaaaaacaactttcatcgccgtccgccaccggagctcacttcgtcggccttccctcagtgtcaacccccttctcaaaacttgtatttgcacctcagtccctgccggtctgcccggtcgccgcctcgccggaggaagcccctcgtctccttgccctgcggcgggttcatggggttctcgctgtaccccatgaagacgtccacgcggatgctctggagcactagcttcttccgccataagctcagctcctcctcctgcttcctctgaggacgccccacccgcctcgatcgcttcggcggcgggccgctgctgctgcgctgtcctagcatccgttcaagtgtgtgtttgcgttcttaggtttcaagattggcttttgttgcgttcttggcgagacgaagggactagggcgcggacaaagaatcagcatgcatccgagcgcggtcagtttcgactccggcgacgggcggcggcgcggtggcgcgcagatgctgctcttcggcggcggaggcagcgccaacagcaacggcttcttccgaggtgttccgatggcggtcctggccatggacgacgcgacgcgcgtgggcaagcggcccttcttcacgacacacgaggagctcctggaggaggagtactacgacgagcaggcgccggagaagaagcgccgtctgacggcggagcaggtgcagctgctggagcggagcttcgaggaagagaacaagctggagcctgagcgcaagaccgagctggctcgccgcctggggatggcgccccgccaggtggccgtgtggttccagaaccgccgcgcgcgttggaagacaaagcagctcgagaccgactatgaccgcctcaaggctgcctacaacgcgctcgccgctgaccaccagggcctcctggccgacaacgatagcctccgggcacaggtgatctgcctaacagagaagctgcaaggcaaggagacatccctgtcggcaaccatcgctgcccaagaggtcgaccagccaaacgaacacaccacaggcactgagaaattgctggcgcagcagctcaaggacgacctgcacagcagctgcggttgcactggacatggtgccctgtcttcggaggaagaggatggtggcgtggtcagcgatgagggctgcaactttgatctccccgacgccatgtttgctgttggggtcaccaaccatggtgctgaggaggcgcagctggccaactggacatcttggttctggaactgatcggttgatggatggatgcatcaagtgcaaagagcaaatcctctcctggtttcgactcttttctgcaacatataattactgtgttgattatgtgccgtcagatgttttcaagtaatgaaacagaactgatgttgtaagtttatgtttctgaagatttgtatgttcatatatataataatatgctttgaacatgagactccaaaagttgaaataagtggatgtggagacctgttgtgcactagcagccagcatgcgtttttatgctgctttagacatgaaaatgtatatccaacacaggcctgtgaataagatgatgaaagtatatccaatcgctgcacttcatttgg

SEQ ID NO: 94755 - DNA, 990 bp, Zea Mays
atggacggtataaatatgaaaatcgatcaagctattgcaaatggggaatcagtttatggacgatttcctcaaaccgtccttgatcttgcctctgatggattaaaagaagttattagtggatgtacggagttgatagcattagaaaagccatgtgctaatgctttccggttgtatctcaagactcgttccatgccttcaaaagaatctatcaaaaggggttctaatcaatggctagatgtgatgaagaagaaacgagaagttcatgaggggattatcaatttagttcaccaaaagagttctgaggatccaaggccagaggttgaagaggtggatgacattccaaattgggagaaaaaagaagtttgtggcaagaaacggaagttacagaactttagagacgaggactactacataagttcagtacctcaaaaccatcatttggaagctgggttgtcagtgagggacaatgaaggatttgttgaaaatagattggatgcagctgttcttgatctagttgacgatgaagcttctggtatgcaagcacagagaagtcgatatcactggatgaagaacaaatttgtcaagttgaatgcaggggatcgtgtcaccgctacaggaaagatcaaaacggaaggtggtgcaaagataaaggcatcggctacagggatatataagacatggcagcagaagacacataaatcaatcaatattggtgggaaatctggcaactttgcagaagagcgcacacccagttcaggcgggtatcagagaggcaacaagaagcatttcgcggggccatggccacagatctataccaaatgccaacgtgccctccgaaataaggaaccccgagcaaatgcagaagagcaggcagcagaaggcaatggaaatcacgcggttgaagaacaaatcggcgaaagacgggaaattccagaagaacaggcggcccgatgggaacgggttcagcaaaggggctggtgggaaaggtaa

SEQ ID NO: 94756 - DNA, 107 bp, Zea Mays
gatcgcattaactaataaaatgtttaacttaaattccatattattatgcattaatacttattatgatttgattaatagcatatcattttctatttagtggtttgaga

SEQ ID NO: 94757 - DNA, 833 bp, Zea Mays
tggctccaactccattcgctgatgacgatgtcagagtgtttttggtttgaggaggagattgaagagttaattctctctctgtctcccaactcccaagctgagcccacgatactctctatctacgcctatggttgagcttgcagtataactgatagtgtgtgtgtgcgcctgtcctgtgtctccataaatacaaccgccaccggtagtccggtacagagagcgagtacagatctgcccacccgctgcgttcctataccgccttcctcttgcttcgcctcctcgtcctcgtcctccaacaccaccagctgagaagacccgatcgagaggtaattaacgtcgtccatggtgatgatgggtcagctggggcgtctggtggacggcatcaagtccaggctgcgcgccggcgccggcaccggaggcaacaagaggggcggggcgaggaaggcggcggcgacgacgacgaccacggggtacgacaaggtggagaagacggagagcatgcgtgtggagatccgcagccgccaggcgcgcaagctcatcgccaagaacctcgacgccgccggctccgtcggacgcaccggccggaccaacaagcgcttcttcctcgccttctgatgcatcatcgatcgagcgtggttcgtcgtctatatatgtgtgttattatttatacgtaaggtgctagtgacggtcacggatacatgtatatcagtatatatgtaaaaagaaacatgtatctgtcgaatcaatcaaacacatcggtctcccgacccgttcattattatgtttgagaaatacatatatgcgtgccatttttattgtcctacattatataa

SEQ ID NO: 94758 - DNA, 288 bp, Zea Mays
atggcattatctatacttgattatggtgctgctgctgctggtggagcattagtacttgatgatggtgtgccactagcagtagcatcgctggcacttgataggcctgcactcggcgtcgacgtcgatgtaggtgtacctgcagcatcgccaacacgattggtagttgaccggtttgaggtcaccctccccctcctcgttgcagaaccatgtgaagacaaaggtggacgattagcttgcatcccggtgccggatccacttgtaggcgccatggatgtacttgagatttga

SEQ ID NO: 94759 - DNA, 356 bp, Zea Mays
cggaccgtccggcctcagggccggaccgtccgccggctcttttatggttcaaacaggcgggttcgagtcgatggggctctgcaaggaggtgtaccacggggtgcgccacaaggggtaccgcgtgcccacgccgatccagcgcaagaccatgcctctcatcctcgcaggcgtcgacgtcgctgccatggcccgcacgggctccgggaagaccgccgcattcctagtgcccatgctgcagcgcctccgccgcctcgaccccagcgccggcgtccacgctctcatcctctcccctacccgcgacctcgcgtctcgcgatgcagacgctcaagttctctaaccagctcggcaagttcaca

SEQ ID NO: 94760 - DNA, 3548 bp, Zea Mays
accggtcttcatgcccgagatcgaaatcgaacccaaacggccaaaccaaccatcgtctactcggcggctgggctagcaccctccctaccaccatggcggccgtcgtgcctccgcccgacaacctggacccgcagccggctactcccccagccgccgctccttccgccacgctcaccccgcctcccgccgccacctccaccccaccaacccccttgacgccgggccccgcggcgcctagcccaaaccctaacctaccccctgcccctgcccctgcccctgcccccgcccccgcttccacgcctccggcggcagtcgcgccaccgatgcccccagctccgatctccttcgctgctaccttccgtccactcggtgccccagcgccaccgccgccgtaccaggtcccgcagtacgtcgcggtgccggcgaacccgggctacccgatgcagccgccgggcgtccccgtcgttatgcctccgggcgccgtgcggctgccggccatgtacgggccgccccagccgggagtatacatgccgcagcagggcgctgcgatcccccatcccgcggtggtcgtgccagccattactccccacaacaagaggtgccggctcatgtttgattctgcagctctagatcgtttgctccctcactgagtgtgatgcttcagctctgggttgttccaaaaacttgctaaggtatcatgattttctgccgtttaaatttcatatgccggctatatctttttttttctggtttcatataaacttctttgttgataagaagtgtagagtagtgacatatttgcctgagctcttattacctgagtagtgcattgcaatggtgtgagctataccaagtttctcaaataaccaatgcaagtgtgttatcctgtccatgaggttgagaggtaaggccagctttgcttagctcccttttcatttgagcaagatattgcttctgtcaatgttcactctggtatttgtttatggcttttggtatcttctgcttacacatggccacattctctgattctatatgtgttatgaggtttcatttgttcactatatgatttacttgtaggtatacttactgatgtggttgcataggtgtcatttgtctctctctgcaggaatgtctcgttatcctgcaccgtatcctatgattcgtcctggttttgttccacgtccaatgccgccgcctggtgttgtgccaattcaacgaccaacaataatttctgggatccgggctattcctcctttggtagccccaactgcccggccacctgctccagctgttaagctggcagataaaccgccaaccgcagtttatgttgggaagatcgccccaacagtggacagtgatttccttctttcacttcttcggctttgtggatctgtcaagagttggaagcgtgcccaagatcctagtaatggaaaacctaaaggttttgggttttgtgaatttgaatctgctgaaggcatccttcgtgcgacacggcttctcaacaaattgagcattgatggtcaggaactggtgattaatataaatgatgccaccaaggaatacctgaagaaacatgttgagggaaagaagagagcacaagagaaggaaaaagaaacagaagatgcaagcggggatggaactacagctgttgctgaaaatgaatcatcaaaacctgtccctgatgaattggatgagacaggagatgctggagataagtacagggaagacaacactgataaatttgggattgttactgacgaagactctcaaactgacaaagatgtcgcagaaaaaataagcaatatgattgaggagtggttaaagactagaccgccacccccaccttcaccagttcaaccatctgctgatagctctggcgtagataaggcaaaaaatgattctgatgataagaatgctgctgatgctgataaaagggcagctaatgaaactgagagatctgaaactgcctctcctgataagaggaaggatagagagcatgataaggacaaacgggacaaagatcttgaaaggcatgaccgtgaacgtgaaagagtacggagggatagagagaaggatcataagcatagagaagctgataggctctacagggatcgccttaaggagtgggaatctagggaaagagagagagaatatcagaggtatagtgaaaaggagaaagaaagagatagagatcataaccgcagaagggagatcctgaagcaggaagatgagagcgatgacgaggataataggaaaaggaaacgaaggagtattagctcacttgaagataggaagaggaggaggcaacgtgaaaaggaggaagatttggcagataaaataagggaggaggaggaaattgcagaagcaaggaggctggctgtagagttgcaacggcaagcagatgaagcagctgcggcggcggctgcagccgccgaagagtctgcatcacttatggagattgatggtgatgacgaaaaggaaacagatgcacaaaacaagtcggctgttgtggaagctgataacatctcgagctttgctaatggtgttggtgctggtcgacttagtaagggaaataatggtgaggaaacatgtatgacacctggtcaaaccgcagatactaagcaaaacaacaatgttccagcaaagaaactgggttttggtttgattggcttgggcaaaaggacatctgttccatcagtttttgctgtagaggatgacgaaaataatgttgataaaagcataagacctctagtacctatcgattactccactgaagaattacaagctgtacatgctaattcttctactggggcaaatgtcacagcagctgccgagtttgccaagcgcatctcagtttctaattcaaaggaagagaaggctgaagctgagaaggataggaataggagatccagtgaagctcgtcctaatgatgagcgaagagagaagctacatgatcgcgagaaggataagcccaagtcagagaacaagaagattctggatgcaaagcaactaattgatatgatcccaaggacaaaggaagagctttttgcctatgatataaactgggcgatatatgacaagcatgagttgcaagagagaatgaggccttggatttcaaaaaagataattgaatttcttggcgaggaggaatcaactttggtggactatattgtttcctgcaccaaagaccatgttcaggctgaaaagatgctagatcttctacagtcgattttcgatgttgaggccgagatgtttgtcctcaagatgtggaggatgcttatatttgagatcaagaaagtcgaatctggactatcaggaagagcaaagtcatgaagcgaagcctgttaccctgtatgacctctgatctgcattactcatcaactgtgaccacacttgtaaggtcatactgcactacaagtatcaaaaaccatttttagtgacagagttgatggatctttttacttgtttcttgtacaaatgcatacgagagttaatgagatactgtgcgtaatatttttattttgatagattgcataactgtgtttggc

SEQ ID NO: 94761 - DNA, 306 bp, Zea Mays
attaaatttgttttgaatttcgggccctgatgtgaatttcgggccaaaaactgcatttcgggccaaaaattgaatttcgggccctaatgtgaatttcgggcttttataattttgggccgcccgaaatgagcccggcacgtttaagcaattacgggccgggccgtgggccgagggctaggcccatgggccggcccggcacgatccgaaattcaaacgggccgggccgtcccgaaattcaaacaatacgggccttttcgggcttgggccgggccgggccgggcggcccgaatgtacacctatactcac

SEQ ID NO: 94762 - DNA, 1189 bp, Zea Mays
gtagttcgtgttcatgtccgatctgaaatggcttcagcgacttcgcgtgcttgattgaaacgcacccagtccccgctcctgtttcgatctcccgaatcccgatcccgctaccggaggcggaggcgatggcggcggcgccggcggtaaggttcccggtcttcgggctcgtgcggctgctgggcttggccgccgcggcggcgatcctcttctgggccgtccacttccgaggcggcatggcgctctccaccgaagaggagagcaagctccccctcttcaacgttcacccagtgttaatgctgattggtttggtggccttgaatggcgaagctcttttggcttataaaactgtgccaggaaccaagaaactgaaaaagctagtgcaccttgccgtgcagttccttgccatgtttctgagtctaattggtctgtgggctgtatggaagttccatgatgaaagaaaaatcgatcatttatatacacttcactcgtggttgggccttacttgcttcatcttcttcagcttgcagtgggctgctgggttttggaccttttggtaccccggtggatcaagaagtggccgtgcatttttgcttccctggcatgtcttctttggtatattcatctatgttcttgctatcgccacaagtgtgactggactcctggagaagtcaatctttatgcagagcgccaaaatgattgagcgcttctccacagaagccatgtttatgaactccctgggaatgctgctggtgttgttgagcagccttgttattcttgcactcgttagtcctggacccagcatgatcgacacatacagaggctcttctgagtgagaggaaatgattacagcctagtttcttaagctacatttttaatcagtagctgagcaatttttgtgtacatgtacccagaattatgcttttcttcttttgacatggagttagtcagtgttgaggataatttcatccctgttagagtggcttcattcaagtcgcagtaataaaattgtggatgaggctgacaatgaaattacagctgagaatatgactgaagtaacaattcctggttaatcagaagttaaccaattcccaatatgtgatcaacctcttttcagaagtaacaatacgcatttacatgagattgatcaaactcaatcacagagcaaatcttcaccgagaattttttattt

SEQ ID NO: 94763 - DNA, 989 bp, Zea Mays
gtagttcgtgttcatgtccgatctgaaatggcttcagcgacttcgcgtgcttgattgaaacgcacccagtccccgctcctgtttcgatctcccgaatcccgatcccgctaccggaggcggaggcgatggcggcggcgccggcggtaaggttcccggtcttcgggctcgtgcggctgctgggcttggccgccgcggcggcgatcctcttctgggccgtccacttccgaggcggcatggcgctctccaccgaagaggagagcaagctccccctcttcaacgttcacccagtgttaatgctgattggtttggtggccttgaatggcgaagtgggctgctgggttttggaccttttggtaccccggtggatcaagaagtggccgtgcatttttgcttccctggcatgtcttctttggtatattcatctatgttcttgctatcgccacaagtgtgactggactcctggagaagtcaatctttatgcagagcgccaaaatgattgagcgcttctccacagaagccatgtttatgaactccctgggaatgctgctggtgttgttgagcagccttgttattcttgcactcgttagtcctggacccagcatgatcgacacatacagaggctcttctgagtgagaggaaatgattacagcctagtttcttaagctacatttttaatcagtagctgagcaatttttgtgtacatgtacccagaattatgcttttcttcttttgacatggagttagtcagtgttgaggataatttcatccctgttagagtggcttcattcaagtcgcagtaataaaattgtggatgaggctgacaatgaaattacagctgagaatatgactgaagtaacaattcctggttaatcagaagttaaccaattcccaatatgtgatcaacctcttttcagaagtaacaatacgcatttacatgagattgatcaaactcaatcacagagcaaatcttcaccgagaattttttattt

SEQ ID NO: 94764 - DNA, 2068 bp, Zea Mays
cagacagaggtcaactggaatccgcgtcctgttgaggaaaacgtttttatggtagttcgtgttcatgtccgatctgaaatggcttcagcgacttcgcgtgcttgattgaaacgcacccagtccccgctcctgtttcgatctcccgaatcccgatcccgctaccggaggcggaggcgatggcggcggcgccggcggtaaggttcccggtcttcgggctcgtgcggctgctgggcttggccgccgcggcggcgatcctcttctgggccgtccacttccgaggcggcatggcgctctccaccgaagaggagagcaagctccccctcttcaacgttcacccagtgttaatgctgattggtttggtggccttgaatggcgaaggtcaggacatgactactcctgtgctgtgaacaatattgttgcatattgaaatttcagaataccatttcatgatactatctcattcactgcaatacgagcacagttttgtttcagaaacccagaaacatttatccaactaattaatttccccatgggacaaagagtctagcattatcacatcttgcataaataatttcttgttttgttggtacttgtgattgttgattgaaccaaacttgctaatatgaaaagttagatactttgtatgtttttcttgctcaaatcaacaggaaattatgtagtatcatcaagtaaatatacagaaagcttgaaaagcgaaactgaaaatacctactttaccccagcacctacagcctgacctgggattactaatcaaatcaggttccatgtaatttccttcaaatccaattatttggatggcatattttaatgtttttcggtagccccattttttcttattaaaacggtggctgctgatgcctagcatttacgaaagactattttggtgctaatttcaatgaccttgattattagaattgatttaaatcatttgaatttatgtagtagatgtaaactaagttcctttgctacagttttgtgtgtgtgtgtggtcatgatctttaatggattggttattttttgcatgcagctcttttggcttataaaactgtgccaggaaccaagaaactgaaaaagctagtgcaccttgccgtgcagttccttgccatgtttctgagtctaattggtctgtgggctgtatggaagttccatgatgaaagaaaaatcgatcatttatatacacttcactcgtggttgggccttacttgcttcatcttcttcagcttgcaggtagactaatagagtgtttggtttgaggaatcaaaccattcaaattgaagtggtgcatcatggattcattcctcaaatttggtggaatgactccattcctcatattagtactaactaaataactataaggaatgaattggtgatggatcaactcattctattccacaaaccaaacaaaaatagtgaggagtgagaagataatagactagttcattcctcaaaccaaacaccccatgagatatgaattcttctgttcagttcttctcatgtgtttttcacattttctcctcttttgtccttgtgttcgaatctctgcagtgggctgctgggttttggaccttttggtaccccggtggatcaagaagtggccgtgcatttttgcttccctggcatgtcttctttggtatattcatctatgttcttgctatcgccacaagtgtgactggactcctggagaagtcaatctttatgcagagcgccaaaatgattgagcgcttctccacagaagccatgtttatgaactccctgggaatgctgctggtgttgttgagcagccttgttattcttgcactcgttagtcctggacccagcatgatcgacacatacagaggctcttctgagtgagaggaaatgattacagcctagtttcttaagctacatttttaatcagtagctgagcaatttttgtgtacatgtacccagaattatgcttttcttcttttgacatggagttagtcagtgttgaggataatttcatccctgttagagtggcttcattcaagtcgcagtaataaaattgtggatgaggctgacaatgaaa

SEQ ID NO: 94765 - DNA, 701 bp, Zea Mays
cagacagaggtcaactggaatccgcgtcctgttgaggaaaacgtttttatggtagttcgtgttcatgtccgatctgaaatggcttcagcgacttcgcgtgcttgattgaaacgcacccagtccccgctcctgtttcgatctcccgaatcccgatcccgctaccggaggcggaggcgatggcggcggcgccggcggtaaggttcccggtcttcgggctcgtgcggctgctgggcttggccgccgcggcggcgatcctcttctgggccgtccacttccgaggcggcatggcgctctccaccgaagaggagagcaagctccccctcttcaacgttcacccagtgttaatgctgattggtttggtggccttgaatggcgaagctcttttggcttataaaactgtgccaggaaccaagaaactgaaaaagctagtgcaccttgccgtgcagttccttgccatgtttctgagtctaattggtctgtgggctgtatggaagttccatgatgaaagaaaaatcgatcatttatatacacttcactcgtggttgggccttacttgcttcatcttcttcagcttgcaggtagactaatagagtgtttggtttgaggaatcaaaccattcaaattgaagtggtgcatcatggattcattcctcaaatttggtggaatgactccattcctcatattagtactaactaaataac

SEQ ID NO: 94766 - DNA, 1384 bp, Zea Mays
gccggttctctctcctcccatccagtcttacccctgctatttgtacccgccttaccgcgccccctaaccctaggccctcaattccactctgcccgagcaagccgaattgtcgtccgaattcgctcgcggggagcacttgctacctcgcgcccgccttctgtcgcgcggattcgttgctgcgcctggagatggacccgatggacatcgtcggcaagtccaaggaggacgtctccctccccaaatcaacaatgtttaagataattaaggagatgcttcctcctgatgtacgagtggcaagagatgcacaggatcttcttgttgaatgctgtgtagagttcatcaatctcctttcgtctgaatcgaatgaagtgtgcagcagagaagagaaaaaaacgattgctcctgagcatgttatcaaggctctaagtgatcttggcttcagagagtacattgaggaggtttatgctgcatatgaacagcacaaacttgatactttggattctccaaaagctggcaaattcactgggattgagatgacagaggaagaagctgttgctgagcaacaaaggatgtttgctgaggctcgagcaaggatgaataatggagcccccaaaccaaaggagacagaacaagagccgccacagcaaccacaagcacaaccccaacttcagctgcatactgaaccacagcaacccgtgcaatctcaagtgcagttgcattcgccaacacagcattccctccaacctcaagtgcagctgcacccccagccacaacagctcccacaagtgcaggtgcactctcagacgcagctgcaccctcagccacagcagccccaagtgcaggtccatccgcagctgcagcaactcccacaattacaggcccactcgcagccaccgcaaccccaagtgcaaatccacccacagccgcagcagcccccacaagtgcagttgcagtcatcagtccagcagacctcccaaccccaacctcaggtacatctctacaatcacagggggggctcacaagcgcagctgcagccccaactgccaggtcagctgcagacacaggggcaaaccggacctggcattgacagttagagactactgctggcatatactaggaacctgtatgcttgcttgtgactcgttagatcctgatttaggtttctgtgcttcctgtacaatgtaaatccagtgtgattgcagttgccttgttgctaataatgtgaaaccgttagttactgatgatgtccttactgtgtcgaatactgaatgtcatggcgtggcttatgtgccatgctgaatgatgttctgtggtcattgtaatagcctaacttgacatctgtccatgatgatagtgattgatttgaatgagctcttggtgcata

SEQ ID NO: 94767 - DNA, 1464 bp, Zea Mays
gccggttctctctcctcccatccagtcttacccctgctatttgtacccgccttaccgcgccccctaaccctaggccctcaattccactctgcccgagcaagccgaattgtcgtccgaattcgctcgcggggagcacttgctacctcgcgcccgccttctgtcgcgcggattcgttgctgcgcctggagatggacccgatggacatcgtcggcaagtccaaggaggacgtctccctccccaaatgatggttgtcctgggcttgtggcgaagtcttgaatttcgtggattgtggatggctaaatctggcggccttgttgataatcagggcaacaatgtttaagataattaaggagatgcttcctcctgatgtacgagtggcaagagatgcacaggatcttcttgttgaatgctgtgtagagttcatcaatctcctttcgtctgaatcgaatgaagtgtgcagcagagaagagaaaaaaacgattgctcctgagcatgttatcaaggctctaagtgatcttggcttcagagagtacattgaggaggtttatgctgcatatgaacagcacaaacttgatactttggattctccaaaagctggcaaattcactgggattgagatgacagaggaagaagctgttgctgagcaacaaaggatgtttgctgaggctcgagcaaggatgaataatggagcccccaaaccaaaggagacagaacaagagccgccacagcaaccacaagcacaaccccaacttcagctgcatactgaaccacagcaacccgtgcaatctcaagtgcagttgcattcgccaacacagcattccctccaacctcaagtgcagctgcacccccagccacaacagctcccacaagtgcaggtgcactctcagacgcagctgcaccctcagccacagcagccccaagtgcaggtccatccgcagctgcagcaactcccacaattacaggcccactcgcagccaccgcaaccccaagtgcaaatccacccacagccgcagcagcccccacaagtgcagttgcagtcatcagtccagcagacctcccaaccccaacctcaggtacatctctacaatcacagggggggctcacaagcgcagctgcagccccaactgccaggtcagctgcagacacaggggcaaaccggacctggcattgacagttagagactactgctggcatatactaggaacctgtatgcttgcttgtgactcgttagatcctgatttaggtttctgtgcttcctgtacaatgtaaatccagtgtgattgcagttgccttgttgctaataatgtgaaaccgttagttactgatgatgtccttactgtgtcgaatactgaatgtcatggcgtggcttatgtgccatgctgaatgatgttctgtggtcattgtaatagcctaacttgacatctgtccatgatgatagtgattgatttgaatgagctcttggtg

SEQ ID NO: 94768 - DNA, 1443 bp, Zea Mays
gccggttctctctcctcccatccagtcttacccctgctatttgtacccgccttaccgcgccccctaaccctaggccctcaattccactctgcccgagcaagccgaattgtcgtccgaattcgctcgcggggagcacttgctacctcgcgcccgccttctgtcgcgcggattcgttgctgcgcctggagatggacccgatggacatcgtcggcaagtccaaggaggacgtctccctccccaaattaatcttgtgagatgatacgctaggaagcttgaattttgaagtgatgctatgaggaaagttagcaacaatgtttaagataattaaggagatgcttcctcctgatgtacgagtggcaagagatgcacaggatcttcttgttgaatgctgtgtagagttcatcaatctcctttcgtctgaatcgaatgaagtgtgcagcagagaagagaaaaaaacgattgctcctgagcatgttatcaaggctctaagtgatcttggcttcagagagtacattgaggaggtttatgctgcatatgaacagcacaaacttgatactttggattctccaaaagctggcaaattcactgggattgagatgacagaggaagaagctgttgctgagcaacaaaggatgtttgctgaggctcgagcaaggatgaataatggagcccccaaaccaaaggagacagaacaagagccgccacagcaaccacaagcacaaccccaacttcagctgcatactgaaccacagcaacccgtgcaatctcaagtgcagttgcattcgccaacacagcattccctccaacctcaagtgcagctgcacccccagccacaacagctcccacaagtgcaggtgcactctcagacgcagctgcaccctcagccacagcagccccaagtgcaggtccatccgcagctgcagcaactcccacaattacaggcccactcgcagccaccgcaaccccaagtgcaaatccacccacagccgcagcagcccccacaagtgcagttgcagtcatcagtccagcagacctcccaaccccaacctcaggtacatctctacaatcacagggggggctcacaagcgcagctgcagccccaactgccaggtcagctgcagacacaggggcaaaccggacctggcattgacagttagagactactgctggcatatactaggaacctgtatgcttgcttgtgactcgttagatcctgatttaggtttctgtgcttcctgtacaatgtaaatccagtgtgattgcagttgccttgttgctaataatgtgaaaccgttagttactgatgatgtccttactgtgtcgaatactgaatgtcatggcgtggcttatgtgccatgctgaatgatgttctgtggtcattgtaatagcctaacttgacatctgtccatgatgatagtgattgatttgaatgagctcttggtg

SEQ ID NO: 94769 - DNA, 1431 bp, Zea Mays
gccggttctctctcctcccatccagtcttacccctgctatttgtacccgccttaccgcgccccctaaccctaggccctcaattccactctgcccgagcaagccgaattgtcgtccgaattcgctcgcggggagcacttgctacctcgcgcccgccttctgtcgcgcggattcgttgctgcgcctggagatggacccgatggacatcgtcggcaagtccaaggaggacgtctccctccccaaatagttgtttaaaatcttctactgctgattgaactttctgctttgcactttagcaacaatgtttaagataattaaggagatgcttcctcctgatgtacgagtggcaagagatgcacaggatcttcttgttgaatgctgtgtagagttcatcaatctcctttcgtctgaatcgaatgaagtgtgcagcagagaagagaaaaaaacgattgctcctgagcatgttatcaaggctctaagtgatcttggcttcagagagtacattgaggaggtttatgctgcatatgaacagcacaaacttgatactttggattctccaaaagctggcaaattcactgggattgagatgacagaggaagaagctgttgctgagcaacaaaggatgtttgctgaggctcgagcaaggatgaataatggagcccccaaaccaaaggagacagaacaagagccgccacagcaaccacaagcacaaccccaacttcagctgcatactgaaccacagcaacccgtgcaatctcaagtgcagttgcattcgccaacacagcattccctccaacctcaagtgcagctgcacccccagccacaacagctcccacaagtgcaggtgcactctcagacgcagctgcaccctcagccacagcagccccaagtgcaggtccatccgcagctgcagcaactcccacaattacaggcccactcgcagccaccgcaaccccaagtgcaaatccacccacagccgcagcagcccccacaagtgcagttgcagtcatcagtccagcagacctcccaaccccaacctcaggtacatctctacaatcacagggggggctcacaagcgcagctgcagccccaactgccaggtcagctgcagacacaggggcaaaccggacctggcattgacagttagagactactgctggcatatactaggaacctgtatgcttgcttgtgactcgttagatcctgatttaggtttctgtgcttcctgtacaatgtaaatccagtgtgattgcagttgccttgttgctaataatgtgaaaccgttagttactgatgatgtccttactgtgtcgaatactgaatgtcatggcgtggcttatgtgccatgctgaatgatgttctgtggtcattgtaatagcctaacttgacatctgtccatgatgatagtgattgatttgaatgagctcttggtg

SEQ ID NO: 94770 - DNA, 109 bp, Zea Mays
cttaaaacagctcgcagaataataaggcatttgaacggcagaccaaacaacttggaggcaccgaccaaccaaattctattcactccagccactaacagctcttcttacg

SEQ ID NO: 94771 - DNA, 1568 bp, Zea Mays
aactcgttctcgtcctccaccaccggcgcctcgtctcttcccgtctccccagtccccactctcgtccccgctccctccaaagtccaaaccctaccaccccacttccccaccaccactacatggcggcggcgctcgcctcctcccgctactgctggagccgcccgtcgctgccgccccaaccgacccgcggccgccgctccgtcactagctgcgcgctctccggacgagagaaaagaaactcctttagctggagagagtgtgcaatttctgttgcattgtcagttggactaatcactggtgcaccaacgtttggaccaccggcctatgcttcttctcttgaacctgttcttccagatgtgtctgttcttatctctggacctcccattaaagatccaggtgctttattgagatatgctttaccaatagataataaagctattcgtgaagttcaaaagccgctggaggatatcactgacagcctcaaggttgctggtgttagagccttggattcagttgaaagaaatgtcagacaagcatcgaaagcactgaacaatgggagaagcttaattcttgctggccttgctgaaccaaaaagagcaaatggagaagagttgttgaataagttggctgttggatttgaggagcttcaaagaattgtggaagacagaaatagggatgcagtagctccaaagcagaaagagcttctccagtatgttggaactgtagaagaagacatggtcgatggctttccctttgaaataccagaagagtacagcaacatgcctcttctcaaaggaagagctactgtggatatgaaggttaagattaaggacaatcccaacatggaagactgtgtatttaggatagttctggatggatataatgctcctgtgactgctgggaacttcgtagatcttgtcaaacggaaattctatgatggcatggaaatccaaagagctgatggctttgttgttcaaactggagatccagaggggccagctgagggctttatcgatcccagcaccggcaaaatccgtacggtacctcttgaaattatggttgatggtgataaggcgcctgtatatggtgaaacacttgaagaacttggtcgctacaaggctcaaacaaaactccctttcaacgcttttggaacaatggctatggcaagagaagaatttgatgacaattctgcttctagccaagtattttggctcttgaaagagagtgagctaacaccaagcaatgccaatatattggacgggcggtacgcagtatttggatatgtaactgagaatgaggactacctggctgacgtcaaagttggagatgtcatcgaatcaatccaagtcgtctcaggcttggacaaccttgtcaacccaagctacaagattgtaggataacgtgttttgtatcagagtttcttgtctgtgggtctctgtcctcaagtcgatgtaaagtgctatatagtatcttactcccatatccttctcgctcgttaacgagggtttgtgtcacgcggaattcgatagtaattgaaagtacagagtcattgattggttgtcccatac

SEQ ID NO: 94772 - DNA, 2246 bp, Zea Mays
acaatcaataacttgagggggttaacttgcacgtgacattggctctagggcgaggatgtagagttagttggagattttacaagtaactggaaagacaaaataaggtgcagccacaagggtggctcaagatatgaggctgaagttcgacttcgacatggaaagtactattacaaatttatagttgggggccaatggaggcattcgacttcgttgcctacagaaacagatgaacatgggaatgtcaacaatgtgatcagagttggcgacattgctcggattcgtcctgctccaagccagctacatataaaagacccatctgttgttaaggtcatagaaagggcgctaactgaggacgagcggtttttattggcgtttgcagcacgccgcatggcatttgcaatctgcccaatcagactgtccccaaagcagtagacgtgtcggtcgtccttctccgagcggaaccaggcgtcatcgaggatcagcgattttcgaagctacagaaaactcatgtatgtaacaacagaggggcttcttactgtatgtacccgttcacacaaaacctggaacgtggctaagtgtctcagcaatgggcacaatgtacacctctttgtaattccatggactgtatacctgaaatgaactccattttagactgacactcttgatataatcggaggccggctcgcaaatggccagtgaacaggctctgcaatctacagctctcatgggatgggagagatgactactttgccggttgccctcccggtctcaaggtaggagaacgcctccacaacctgcgagaaggagaagggcccctccgggtcgatgagtggcttcagcttccctgactcgaggtacgggttgagcttctccaagacggagccgttggaggtgacgacgaaccggaaccctggagggctgacggcgccggtgagaaccaccacgctgccgccttccttcactaccttgacagctttgtcaccctgacctgaatggatcgatggtgcaaagggcagatcatgtcagccgaggcctgagggtgggtgacggatttttgtttttgtgtgtgctgggcatgtgtttgatgatggtgatcttaccgactccgtcgaagacaatgtcgtatttgtccggtagctcttccaagttctccttagtgtagtcgatggcgacatcggcacctaggctcttgagcagctcgatcttcttggtgctggccgtcgcagctaccttggacgcgccgtagacatgcttcgctagcttcattccacatcaagagcagaggcagcagcattgcaaggttgagttcagtcttcggtacgtacgtacccacaccaacatgcaaacagtacctggatcgcaagggagccgacaccgccggcgccaccgaggatgaggacggacttgccggcggatattcctgccctctccaggccctcgttggcggtctcgacggctagcggcaggctggcggcctgcgcgaagtcgaggcccttgggcttgagcgccagcagcttctcctcgacggcggtgtattccgccagcgagccggactgcttgggcccctgcagcggattctcgctgaccatgccgtacacctcgtcgccttccttcaacttcttcacctggctgcccaccttgacgacgacgccggacaagtcgtaccccggcacgaccgggagaggggagtcggtggcctggaacttgccggcccgccgcttggcatcgacggggttgagcgccgcggcgacgaccttgacgagcacctggtcctcgcccacggccggcacagccgcggcctcgtcgagcttgagcacgccggcgtccccgtacgcgtcgtacacccaggccttcatcaccccgggcacctccgtcgccaccgcggccgtggccggggacgaggacgcggacaccgcgacgacgcaccgtcccgaccgaccagcttccgaagctgttcttctaccggcggcgaccctcggcgctgacgacgggacgacgagcttcacgggagcctgaggcggccgcggcaagaagtatgatctcgagtacgaagtggccgggatcgacgaagagaggaacgcgtgcattttttttttctctctctcgatggctcgtctctgatcaactcagttcagagcctgtgcttatgagcaaacggagcaggatgaacgttgcaggtgttctctgctgctctgcttcactggctgttgttatccgtttgcggccgtcaggagtggcgggtagcg

SEQ ID NO: 94773 - DNA, 3739 bp, Zea Mays
gttccacacacttcccatccccggacgcccactccagtactccactacgcctctgatcccgtgccgagtgccgccatttcccgtgccccccaccgccgccccgccgccgacgcgatccccatcacgcgccgcccatggcgccccacctactcaccccaccagccctcaccgttacgggcgccgccgccccaggtcgcctcggcagcgccggatcggcggacccgcggacgcccaggccacgcgcgccgtggcccactttctgctcctcccccagcagagggcggcgggagctgaggaagaggaagggcttgagcgtcgcggcggcggcggaagtagcggagccgggtgggcccgctggggcgatgcggctcaacgagtacatggtcgctgtggaccggcccctcggcgtccgcttcgcgcttggtgtcgacggacgcgtcttcgtccattcccttagaaaagggggaaacgccgagaagtccaggatcatcatggtcggcgacacgcttaagaaggcaggcgccgacggcgaaggcctcgtcaccatcaaagacctaggtgacacggagactgcgctgagggacaagtcaggaccatgcagccttgtccttgagagaccatttgctccttttccaatccatcagttgcatcaaaatgaagattaccacattctatttaacagaggacgagctgctgtggcctcttggaacagtgctgtttggtctacaaagatgaacgaatcttctactggggatggaaaattaggttttgctgtattctccccaaggttgctaagttctcaaggatgggctcttctgtccaatgagaaaggtggactcaatcagagtagcactaaccttgccaatcgcgtaagtgagattgttggtttatattctgatgaagacgatgacaatgctgagtgggcacatggtagctttcctttggaagagtacattaaagcactagaccgtgctaaaggtgaactgtactataatcattcactgggtatgcagtacagcaagataacagaacaaatatttgttgggtcatgtatacaaacagagaaagatgtgaagatgttatcagaaactatgggtattactgctgttctgaatttccaaagtgaaagcgagcgcattaactggggaatcaattctgagataatcaacagttcctgtcgtgagaataacatcttgatggttaactatcctatacgagaggttgattcattggacctaagaaagaagcttcctttttgtgttggtcttctgttgcgtcttataaggaagaactaccgcatatatgtgacttgtaccactggatatgatagatcaccagcatgtgtgatatcatacttacactgggttcaagatacacctctccatattgctcacaagttcatcactggtttgcactcttgtagacctgacagagctgcaattgtttgggcaacttgggatcttattgctttagttgaaaatggaaggcatgatggtagtcccacacattcagtttgtttcatttggaacagtggtagggagggcgaggatgtagagttagttggagattttacaagtaactggaaagacaaaataaggtgcagccacaagggtggctcaagatatgaggctgaagttcgacttcgacatggaaagtactattacaaatttatagttgggggccaatggaggcattcgacttcgttgcctacagaaacagatgaacatgggaatgtcaacaatgtgatcagagttggcgacattgctcggattcgtcctgctccaagccagctacatataaaagacccatctgttgttaaggtcatagaaagggcgctaactgaggacgagcggtttttattggcgtttgcagcacgccgcatggcatttgcaatctgcccaatcagactgtccccaaagcagtagacgtgtcggtcgtccttctccgagcggaaccaggcgtcatcgaggatcagcgattttcgaagctacagaaaactcatgtatgtaacaacagaggggcttcttactgtatgtacccgttcacacaaaacctggaacgtggctaagtgtctcagcaatgggcacaatgtacacctctttgtaattccatggactgtatacctgaaatgaactccattttagactgacactcttgatataatcggaggccggctcgcaaatggccagtgaacaggctctgcaatctacagctctcatgggatgggagagatgactactttgccggttgccctcccggtctcaaggtaggagaacgcctccacaacctgcgagaaggagaagggcccctccgggtcgatgagtggcttcagcttccctgactcgaggtacgggttgagcttctccaagacggagccgttggaggtgacgacgaaccggaaccctggagggctgacggcgccggtgagaaccaccacgctgccgccttccttcactaccttgacagctttgtcaccctgacctgaatggatcgatggtgcaaagggcagatcatgtcagccgaggcctgagggtgggtgacggatttttgtttttgtgtgtgctgggcatgtgtttgatgatggtgatcttaccgactccgtcgaagacaatgtcgtatttgtccggtagctcttccaagttctccttagtgtagtcgatggcgacatcggcacctaggctcttgagcagctcgatcttcttggtgctggccgtcgcagctaccttggacgcgccgtagacatgcttcgctagcttcattccacatcaagagcagaggcagcagcattgcaaggttgagttcagtcttcggtacgtacgtacccacaccaacatgcaaacagtacctggatcgcaagggagccgacaccgccggcgccaccgaggatgaggacggacttgccggcggatattcctgccctctccaggccctcgttggcggtctcgacggctagcggcaggctggcggcctgcgcgaagtcgaggcccttgggcttgagcgccagcagcttctcctcgacggcggtgtattccgccagcgagccggactgcttgggcccctgcagcggattctcgctgaccatgccgtacacctcgtcgccttccttcaacttcttcacctggctgcccaccttgacgacgacgccggacaagtcgtaccccggcacgaccgggagaggggagtcggtggcctggaacttgccggcccgccgcttggcatcgacggggttgagcgccgcggcgacgaccttgacgagcacctggtcctcgcccacggccggcacagccgcggcctcgtcgagcttgagcacgccggcgtccccgtacgcgtcgtacacccaggccttcatcaccccgggcacctccgtcgccaccgcggccgtggccggggacgaggacgcggacaccgcgacgacgcaccgtcccgaccgaccagcttccgaagctgttcttctaccggcggcgaccctcggcgctgacgacgggacgacgagcttcacgggagcctgaggcggccgcggcaagaagtatgatctcgagtacgaagtggccgggatcgacgaagagaggaacgcgtgcattttttttttctctctctcgatggctcgtctctgatcaactcagttcagagcctgtgcttatgagcaaacggagcaggatgaacgttgcaggtgttctctgctgctctgcttcactggctgttgttatccgtttgcggccgtcaggagtggcgggtagcg

SEQ ID NO: 94774 - DNA, 2009 bp, Zea Mays
aattctgtacatactgatcatgttgcagctgttgagaaggtgtcagaagacattgagaaggatttggttcttttgggtgctactgctgtagaggatagattgcaaaatggggtccctgagtgtatttataaacttgcacaagctggaattaagatctggattttaactggagacaagttggagacagctgtaaacataggttacgcttgtaacctactgaggaaagagatggaggaaatttttatcacactggagaactcaagtacaagtgcttcagaggggtccagtggagaaggaaacaaaattgccacatttgaggaaattgatagaaaattaaaagatgctagaggaaagatttcccaaaaaggaacttcaacttcatttgctcttatcattgacggcaatgctctgacacatgctctcacgggcagccttaagaactcatttctggatctagcagtcaactgtgcatctgttttatgttgtcgggtttcaccaaaacaaaaggcactggtcaccagattggttaaaattaggacaagtaaaactactttagctattggtgatggagcaaatgatgttggtatgctacaagaggctgacattggggttggaataagtggtgctgaaggaatgcaggctgttatggcgagtgactttgcaatagcacagtttcgttttttagagcgattacttcttgtgcatggtcattggtgttatcgtcggattgcagctatgatatgctattttttcttcaagaacatcacatttggctttacgcttttctggtttgaggctcatgctatgttctcagcacaacctgcgtacaatgattggttcatatctttctataatgttgccttcacatctcttcctgtcatcgccctcggtgtttttgacaaggatgtctcttcccatgtttgtcttgaggtcccttcattacatcaagatggcgttaataatgtattcttcagttggtcccgaatactcagttggatgttaaatgggatgtgctgttcaataattatttactttggttccctcaacgctattctggttcaggctgtccgacaggatggtcgcgttgctgggtttgatatccttggggtgaccatgtacacttgtgtagtgtggactgtgaactgccagcttgctctctacatcagctacttcacctggatacaacattttgtcatctggggcagcatactgatttggtacactttccttgtcatatatggtctattttccccagcaatatcaaccactgcatatcatgtttttgtggaagcttgtgcacctagccctttgtactggctatccactctaatgattgtggtgacagccttgatcccattctttgtctacaaaatatcgagaacactctattatccacagtatcatgatcaagttcagagggctaactcaaagaattggtagtgcctgttgtataagatgctactgaatgaggggatgtacagtcagtaatttggtttaacataccacatgctttgctttgtagatcatgatgcagaggtagtgtatataaacaaagttggctgtttaacagatcttgtatttacggtctatgcccacaaagttacagtttcaggttgtggcagtgcgtctgtcaaatatcagaacacaatggtgacttcgcagtcacgcgaaggaactgcaagcggcaaattgattctttggacctattaccccactaggacacgtttttcttcggggtgccatcatggaagcagattgcaattaggatttatatagaatgatgtatagcatgtcgataactcgaacatgacttcctcgatatatgtagtactgtcttccaaaaaatagcattcttgtagcatcaaacggccaaacctatgttcgtggaagcatagttaataccctttattgctccaatggtttgtacatagttgtatgaatatatgagatggatcttgatgttgtttaacatttgatatgaaatgaataaatgatatgatgttatctct

SEQ ID NO: 94775 - DNA, 1126 bp, Zea Mays
atgaccctatccccaatctgtcgctccttcttcccagtgcgtggacgcacgccacctgtaccgacacacccagcgccctctgctccaccatcggcacacacactgacacaccctagctcgtctccaccaccgcgcacccagcgctgctagcccctgcgtcgcgtcttcagacatcctcggcaacggctctgcaggactctgtactctcaccgtggccgggtcaccatgactccatcagcatgcctcctccagctctctcccatgtccccccgagctcctccctcgtggccgtctggtgcgtcgtcgggacggacctccccactctgattgtcgtcaccgtctccagcagcgacgtccgccgcgcctataggcttttccccgctgtggtgctgctcgtccccatggcagggcgcacctgcttccccccacgccagtcgacctcgccgcggcttggcctccagagcccgcgttgtcgccccctccagctccggcatctgtagcagcgccctgacactcgcccctatgcaacaacgagctcgcccaggtcggacgaggatcccggcgaactcccctcgacaacagccgctgcctccctcgctgaggactccgagctgaccttgtcttggacctcgccatattcaatgccagtcctactcgccgtgcaccgtccccaaactattacacgtgtctcgccgtcaatccccagtgtctgtggtcgagctctccaacagctctcatatcgttgtttgcctcgatccgtcctcgtcgcggtaacagcaacctggcgcagaccgtctggtggtaatgtggatgatggaagcaagttcggcgcatcgctcgcaaggtgttcagtcgaaagcttcgatcggcgctggtcggtgttcttgcgagattcaagttcggtttagtgtggtaggacgatttgttagcttgttgaggtgtattagatgtttgtgaagttgcctcctcgcatatggcgatgtgattgtgttcgcgattgagaaatagacgtagcttatgtgtatgttaatgcttaggtcgagaagtatctggatggatacgtactcgcaaaatgtaacataaatggtaacagtaatggttcgcattcgattatcatcaataacaa

SEQ ID NO: 94776 - DNA, 990 bp, Zea Mays
atgagggcagttcagtctgcacagatcaactccaactccaaccaagaaatagcatcgaaatgctaaagcaatagcaaatgaagcctagtagctagggagcagaaagcctgaagagagacgagacgagacgatgcagctggagaaggggtccctggacctggtgctggtgccatgcgggctggtggtgatgctgagctaccacctcctactcctctaccgcattctccggcatcccgccacgaccgtgatcggctacgagaaccacaacaagctcgcctgggtgcggcgcatggtgcaggcgacccccgacgagacggggctggcgctgagcgtcatctccagcaacatctcggcgtccaccaacctggcgtcgctgtccatcgcgctgggctccctcatcggcgcctgggtcagcagcaccaccaagatgttcatgacggagctcgtctacggcgaccgcagccagtccacggccaccgtcaagtacatctccctcctcgtctgcttcctcgcctccttcacctgcttcatccactccgccaggtactacgtgcaggccagcttcctcgtcaccaccctcgactccgacgtgccggcgacctacgtgcagcacgccgtcatccggggcggcaacttctggtccatgggcctccgggcgctctacctggccaccacgctgctcatgtgggtcttcgggcccatacccatgttcgcctgctccgtgctcatggtgctcatcctgcacatgctggacaccaactccctgcccctgcaccaacaccaattcacagttaggaaacggcaagctctcacgccaaccatcgccacgactacgagacagcagaccagtccgcagaacccaatgctcagcaacccggtcttgtcacctgttacctttttcacttgagacaatcattgcagaacctgaattttcattaatgttgaactacaaaaatttcattacagatattgtttccaaaactaggacaa

SEQ ID NO: 94777 - DNA, 1170 bp, Zea Mays
acgccacgaccctctagccacgctatgcacgacgccgtcgtggccgccgtccaccacaccgtcgtggccggcgccgcagccgcgctcgtcgctctggccgtcgcgctcgccctgctctggcgcaagaggcgtatggcagccgcgagaagccccgccaatggtgccgcagcctcaggctcttcgtcatcgaccaagcctcttccggtgatcccgctcgccgacgtcgagcgcaccacggaagggttccacccgagccgggtcatcgggcaggggaggcactttgccgtgtacgctgccgcacctggcatcgccgccaagcgcatgcacccgcacctcgtcctcggcgaccccggcgggatgcggttccccgccgcggtccgctcgctggccgtgccgccccaccccaacgttgccgcggtgatcggcctctccgagggaccaggggagcgcgtcatcctcgtcgagcgcgcccccgccggcgccgtcagcctcgacaggatcctaggctggggcgacgacgcgcaccacgtacccgcgttgtcgtggcgccagcgcgccgcgatcgctgccggtgccgcgcgcgggctggcgcacctgcacgcgcacggcgtggcccacggccgcgtgcggccgtgcaacgtccttgtgaacgcctcctccggcggcgccgcgcgctggaggcacgccaccaccaggctcaccgactacgggctgaccggcttcctcgaccgccgcgacgacgcgcgcgccgatgacgacgtgtacatgttcggcgcggtgctgctggagctgctcacagggcggcgctgggacggcggccggcttgcggactgggccctgccacacatacgcggcggcgccagcatcgaggtgttcgacgtcgtgcgggccggcgcgccggccgacaaggaggaggtgcggctgctggcgcgggcggccagggtggcgctggcgtgcgtggggaacgacgggcgcagccgtccggggatggcggaggtgtcggccatcctcagcgacgtggaggccgcgtacaggcgccgtgacggtgcacttgtgggcaaggaggaggagcacgacgacgatggcgatgagagccgtctcagtggatgccttctttgcccaggcaggagcatccacaaagcggacatgctgctccggcctcccttgtga

SEQ ID NO: 94778 - DNA, 1054 bp, Zea Mays
aagtacaagttaaaaaagattcatgggcaaccagaacttcctatgcacatagctaaaagattgaagagcttcaaaagccgtccaggcctgtgcatgactgatatatctcaagggaaggaagccactcccatctgtgtcattaatacagtcgatgatgtgcaacctggacctttccaatacaccactagaattagatatccatttgggcttacagaaaaacacaatcagggttgtgactgcaccaatggttgctcagactctgagagctgtgcctgtgctgtgaagaatggaggggagatcccatttgacttaagtggcgcaattctcaatgagaagtctgtgatatttgagtgtggttcatcttgtaaatgtcctccgtcgtgccgcaacagggtcagtcagcatgatatgaaaataccactggaagtattcaggacaaccaagacaggttggggcgtaagatctctatggtccattcctgctggcagcttcatatgtgagtatatcggtgaggtgcagcatcaaaaggcggctgacaagagaaggaacaacaattacttgtttgatgccatggaagatgtgcgcttcactatagatgcatctgtgtatggaaacatcggaaggttcatcaaccacagctgttcaccaaatcttcaagcacaaaatgttctccgggaccatggtgacaaaaggatgccacatattatgttctttgctgcagagacaattccaccactacaggaactgacttatgactataataactctgaaatagatcgtgtccaaggtgtgaatagaagaatgaaatccaaagtttgtcaatatagttcttcgctgtgtcgtcggaggttctactaaggcatggccgactgatagtcgtgtagtagtttcttgaaaaagaaatatcctacggaatgctgtcacttgtgttttcatttaccagttgatgacactcaaacaatatgagatgttactgctagtaaagtttcgatcctagttgatgacacgagatgctgctgatattaaagaagtattattagttgtacttaaccta

SEQ ID NO: 94779 - DNA, 3519 bp, Zea Mays
atgcctctcctcaacccaaccggatcctctggtggaacttccagggtgccctcgtcggcggcgcgcttctcctcctctacatcgtcgacgccgccgttggttgaaagctcagaggtcatgcctcactcggcgcggcctccggggaccggagccaacttcaaccgcgcgcgcgaccagcgcggcacccgccgcgtctttctgcgtcgcccgccgcctccgcttcggcgtcctcctcatgtcacagccaatggtcatcgaggcgagggaggcagcggcggcgggggagcgcgtcggagcgcgggagaggaggcgggcgggcggtacacgaggcgcggcggcgtggcggaccgtgaggtggcggtgagtgccagcgcggaccctgtgggacggaatgctgcgaccgtcgccactggtggtgaggctccaccgccgcgggaggaggatggcggcggacgaggtggtgttcttgtgagcaagcgcccgtctgctgcgcccgtgctcccaccgcccaagcggagggcggtctccgtcactcggcagttcccacccgcctccaggtggacctcggctgctcctgctccgctcgctggtgcagatgccgacggaggtttgcggacacgatacgaagggcaacgtgagaacagagcttctgatgcattcaagaagccggcagttgctcgtcccctcgcgggcctcaaggatggtgttggtgttggtgtgatgtcgagagcggtgtcccccaaagctgctggcacgagggttctcaaaaagccgtgtgccagggatggagctgctccaatgtcgaacacagatcgtcatgatgctggattggtgaaatcgtctgctgcacatgacagaggaaggggagcaaggattgatgagctgcgggggaagaagggcccggtgaccggcgcacgatttccaccaaagccagagatcatatctaccacacgcaccttgctacctggccatggaaaggatggcggttgccatagcaaggtgcatcggccattggagtctgggcgtgctcatggtagttctttggctgatggacgtgctgtggaaattgttgctgcttgcactggtactagtgctggagctgtacaagatggcaaattagagaatggagaggttccctccaagaaggcttgggggtctcaggtttcttccgatgctgttctgcttgatcctgcatcttatagggatgtttctgcaagagatttccctggtttaagtgggaactttggaaggaagacgctgtcatgggcactagtaaaagatagaaaggtgatgaacaaatatggtaggacttcgtacagatacaacactgttgctgcatctttttctaagaattcttccaaaaaacccgtgatgggtaagatagtatctgacagtggtaggattaacaggatgatatcttctgatgttgcagcagaagtgtctggtgagggcactgtgttgggaagtaaggacatgtttacaaatcaaagcacagtcaagccagacaatgtggttcagaaatttgttacagatgctcagcatataccattttccaaaggcaagaaggaaaccgtacgcgaaaggtgggtaacaacaaatgggattcaggactctgttgagctcactaaggatcgagttatgcaagctcccatgtctgcagacatgtgccccatgcccatgacacacaaaaagaaggctgccacaactagggatttctttggtcacaagaggatggtgaaggcaaaagctctaggtcatcaacagaggatgtttgcctcgggtagtaagagcaaacgggatgatgaggtggcttccaacttgaaaattcatgacatatttagggaaatagttttaaatgaaagaaatctcgagctttacctcaatagttcatcaggcctgccttctgtgaggtgtcaaaggcaatatagatacatgaatgcagatgctaggagcagatttaaaatgttgtgcaggatgtttgagtttgtatgcaggacgcttgtacaaactatggagcagcgttcattgaagatgagaattgacaatgaagctgctaaagtaatgaaggcgttaccaggttttactaaacatggtcctattgtgggacaagttcctggagttgaagttggtgatgagtttctatacagagctcagcttgctattgctggtctacatagtgagtaccggagaggcatttccaccaccacatatagaaatggcatgcttattgcaataagcattgttgcttctggaggttatcctgatgaattgggttgctcaggtgaactgatatacactggttctggcgggaagtctgctgttaagaagaaagatgaggatcaaaagcttaagtgtgggaaccttgcactaaagaattgcatcaaaacaaagactcctgtaagagtgattcatggatttaagtgtcggaataccgatcgaggcagtcattcgggggccaaactaatcccaaaatacacttatgatggattgtatttagtggtggatttctggatggatggtaaaccaggttcaagggtgtttaagtacaagttaaaaaagattcatgggcaaccagaacttcctatgcacatagctaaaagattgaagagcttcaaaagccgtccaggcctgtgcatgactgatatatctcaagggaaggaagccactcccatctgtgtcattaatacagtcgatgatgtgcaacctggacctttccaatacaccactagaattagatatccatttgggcttacagaaaaacacaatcagggttgtgactgcaccaatggttgctcagactctgagagctgtgcctgtgctgtgaagaatggaggggagatcccatttgacttaagtggcgcaattctcaatgagaagtctgtgatatttgagtgtggttcatcttgtaaatgtcctccgtcgtgccgcaacagggtcagtcagcatgatatgaaaataccactggaagtattcaggacaaccaagacaggttggggcgtaagatctctatggtccattcctgctggcagcttcatatgtgagtatatcggtgaggtgcagcatcaaaaggcggctgacaagagaaggaacaacaattacttgtttgatgtaggccttaactatgatgacgagaatgttagcagtgtgttgctatcaaatgtttcaggtttgaactcttctagctcttgctcccaggccatggaagatgtgcgcttcactatagatgcatctgtgtatggaaacatcggaaggttcatcaaccacagctgttcaccaaatcttcaagcacaaaatgttctccgggaccatggtgacaaaaggatgccacatattatgttctttgctgcagagacaattccaccactacaggaactgacttatgactataataactctgaaatagatcgtgtccaaggtgtgaatagaagaatgaaatccaaagtttgtcaatatagttcttcgctgtgtcgtcggaggttctactaaggcatggccgactgatagtcgtgtagtagtttc

SEQ ID NO: 94780 - DNA, 112 bp, Zea Mays
ttcttcagttttcaaatgaaaccctgaactcaactgtcttaagcttgctgcccatctccacacctccctatttaagcccctggtatctcacaattcccctcaacaacagacc

SEQ ID NO: 94781 - DNA, 1112 bp, Zea Mays
tatactatctattcatatagagatggaatcaccgcccctcacagctgaagcaattgcttatacagagaaaaagatggacatggctttgggtatgctatttgaccaatttttttggtttaataggatgctaattgatattttattgttgatttaactcatgtattgtttctgtgtttactcagaggatataattaaaatgtcaaagaaaaagaatcctggaggcaagaaacccccgaggcagccgataaaaaagcatccattccagaatggcaactctaataaagggaatggcaaggttcaaagttttatggagtctagatcaaccattagacaaggtgttcttgcacagagaaggtcaaatcttggtggaaatcagttccctgctacaaagcaggctgcgaagaaggctgctgttatgccaatgcacaagggggctatccgttggaacaagccaagtgcaagtaccttagtgcagaggaggcctgtaggtggtgcttttcagaatgccaaggtcaaggagtccaaccaggcagcaccaaggacgatggatgcactctttgcacagatgaaggcgcaacgcttgaggacggtacctcaacagcaggcaaattcttccccctggagtcatttcaaccagcatcgacgtgttcagcagcagcagaggcgaggcagagggtatggtggccgtaatgttggcaaccaatgaatccaactagacatatctactgcatcggagccctttctcttcactggtcttttggaccttggaagaaaggacgccccttggaaaatcaaacttggctttgtttattggaggggtgacaatgggctctaacttggctttgtttattggaggggtgacatcgggctctaaattttacactaagatttaaggatctgattaagatcaggccctatttctattcatttttaaactaaaatttatttagtgtcctactattttgtgaagcgtttggatcgtgatccattaccacctcacctttggacgtggacaggatatgaagcgaagtttgtttgagttttctagttgtgtgcagtctgcttccgtttcagcatgtataatgacatggaaattatttggtcagagatta

SEQ ID NO: 94782 - DNA, 2394 bp, Zea Mays
tatactatctattcatatagagatggaatcaccgcccctcacagctgaagcaattgcttatacagagaaaaagatggacatggctttgggtatgctatttgaccaatttttttggtttaataggatgctaattgatattttattgttgatttaactcatgtattgtttctgtgtttactcagaggatataattaaaatgtcaaagaaaaagaatcctggaggcaagaaacccccgaggcagccgataaaaaagcatccattccagaatggcaactctaataaagggaatggcaaggttcaaagttttatggagtctagatcaaccattagacaaggtgttcttgcacagagaaggtcaaatcttggtggaaatcagttccctgctacaaagcaggctgcgaagaaggctgctgttatgccaatgcacaagggggctatccgttggaacaagccaaggtaaacaatgatgttcttttattgcttatgagaaagtttactgcattcaaggggttgttcaatttattgagtcatgcaccttggattatattggctgagaatgattgtgatgctggtgtttacatggaactgccttaacttctctggttatacacacacaagcttataaagaacaatcgatttcatattcttgtggcacaaggcctgttttcttggttgaactgctacaaatatatggtgaatatagcatatgagccttgaagcttcattgaaagttatggccttctcctttatctgctgttgcctgacatttttctatgcagtttcatggtgtaatttatagctgctggatgagtgttattttggacaccagcattaactgtctgtgagggtttcattagtgttatttgtcaactattgttggaaggactgaaggagatgtgataatggttagcgtctcatgccactggtgacggatcatccatatacagggacgttacatgcctgagtttgaattggttttgactactggctccttggcagtgttcagtgtttatttgttgaatgatgaatgcagtgtaaatctagggtagtgctgctaattggacaattgttgtatgcctccaagggagtatattttgctactgcctcatattcaagttggctgtatccgtaacatcatgccagttttgagcatcctatcataatctgctatatgctccccttgttcactgcgtcccacagagataatgcttgcctgcatttctactggataagagtaaatcatggtatcttacgatttatctcagtatgctgggctgtatggatgctatcttttcaaggtcaactgttgggatttattttcatgattccttatgtgaccttgtttgttctggatcagtggtcactatttacatggcttgagttttatcagtttaatcaatcaataagttgtgtcaacttgggacattgttgaaccatgtgcattgaaatttgggtggaactaaacagtctagactccaaaatgtgagggccttggaaaccaagaggatgcactagatattttcaatgaacactttattgtttctgtttcattttatttcaaaacatggtatgtactccctgacttcacttgagaagcgagaattgtatccttgttttgatgggggtatggtgagtttgctcagaaaacaatatggctcttggttctccgttgcttatgattcttggtactcgagcactcctgctcatgtgagatactaatgttttgattttgatacagtgcaagtaccttagtgcagaggaggcctgtaggtggtgcttttcagaatgccaaggtcaaggagtccaaccaggcagcaccaaggacgatggatgcactctttgcacagatgaaggcgcaacgcttgaggacggtacctcaacagcaggcaaattcttccccctggagtcatttcaaccagcatcgacgtgttcagcagcagcagaggcgaggcagagggtatggtggccgtaatgttggcaaccaatgaatccaactagacatatctactgcatcggagccctttctcttcactggtcttttggaccttggaagaaaggacgccccttggaaaatcaaacttggctttgtttattggaggggtgacaatgggctctaacttggctttgtttattggaggggtgacatcgggctctaaattttacactaagatttaaggatctgattaagatcaggccctatttctattcatttttaaactaaaatttatttagtgtcctactattttgtgaagcgtttggatcgtgatccattaccacctcacctttggacgtggacaggatatgaagcgaagtttgtttgagttttctagttgtgtgcagtctgcttccgtttcagcatgtataatgacatggaaattatttggtcagagatta

SEQ ID NO: 94783 - DNA, 1114 bp, Zea Mays
tatactatctattcatatagagatggaatcaccgcccctcacagctgaagcaattgcttatacagagaaaaagatggacatggctttgggtatgctatttgaccaatttttttggtttaataggatgctaattgatattttattgttgatttaactcatgtattgtttctgtgtttactcagaggatataattaaaatgtcaaagaaaaagaatcctggaggcaagaaacccccgaggcagccgataaaaaagcatccattccagaatggcaactctaataaagggaatggcaaggttcaaagttttatggagtctagatcaaccattagacaaggtgttcttgcacagagaaggtcaaatcttggtggaaatcagttccctgctacaaagcaggctgcgaagaaggctgctgttatgccaatgcacaagggggctatccgttggaacaagccaagtgcaagtaccttagtgcagaggaggcctgtaggtggtgcttttcagaatgccaaggtatggagtatggactttgtcaaatcttgaccttaatgctgagtaaataggacaaactggccgaaaaggtcaaggagtccaaccaggcagcaccaaggacgatggatgcactctttgcacagatgaaggcgcaacgcttgaggacggtacctcaacagcaggcaaattcttccccctggagtcatttcaaccagcatcgacgtgttcagcagcagcagaggcgaggcagagggtatggtggccgtaatgttggcaaccaatgaatccaactagacatatctactgcatcggagccctttctcttcactggtcttttggaccttggaagaaaggacgccccttggaaaatcaaacttggctttgtttattggaggggtgacaatgggctctaacttggctttgtttattggaggggtgacatcgggctctaaattttacactaagatttaaggatctgattaagatcaggccctatttctattcatttttaaactaaaatttatttagtgtcctactattttgtgaagcgtttggatcgtgatccattaccacctcacctttggacgtggacaggatatgaagcgaagtttgtttgagttttct

SEQ ID NO: 94784 - DNA, 821 bp, Zea Mays
aaccattgctattgtaattgatattttgtgttctttcttgatatgttttaatgcatagacagcatagttttctcacataatccatcttttttctggtatcctcgtgtcacttcataatcatctgtagtagtttcagagccgtgatcagtgctatactcgagtccatttttatttttagaagttgcgtgatacatgaacttctatttgtttgattaatatattcgttgaattatcatgtcctgtagttttttttgtcgctgctgatcatacgcccgtaatctatttgtaggtcaaggagtccaaccaggcagcaccaaggacgatggatgcactctttgcacagatgaaggcgcaacgcttgaggacggtacctcaacagcaggcaaattcttccccctggagtcatttcaaccagcatcgacgtgttcagcagcagcagaggcgaggcagagggtatggtggccgtaatgttggcaaccaatgaatccaactagacatatctactgcatcggagccctttctcttcactggtcttttggaccttggaagaaaggacgccccttggaaaatcaaacttggctttgtttattggaggggtgacaatgggctctaacttggctttgtttattggaggggtgacatcgggctctaaattttacactaagatttaaggatctgattaagatcaggccctatttctattcatttttaaactaaaatttatttagtgtcctactattttgtgaagcgtttggatcgtgatccattaccacctcacctttggacgtggacaggatatgaagcgaagtttgtttgagttt

SEQ ID NO: 94785 - DNA, 723 bp, Zea Mays
tatactatctattcatatagagatggaatcaccgcccctcacagctgaagcaattgcttatacagagaaaaagatggacatggctttggaggatataattaaaatgtcaaagaaaaagaatcctggaggcaagaaacccccgaggcagccgataaaaaagcatccattccagaatggcaactctaataaagggaatggcaaggttcaaagttttatggagtctagatcaaccattagacaaggtgttcttgcacagagaaggtcaaatcttggtggaaatcagttccctgctacaaagcaggctgcgaagaaggctgctgttatgccaatgcacaagggggctatccgttggaacaagccaagtgcaagtaccttagtgcagaggaggcctgtaggtggtgcttttcagaatgccaaggtcaaggagtccaaccaggcagcaccaaggacgatggatgcactctttgcacagatgaaggcgcaacgcttgaggacggtacctcaacagcaggcaaattcttccccctggagtcatttcaaccagcatcgacgtgttcagcagcagcagaggcgaggcagagggtatggtggccgtaatgttggcaaccaatgaatccaactagacatatctactgcatcggagccctttctcttcactggtcttttggaccttggaagaaaggacgccccttggaaaatcaaacttggctttgtttattggag

SEQ ID NO: 94786 - DNA, 669 bp, Zea Mays
tatactatctattcatatagagatggaatcaccgcccctcacagctgaagcaattgcttatacagagaaaaagatggacatggctttgggtatgctatttgaccaatttttttggtttaataggatgctaattgatattttattgttgatttaactcatgtattgtttctgtgtttactcagaggatataattaaaatgtcaaagaaaaagaatcctggaggcaagaaacccccgaggcagccgataaaaaagcatccattccagaatggcaactctaataaagggaatggcaaggttcaaagttttatggagtctagatcaaccattagacaaggtgttcttgcacagagaaggtcaaatcttggtggaaatcagttccctgctacaaagcaggctgcgaagaaggctgctgttatgccaatgcacaagggggctatccgttggaacaagccaagtgcaagtaccttagtgcagaggaggcctgtaggtggtgcttttcagaatgccaaggtatggagtatggactttgtcaaatcttgaccttaatgctgagtaaataggacaaactggccgaaaaggtaaactgtttcctaatgtattgtatctgatgcataataatcaacttaagatgtaatgggtgatcttttggcctatcaatataatgacat

SEQ ID NO: 94787 - DNA, 3386 bp, Zea Mays
ggattgcattatccgctcgctgtgcctgccctgcttcttccgccattctttccgtctctgctctactttcttggtcgcctgtccggaggctcctccccgcggcccctgagcaaactgtaccatagccgcgtgattgattggttcacgggagggacagggagcggcgtcaagctggttttggtagtaaaaaatcacttcaattgtcccctcattcccatactaaagcaggctgcccaaaatttctcaatattgtcctcagaatttgttgctgtgcttttgccagaagcggtgcttgcttcggcagatggttgttctcccgcacctgtcctaccgccgttgatcgcgagagtctcgtacgtagtcttcgggggcaagcatccatggcggagtcatcgtcaaggcaagcggccgagatggtggagaagtggatggcgttcccgtctggctccgacgccggcagcggcttcgcgttcccggcgccacgctcagtgtcgggcgcgggcaaggagatagtggagctggcgtcgccctccacagccacggccacggccacggccacgaccacggccagtgccggcaacaggcaggcctcgttccagcgcggccgcgacagtggcgtgggcagcaccaggtcgtccatggacggcgcgcgcgcgtcgggggactcgtcgatgccgcgggtgtcgcaggagctcaaggacgcgctgtccagcctgcagcagaccttcgtggtctccgacgccacccgcccggactgccccatcatctacgccagcgccggcttctacaccatgaccggctacacccccaaggaagtcaccggccgcaactgccgcttcctgcagggccccgacacggacatgaacgaggttgccaagatccgggacgccgttaaaaccggccgcagtttctgcggccgcttgctcaactaccgcaaggacggcacgcccttctggaacatgctcaccgtcacccccatccgcgacgacaacggcaaggtcatcaagttcatcgggatgcaagtcgaggtgagcaagtacacggaggggctcagcgaaaagcgcatgcggccaaacgagatgccagtgtccctcatccactacgacgaccggcagaaggagacggcaatgtcatcgatcacggaggtggtgcagacggtgaagcacccgcgcgctcgctccgagggtgaacaggagcccgtggagcctgcaccgcccgtcatggcgtcgccgttggtggcccctggcacgccgtcgggcggtgccagcctcaagtccccgctctgggacgtgaagaaggaggactcacggctgagccggaagtcgagccgccgctcttccctcatggggttcaagatggggaagaggagctcgataggaagcaaggatgcccttccagcggaggtggaggccccggcgccggcgccggcgccaccggagtcaacgacggagaagcagcgcaagaacagctgggagcaagaggggagggagagggacatcaggcaggggatcgatctagccacgacactagagcgtatcgagaagaacttcgtcatcacggatcccaggctccccgacaaccccatcatcttcgcgtcggatagcttcttggagctgacggagtacacgcgggaagagatcctcgggaggaattgcagatttcttcaagggccagagaccgacatgtccacagttgataagatccgggaagctatccgggaacagaaagaaatcactgtccagctaatcaactacaccaagagcgggaagaagttttggaacttgttccacctacagccaatgcgagaccagaaaggagagcttcaatacttcattggagttcaattggatggaagcgaccatgttgaaccccttaggaatcgtctctctgagaacactgaactacaaagtgctaaattggtcaaagctacggcagagaatgtggatgaagcagtcagagagcttcctgatcccaacctgagaccagaggatctatgggacatttactcacgatatgtttccccaaagcctcataaacgttacaactcttcttggattgcgatggaaaagattataaaatctggtgtgaagattggcttgaagcacttcaagcctataaaacctttgggttatggtgacactggcagtgtacatttggtggagttgcaaggaagcggtgaattatttgcaatgaaggcaatggacaaatcagtgatgttgaaccgcaacaaggttcatcgagcttgtatggaaagagaaatatactcactattggatcatccttttctcccaacattatatacttcattccagacaccaacacatgtttgtctcataacagacttttgtcctggaggagaattatttgcactactcgatatgcaaccaatgaaacttttcagagaagaatctgcaaggttttatgctgcagaggttgtaattggcctggagtatctccattgccttggaataatataccgtgacctaaagccagaaaacattttgctccaagaggatggccacatcgttctgactgattttgacctctcttttttgacttcctcaaaacctcatgtgataaagcattctacatcaaggcgaagaagatctaaggagtatctgcccccaagttttgtttcagatcctgccactccatcaaattcttttgttggaactgaagagtacatagctccagaggtcatcactggtgtaccacatacaagtgccattgattggtgggctcttggaattctcttgtatgaaatgttgtatggacgtacaccttttcgaggaaagaacaggaaaaggacatttcataatatcctgcacaaagaccttacatttccaagtagcattccggttagtcctgcggctaagcaattaatccatggattgctacagagagatccctcttctcgacttggttcaagtgctgctgcaaacgatatcaagcaacatcccttttttgaagatatacactggccactcatccgttgcatggagcccccagagcttgatgttccactgaaactaactcggaaggaacctgaacaaaaagtgaagcctgaggaggatatatactcatgttcagattattgagacattttaagggcaggttgtacgatcccccctcccgaccccgtgcatgactttcagcctgaagagattttatattaccgagtggaaataacgttgctgagcatgtacatagtaataaaagaggtttataggcatgcaagatttccagcctgaattgcacaagaggtcgttgtaagtcattcttttggttaggttaagtgaataatccatcaacaggataaagttcttgtaaatgtacactttctttggcatatataataaaaatcttactaatttccgttggtcaaa

SEQ ID NO: 94788 - DNA, 2469 bp, Zea Mays
atggccacaggctcagcagctttagcgttggtgttagcgatcgcggcggccgcggcagagactccagcaccagcggcaccgatagggccgagcgactgcagcaccagttgcggcggcgtgagcgtgccataccctttcggcttcgggcctccacgctgctactggccagggttcaacctgacatgcgacaggaggagaggccagctgctcctcggcgacggcacgctccgggtggccgagatctccctccgcaacgcgaccgtgcgcgtggtgcgcagcggctccatcatcgacagcgccagcatcacctccgacaggaacgtctccttcggcggcagcttcatggaccacggctacatgctgtcgaacggcaacgagctggtgctctccgggtgcaatctggtggcgacgctggtcgaggagctcggggtggggcccggcaggtcgggcatcatcagcggctgcgcctccttctgctcgttccgcaacaagaaggtggacagcgtcgggcaggcggggggcaacaagtactgctccggcatggcgtgctgccaggcgcccatcaactactacagctcgcccacggaggtgcgcctcaggtggctggacgccgggaaccacagtgaggcgctgacgttcctgccgacctacgtgttcgtggcggaggaggggtggttcgaccagaggccgctggccgacgagctgctgagcgtgaagaagagcccgtcgagggcggcgctggaggtcccccttgtcctcctgtggggggtccggcagggccttccgccgctgcccaacttgccggccaacgccaccacgtcgtgctccgccgacgcagaccgcatgctctgcaagagcgaccacagcgtgtgcgcagccggaaacttgggctatacgtgccactgccaacgaggttacgacggcaatccgtatctcgtccatggatgccaagataccaatgaatgtgagcggccacaagagcacgggtgctttggcgagtgtatcaacacaattggaggtttcaaatgccagtgccctcgaggaacccatggcaactacaccgtcagagatggctgcaccaagacctcaactacagggataagcatcggtattggagtgggtagtgcagcaggttttatgcttctggttctcgcagcaatcttcgtggctcaaaggctaaaacaaaagaggcaaatgatgttgaaacgaaggttcttcaagcagaatcgtggacaactgttgcaacaactggtatctgcaagggcagacattgcggaaaggatgatcgtgcctgtagatgagctcgctaaggcgacaaacaacttcgacaaggctcgtgaggttggcggtggagggcatggtaccgtctacaaagggattctatcggatctacacgttgttgccatcaagaagtcgaagatagcagtccagaaggagatcgacgagttcataaacgaggtggccatcctctcacagatcaaccataggaacgtggtgaagcttcttggatgttgcctggagacggaggttccgctgctggtctacgaattcatctccaacggaacgctctatgaccatctacacgtggaagggcccctttcttgggccactaggttgaggatcgcagccgaaactgcgagtgctctcgcctatcttcactcgtcggtttcgattccaatcatccacagagacatcaagtctagcaacatacttctggatgaaaccatgacgtccaaggtgtccgacttcggagcttccagatacatccccatggataggacagggctgacgacaatggttcagggaacgattggatacctggacccgatgtacttctacacgggacgcctcacggagaaaagtgacgtgtatagctttggcgtcattctcgtggaactgctaacaaggaagaagccgttctcgtacttcttcctcgacggagatggcctcgtctcactttttgtcaacctgcttgctaaagaaaatctggcccaaatactcgatccccaagtcgtagacgagggaggcaaagaagtccatcaagtctccatgcttgcggccgcatgtataaagctaaacgctgaggaccggcccacaatgcgacaggtagaacatacactccaaggtcttcttggatccaaatccaagaggtgtgtccaaactggtggtgtgaatgtagagacaactggagagaaggctatgatgaattgctcctcgtcgaaaacggaaggacaaagcacgcaagagtgcaccagaagatatagcatggaagaagaaatgttgatgtctgcaaggtatcctcggtagagagacaggcttttcgccatgcatatatgtacgtcaaaagcatcaaccatagctacaatagtcatgtattgatatgtgctaactttgcctacaaaatttgttaccgtaatatttattttattaattaccataaaaagtcttgattaccatatgaagaagaaa

SEQ ID NO: 94789 - DNA, 738 bp, Zea Mays
atggcttcggcggcggttcaccagcttgtggtgctcctgctcacgctggccctgccggcggtcatgtccgcgtgcgccagtgaggtcttcccatcagggaagacctacgtgacgtgccaggacctcccggagctcggcacggcgctgcactggacctactacgactacgcgtccgggccgttgctgtcgctggctttcgtggccgtgccggcagcgcccggcgggtgggtggcctggggcatcaaccccactggcaacggcatggtgggcacgcaagcgctgctggccttcgtgcctggcgcctcctcgtccgtgcccaccgtcagaacctacaacatcaccagctacgcggttggcgccgcctcgacgcccatcgcgttccccaccgccggcttcgccgccgacgtggccagtggcgggaggatccggctgtacgccacgctgcagctggacaagggcatcaaagtggtgaaccaggtgtggcaggtcgggccctcggtcaccagaggagtgcccgatacgcacgccatggcccccgaaaacctggctgctatgggcaagctcgtcctctccgtcgggaccgccgcaagccctccagcgcacgccggcggcacgtccagcgacacgacgccgtcaggcaggcagatgtcacggggggcagagacggacagcgtctccctctccccgacggcacgcgttgtacttgcattgctgggtttctgggcgatggtcggatag

SEQ ID NO: 94790 - DNA, 387 bp, Zea Mays
atggcagttggactccccttttgcgtgcccctgctccctcgaccagtcctgcgcggcggcgtgctcggcgcccagccggccagcccgttccccttgctgcgcaggcaacgcatcatgcgcgagtctcagcccagcagcgcaatctacctccccgcgtctgcagccccgttcatggctttgtcgtcgcgctcgctgctggtgagaagcagccagacccacgaccaagccgagctcaagcgccacagccccgagcgtgactccgcctctcttgcgcgcctagaaattgtccctgcttatgagatacaaaatacatcgaaaaggattttctgtagtgtggccctcggtgtggtcagttcctggccaatagaatcgagccacgtaatttaa

SEQ ID NO: 94791 - DNA, 903 bp, Zea Mays
gcgttcccttcgttgcgtcttgaaaggggagagagagagagagaagagagagagaagagagagagagagagaggagtgggagacccgcgagaggctgccgtgtagggaccgtagactcagcgactgcgaaggagggataaggggatggccgggatcggaccgatcaggcaggactgggagccggtcgttgtgcggaagaaggcacccaccgccgccgccaagaaggatgagaaggccgtcaacgccgcgcgccgcgccggtgcggagatcgataccatgaagaagtacaacgctggtacgaacaaggcggcatccagcggtacatccctcaacaccaagcgcctcgacgacgacaccgaaaacctcgcccatgagcgagttccaagtgatctgaagaagaatctcatgcaagcaaggctcgataagaagctgacacaggcacaacttgctcagatgaggatgtggtgtttattgtagatgataaatgagaagccacaggtgattcaggagtatgaatcaggcaaggcaatccccaaccagcagatcattagcaagctcgagagggccctgggaaccaagttgcgtggcaagaaatagctttcctacgagtttgtgtcccggagcatcataatagggggaagacaaggcaagctgtctgcttatttgtctatgtttggtatctcaagtcctgcggactgtttctgttggcacaagagggaataaatgtgttcacggacctgtaatgcttgctccttgtcatatgaccttgctctaaacatttgtgatgaagctgtcaaggtaatatattttctctaaatatttagcctatattgcgatgtcagtaaccacatcaatgttagcgagcgtgtgacgcatagcagttatagaaccaaaattctggcg

SEQ ID NO: 94792 - DNA, 879 bp, Zea Mays
gcgttcccttcgttgcgtcttgaaaggggagagagagagagagaagagagagagaagagagagagagagagaggagtgggagacccgcgagaggctgccgtgtagggaccgtagactcagcgactgcgaaggagggataaggggatggccgggatcggaccgatcaggcaggactgggagccggtcgttgtgcggaagaaggcacccaccgccgccgccaagaaggatgagaaggccgtcaacgccgcgcgccgcgccggtgcggagatcgataccatgaagaagtacaacgctggtacgaacaaggcggcatccagcggtacatccctcaacaccaagcgcctcgacgacgacaccgaaaacctcgcccatgagcgagttccaagtgatctgaagaagaatctcatgcaagcaaggctcgataagaagctgacacaggcacaacttgctcagatgataaatgagaagccacaggtgattcaggagtatgaatcaggcaaggcaatccccaaccagcagatcattagcaagctcgagagggccctgggaaccaagttgcgtggcaagaaatagctttcctacgagtttgtgtcccggagcatcataatagggggaagacaaggcaagctgtctgcttatttgtctatgtttggtatctcaagtcctgcggactgtttctgttggcacaagagggaataaatgtgttcacggacctgtaatgcttgctccttgtcatatgaccttgctctaaacatttgtgatgaagctgtcaaggtaatatattttctctaaatatttagcctatattgcgatgtcagtaaccacatcaatgttagcgagcgtgtgacgcatagcagttatagaaccaaaattctggcg

SEQ ID NO: 94793 - DNA, 561 bp, Zea Mays
cttctcatgtttcttggaatgatcaccacctaaatcatgattcccactcttgtcctttttcttttctttgtctttgtccttatctttatctttatctttactccgatctttatgccgatgtttgtgtttcttctgctccttctccttgtctctatctttctctttgtgtttcttatgtttcttcactttatccttggacttgaccttggatttcccagatatggttggtgtacctttttcagcctaaggcaagtctactggtgcagtttctcgcagctgaaatgcttgtcctagtgtttccatgtcaaatggctgaatgtaagcagtcttctcacttgaacatgagttctgaaagagttggtccaactccatcccttcccccttacgaatttctgtgtcacccacaacattgttaaggtaatttgtatctgaaattgccaatggcaaaggcttcttgcaaaagaaactatgatgattcagcagcttgtagcgactaattaagtccacagcaccactaagctcccgaggacctgaaataccgaaagatatcatggtgggtga

SEQ ID NO: 94794 - DNA, 285 bp, Zea Mays
atggccactgctcatggagatctcaacagtgaactcagtgagcatgaagatgtcgacgccaatgatgaagccaaagctgaaccatgtgaggcaccggcaaatctcgtttttgttgcatgcggaccggtcgacgaaacagtcatggacggccggatgtggatcagccgcccaacagtgccccagttcacgaactacaactccaagttctctgtgccgccgccagtagctccttgtcgttgctacagctttgcctgtgtccatgccccctcctctcccctgagctaa

SEQ ID NO: 94795 - DNA, 1446 bp, Zea Mays
atcaccacatagacataaccgcacgccttcccgttgtccatttgctccacgggccagcctgccggcgccgccactgcaaagtccgtacacacagacacacaacgcacgtcaccgccatgtctgccgccactgcttgcatgcccctggtccttgatccgtctcctctccatggatcggcggcaatggcagatgccgttgagaggcggcagcccggtggcatggagaccaccaagaccggttccgagggaacgctcggccgcgtcgtcaggagccaagtgtttggcaacgaggacgacgaccgtgctgggcacggcgacggcgacgaggtgagcaagccgcgggcggtggtccacacactgacgtgcgagcgcaagccattgttcgagggcttcgcgctctggcggagcatcggcaggcctgagcttcccgaactggatccaatcttatcgttcgacgaattcgagttttctgctccagctggcttccttgaccatcctcacaggggatttgagaacgttacctatatgctcgagggcggcatcagttaccacgacttttcaggccacaagggaaccatcaacccaggagacgttcagtggctgacggcggggcgcggcgtcgtgcacgcggagatgcccgccgccggccagggagtacagaggggcatcaacatctggatcaacctctctgccgccgacaagatggtggagccgaggtaccaggacctggcgagccacgacatccccgccgccgcggcggacgccgctggcggcgtctccgtcaaggtcatcgcgggcgagtgcctcggcgcgcgctccccgctccggccccgcaccccggcgctgtgcctcgacgtcgccctgcggcccggcgcgcgcctgcgccagcctgtcccgcgcgggtggagcgcctgcgcgtacgtcatccacggcgaggccgccttcggcactgcctccggcgagggtaacggcgcctccacggctaccgcgcgcacgctcgtcgtgttcggtggcgacggcgacggcgtggagctgcggggcgatgcagcgggccagggcgcgagggtcatgctggtcgcagctcggtcgcacggcgaggcggtggcgcgggacggccccttcgtcatgaatacccgggaggaggtggaccaggcgcgggaggactaccgccaccgccgcaacggcttcgagatggccgacggctggacctccgatcacgcctccgcagctgaaaagcattcataggatacacctaccttaggctagtcgcgcgcggatgcaactgtgtaaggctttatatgtagtttgatttccatcaataatccacaagttttatttccaaaattgtgggttttttccaaaaaattgtgggctttaatagcatagcaaattgtttgcaataatgtgacatgttatatatagtcaatctggaatcgattttcaaaaa

SEQ ID NO: 94796 - DNA, 1638 bp, Zea Mays
atcaccacatagacataaccgcacgccttcccgttgtccatttgctccacgggccagcctgccggcgccgccactgcaaagtccgtacacacagacacacaacgcacgtcaccgccatgtctgccgccactgcttgcatgcccctggtccttgatccgtctcctctccatggatcggcggcaatggcagatgccgttgagaggcggcagcccggtggcatggagaccaccaagaccggttccgagggaacgctcggccgcgtcgtcaggagccagctgcaggctgcagctgcccggatcgatgtggccggctgcccggccggcgtaatcaagaacggccggccaggcagcactagtataattttcattatggaacgtatcctgttcttcttccttaagctgacaaacatgatgcattcgatcgatcagccaagtgtttggcaacgaggacgacgaccgtgctgggcacggcgacggcgacgaggtgagcaagccgcgggcggtggtccacacactgacgtgcgagcgcaagccattgttcgagggcttcgcgctctggcggagcatcggcaggcctgagcttcccgaactggatccaatcttatcgttcgacgaattcgagttttctgctccagctggcttccttgaccatcctcacaggggtttgtaataatagcttaatttcctcttacatcatgaatccattagctagctatcgaataatgtagcaaaacaatcatcaattctgaccttgtactttttttttctctcttcggtgtgtttctcatgtcatgcctcaggatttgagaacgttacctatatgctcgagggcggcatcagttaccacgacttttcaggccacaagggaaccatcaacccaggagacgttcagtggctgacggcggggcgcggcgtcgtgcacgcggagatgcccgccgccggccagggagtacagaggggcatcaacatctggatcaacctctctgccgccgacaagatggtggagccgaggtaccaggacctggcgagccacgacatccccgccgccgcggcggacgccgctggcggcgtctccgtcaaggtcatcgcgggcgagtgcctcggcgcgcgctccccgctccggccccgcaccccggcgctgtgcctcgacgtcgccctgcggcccggcgcgcgcctgcgccagcctgtcccgcgcgggtggagcgcctgcgcgtacgtcatccacggcgaggccgccttcggcactgcctccggcgagggtaacggcgcctccacggctaccgcgcgcacgctcgtcgtgttcggtggcgacggcgacggcgtggagctgcggggcgatgcagcgggccagggcgcgagggtcatgctggtcgcagctcggtcgcacggcgaggcggtggcgcgggacggccccttcgtcatgaatacccgggaggaggtggaccaggcgcgggaggactaccgccaccgccgcaacggcttcgagatggccgacggctggacctccgatcacgcctccgcagctgaaaagcattcataggatacacctaccttaggctagtcgcgcgcggatgcaactgtgtaaggctttatatgtagtttgatttccatcaataatccacaagttttatttccaaaa

SEQ ID NO: 94797 - DNA, 349 bp, Zea Mays
gcttcaggcgtggacggctacgaccttgagaggcatgagcggtggccgaacattgacgacgacgtcatacatagtgaccccggtgacgagtgcacaaggcatgagcaagtggcggcggctacgcgtggctcgagcggcggcccccagaggcggggcgaatgacgacgcactcgacgtgggcgaacggcaatgatgcacccccagacgcgagcagcggctgcggcccctgacgtgcgaacaacgtcgacgcgccccctaagacgtgagcgacggcagtaaccctcggaggcgcgagctcgagcggatgccacgcaaggcacgaggtgcacccgacagcggtcgcgagagg

SEQ ID NO: 94798 - DNA, 772 bp, Zea Mays
aaagcagcagaaaaaaaaagatatgcatttgagacaattatctgccccaggtccagagcgcaacaaagccaaagccgaatctgagaaccagccgaatccgagctgcggagcctcctcccgatccggctgtatccaactccgaggcttcgaggcatggccacgccacttgctcgtgcgccgctcccgggggccctacttcgccccgctcccgccgtccttcggttggccacgcgctgccgtttccgggccacggcggccagcggtgaaggcgcggctgggccgatgctgcgcacttgcaagaactgcaagcagcagtacgacccgtccgtgaaccacccctacgcttgccgtcaccacaccgcccacttcggaggagaaacaaagagaaaatttgagagcgtttatgctggagggaccatggatactccaaattcaggcaaagtgtttcagtattggcattgctgtgggtcggaagacccatttgatgtgggttgtactgcttctcctcactgttcttatgatgattgaatatctcaggcttgcattatgttcttgtgattgtacttattaattaatattttacatgaaatttctttccaatttgttattatttaaacacttctaaactatagtctcatgtttagatttagcctcctaaagtcctaatcactttttttttggaaatggaaatatcattccggccttttgcatgttcatgcatacagccatacagctcaaataatacatcatctcaacagtttgtgaatcaaac

SEQ ID NO: 94799 - DNA, 1183 bp, Zea Mays
ctgagctgaggatggcggcagcgtggaggccgcgtgacaacgatgacgacgacgaggacgatgcgggcggcggagccgatgatgatgatccgcacaggagtggccctaggcctacgcagacccgtgttgtaagaggatttgtggaccaagaaagtattcaacaaatattccactatctggaaccacttattagtagggtggtgcgagaggaaatccagaacatcttttcgcattgtcacaatgatcacatgccaatcaggtctcttcctctacgcatccgagaggcacatgtcttgccccatctgaagctagtctttgctaagcagcttaagcaaccaatcttcacaaacaacaaaatcgttgatatagcgaacaacccaattgaaatccatctcatggacacgacaaccaactctatgatcccaccagcagatactcaccttggaccatcatcagtagtaagactagaagtgctggttctgaacggtgattttcagtgtgaggaccgtgatgtgtggacggctgaccagtttaatgcagtggttctgaaggctagagaagggaagagaccattgctcgtgggctcactcaatgtccctatgaacaatcatggagtggctgtgattgatgatgtgttctttactgataattcgagctggataaggtgccggaagtttcgaattggtgtgcgcatcatgcccgcggatcatcttggatcaagagtcaaagaggcagtgagtgagagcttcaccgtcagagatcatcgtggtgaatcgtacaaaaaacactatcctcctttgatgactgacaacatatggaggctcaagaacattggaaaagatggaccaatcgataagaggttgcagtctgaggggattaggaacgtccaggacttcttgaagcttaacaccatagatcctgaaaaactccaagctctcgtcggcatgtcagataagcaatggaacacaacgctgaatcatgcaaaaacgtgtgacatgggacggaaatgttacactttcaagactgtagggtgtgacattacctttaaccccataggagaggtcttacgggcaagaattggagaccatacatttcctctgcaagaactgcacccatatcaactgttccatgtgaagcaactggccgctcaggcataccagatgtgggatcaactggaagaagt

SEQ ID NO: 94800 - DNA, 505 bp, Zea Mays
ttcctctcttacatactcctctgctgcttctcgctctactcctacgcaacgcctcgcaccgcgcctgttcatcgcagcatccgcgcccagacaccgtcatgacaccgctggagtctagtcgactctccttgtttgcgtcgttcctctgcatcttgcaccgctcgctggagttcgtcgccataatgtcgcgggagctctgcgtcctgcttactgctccagcatccttcctcccgcgatgccgtgattctggcaccgttgctgccttcccgctcatcagcaccatgacttcatcgtgcagctgattcccctgtctgagccccctgcgtcgcccgttgtcgctccctcgtcgttgccttgttgctgttaccctcactggcgcctgcacatcactggagttcactgtcacggtgtcactagaacctctacgcccagcttgtcgcgccgaccgtcatcgtcattctctgttccgctccgcgacgatttgttttctatccgcaatccgaag

SEQ ID NO: 94801 - DNA, 1189 bp, Zea Mays
gctactgccgatccgttccctcagcccctcacaccgcttacttgactcctcccgaacttccacatctctgctctgccttcccagtctcccatccctgaaaacctcacaaaaccctcgctcgctccccaccaccccgccgcgccgccgcctgtaccagctgcgtcaagatgagtcggcaccctgaggtgaagtgggctcagaggatcgacaaggtttacatcactgtacagttacctgacgcaaaggatgctaaggtcaatttggatccagatggtgtcttcacattctctggcagtgctggtacaaacttgtatgaattgaaactagatctgaatgacaaagtaaacgttgaggctagcaaaataagtgtgggggtcaggtccatattctgtatcgtagaaaaagctgaagccaaatggtggaagaaactcgttcgagatgatcaaagggcacctcactttgtgaaagttgattgggacaaatgggttgatgaagatgatgatggtgctgatatcaacatggatgggatggacttctcgaatttcggtggcatgggtggtatgggcggcatgggtggcatgggtgatatggctggtatgggtggtcttggtggcatgggtggtatgggtggtcttggtggcatgggcggtatgggaatggatgatttcgaagatgagagtgatgatgaagaagaagtgtcgaaacctcaagctgcggacaaggctgttgaggctgaggagacggagtcagcggaaaccaagattgaggcggctcagagcagttgaagatgcttatgatctaagctagattgtatcctcatgttaattctgctgaatcggaggacaaaccttacatttatggtgctggcaagtcccagtggcgtgccatgaaaatttacgttccgtcttttaactgggtatccgagtgtcgtgctcagcatattatggatattatttccgtaatgcttcctttggtcgccaatcatgtggtgaagagtttgttttactggattgctttatttgttttttggtcgccaatcgaatggtctggtcaaaaggactagtggcgacgtgattttgttatttggttctctacccagcaatacaactcccacggtaaagtgctacagaggagcaccttcaactgagcaccttcaactgtttctaatatttattcttccaatattgct

SEQ ID NO: 94802 - DNA, 1032 bp, Zea Mays
gctactgccgatccgttccctcagcccctcacaccgcttacttgactcctcccgaacttccacatctctgctctgccttcccagtctcccatccctgaaaacctcacaaaaccctcgctcgctccccaccaccccgccgcgccgccgcctgtaccagctgcgtcaagatgagtggcattgtcttctgtagtcggcaccctgaggtgaagtgggctcagaggatcgacaaggtttacatcactgtacagttacctgacgcaaaggatgctaaggtcaatttggatccagatggtgtcttcacattctctggcagtgctggtacaaacttgtatgaattgaaactagatctgaatgacaaagtaaacgttgaggctagcaaaataagtgtgggggtcaggtccatattctgtatcgtagaaaaagctgaagccaaatggtggaagaaactcgttcgagatgatcaaagggcacctcactttgtgaaagttgattgggacaaatgggttgatgaagatgatgatggtgctgatatcaacatggatgggatggacttctcgaatttcggtggcatgggtggtatgggcggcatgggtggcatgggtgatatggctggtatgggtggtcttggtggcatgggtggtatgggtggtcttggtggcatgggcggtatgggaatggatgatttcgaagatgagagtgatgatgaagaagtgtcgaaacctcaagctgcggacaaggctgttgaggctgaggagacggagtcagcggaaaccaagattgaggcggctcagagcagttgaagatgcttatgatctaagctagattgtatcctcatgttaattctgctgaatcggaggacaaaccttacatttatggtgctggcaagtcccagtggcgtgccatgaaaatttacgttccgtcttttaactgggtatccgagtgtcgtgctcagcatattatggatattatttccgtaatgcttcctttggtcgccaatcatgtggtgaagagtttgttttactggattgcttt

SEQ ID NO: 94803 - DNA, 1012 bp, Zea Mays
gctactgccgatccgttccctcagcccctcacaccgcttacttgactcctcccgaacttccacatctctgctctgccttcccagtctcccatccctgaaaacctcacaaaaccctcgctcgctccccaccaccccgccgcgccgccgcctgtaccagctgcgtcaagatgagtggcattgtcttctgtagtcggcaccctgaggtgaagtgggctcagaggatcgacaaggtttacatcactgtacagttacctgacgcaaaggatgctaaggtcaatttggatccagatggtgtcttcacattctctggcagtgctggtacaaacttgtatgaattgaaactagatctgaatgacaaagtaaacgttgaggctagcaaaataagtgtgggggtcaggtccatattctgtatcgtagaaaaagctgaagccaaatggtggaagaaactcgttcgagatgatcaaagggcacctcactttgtgaaagttgattgggacaaatgggttgatgaagatgatgatggtgctgatatcaacatggatgggatggacttctcgaatttcggtggcatgggtggtatgggcggcatgggtggcatgggtgatatggctggtatgggtggtcttggtggcatgggtggtatgggtggtcttggtggcatgggcggtatgggaatggatgatttcgaagatgagagtgatgatgaagaagaagtgtcgaaacctcaagctgcggacaaggctgttgaggctgaggagacggagtcagcggaaaccaagattgaggcggctcagagcagttgaagatgcttatgatctaagctagattgtatcctcatgttaattctgctgaatcggaggacaaaccttacatttatggtgctggcaagtcccagtggcgtgccatgaaaatttacgttccgtcttttaactgggtatccgagtgtcgtgctcagcatattatggatattatttccgtaatgcttcctttggtcgccaatcatgtggtgaag

SEQ ID NO: 94804 - DNA, 779 bp, Zea Mays
gctactgccgatccgttccctcagcccctcacaccgcttacttgactcctcccgaacttccacatctctgctctgccttcccagtctcccatccctgaaaacctcacaaaaccctcgctcgctccccaccaccccgccgcgccgccgcctgtaccagctgcgtcaagatgagtcggcaccctgaggtgaagtgggctcagaggatcgacaaggtttacatcactgtacagttacctgacgcaaaggatgctaaggtcaatttggatccagatggtgtcttcacattctctggcagtgctggtacaaacttgtatgaattgaaactagatctgaatgacaaagtaaacgttgaggctagcaaaataagtgtgggggtcaggtccatattctgtatcgtagaaaaagctgaagccaaatggtggaagaaactcgttcgagatgatcaaagggcacctcactttgtgaaagttgattgggacaaatgggttgatgaagatgatgatggtgctgatatcaacatggatgggatggacttctcggtaattaaatcttgaaccagttgattttctaatggactcttgacattgtggcaaactggtttgatatttttctttgtttttttttgtagaatttcggtggcatgggtggtatgggcggcatgggtggcatgggtgatatggctggtatgggtggtcttggtggcatgggtggtatgggtggtcttggtggcatgggcggtatgggaatggatgatttcgaagatgagagtgatgatgaag

SEQ ID NO: 94805 - DNA, 2367 bp, Zea Mays
ccccacatggcgccaccgccgctgcccctcttctccccgtccctaaaggccccgccgccgccgccatggctccacgggtcctctacccaaagccgcgactccgcacccccggtgcctccactccccgccgaggcaactccttccaagttccgcatcgacagccccaaaccggcaccggcaaggaaaaacaccaaaacagcagccaagcccctcactgccggagtccccgggggccgcacccaccgagcggtcctcggcatcatccggcgcgtccgctccctcgagctctccgatgctccgagtccgaattccgtccacaccagcaacagcggtgccgccgccgccgcattccaccttacgatcgagctgtccccgccgcgggaaccaggccaatatgtggttgagaaggagaagtcacgggctgttccgtgggcggctgctagggacgagggcctcaaggttgcgctgcggcgggagaagaagccgcgggagccgacgcgcgcggagaccgagctggagacccacgagctgcatcgcctgcggcggttggcgcgtgggataggcaggtgggcgcgggccaagaaggccggagtcaccgacgaggtagtcaaggaggtgcgaagggaatgggccagtggtgaggagctcgccgccgtgcgcatagtcgagccactccgccggtccatggatcgcgccagggaaattcttgagattaaaacaggaggcttagttgtgtggacaaaaggagacatgcattttgtctacagaggaagcaaatatcagcaaaacgcaaagcatagtcacacttttctaactaatgttcataaagatgatgcttttcaagaaaatgatcaaagcatttgtggccagaaggatgaagaacctgtcaagggtacactatatgagagagaagtcaatagactattggacactttgggccctcgatttgttgattggtggtgggacacaccattacctgttgatgctgatctcctcccagagtttgttccaggctttaagactccatataggctgtgccctcctggggtgagaccaacactagctgatgaggagctgacatacttgcgcaagcttgcacgccttttgccaacacattttgcccttggtagaaacacaagattgcagggtttggctgctgctatactgaagctttgggagaaaagccttatagcaaaaattgcagtgaaaataggtatccagaatacaaacaatgaacaaatggcatggaacctcaagcatcttacgggaggcactgttatattgagaaacaaggattttattattctatatagaggcaaggattttcttcctggtggagttgctcaaactgtcattcaacgagaagctcaggtacatgatgaacaggtgaaggaagaggaagcccgactgaaagcagttgactcacttcagatggttggtgaattatctgaagaaagttctttaggaactttcagggagtaccagggtttccatgctaagtttgtgcatgaaaatactgaaaactctaacaccatgattgaactagaggctgagaagtatagattggaaaaggaactgaaagaccatgagtggaagctttccgttctcaacaagaagattgaaagatctaaccaggcactggcaaagcttcacagttcttggagcccttcagagcagtctgctgatagagaacacttgacagaagaggaaaaaataatgttccgccggattggccgcaaaatggatgggcttgttctcctaggaaggcgtggtatctttgatggtgtaattgaagagattcatcagcactggaaacataaagaggttgtgaaagtaattacaaaacagaatcaaactcgacagatcatgtacgccgcgagtctgctcgaggttgagacaggtgggatattaatagcagtagaaaagctcacaaccagccatgccataatactttaccgtggaaaaaactatcgccgcccagcaaaatcatcatttagtaatctcctaacaaaaagagaagcgctccgaagatcaatcgaggtccaacgacgagggtcaatgaaatactttgttcgggagagacagaagtccattttggaattgaaaaggaaactgaggtatgtgacaaggcaaatcaggtatcgaaccccatgatcatgaagagtttggatagcatggttagtaaatgatagttagaatttgcaataatgactgcatccaatttttttccttaatatgggatagccgtgtaaactgtgaagcccaacatgaacaattctgaagtgtacagattatataatagtgtctgttgtacatatgtgacacttttgactttacccatatttcatgaaacaagagatttttttt

SEQ ID NO: 94806 - DNA, 2551 bp, Zea Mays
ccccacatggcgccaccgccgctgcccctcttctccccgtccctaaaggccccgccgccgccgccatggctccacgggtcctctacccaaagccgcgactccgcacccccggtgcctccactccccgccgaggcaactccttccaagttccgcatcgacagccccaaaccggcaccggcaaggaaaaacaccaaaacagcagccaagcccctcactgccggagtccccgggggccgcacccaccgagcggtcctcggcatcatccggcgcgtccgctccctcgagctctccgatgctccgagtccgaattccgtccacaccagcaacagcggtgccgccgccgccgcattccaccttacgatcgagctgtccccgccgcgggaaccaggccaatatgtggttgagaaggagaagtcacgggctgttccgtgggcggctgctagggacgagggcctcaaggttgcgctgcggcgggagaagaagccgcgggagccgacgcgcgcggagaccgagctggagacccacgagctgcatcgcctgcggcggttggcgcgtgggataggcaggtgggcgcgggccaagaaggccggagtcaccgacgaggtagtcaaggaggtgcgaagggaatgggccagtggtgaggagctcgccgccgtgcgcatagtcgagccactccgccggtccatggatcgcgccagggaaattcttgagattaaaacaggaggcttagttgtgtggacaaaaggagacatgcattttgtctacagaggaagcaaatatcagcaaaacgcaaagcatagtcacacttttctaactaatgttcataaaggttatctagtaaaacataatgttcatacaaccttacttaagtatgggagcattggtccagtgttaatcaacaattatggtgaagcagatgatgcttttcaagaaaatgatcaaagcatttgtggccagaaggatgaagaacctgtcaagggtacactatatgagagagaagtcaatagactattggacactttgggccctcgatttgttgattggtggtgggacacaccattacctgttgatgctgatctcctcccagagtttgttccaggctttaagactccatataggctgtgccctcctggggtgagaccaacactagctgatgaggagctgacatacttgcgcaagcttgcacgccttttgccaacacattttgcccttggtagaaacacaagattgcagggtttggctgctgctatactgaagctttgggagaaaagccttatagcaaaaattgcagtgaaaataggtatccagaatacaaacaatgaacaaatggcatggaacctcaagggaaaggcttacatcggtttatcccttactcagagcactgagtctgtccttttgttatttgtattttcttgtgtaacactgaagctcctcagtgcagcatcttacgggaggcactgttatattgagaaacaaggattttattattctatatagaggcaaggattttcttcctggtggagttgctcaaactgtcattcaacgagaagctcaggtacatgatgaacaggtgaaggaagaggaagcccgactgaaagcagttgactcacttcagatggttggtgaattatctgaagaaagttctttaggaactttcagggagtaccagggtttccatgctaagtttgtgcatgaaaatactgaaaactctaacaccatgattgaactagaggctgagaagtatagattggaaaaggaactgaaagaccatgagtggaagctttccgttctcaacaagaagattgaaagatctaaccaggcactggcaaagcttcacagttcttggagcccttcagagcagtctgctgatagagaacacttgacagaagaggaaaaaataatgttccgccggattggccgcaaaatggatgggcttgttctcctaggaaggcgtggtatctttgatggtgtaattgaagagattcatcagcactggaaacataaagaggttgtgaaagtaattacaaaacagaatcaaactcgacagatcatgtacgccgcgagtctgctcgaggttgagacaggtgggatattaatagcagtagaaaagctcacaaccagccatgccataatactttaccgtggaaaaaactatcgccgcccagcaaaatcatcatttagtaatctcctaacaaaaagagaagcgctccgaagatcaatcgaggtccaacgacgagggtcaatgaaatactttgttcgggagagacagaagtccattttggaattgaaaaggaaactgaggtatgtgacaaggcaaatcaggtatcgaaccccatgatcatgaagagtttggatagcatggttagtaaatgatagttagaatttgcaataatgactgcatccaatttttttccttaatatgggatagccgtgtaaactgtgaagcccaacatgaacaattctgaagtgtacagattatataatagtgtctgttgtacatatgtgacacttttgactttacccatatttcatgaaacaagagatttttttt

SEQ ID NO: 94807 - DNA, 404 bp, Zea Mays
cacccccactgatcccacacaatggatgttaccaaatacccttcccactaaacttatgcaacacaagaaatgaaataaagagagaaaatattgcaaaatccggcagcacctcccttgaaagaagcataacaaggggggaacatagagttcatacaggatataaaagacagataattcacgtagtataatcaaaatgcaaaagtagtaaagcacattcgtgaataattaaaaaaatgggtaactcagagctcaactaccatgaaaggctagaacataataattccctagacttgaccctccatgattaacaacattattaagcagtggttcctttattaaaggtgtagtggccgtgctgctacatctcttctttcccaaagcagaaatcaggtgcctacatcaga

SEQ ID NO: 94808 - DNA, 494 bp, Zea Mays
tggggcggaaccttctccattgcgtcttcccatcgcgaaggtcttgttcatgccgacagctagttcccgacagacttcctcggaggcggtcagcaccgacaacaaggaggctgcgcggggaggcaaggccggacgaccctcgccgccatgctacttgtccgccacgctacttgtcgtgcaggtagtctgctacttcttacacggtcgccgtcggtgttgggctctccgacggtgctgccgtcgacggtgcggactctctgcacaaccacaccaatgagctctcatccgccgtcatggacatgcttcacgatccccctggccatctgcttcacggttcctcgcctcgcggccacaacaagcggtggtggtggctggtgcgctctaggtgctcgacgaaaggtgtgtttgtagttcggcactttgtaccaatggaaagagagagaagtaaagaatatgcatgcgaagtcaaaaaaagtgaaatcgaaattcttttc

SEQ ID NO: 94809 - DNA, 1708 bp, Zea Mays
gaaacacaggcaaacgagaagatctgcaaccagagagtgagaccggatcggacggaaatggagagagcaacagcggaccctcacttcctgctgcttccatggcaaggagccatcagccacatcatccccatgaccgacatcggccgcctcctcgcctcccacggcgcggcggtcaccatcatcacgacgcccgccaacgcgctgctcgtgcagagccgcgtggaagacctcgccgcggcactgcaccgtccgcacgggcacggcgcggcagggacgatcacggtcaccgcgatcccgttcccagcggcggaggccggcctgcctgagggcagcgagaggctcgacctcctccggtccccagccgacgtgccacgcttcttccacgccaacagactgttcggcgaggcggtggcgcgctacttccgcggcgaggctctgccgccgcgccgccgcccgagctgcgtcgtcgccgggatgtgccacgcgtgggcgctcggcctagcgcgcgagcttcgcgcgccgtgctacatcttccacgggttcggcgcgttcgccctgctctgcgtcgagtacctctacaagcacaggccgcacgaggcggtttcgtcggcagacgagctcttcagcatcccggccctgccggcgtttgactgcagggtctcgcgcgcgcagctgccgcagcatttcgcgccatccacttccatgggcggcgggacgctacaggagatacgggagttcgacgtggcagtggacggcgtcgtggtgaacagcttcgaggagctcgagcacggctcctgcgagcttctcgcggcagcgaccggcaagaccgtcgtcgccgtcggccccgtctcgctgtgccatcaacatcccatgacaatgacagacgacggcggcggcggcgacaggcgggtcctggagtggctggacaccaaggagaccaagtctgtggtgtacgtcagcttcggcagtgccgggtgcatgccacccgcgcaggtcgtgcagctaggcatggctctagcgtcgtgcgcctggcctgttgtctgggtgctcaagggcgccgactccatgcccgacgacgtcaaggagtggttgcgtgagagcttggacgacaagcagtgcttgctggtgcgaggctgggctccccaggtcgccatccttgctcaccgcgccgtcggcggcttcctcacgcactgcgggtggggctcgactctggaggccattgccgccggcatgcccatggccacctggccgctcttcgccgagcagtttatcaatgaaaggctcgtcgtggacctgcttggtgttggggtgtctgtaggcgtgacaaagccaacagaaaacatcctcactgccagcaagctcggagcggatgtcgaggcggaggtgggtatggaacaagtggcgaaggccttggagaggctgatggatcagggtagccaaggggaacacaggaggaggaaggctcaggagctcaaggccaaggcaactggagcattgcaggatggcggatcatcctacatgaatttggagaagctgatagtccaatcttcggtttcgagaccgaatacatgtggcgtttaattagtacagtattatatttgctgaataacgtacatagctggtgctcatccatgtcatgagtgactcacaaataatcaaattcaatttgtttgatgtcttcgtgtgaacatatgattggcatttaatt

SEQ ID NO: 94810 - DNA, 3580 bp, Zea Mays
ctttaacaagttgcagcaagaaacttctttcgaggagcgaaacatgcacctcgacattggtggcggcatttattttgttcttgatttgcctttcccaatagctacgatgcacactactattcaactccgcacaccatttctgctcagtgagcataattcacacaccaataatcttgctcctagcagcggccaaaggcagatccatggaggttatgactggggcactaccgagcctcatccccaagcttgctaatctagtcgctggtgagtacaatctgcaaaagggtgtcaaaggggatatcatgttcctccaagaagagcttgagagcatgagggatgcactcgaggagatctccaaggttccagcagaccagcttcccaacagagataagatttgggctaggaacgtgagagagctctcctacgacatagaggttagtattgacgcattcatggtgcagtccaagggtaggaagctggttaaacaatatggtctccagaaagtcattggtatgtgtctcgactggttgttgcagcccaagattcgccataaaatggctactgaaattaggacgatcaaaaggcgcatcgttgaggtgcacgaacgacatatcaggtatgaaattaatcttggtcctgataagcttggcaatgctgctgtagatccccgaatatttggtcagtacacagagctgaaagagcttgttggcatcgacgagacaagagatgagttaatcgatattatgatggaagggaatgtagtccccatgaagcaaggcaagataatttccattgttggatttggggggcttggaaaaacaactcttgctaatgctgtttatgagaagataagagcattgttcgattgctgtgcatttgtttcagtgtctcaaactcctgacttgaagaaattattcaagagtttgctctatgatcttggcaagtacatcaatgaagaatcgttggatgagagacagctcatcaatgtactcagagaattccttcaagagagaaggtatttaattgttattgatgacatatgggacatctcagtctggaaaatgattagatgtgctttaccagacaatgatatcgggtacattattgttacaaccacacgcatttccgatgttgctgaaaaagttggtggtgcttataagctaaaacctctttcattgaacaactctcgagaattaatgtataagataatatttgggaacgaaaatagagaaaacactaaagacaaagaaatatgtttagatgaggagcttgcagaagtatcaaataaaatactaaagaaatgtgccggtgtgcccctagctattattacgatggctagtgtactagcttgtaaagcaagaaatgaaatggagtggtatgaggtgtacaactctattggtgttggcattgagaacaatctagatgtggggaatatgagaaagattttgtcattcagctattacgatatggcatcccatctcaagacatgtttattatacttaagtatgtttccagaagattataaaattgagaaagatcgtttgatatggatgtggatagctgaaggctttgtccaatatgtgaaacaagggaagagcctatttgagcatggagagagttacttcaatgaactcataaacagaggtatgatccaacccatatataaccaagctggcatgatatatgaatgtcgtgtgcatgatatggtgcttggtcttatatgttccttgtcaaatggagaaaattttgttacaacattaaatggtttgggtcacggatctccatcaaatatgattaggagattatcagttcaaaatggcaatgagagtcaagctatgactctgcaaaccagaaacttgcagcaagtaaggtcggttgttgcctttccggatgccaccgctagtgtagttacggtcttgaggagcttccgagttctacgtgtactagatttacaagattgtgacctttcacaatgttgcagcctgaagtaccttgggaatctatttcacttgaggtatctaggactatgtaacacaagtattacacagctccctgaagaaattgtaaacttgcaacttctacaaatactggatgtatggaacaataaaatgtattgcctaccctcaactattgtgcagctgagatatttgatgtgcctttacattgatggttttactagagtgccaaacgggattgggagcctaacaagccttgaagaactcacatttctaggcatttatgactccactgtggacattatagaagagctgggccagctaacggagctacgggtactgcatatcgttctttttggtgaatggaacgacaagctggtggagtgcctgcacaagctgaaaaagttgaaatatctatatatcaaggaccgcagtggtcaacttaacattggtggtttggatgcctgggtagcccctccaaatctccaaatattgaatacgcgatcgggttgctggttcaccacactgtcagcatcagcatggatgaatccatctcttcttcaggacctctccttatctaccaccgtgagggagttgcagcaggatgacattataattcttgggagtttgccagctctccgctatctaaatctgatgattgttggtgaggatttgggagttcacaatgaaatccatggggaatgcattgttggtgctggtttgttcccatccctagtatactgccagctctggggaaatgtggcgcctatagtgtttcagcgaggagccatgccacggctcagaacccttgactttcggttatctgttcaagaggtgagaggaatcaacggcagggatggtggtatcgacttgggcctcaggaacctgccatcactccagaaggtttgggttcatttggaccctgagggcgctaacaaggcagaggtgaaggaactggaggctgagttgacgcgtgccatcaaaattcatccaaatcatcctcagctgtatggaattcaggatgaagatgcagatgatgaatgatgcactggagaaaagattaccaattatgcagaagctagtgcactttcaactttcatggcactggtctcaaggattgtctgattcagatggattacttctgtttctgtctcagattcagaatgtgatgtccaccccaatcatccaacccttaaggaacatggtgtcatggtgatgaagatgtaaggagccaacttgtgatcatccgctggaaaatggaagagcaatctggtggcctgatggactagcaaacctggaagtaagtacaaacaaaacacgagacagagacacagagtcgggcctaagatttagcaaaactgatgctgggttgggtatgtatgccctgtttggtgtgctctgatcagaggatgacatttacagaattaaagcgtagtgtggcaatgtggcagcctggggaaacctgcaactggcgatctggaggtctggagagaacaaaacgccagtgacagttggggcttaggcttggcaagcctaatattgcaatagcacatatgaataacggttgtttgttgcgactggaagtcctgtttggtttttttacatagtgtttgctgttttcactc

SEQ ID NO: 94811 - DNA, 108 bp, Zea Mays
ccccacatgtcattgactcatgtggacccacatgtaagtgagatagtaatggtatggatccaaagtggtgatcttttaatggtatggatccaaatttcccttaattaa

SEQ ID NO: 94812 - DNA, 511 bp, Zea Mays
aagcaacaccattatgaatatgaagtgtcccactgccaaggcgctttctgtggccaccctctcagctctgctcatcctcctcttctttgtcctgcgatgtggctcttctgcgtcgccatcgccgcagttgtctattgcgaggaggagcagaaggcttctgtggacgccatgccgtgatgccaactcttgctcgacgcctgtgagcgggttcaggcagttcttcaaggcgccagcgacagtgttcgagagcttgaagaagatgcccaagagcaggtccaatccatcacataattaattaggccgaggtcgtcgatgttcttctcactctagcttacttcgttcttttgtagtggatcacttcgcctgctggtctatttagttcaggataggcaccagcatgtacattattgtggggggcaaggctagctagcttaactgcagctcggcatgtatgtacgtttttttgaagcaaaatcgatgtctagatctgtgtagtatatgcttattcaca

SEQ ID NO: 94813 - DNA, 1253 bp, Zea Mays
ctcagttgcgttgtgggtgatccactcgttcttccctccacgcgccaaaaccccagccacggccatctcctcctccactcctcccgttcgtccacatccaaaagcttcccaggagaaaaaaagaacagttatttgcagcgggaaccctaacaaatcactcgctacaagcgagcgagggagagatgtctctccagtacgtggcgcccccggtccgagcactcgccgtgctaccggcgccaggcccccctcgccgccggacaagccatgtgtccctataccttccgagccggcggccagggctcgccgtcgccccggtccgtgcggcggagtcgtcctctccgcccaccgtgcccgcctccgcggccggcaaggctgtcgtcccggacgacgagttctccctcgccaaggtctctttcggtgtgatcgggctggggcttgggctctcgctcctgtcgtacggattcggatcgtatttcaacctgcttcctggttcggaatggtcagctttgctgctaacctacgggtttcctctcacaatcatcggcatggccttaaagtatgcagaactgaaaccagtaccctgcataacctacgctgatgcctttgctctaagagaaaagtgtgctacccctattctgaagcaggtcaggagtgatgttacacgttttagatatggtgatgaacaacacttggatgaagcactgcagagaatctttcaatatggtttgggtgggggcattcctagacgtaatgcacctatattacaaaagattcgagaggaagtaactgacgatgggaaatacagtttagtactcgtatttgaagccaaagcattggagctatctgattttgagaagagacaggctaaattcacctccttttttggtcctgggattaaagcagaaatcgatgcaggaaaaggtggcggtgatctatatgaagttcgtctaatctcagacactgtttagaaacaatctttgtgaattttctctaatacaaaactaaacttttattttttttctttgatccgctgattttgcatatatgatgttaatagcatcagattttacccttgtttctgttgtgccttctgagcttccatgtatattggctgttgatccttggccatgacctgacaccttcatacactccatggacatgtgtgaaggaaaagttgttgtaatattagatgtaaatgaactttgattgggaacgctgtccatatagttgaaaggtatttagctgtttttttc

SEQ ID NO: 94814 - DNA, 1765 bp, Zea Mays
tctctccttgggtgaaaactctgctgcgcaagcaaaagcggaacacgaaagcggggaggaacgacagcagccatcagaagaaagctccaatctttctcgccctctcgcggttcggaggagggacccgggcgcaaagactctaaagcgcaggtgagctccgggcggggaagatgttccccagcctgatccaccacgctagccacggccgacccgacgtcgccgtcgccgaggacgcaccacgcagtggctgcgggttagggctgcccgggcacggcggcgggcccagcgtggtgctcacggccgatcccaagcctaggctccgctggacggccgacctccacgaccgcttcgtcgatgccgtcgcccagctcggcgggcctgataaagcaacaccgaaagctatcatgaggacaatgggagtgaagggcctcaccctttttcacttgaaaagccatcttcagaaatacagattgggaagacagtctggaaaagagttaacggagcaatcaaaagatgcttcttaccttatggaagctcaaagtggaacaactttgtctcctagaggttctactccagatgtgaaagagagtcaagaagttaaagaagcactcagagcacaaatggaagtgcaacgaagattgcacgaacaagtggaggtccagaagcatatgcagatccgaatggaggcgaaccagaagtacatcgacacgatactagataaggcgttcaagatagtatctgagcaactgagtggcttcagcatatctgaccaagacctaccgattctcacctctgctagggccatgcttagccctgcagatcacttgagttcgtctgtcttcccccagctctccgtcagctccgttagccttcacaatcctggtcctggaggagggaaaggccttccgcatgttgccgacagccacgtgttctcccagaggccacctgaacaattcaagcgcaaatcacgttgagaagcattgctagctcgacgcagatgcatgacctgatcaagggcacactggaaaatcagaggaatttcgtctgacatgtgcacggtgcaatcgttcacccatcctcccgtagcacatctgtgaaaatcaaggttatcttggtctatttcggtacatctagactgacctttattaatatctaatgtaatgcctaagtggactagataagtaattcgcttgatgtaaactgcccagctgtaggatccagttttaaagtcctgttccacgcacttaaaacttaggggccgtctctcgggcggcttcagcagctctggctctttgtcggatccctaccaaaggccatgtcccagaacagcttctgagcaggagctcatatacggctggaagccggagcctaagggggcgtttggttacttgtatgggtgagcctggctcgtatctagtgagcctggctcagactggactggctgagtgcatgcagtatagcgtgtttggttgtgtgtatgtggccagtctggttcacaagagatgtttggttgcttgcatgagtacatggtgcatgagttaaaaaaatttaaaaaatctattaatagacactaattatatggtaaattgcttaatagatactaattacatgttaatatacactaattatatattaatcttaatcacgtaatttttttatttgaaatatatatagtatgagtggtctagtttcgttcgcaaaaatgtcaggaacgcggatatgaaatcggttcggtgattaaatcttttaattagacgatataatg

SEQ ID NO: 94815 - DNA, 1654 bp, Zea Mays
acgagctggtcatcgaggggcggagagatgtcatgtggggccaaacatactctcggcagcagcgcgccagggacatccggagggcggcgtcaagtgcaccagagggcgtggccacccccacatgatgcgatggcggttaggattagggctagatggcagctagtctttagccttaggattaggaggtttgttagcaggttattaggaggtttgttagtaggttgttaaacagatcggatcagccaagtttgttagcaggttgttaggaggtttgttagtaggttgtttagccatatcggatcaatccctaggatctaggagcagttatctctagggttgttagccggtgggcttatatattagtttgtaaccaggaaaacagaaaatcaacaaagaactatttcctaatctctctttctcttccccaaaccggccgggtgtgctgaggggcaaaaccttgcctccccccaactacggatcgcggctacgaactccggagccgaggtcctactaccctagggcttaacgcccttgacagtagacttctctgcagaccttattaagcaacaccgaaagctatcatgaggacaatgggagtgaagggcctcaccctttttcacttgaaaagccatcttcagaaatacagattgggaagacagtctggaaaagagttaacggagcaatcaaaagatgcttcttaccttatggaagctcaaagtggaacaactttgtctcctagaggttctactccagatgtgaaagagagtcaagaagttaaagaagcactcagagcacaaatggaagtgcaacgaagattgcacgaacaagtggaggtccagaagcatatgcagatccgaatggaggcgaaccagaagtacatcgacacgatactagataaggcgttcaagatagtatctgagcaactgagtggcttcagcatatctgaccaagacctaccgattctcacctctgctagggccatgcttagccctgcagatcacttgagttcgtctgtcttcccccagctctccgtcagctccgttagccttcacaatcctggtcctggaggagggaaaggccttccgcatgttgccgacagccacgtgttctcccagaggccacctgaacaattcaagcgcaaatcacgttgagaagcattgctagctcgacgcagatgcatgacctgatcaagggcacactggaaaatcagaggaatttcgtctgacatgtgcacggtgcaatcgttcacccatcctcccgtagcacatctgtgaaaatcaaggttatcttggtctatttcggtacatctagactgacctttattaatatctaatgtaatgcctaagtggactagataagtaattcgcttgatgtaaactgcccagctgtaggatccagttttaaagtcctgttccacgcacttaaaacttaggggccgtctctcgggcggcttcagcagctctggctctttgtcggatccctaccaaaggccatgtcccagaacagcttctgagcaggagctcatatacggctggaagccggagcctaagggggcgtttggttacttgtatgggtgagcctggctcgtatctagtgagcctggctcagactggactggctgagtgcatgcagtatagcgtgtttggttgtgtgt

SEQ ID NO: 94816 - DNA, 673 bp, Zea Mays
tgatcgggaatcctttcatctgcttccgagtagtttcagattaaaaagaaaagaaaaaaagcttttcatttaagaagcaggtcccttcctaacattggcatgcccaacgatgatgtggtcccaggttaggaccatggtgaagccagggtgctcccgggagatcctgaaggcggcgatcagttccatggtgtcggtgacggatgtgctgactgtgatgtcccaccccctcaacgccgagctgcccctctaccatttcaagtgagcgagggcatcagtctggttgttattcctagagtgtttttgaaacagcagaagattctgcttcatggctgccggtcttctttttttttaatttgggtgagaattaagcaatgggttgtactaataaacactgaaacagtacttgatactgaactgagtcgcgtgctagttgtattattggtggcagtattccagttttcaagaggtctctagaatatccaagattgataacactcatctttcagcctagcaatatagtagtagttctttctttacttactattaatgcactttctctcctcgcaaagttaagaattgcccaaccacctcttcttcctcgctgccctccaaggtggccaagagccaacagatcgatgacagaaactacaaattaaaaacaaacaaataaaaa

SEQ ID NO: 94817 - DNA, 2332 bp, Zea Mays
aatcgaaaccaacagtgaatcagccggcgccgcagcatgcctgtacctctcggctctcgctcttatccccacccacctcgctttctcccctctacaagaaagcgaccaccgctgtgaatcagcagagctgcagtgagagcaagtgagaggatcagaggaggcatccgtgaccaaagatcgagtagccaagaagaagagagatgaacgccgacttcggcgcgcccaaggagctcgcgggaggcctgcagcagcggcgggccctgtaccagccccgcctcccgccatgcctccagggaccgacggtaagggcggagtacggtgacgcgaccacaaccatcgatcccacctgtgcccaagccgtcgcgcaggccttcccgcacacctttggccagccgctcgtcagcttcgtcgcgccggccgccggcgccggcgccgttgaggagcgccacccgatcagggtgggcgtggtgttctctgggaggcagtcgccgggagggcacaacgtcgtctggggcctccatgacgcacttaaagcctacaatcctcagagcttgctctacggattcgtcggtggcacggagggactgtttgcaaacaagacgttggagatcacagacgatgttcttgcttcctataagaaccaaggtggtttcgatttgctcggtaggagtatcgatcagatccgcactactaagcaagtgaatgctgcaatgacaacatgccacagtctgaacttggatgggttggtcatcattggaggtgtgacctccaattcagatgctgcacagcttgcggagacccttattcagaataactgtaagaccaaggttgttggtgtgccagtttcattgaatggtgacctcaagaaccagtttgttgaaacaacagttggatttgatacagtatgtaaggttaattcacagcttgtaagcaatgtttgtcttgatgcgatctcagctggaaagtactattattttgttcgtctgatgggacgaaaagcatctcatgttgcctttgaatgtgcacttcagtcacacccaaacatgctcatcttaggcgaggaggtagcattgtcaaaactcacactgatggaaattataagcaagatatgtgatggagtacaagcaagggcagaattagggaaatatcatggtgtgcttgttattcccgaaggacttatagaaagcattccagaaatgtatgctcttattcaggaaatcaatatccttcacaacagtaatgttcctgtggctgagatgtcatcacaactgtctccgtgggcagctgctctgttccagttcttgccacccttcatcaggagagagctgctgctccaccaagaatcagataactctgcgcagttgtcccaaattgacacggagcaactgctggcccatctagtagaaacagaaatgataaagagaacgaaagaaggaaggtacaagggaaggaagttcagttcagtatgtcatttctttggatatcaggctcgaggatctacaccatcaaatttcgactgtgactatgcttatgctcttggacgtatctccctgcatatgattgcagttggattgactggctacatggcaactgtggctaatctgaaagaccctgttgacaaatggagatgtgctgctgctcctttaactgcgatgatgagtgtgaagaggcatttacgtggccctggagcaatccctatagggaggccttccattcacccttctccaattgacctgaaagggaaggcttatgagttgctgcgagagaaggcttcaagcttcctccttgacgacttctacaggactccaggaggcattcagttcgaagggcctggttcagatgcaaagcccatcacgctgaccattgagaaccaggactacatgggtgacattgagatactgaaagagtaccttggcaaggttaggaccatggtgaagccagggtgctcccgggagatcctgaaggcggcgatcagttccatggtgtcggtgacggatgtgctgactgtgatgtcccaccccctcaacgccgagctgcccctctaccatttcaagtgagcgagggcatcagtctggttgttattcctagagtgtttttgaaacagcagaagattctgcttcatggctgccggtcttctttttttttaatttgggtgagaattaagcaatgggttgtactaataaacactgaaacagtacttgatactgaactgagtcgcgtgctagttgtattattggtggcagtattccagttttcaagaggtctctagaatatccaagattgataacactcatctttcagcctagcaatatagtagtagttctttctttac

SEQ ID NO: 94818 - DNA, 2430 bp, Zea Mays
aatcgaaaccaacagtgaatcagccggcgccgcagcatgcctgtacctctcggctctcgctcttatccccacccacctcgctttctcccctctacaagaaagcgaccaccgctgtgaatcagcagagctgcagtgagagcaagtgagaggatcagaggaggcatccgtgaccaaagatcgagtagccaagaagaagagagatgaacgccgacttcggcgcgcccaaggagctcgcgggaggcctgcagcagcggcgggccctgtaccagccccgcctcccgccatgcctccagggaccgacggtaagggcggagtacggtgacgcgaccacaaccatcgatcccacctgtgcccaagccgtcgcgcaggccttcccgcacacctttggccagccgctcgtcagcttcgtcgcgccggccgccggcgccggcgccgttgaggagcgccacccgatcagggtgggcgtggtgttctctgggaggcagtcgccgggagggcacaacgtcgtctggggcctccatgacgcacttaaagcctacaatcctcagagcttgctctacggattcgtcggtggcacggagggactgtttgcaaacaagacgttggagatcacagacgatgttcttgcttcctataagaaccaaggtggtttcgatttgctcggtaggagtatcgatcagatccgcactactaagcaagtgaatgctgcaatgacaacatgccacagtctgaacttggatgggttggtcatcattggaggtgtgacctccaattcagatgctgcacagcttgcggagacccttattcagaataactgtaagaccaaggttgttggtgtgccagtttcattgaatggtgacctcaagaaccagtttgttgaaacaacagttggatttgatacagtatgtaaggttaattcacagcttgtaagcaatgtttgtcttgatgcgatctcagctggaaagtactattattttgttcgtctgatgggacgaaaagcatctcatgttgcctttgaatgtgcacttcagtcacacccaaacatgctcatcttaggcgaggaggtagcattgtcaaaactcacactgatggaaattataagcaagatatgtgatggagtacaagcaagggcagaattagggaaatatcatggtgtgcttgttattcccgaaggacttatagaaagcattccagaaatgtatgctcttattcaggaaatcaatatccttcacaacagtaatgttcctgtggctgagatgtcatcacaactgtctccgtgggcagctgctctgttccagttcttgccacccttcatcaggagagagctgctgctccaccaagaatcagataactctgcgcagttgtcccaaattgacacggagcaactgctggcccatctagtagaaacagaaatgataaagagaacgaaagaaggaaggtacaagggaaggaagttcagttcagtatgtcatttctttggatatcaggctcgaggatctacaccatcaaatttcgactgtgactatgcttatgctcttggacgtatctccctgcatatgattgcagttggattgactggctacatggcaactgtggctaatctgaaagaccctgttgacaaatggagatgtgctgctgctcctttaactgtaataagatgtcactgaccatgccttcaagatcagatgctgaaaggttacttatctatttatgttgacctagttgcacaatctgttgtctctaccaggcgatgatgagtgtgaagaggcatttacgtggccctggagcaatccctatagggaggccttccattcacccttctccaattgacctgaaagggaaggcttatgagttgctgcgagagaaggcttcaagcttcctccttgacgacttctacaggactccaggaggcattcagttcgaagggcctggttcagatgcaaagcccatcacgctgaccattgagaaccaggactacatgggtgacattgagatactgaaagagtaccttggcaaggttaggaccatggtgaagccagggtgctcccgggagatcctgaaggcggcgatcagttccatggtgtcggtgacggatgtgctgactgtgatgtcccaccccctcaacgccgagctgcccctctaccatttcaagtgagcgagggcatcagtctggttgttattcctagagtgtttttgaaacagcagaagattctgcttcatggctgccggtcttctttttttttaatttgggtgagaattaagcaatgggttgtactaataaacactgaaacagtacttgatactgaactgagtcgcgtgctagttgtattattggtggcagtattccagttttcaagaggtctctagaatatccaagattgataacactcatctttcagcctagcaatatagtagtagttctttctttac

SEQ ID NO: 94819 - DNA, 188 bp, Zea Mays
caaaagatagacatctcagcccaccaaactaaacagttcaactaccatgaaagattagaatgtagtaattccctagacttgacccttcctgtttaacatcattaataaacagttattcctttatttaaaagtgtggtggccgtgatgctacatcccttctttcccaaagcaaagatcaggtgcctgca

SEQ ID NO: 94820 - DNA, 555 bp, Zea Mays
atggagtgggcgtcagtggagtacacagccgcagcgctggtgtgcgccgcggcggcgagcgtggtcgcgctcgcgcacatgtaccgccacctcctccactacgccgagcccatctaccagcgattcatcgtccgcatcatattcatggtcccggtaaagctctccgcccgccgctcacacccacaacaaatcctcgcggccaagggcgccctcgcgccagatttgtcgcccgccttcgctgtagcttttccgtattgggtatatgctatgatgtcattcctttcccttatcctccctgacaacgcagtatattttaattctattcgagagatgtctgggatttccatctggttcttcaacaacttggaactctcccttatggtgaggattgtaatccagccattgctggaaaagatgtttgaatatttagcacctgctggggtggcctcaatgataccctacttagcaaaggttgtgacagacatgatacctctggcctcgaagcacctagctggactgattgctgattcatggggacaatataatatgagctaa

SEQ ID NO: 94821 - DNA, 1441 bp, Zea Mays
cacaaatgctggacagctcaacgagtcacttttgccgtactaccgggccagcgccggagcgcaatacccggagcccggcggccttcccacgttacccggcaccgccgtcggctgctgctgctcccgcaaagcccgaatgcctgcaccgccggccgcaccgccggtgccaccggccgctccctggcgtcggcacgctcccacggcggcctcctctactcccagaaccgtcctgctcctcctaccgatcctcctgctgctcctcttcgtgctctccaaagcgacggatctaaccttctccaccaccaccacctcctcctcctcctcccgccatgttccagtcaacctccgctcctttgactgctacgcctcgccgcaggcttccccgatggtcgccaaccttgtggagggcgtgccctaccccttcttctactcgctcgccgacatgggtaccctccccgaccacccccacaagaacatcgctcgtctcctcaagggcaagcgcttccgcaagcccgacatctccgagaccatccaggagttgctcggcggggaggtggggaagggggaaccatccggtggtttggtggtggacgtgggtgccaatgttgggatggcatcattcgcggccgccgtgatggggttccgggtgcttgcattcgagcccgtgttggagaacctgcagcggatatgtgatggggtctacctcaaccgggtgcaggaccgcgttgtggtgtatcacgctgcagcttctgatcgagttgggactactacgatgcacaaggtgattggccgacttgacaacagtgctatatctgcaattggtgcaaagttagcattcaagtctaatgcagaagttgctgttgaagtttccacaattccattggatgaagttgttccagatactgagagagttcttctgatcaaagttgatgttcaaggctgggaataccatgtactgagaggtgcatcaaaattgctttcaaggaggaaaggtgaagctccctaccttatatatgaagaagatgaacacctgctgcaggctagcaacagcagtgcacaggagataagggcatttctcactagtgttggttacaatcactgtaccaggcatggaaatgatgctcactgtacaaaggaatagacaaatttgtttctgaccggtgctcttatgctcctaagcttgggctgtatatgaactgcgaagaatcaattgagttctggcagttttgcccctttgttactcaccaaggccagatgtttagacatgtcatgtgcccaatagttgtgttgcatcgagttccatggtatccattgcctttaacttttaggttagtttgttggttgcgggaccttttgttattactgtctctggtagggaaaagatgccgttcctactggacttaccgacttagcaattgagttaactgaccatttgctgtca

SEQ ID NO: 94822 - DNA, 116 bp, Zea Mays
ggttactgggcggtatgcagtgacctcattaatgttgatgtattcttagttctaatgcatccttggagttccatgcacccttcttagaaaatttctaaaagaacaaataaaaaaaa

SEQ ID NO: 94823 - DNA, 897 bp, Zea Mays
aaccaaacaagcgtcgtcattcatttcctcactcagcgaggctaggcaagctggccgtcaagctcaggccgtcaggcgatacaactacaagcctacagtgcctacccctccgccgcctagagagagagaggccagcgatgacgaagacgacgccgccggcgttcgtgtaccggatcagcacggccgacgagtgggcggagtttcagcgcacgggcgccacccttggaggcgacctcgacagctccaccggctgcatccatctcagcgacctaaaccaggtgaagatgactttaaaaaactttttccttggaaggaatgatctgtacctactgcaaattgatactttcaagcttgcagatgggttaatttatgagctaagtgatggtgataactattttcctcatttctatggccctggtcggagctttgcacctcttcaactagatactgttgtgaaggcagacaaaatagagtttgcagacaatgattttacctgtggtctacttgatggaagttatctcccaagctgatctgtagagtctcaccttcatcttagcaatgctcatttgagttctctgccaaaggttagtgtttaatatgtctatatatgcagaagtcggtcatatatttgagtgacagattgtaccatccagaattttccacagttattcatatactttctggtggaagataaaatatgaaactgtatgtaattgacgcatcatgatggatacggatgttcattatgctatagcaagtagtacaatgtgtacttgctgtcatgttacatccagtgcctggttgcataaacaataagcactatatgttaccttgggtaacatacttgtaataatgatatgaattcaaaaggagaatgccacttcaattgtttttcca

SEQ ID NO: 94824 - DNA, 781 bp, Zea Mays
aaccaaacaagcgtcgtcattcatttcctcactcagcgaggctaggcaagctggccgtcaagctcaggccgtcaggcgatacaactacaagcctacagtgcctacccctccgccgcctagagagagagaggccagcgatgacgaagacgacgccgccggcgttcgtgtaccggatcagcacggccgacgagtgggcggagtttcagcgcacgggcgccacccttggaggcgacctcgacagctccaccggctgcatccatctcagcgacctaaaccaggtgaagatgactttaaaaaactttttccttggaaggaatgatctgtacctactgcaaattgatactttcaagatactgttgtgaaggcagacaaaatagagtttgcagacaatgattttacctgtggtctacttgatggaagttatctcccaagctgatctgtagagtctcaccttcatcttagcaatgctcatttgagttctctgccaaaggttagtgtttaatatgtctatatatgcagaagtcggtcatatatttgagtgacagattgtaccatccagaattttccacagttattcatatactttctggtggaagataaaatatgaaactgtatgtaattgacgcatcatgatggatacggatgttcattatgctatagcaagtagtacaatgtgtacttgctgtcatgttacatccagtgcctggttgcataaacaataagcactatatgttaccttgggtaacatacttgtaataatgatatgaattcaaaaggagaa

SEQ ID NO: 94825 - DNA, 1863 bp, Zea Mays
gctagtttattatctacactacttagataaaaactatggctgccagtgccatgggtcgggttcgggtccgtccgcgtcctccgtagtaggtagcgtaccccactcgtacacggtacacagtacactcatcaccctcccctaagaacccggaaatccatggccaatcacatgatggcatcatgcggccatgacagcccggggagaaacgacgctcgcaggcgctgcccgagatctcgcggaccgatggcaatggcatccatccagtcagtgatccactctcactctcacgccacgccacgcctcggctctgttcgatctatttctcctactagtcctgttattattagtatataatagcatatcccgcggacaccggccacccgatcaagcactggtgctcatgtgcgcagcgcgaggctcgagccgccaaagcagggaagcagagagcaagcttaataagcaaccgcgtttcccagattccttggcactgcagcagctgcgtccaagcttgctaggtggtggcggcagcagcagcctgcgcctatgtacactgcaatggcagcgcgaccgctgcttcttccccctccggtcctcctcctcctggtggtgctggctgcttcgtcggccgcccatggctacggcgcctacggctacggcgacgctgctgctgagctcagggtcgggttctacaaggactcgtgcccggacgccgaggccgtcgtccgcaggatcgtcgccaaggccgtccaagaggaccccacggccaacgcgccgctgctcaggctccacttccacgactgcttcgtccggggctgcgacggctccgtgctcgtcaactccaccagggggaacacggcggagaaggacgccaagcccaaccacacgctggacgccttcgacgtcatcgacgacatcaaggaggcgctggagaagcgctgcccggggaccgtctcctgcgccgacatcctcgccatcgccgccagggacgccgtctcgctggccaccaaggtggtgaccaagggcggctggagcagggacggcaacctctaccaggtggagaccggcaggcgggacggccgcgtgtccagagccaaggaggccgtcaagaacttgccggactccatggatggcatccgcaagctcatcaggaggttcgcttccaagaacctcagcgtcaaggatctcgctgttctctcaggcgcccacgcgatcggcaaatcgcactgcccgtcgatcgccaagcggctgcgcaacttcacggcgcaccgggacagcgacccgaccctggacggcgcgtacgcggcggagctgaggcggcagtgccggaggcgcagggacaacacgacggagctggagatggtgccggggagctccaccgcgttcggcacggcctactacggcctggtcgcggagcggagggcgctcttccactccgacgaggcgctgctcaggaacggggagaccagggcgctcgtctaccgctatagggacgcgccgtccgaggcggcgttcctcgcggacttcggggcgtccatgctcaacatgggcagggtgggcgtgctcaccggcgcccagggggagatcaggaagaggtgcgcctttgtcaactagctagcgatatgctggattgtactttgtaccctctcgccttaattaaaatttaaatgctggagtttcacctagtctcgagagaatcttccatttttactactacatagataatagatttaggaacgtttctaggttttatatgattgtgaaacgtttgggctgagctcatctgtaactgtaaactctgatggaatgcgataacgtgttccatattgtgtgaaccggctttgacttgggaaagggaaatggata

SEQ ID NO: 94826 - DNA, 2137 bp, Zea Mays
gcaaagctttgctctggcagctgcttcaaatgcttgcattgtactccaatacaatgggtacaacagctcccgtcgccggagctgtcgtcgtcagggtcaagcaaagcatgctgctcgtcctcgttatcgtcaccagcgtactggtcgtcggccccacggccgaccgtggagccttcgccagcccgccgccggaacccgtgcagtgctcgtccggcggcggcacggccaactgcaccgtgtccagcgcctatggcgtgttcccggaccgctccacgtgccgcgcggccgccgcggtgttcccggcgtcggaggacgagttggtgcgtgccgtggccgccgccgccgccgcgtccgggaccaagatgaaggtggccacccgctactcccacagcatcccgaagctggcgtgccccgggaacggcaccggggagggcctcgtcatcagcaccaggcggctcgaccgcgtcgtttccgtcgacgccgcgacggggcacgtcacggtggagagcggcgtcacgctgcggcagctcatcgcggaggcggccaaggccggacttgccctgccctacgcgccttactggtgggggctcaccgtaggcggcatgctcggcacgggcgcgcatggcagctcgctctggggcaacggcagcgccgtgcacgagtacgtcgtcgggatgcgcatcgtcacgccggcgcccgccgccgagggctacgccaaggtgcgcgtgctcaccgccggcaacccggacctggacgccgccaaggtctctctcggcgtcctcggcgccatctctcaggtgacgctggcgctgcaacctctgttcaagcgctcggtgacgttcacggagcgggacgacgacgacctggcggagcaggtggccaaattcgggtaccagcatgagttcgccgacatctcgtggttcccggggcacgggcgggcggtgtaccgcatcgacgaccgcttgccgctggccgcgtccggcgagggcgccatggacttcatcggcttccgcgccaccccaacggtcgtgatccaggccagccgtctcgccgaggatctcttcgagcgcgcgggcaacggcagcggcaagtgcctgacgtcgcgggtgacccacgcggcgctgtcggtggccggctacgggctgcagcggcggagcggcgggctgttcacggggtatccggtggtggggccgcagcaccggatgcaggcgtcgggtgggtgcgtgacggggcccgagaacgcgctgctgacggcgtgcccctgggacccgcgggtgccggccggcaccttcttccaccagaccaccttcagccttcccctgcgccgtgccgcggcgttcgtcaccgaggtgcgccggctgcgggacctggagccccaggcgctgtgcggcgtcgagctctacgacggcatcctcatgcggtacgtgaaggcgtccacggcgcacctgggcaagcccgcgccgcgcggggagccgtcgggagatatggtggacttcgacatcacctactaccgcagccgcgaccccgggcgggcgcgcctgttcgaagacgtgctggaggagatcgagcagatgggcatcttcaagtacggcggcctgccgcactggggcaagaatcgcaacctcgccttcgtcggcgccgcgcgcaaatacccgggcttgccgcacttcctgcgcgtcaaagacgcctacgaccccgacggcctcttctccagcgactggagcgacacgatgctcggcatcggcgggaggtcgccgacgacggacgcgcccgggtgcgcgctcgaggggatgtgcgtgtgctcgcgggacgagcactgcgcgccggagcagggctacgtctgccgccccggcaaggtgtacaaggacgccagagtctgcaccagggtgtcgtcgtagaatcgattcattggccacgtttggatttgatttctagactagaaacaccaatatatattactgtaatttatttaggacagatcgacagctgaaggaactatcggaggactttctccaagattcccaacagaattgaatttgctgctatgaaattcagctatggttcggcttgtcctggctaaaactcgcatatatgcttgtaaatcaccactttacaatgaggcatgtcatttttattt

SEQ ID NO: 94827 - DNA, 3164 bp, Zea Mays
gccaggccaaccacaccacgcggtgcagtgcagtgcagtgctcgagacaccaccgaacacgacgcgccgcggcccgtctcgagtcctcacttgctcagtcagtcgtcaccaactccatccatccatccatatgcggatctgcctgccaggctccagcctccagacctctgggccgcaccagcaggagcggaagaaagggccctgctgccgcgccgcgaccgcgaacccgcgtccagacgtcggcgtgccgtgtcagccccaacccccaaaatccccccacaacatccaaaggaaacgcagcacaggctgcccgcgattaatcaactccgccacgaccaacacgtacgtaaccagcggcggttcggcaccatgcggcgacgacggtgtccgctcctcgccgccgtcctcttcctcttcctcctccccctcttccaccgccaccacgccgccagcggcaccgacacggacacggtcacgctggccgcgccgctcatggggaaccggacgctggtgtccgccggcagcgccaagtacgtgctgggcttcttcgcgccggacccggaatcaggacgggcgtacctcgggatatggttcaacggcatccccgcgcggaccgtcgtgtgggtggccaaccgcgagagccccgtcctgggcggcgtgggcgccgccgcgctcagggtcctcgccaacgggagcctggccatcgtcgtcgtgaacgagaccgacaccgccaactacgaccagcagcccgtggtctgggcgacgccgccgccggccacggccagcggcagcaacgccaccgcgcagctcctggacaacggcaacctcgtgctgcgggtcccgggcgccggcgtggtgtggcagagcttcgaccaccccacggacacgctcctgccgggcatgaagctgggcatcgacttccgcacggggctggaccggcgcatggtctcgtggcgcgccgcgggggacccgtccccgggggagtactcgttccgcctggacccgcgcggctcgccggagctcttcctctaccgcgggtccgcgcgcgtctacggcagcgggccctggaacggctaccagttcacgggcgtgcccaacctcaagtccaacagcctcctcaccttccgcttcgtgtccgccgcggacgaggcctactacagctacggcgtggtagacagcgccgccgtgctcacgcgcttcgtcctcgactcgtcggggcagatccagcgcctcatgtggatcgacatgacccgctcctggagcctcttctggtcctacccgctcgacgagtgcgacggctaccgcgcctgcgggccctacggcgtgtgcagcgtcgagcgcagccccatctgcggctgcgcgccgggcttcgacccgcgcttccccaaggagtgggcgctcagggacggctccggcgggtgcaggcgccgcacggacctcgcctgcgccggcgacggcttcgccgcgctcaccaacatgaagctgccggagtcggccaacgccaccgtcgacatgtccctcaccctcgaccagtgccgagaggcctgcctcaggaactgcgcgtgccgggcctacgccggcgccaatgtcagcgcgcagggggccaccggctgcttcctgtggaccggcgacctcctcgacatgaggcagttcggcaaaggcgggcagaatctcttcgtccggctcgcggcgtccgacctacctctcagcagctcttcgccagcagacacggacgggcgaaccaagaggctcgtcgagatcatcgtcccatcggttgccgcaccggcgctgctgctgctggccggactctgcatctgcgccgtgaggacgagaaggcgcaggacgaaggagaaggaggccatccccctggcgctgctgagagacgcgcagaggcagagcgcgccgttcggacgaaggaaccagatcgccgcgtccaccgacgcgcaggacgagtcccttcacgacggccagcagggcggcagccaggactgcgacctgccgtcgttcgacgtcgagacgatccaggccgccacgggcaacttctcggctcacagcaagatcggccagggcgggttcgggcccgtctacatggggaagctggacagcgggcaggacatcgccgtgaagaggctgtcgcggcggtccacgcaggggctccgggagttcaagaacgaggtgaagctgatagccaagctgcagcacaggaacctcgtcaggctcctcggctgctgcatcgacgggtcggagaggatgctggtctacgagtacatgcacaaccggagcctcaacaccttcctcttcaatgaggagaagcagccgatgctgagctgggagaaacggttcagcatcatcaacggcatcgcgaggggcatactgtacctgcaccaggattcggcgctgaggatcatccacagggacctcaaggccagcaacattctgctcgacaaggacatgaaccccaagatctccgacttcggtgtcgccaggatattcgggaccgaccagacggccgcgtacaccaagaaagtagtcggaacatatgggtatatgtctcctgagtacgccatggacggagtcttctccaccaagtccgacgtgttcagcttcggcgttctggtgctcgagatcgtcagcgggaagaagaacagagggttctaccacaccgagcttgacctcaacctcctaagatatgcgtggaggctgtggaaggacggcgagagcctggagttcatggaccagtccatcgcggacacgtccaacgcggcggaggtgctcaagtgcatccagatcgggctgctgtgcgtgcaggagcagccgaagcgccggcccaccatgtcggcggtcaccacgatgctcacctgcgagaaccccactctgccggagccatgcgagccggcgttcagcacggggaggaaccacgacgacgacgacgaggacccggaggcgaaggcctgccggtctaacagcgccagcagctggacttgcaccgtcgtcgagggtagatgagatagattactgactgtttctgctgcgatgtgtactgtaaatatcaaagcatttttaacttcaacagcagtgagattaattcaattgaatttacctaaacattgaacagcagtgggcctggtcaatgttagtagtacgacattttacttttacctgaa

SEQ ID NO: 94828 - DNA, 2093 bp, Zea Mays
aggactcgaggacttgaattggaagatggccgaagaaacctcatggtttgaccagagcggcagatagagtaccccaaggcccaaacccaagtgcccatcacggagctctcgctagcgacgacgacggcgcccgctcgattggtgctacaagatccctcgtgcgtccaccggtttgcggcgtggggatctcggctctgactgaccgtgcccggagccggagacaggcgcgatggcagtggcagctccggccgcggtgagcacgggagccgggcagggcaaggagtaccccggcgggctcaccctctacgttctcctcacctgcgccgtcgctgccaccggcggccttgtctgcggctacgacatcggcatatccggcggcgtgacatccatggatgcattcctgcacaagttcttcccgtcggtgtaccgcaaggagcagacggcgcggggaggcggcagccagtactgcaagttcgacagccagctgctgaccgcgttcacgtcgtcgctgtacctggcggcggtcgcggcctccttcttcgtcgcgtccgtggcgcgctccctgggccggaaatggtgcatgttcggcggcggcgtctccttcctcgccggcgccgccctcaatgccgccgcgcaggacgtcgcgatgctcatcgtcggccgcattcttcttggcatcggcgtcggcttcgctggcctgtccatcccaatctacctgtcggagatggcgccgcaccacctccgaggcacgctaaacatcggcttccagctgatgatcaccgtgggcatcttctccgccaacctcgtcaactacggcgtcgccaagatcagaggcggatggggctggcgtctcagcctcgggctcgccgccgtcctggcggccgtgatcaccgtgggctcgctcttcctccccgacacgccaaactccctcatccgccgcggctaccacgagcaggcgcggcaggtcctcgcccggatccgtggcgcggacgtcgacgtggccgacgaatacggcgacctcgtgtcggccagcgaggcgtccgccgccgtccggcgcccgtggctggacgtcctcgggcgcaggtaccgtccgcagctaaccatggccgtcctagtccccttcttccagcagctcaccggcatcaacgtcatcatgttctacgcgcccgtcctgttcaagacgatcgggctcggaggggacgcgtcgctcatgtcggccgtcatcaccgggctggttaacatcgtcgcgacgttcgtgtccatcgccaccgtcgacaggctcggccggcgcagcctcttcctgcagggagggtgccagatgctcgtttgccagatcgtcatcggaaccctgatcggcgtccagttcggggcgagcggagacggagccgccatccccaaggcctccgcggccaccgtcgtggcgttcatctgcatctacgtcgcgggcttcgcgtggtcgtggggcccgctcggtgtcctggtgccgagcgagatcttcccgctggagatccggccggcggggcagggaatcaacgtggccgtcaacatgatgtgcaccttcgccgtcgcgcaggccttcctcccgatgctctgccacttgaggttcggcctcttctacttcttcggcgggtgggtgctcgtgatgactctgttcgtcgcggccttcctgccggagacgaagggcgtgcccgttgagaagatggggactgtgtggaggacgcactggttttggggaaggttcgttgctgacgctgacatggacggccgcgcgggaaaccgcgactccgccttccacaagggcaaggacattgctgtagagagccgtagtcgtcctgtgtagacatgggtattggattggagtgtgcaagtgaaacacatgaaagtatgaaacacgcacaaaaaatttggttgtgggttgagctcacaaaatggacctatttctatcgtacgttggacgtaaaaacaaactaccaagaattataaagaattctcaataaataattaaatataaatgtatgtcattatttacgtaccaatatattaaattttaaattctaatctatcctatgctaagagatgtataaaaaacaaaa

SEQ ID NO: 94829 - DNA, 1029 bp, Zea Mays
agcgaactgaagctccaccatccttccgacgccatgcagcacactcccatggcgagctccccttgccgtcgcctgtccatttcagcagttctgctactacagtgcttcttccttctcccgcttacccacgcaaggcttctccttgccgacaagaaccctgccgccgtcaatgacagcaaatcattttccatcagagttaggagtgggaagggcggcggccgtggtttcggcgtgagcatcggccatggcgggcacgacacgtcaatcggcatcggtggcgggttcggaggcggagccggcactgctcgtggcggcggtgcgagcgtggggggcggagcgggtgctggtgttggcatcgatgttggacgcggcggggttgatgtcgggtttggcgggggtggaggcggcgcggttagcgccggcggtgtgcatgcaggagccggcggcggcggcggtgttggcgtgcacataggccgcggtggagtcagcgtgagcgccggcggtggcggcggcggaggtgcaggcgcgggagacggtggcggcggatatggtggaggcagcggcgttggacgttctggcaacgcagtggggagcggcggagggtatggaggtgcgagtggtagtgccggaggtggagcaggcagtggagttgggtcagcccgcggagctgttggcggcggctctggaggtgggggtggccaaggttgaagcaatttataattttatatatctatcttattgactcacaaatatactatttcatagtcatagatatgaactacaatccccaaaaattaaggctgtggtacttgataaaatatctgtctatctagttgtatatgtaacttgtaagcatatgtgccttttttgtgcttttttctgggcggcatatttgatagttggatgcctggcatcttgtaatatgtattggcaagcttgcgatctactgcaaaacacataacagttgtaacctatatttatacacgatatatatatggatggactatgcgcatgtggtgttttgctata

SEQ ID NO: 94830 - DNA, 290 bp, Zea Mays
aggcgacggcgggaacaaggaccgccgtggggggagtacgacgcgcgtgggggcattgtgagcggggacgaccgggtttctcggcgtcaggcgcggggccggtttcactgggggaggcgggggatcaggcgttgtggtcacggcatgcgcgggcgcaggtgcggtgcgcgctggcgacggccgacggtggaaggcaccgcgatctggggaaggagcgtgtggtgggggtgggccgcgagattagctgtgacgggggcgggaggcggagccatatggaggtggtggacgcc

SEQ ID NO: 94831 - DNA, 384 bp, Zea Mays
tcgtgcccgcggcgaatcacgcgcacgaccggcccctcgcggcgaatcccctcccacccgcgacgaatcccctacccgaacctctcgccaccaccgcggcgaaccacgcgcaaatctctcagccacccccatcctcgtgcaaatctgtcgccaccaccacccgctacgcccgctctcaacaacctccgcctccatcgccgtgcgtctcggccatccctcgactctgagatttacgccgctctcaagaacccccgctctcaaaaaccatgctcccaaggaggtactgcagactgctcgcaagtcctggtagcgcagaaccgcgcgtcctcaatccgctactccggcaagcccgctccccgactgttcaactaatccgccgtcacc

SEQ ID NO: 94832 - DNA, 974 bp, Zea Mays
gacactattataaaatcaaaataataagcagcaatgccaagattatctgcaatgaaatcaggcttgttgatgttttttgtgttatgcaacaccaagcactcagtttaagtaccaccacacaggaatcgtggtgtatatgcaccataagacaaaaaatgagataacacaaactgagaaaagattcaggtgtcaaaccatcatattgctatgcaattgaagtgtagattcttctcaaccacgagtacaagctatacagcctcccagaactgccagctattaacatttgcatcccccatttgtacatcctccaaggatgcacttgcaagttgttatcattatataattcttgcagttgcaactatcttccctgtctgctagctcttctcccgagaccatatgattcggatcacattgccggtttgctgcaccactttggactgtgcctctactcatcaaccaatcatcccaagatggataagcaggcagaagatgcatctctttgaagaagagcgcactagtttctcttgctcggatgaaacgtccaaataactaaattggcatgtgtttagattaaaaagttaattataacattcttttattcgagacaaattacatgctaggaaccaaacaatcactaatgcaagtggatctccagggccatgtgggggagtgctagacgaatggaatttgatagggatgcaaagattcttcgaaggaactttgtaattgatctgttaagttacgaggacaattcatgccgctatgctatccttgcaaacatacaataaagacttatcaatatcgcttaaaaggattagattaatgtacggttgtcgacatatttgcttattattaaaatttgtaagacatcacattttttaattgaggttgcatcaataaacaggttgatgtagaccaataaggtttgtgtgtggtttacatgttttaaatataaatatatgtgggcagctagc

SEQ ID NO: 94833 - DNA, 1347 bp, Zea Mays
ggataacgaagggataagctgggcagcggccactcccatccccgcacttcaccggcctcctcctcctccccgtccatcgccgtcgccggggcttcctacaacttcaaaatggcggctaccgccaccgccatggctatagcaactatctcccccgccgctccgattccatccgcgcccttcccatcccttcccctccccctcggcctccgcctccgctctcaacccctcctcttcgctgcttcccgccgccgcttcctccatgttcccaaagccgcctcctgggacgaatccgtccccgaggatggtggagatgcggaggaatccgttgccgctggggacgacgaggacgaggaggagaagcagcggcccgagccggtgtcctcctccgagttccagttcgcggcgccacccgagggctacgtcgagcccgcggcgtttgacgagctaccgccggagtccccagaagacgtggcggcggcgtacgaatctctctacgggccggccttcagcggcgagacattgctggggaacaatgtctttgaggtcaaggtggtcgaccccatcgacatggaccgggagcagcgcccgaacgacgatttcaccgagcgcgtcgtgcaggtcaaccgcgtcaccaaggtcgtcaagggagggaggcagctctcctaccgcgcaatcgtcgtcgttggcgacatgaagggccacgttggtgtcggcgtgggaaaggccaaggaggtcacggaggccatcaccaaggccgccatgaacggccggcgcaaccttgtcacagtgccgctaactaagtactccacattcccgcacagagctgatgcggactatggagcagccaaggtgatgctgaggcctgcttgccctggatctggtgtcattgctggtggagccgtgagggttgtgctggagatggctggtgttgaaaatgctctgggcaagcagctgcgcagcaagaaccccctgaacaacgctcgagccactatcaaggcgacgcagatgatgaagcagttcaaggatgtcgctgaggagcgtggtattccaatggaggagctgtggaaatgataaaaacaattcgaaaccaagacccccccccccctttgtagcattctttctcctgtcgctgtatttttcttaaggtcttcatttttctgctgtatctatgggatgaatcccgcctcacggtttcttttttgcatctctcttctgaaattctgtgtgtgagaatttagtccatgagatctgaccctatatgcttgctcttcacttctgtacactgctactggtggaaattcagaccaaagaatgaacagatttagcgcgaaaatgcatcttgtctgt

SEQ ID NO: 94834 - DNA, 609 bp, Zea Mays
ggcggaaccgctgaaggaagcagaaggcgaggtggatcagtggatggcgtattggtgtcgcgtctcgcgtaagcaagtggggcagacttcaccgccgtgcgcgcccgccagaccgcacaccgccacatccaccgcgcgccgaccagcccccgctcctccacctccactgcacacgccggccagcccccactcctccacctccaccgcgcgccggccagcccccgctcctccacctccactgcacgcgccggccagcccccactcctccacctccacctccaccgcgcgccggcaagcccccgctcctccacctccactgcgcgcgccggccagcccgctcctccaccgcatcaggaaggcgagccagagatcgagcgacccgagaaaaggaggaaacacaagcgtaatcagaagccgaagtccagggagctcaatccaatggagtggatcgctgaagcccggcaccaggcagtgctgatgggaatcgggatggactgcatccgctaggcctctccatcgaccagcgggttcccctgcgcatgttgtattgatttgcgtgcgcacggtttctgccaatctagcgacctgcttcagaatctgatcttcaag

SEQ ID NO: 94835 - DNA, 2122 bp, Zea Mays
catccactcaaagccaggaccaggagccgtagaaaaaccagcccaagaggagagagagagacctccgtgccagccccgccccacctcgccgcctctccacgcgacctgctcgccgctgccgccggcgccgcatcacaaatgcccacccagaagcgcccgcctccgcctccgccaccctctccctccccctccgcggcccctggcgccggctcgccccctccctcgtctccgccgctgccgacggccgagcccgcggagaagaagcccaagctggaggtgaacggcagcgccggcgccgaagccaacggcaacgccaacgatttcggcgcgaaggaggggacggaggtggaggcgtcggagtctgagtcggaggatgcggacgccgcaaaacaggagtttgtaccagtaaaattatctgatgtacgcaaagaagtgcagtgtcccatatgcttaggcatcatccggaagactagaacagttatggaatgcctgcaccggttctgtagggaatgcattgacaaatccatgcgacttgggaacaacgagtgtccagcgtgccgcacacactgtgcgagccggcgttctttgagagatgatccgaattatgatgccttgattgcagctctatatccagatattgacaaatatgaagaagaggagctagcgttcaacgaagaggagaatgaccgcaacaagcagattcaagcatccattgctgaggcttttcggaaacaatcagaagttattgggcggaagtctactgccaaagctactgctgctgcatttgtaagaagatcacgccgtaacattcggcctaatgggcagaatacctatttccgtggccgaggaaaagccagttctgatgacgttgctctggcctgttctgaagatgaagaggatggaaacggtgaaagctgtagcaaagaggcctcatctgcggaggagagttccccagagaaaaagcagaaacgactgccaaaatggccaacaccgcgttcttcacctgcccgagcatgcaatgatgaggttgcttctgatgaaaaggatgatgtaggaatatccagggaaaatttcagcacatctcctctacgagcatggggaaagaatggcactcgcagtcagactcgccacagtagcttcagtggttcaaatggcaggatggtcaagggtgggcgcatgatcaagttggttgagtgcttgcgaaattctgacgacaatgaaggcgagcgtgatgtacatctttgtctgcttccacttgatggacaaacggcaccaaatctggagaagtcatatctgtgttgcggcccaactctgtccatcaaacaactttgtcagtttgtcgccagtcagacatctcacaaagatgaagaagttgagatgtatgcgctgaagccttcttgtagcaagcctgtcagcactaatacatgcggtcctgacaaagcaaggctcgcaggggaggaacgcctttcagacttgcgctcctcgttcacatttcctaatggggttctggagctggtgtatgccataaaagtggctaactagatgctgagtgaaggcccattagttcaaatggaagtgttttttgtttatacatatcttcatcgtgatcccttgacgaaatgacaggtttgggctcttgaatacaacttggaaggaaaaaaaacgttgggggagactagttgttgtataattagcttgtgagatgtgagataaatgtgcgtacgttgtcaacgaatagtttcagaagagtcagattggcttccacagttcacctcgctgcaacccaaaatctggtctccactgccggcatttgggggaatttctcggttgggtgaaggctgagttatttcctcgagtggtcaagttgttttacttccacagttcaccagtttcagcttttgtaattcatcggttcatattcttcaggcggcagccagtccgtgctgcgaacgacttcccagatacatgtaacataaatcttataaaaaatatatatgtaacagaaattactttttttgtcgtttctttgtacggcacaaggacagtcgtatttaaccttgagctggttataccagagtgttactattttattatatctgtacttatacaaactacaaggcaa

SEQ ID NO: 94836 - DNA, 1837 bp, Zea Mays
gcacagagctgtgacttttttttaagcaccacagagctgggactttgagagggaggactcagcgagctccaaagccgacgaggataaagaggatcccggctccgcacgcgggagcgagaggatcgccggcgcaggatgtggtgcgcatcgtgcttggcgtccgcctgcgcgggctgcacctgcaacctctgcacgtcggcggcatcggccgtgtcccgccgctccgcgcgcctcgcttactgcggcctcttcgccgcctcccttatcctctccttcttgctccgccagttcgccgcgccgctcctcaagcatatcccatggataaatgcgtttgatcaaacaccaccagaagaatggtttcaaatgaatgctgttcttcgtgtaagcctggggaacttcttgttctttgcaatattttctctcgtgatgattggtgtgaaagaccagaatgaccggcgagatgcctggcaccatggtggctggattgcaaagattgctgtatgggctgttctcattgttcttatgttctgtgtgccgaacattgtcattactatttacgaggtactttcgaagtttggatctggcttctttcttctagtacaggttgtgatgcttttagacttcacaaataattggaatgactcatgggttgagaaagaagagcggaaatgggaaatagctttgctggtagtgactgtggtttgctatctttctacattggccttctctggtgtgctcttcatgtggtttaatccatccggtcatgactgtggtctcaatgtgttctttatcgtcatgacactcatccttgcttttgcgtttgcaatagttgctttacatcctcaggtccatggaagcgttatgcctgcttctgtcatttctgtttactgcgcatacctgtgctacacgagtctctcgagtgaaccggatgactatgagtgcaatgggcttcacaggcattctaagcaggtttcaatgagtgctcttatactcgggatgctcactacggtgctctctgttgtgtactcagcagtccgtgctggatcctcgactacattcctttcaccgccatcatctcctagatctggagccaaaaacccgctactcggtgacgaggaggacggcaaaggcgatggcaaagaaagcgaaccgcgacccgtgagctactcctacaccttcttccacctcatcttcgcccttgcaagcatgtattcagccatgctcctgaccggctggacgagcgctgcatcagagagctccgagctgatggatgttggatggacgaccgtctgggtgcgcatctgcacggaatgggtcaccgccgggttgtacatctggaccctcatcgccccactgctcttcccagaccgtgatttctcctaggcacccacgcacccatagcctatgagttgtttggtggtgttagttgcgattgtgaatatgaataagccgaagctgggagctggtagggatctggtattgtctctgtatgctatctggcatgcctaatgtgatggcactggttagtacctgtttgtatggccttgtatagaatatatttcgaccgagtgtaggttgtggactttaaaagcagaaaaacaaaactgagcagaaaaacaaaactaagggtaaaatgaggaacactagcaaaactgaggataccagcttaaaaaccctatatcttaaggggtaagtacaaaaaataaagagacgtattttggttaagtaatatctcgattctctaagtctagatatgttccattcatacaattcatataaggtcttgttcggttaattcccttacccatggattggatgggattgaaaaaaataagaa

SEQ ID NO: 94837 - DNA, 2127 bp, Zea Mays
ccacgagacaggcataggcaccgtcgcacagagctgtgacttttttttaagcaccacagagctgggactttgagagggaggactcagcgagctccaaagccgacgaggataaagaggatcccggctccgcacgcgggagcgagaggatcgccggcgcaggatgtggtgcgcatcgtgcttggcgtccgcctgcgcgggctgcacctgcaacctctgcacgtcggcggcatcggccgtgtcccgccgctccgcgcgcctcgcttactgcggcctcttcgccgcctcccttatcctctccttcttgctccgccagttcgccgcgccgctcctcaagcatatcccatggataaatgcgtttgatcaaacaccaccagaagaatggtttcaaatgaatgctgttcttcgtgtaagcctggggaacttcttgttctttgcaatattttctctcgtgatgattggtgtgaaagaccagaatgaccggcgagatgcctggcaccatggtggctggattgcaaagattgctgtatgggctgttctcattgttcttatgttctgtgtgccgaacattgtcattactatttacgaggtactttcgaagtttggatctggcttctttcttctagtacaggttgtgatgcttttagacttcacaaataattggaatgactcatgggttgagaaagaagagcggaaatgggaaatagctttgctggtagtgactgtggtttgctatctttctacattggccttctctggtgtgctcttcatgtggtttaatccatccggtcatgactgtggtctcaatgtgttctttatcgtcatgacactcatccttgcttttgcgtttgcaatagttgctttacatcctcaggtccatggaagcgttatgcctgcttctgtcatttctgtttactgcgcatacctgtgctacacgagtctctcgagtgaaccggatgactatgagtgcaatgggcttcacaggcattctaagcaggtttcaatgagtgctcttatactcgggatgctcactacggtgctctctgttgtgtactcagcagtccgtgctggatcctcgactacattcctttcaccgccatcatctcctagatctggagccaaaaacccgctactcggtgacgaggaggacggcaaaggcgatggcaaagaaagcgaaccgcgacccgtgagctactcctacaccttcttccacctcatcttcgcccttgcaagcatgtattcagccatgctcctgaccggctggacgagcgctgcatcagagagctccgagctgatggatgttggatggacgaccgtctgggtgcgcatctgcacggaatgggtcaccgccgggttgtacatctggaccctcatcgccccactgctcttcccagaccgtgatttctcctaggcacccacgcacccatagcctatgagttgtttggtggtgttagttgcgattgtgaatatgaataagccgaagctgggagctggtagggatctggtattgtctctgtatgctatctggcatgcctaatgtgatggcactggttagtacctgtttgtatggccttgtatagaatatatttcgaccgagtgtaggttgtggactttaaagtcatatagctatacttgacctgatgtcaagtcgcggttgtgtgtaatgacgacaattatcatgtgtaagaatacgtctattgctcgtaatgttgtaataactacgactgtagcttgtgtttagggcatctacaacctactacataaatacataaataacatatatcttagggtttttaaagttggtgctctcagttttgctaatgtcctcatttttattcttagtcgtgttttttttctcagttttgtccttctagtgttatagagcagaaaaacaaaactgagcagaaaaacaaaactaagggtaaaatgaggaacactagcaaaactgaggataccagcttaaaaaccctatatcttaaggggtaagtacaaaaaataaagagacgtattttggttaagtaatatctcgattctctaagtctagatatgttccattcatacaattcatataaggtcttgttcggttaattcccttacccatggattggatgggattgaaaaaaataagaa

SEQ ID NO: 94838 - DNA, 1911 bp, Zea Mays
aaaatacttcagcatgattttgacacatgcatcgttgatgatttgtgtggtcttgttgtcatcactgggaacaactttgcctatttaccataaatgcatgctggtgtactgatgcagagaatgtttgatttgtaaaactgtcgaatttttgttttggaattttgttccatcaaattattgagcttatgataaatcagatggacttttgaggcattgatttaatggtcctgtaagtggtctagtaagtctgtaatgtattgcattgcagggataaatgcgtttgatcaaacaccaccagaagaatggtttcaaatgaatgctgttcttcgtgtaagcctggggaacttcttgttctttgcaatattttctctcgtgatgattggtgtgaaagaccagaatgaccggcgagatgcctggcaccatggtggctggattgcaaagattgctgtatgggctgttctcattgttcttatgttctgtgtgccgaacattgtcattactatttacgaggtactttcgaagtttggatctggcttctttcttctagtacaggttgtgatgcttttagacttcacaaataattggaatgactcatgggttgagaaagaagagcggaaatgggaaatagctttgctggtagtgactgtggtttgctatctttctacattggccttctctggtgtgctcttcatgtggtttaatccatccggtcatgactgtggtctcaatgtgttctttatcgtcatgacactcatccttgcttttgcgtttgcaatagttgctttacatcctcaggtccatggaagcgttatgcctgcttctgtcatttctgtttactgcgcatacctgtgctacacgagtctctcgagtgaaccggatgactatgagtgcaatgggcttcacaggcattctaagcaggtttcaatgagtgctcttatactcgggatgctcactacggtgctctctgttgtgtactcagcagtccgtgctggatcctcgactacattcctttcaccgccatcatctcctagatctggagccaaaaacccgctactcggtgacgaggaggacggcaaaggcgatggcaaagaaagcgaaccgcgacccgtgagctactcctacaccttcttccacctcatcttcgcccttgcaagcatgtattcagccatgctcctgaccggctggacgagcgctgcatcagagagctccgagctgatggatgttggatggacgaccgtctgggtgcgcatctgcacggaatgggtcaccgccgggttgtacatctggaccctcatcgccccactgctcttcccagaccgtgatttctcctaggcacccacgcacccatagcctatgagttgtttggtggtgttagttgcgattgtgaatatgaataagccgaagctgggagctggtagggatctggtattgtctctgtatgctatctggcatgcctaatgtgatggcactggttagtacctgtttgtatggccttgtatagaatatatttcgaccgagtgtaggttgtggactttaaagtcatatagctatacttgacctgatgtcaagtcgcggttgtgtgtaatgacgacaattatcatgtgtaagaatacgtctattgctcgtaatgttgtaataactacgactgtagcttgtgtttagggcatctacaacctactacataaatacataaataacatatatcttagggtttttaaagttggtgctctcagttttgctaatgtcctcatttttattcttagtcgtgttttttttctcagttttgtccttctagtgttatagagcagaaaaacaaaactgagcagaaaaacaaaactaagggtaaaatgaggaacactagcaaaactgaggataccagcttaaaaaccctatatcttaaggggtaagtac

SEQ ID NO: 94839 - DNA, 1676 bp, Zea Mays
atttttttgcaattaaacaacttaagagactttacgttaaacatcactatacatgccctaattacaattgcaacagtatcatccgattgaatctactttttaagcagtagaggacagaacagaacaggacccggcccttcctcgttccttcgtttctcctccccgcatttgctggtcgctgtcatacgacggcgccggaattccggtgggacagggccatcctctccgcttgtcccccagttctgcatttccctcttcgcagacattcgagttgggcctgccgccagttcttcagatggccggagcgggcgacgcggccaaggagtacgtcgccggatccgccgccggcgtcgctcaggtcgtagtcggccacccgttcgacacggtcaaggttaaactgcaagctcataataccacggctcatggaaaggtgtacaagaatgccttccactgcaccagtaggatactgcttgacgaaggaattacagggctgtacaaaggtgcgtcatcttcatttattggtatagctgttgaaagctcccttttctttggcacatattcccaagccaaacagttattacagggaagctatgaggttggtaggccacatcttcaggtaattatcccttctgctgcatgcagtggagctctgattagctgcatcctcactccaactgagctgaccaagtgcagaatgcaagttcaagggaaggatgtaatccatggcgccaggtactccagccctctagattgtgctgtgaaaacattggaaagtgaaggggttaagggtatattccgtggtggtttggcaacattattcagagaggcgatcggcaatgctgtcttcttctgcacttatgagtacagtcgatactggatgcacaactatttggattcctcgagattttctggtagcagtcatttcgtggcggcaaaagatattgggataggggttgtaagtggtggcgttagtggaatggcattctggacagctaccctaccgttggatgtggcaaaaaccataatacagactgatccggaccctcatgtgagccgaaaccccttgcagattttgagcatggtttataagagagctgggttgggtggctgttatgctggacttggaccaactctagcaagagcattccctgccaatgcagcagcaattgttgcttgggagtacagcgctaagattctcggtataaagcgaggctagtattacggtactgctaatatatgaacacggaatcacttagcatttaaccctctttttgtttgttctgctccgttttggttcattgtcatatttcgccgaaatgtcatctgatgggcatttgtttgtgccattagactatagcacttcgtgcttatcccggaattggactggaaaatacactgaatcaaaacttccttttggttcattgcacgtatgcccccccccccccccccccccccacacacacacaaaatgctgaaaaagaggtgtttgaacgttgtacctgtgaaattcatgacatctttatggagtccacatggtccgcttgtattttttagttgcagcttgaaaatggtggtgcatgtaaattaaacaaactaatcacaaggttacttgagttggtgtatggactcaactgtcaccagatgcataaatgtattttaggccttccctctccccg

SEQ ID NO: 94840 - DNA, 1775 bp, Zea Mays
atttttttgcaattaaacaacttaagagactttacgttaaacatcactatacatgccctaattacaattgcaacagtatcatccgattgaatctactttttaagcagtagaggacagaacagaacaggacccggcccttcctcgttccttcgtttctcctccccgcatttgctggtcgctgtcatacgacggcgccggaattccggtgggacagggccatcctctccgcttgtcccccagttctgcatttccctcttcgcagacattcgagttgggcctgccgccagttcttcagatggccggagcgggcgacgcggccaaggagtacgtcgccggatccgccgccggcgtcgctcaggtcgtagtcggccacccgttcgacacggtcaagttctggttctattttacagttacttggtataccagtgtactgaatacacaaaacagacagttccctggatgaaatgatcttcaatctggatggaatatatggttgccattgatataaacttggttaaactgcaagctcataataccacggctcatggaaaggtgtacaagaatgccttccactgcaccagtaggatactgcttgacgaaggaattacagggctgtacaaaggtgcgtcatcttcatttattggtatagctgttgaaagctcccttttctttggcacatattcccaagccaaacagttattacagggaagctatgaggttggtaggccacatcttcaggtaattatcccttctgctgcatgcagtggagctctgattagctgcatcctcactccaactgagctgaccaagtgcagaatgcaagttcaagggaaggatgtaatccatggcgccaggtactccagccctctagattgtgctgtgaaaacattggaaagtgaaggggttaagggtatattccgtggtggtttggcaacattattcagagaggcgatcggcaatgctgtcttcttctgcacttatgagtacagtcgatactggatgcacaactatttggattcctcgagattttctggtagcagtcatttcgtggcggcaaaagatattgggataggggttgtaagtggtggcgttagtggaatggcattctggacagctaccctaccgttggatgtggcaaaaaccataatacagactgatccggaccctcatgtgagccgaaaccccttgcagattttgagcatggtttataagagagctgggttgggtggctgttatgctggacttggaccaactctagcaagagcattccctgccaatgcagcagcaattgttgcttgggagtacagcgctaagattctcggtataaagcgaggctagtattacggtactgctaatatatgaacacggaatcacttagcatttaaccctctttttgtttgttctgctccgttttggttcattgtcatatttcgccgaaatgtcatctgatgggcatttgtttgtgccattagactatagcacttcgtgcttatcccggaattggactggaaaatacactgaatcaaaacttccttttggttcattgcacgtatgcccccccccccccccccccccccacacacacacaaaatgctgaaaaagaggtgtttgaacgttgtacctgtgaaattcatgacatctttatggagtccacatggtccgcttgtattttttagttgcagcttgaaaatggtggtgcatgtaaattaaacaaactaatcacaaggttacttgagttggtgtatggactcaactgtcaccagatgcataaatgt

SEQ ID NO: 94841 - DNA, 1570 bp, Zea Mays
atttttttgcaattaaacaacttaagagactttacgttaaacatcactatacatgccctaattacaattgcaacagtatcatccgattgaatctactttttaagcagtagaggacagaacagaacaggacccggcccttcctcgttccttcgtttctcctccccgcatttgctggtcgctgtcatacgacggcgccggaattccggtgggacagggccatcctctccgcttgtcccccagttctgcatttccctcttcgcagacattcgagttgggcctgccgccagttcttcagatggccggagcgggcgacgcggccaaggagtacgtcgccggatccgccgccggcgtcgctcaggtcgtagtcggccacccgttcgacacggtcaaggttaaactgcaagctcataataccacggctcatggaaaggtgtacaagaatgccttccactgcaccagtaggatactgcttgacgaaggaattacagggctgtacaaagggaagctatgaggttggtaggccacatcttcaggtaattatcccttctgctgcatgcagtggagctctgattagctgcatcctcactccaactgagctgaccaagtgcagaatgcaagttcaagggaaggatgtaatccatggcgccaggtactccagccctctagattgtgctgtgaaaacattggaaagtgaaggggttaagggtatattccgtggtggtttggcaacattattcagagaggcgatcggcaatgctgtcttcttctgcacttatgagtacagtcgatactggatgcacaactatttggattcctcgagattttctggtagcagtcatttcgtggcggcaaaagatattgggataggggttgtaagtggtggcgttagtggaatggcattctggacagctaccctaccgttggatgtggcaaaaaccataatacagactgatccggaccctcatgtgagccgaaaccccttgcagattttgagcatggtttataagagagctgggttgggtggctgttatgctggacttggaccaactctagcaagagcattccctgccaatgcagcagcaattgttgcttgggagtacagcgctaagattctcggtataaagcgaggctagtattacggtactgctaatatatgaacacggaatcacttagcatttaaccctctttttgtttgttctgctccgttttggttcattgtcatatttcgccgaaatgtcatctgatgggcatttgtttgtgccattagactatagcacttcgtgcttatcccggaattggactggaaaatacactgaatcaaaacttccttttggttcattgcacgtatgcccccccccccccccccccccccacacacacacaaaatgctgaaaaagaggtgtttgaacgttgtacctgtgaaattcatgacatctttatggagtccacatggtccgcttgtattttttagttgcagcttgaaaatggtggtgcatgtaaattaaacaaactaatcacaaggttacttgagttggtgtatggactcaactgtcaccagatgcataaatgt

SEQ ID NO: 94842 - DNA, 151 bp, Zea Mays
tcgccccttgcaacaatacaaaagttgtttgataaaattatagtgtgcaacgattacatagaaataaacaacatatatattctcgacatcaatatatcaaaatcatttgcacaaatgaatgccaccacaagtataggcagacagatcacac

SEQ ID NO: 94843 - DNA, 428 bp, Zea Mays
aaatctaaagtattatttgaggcatacaaggaaagactagggcatgtttggttccctgcctaacttgccacactttgcctaacttttctgtctaaggttagttcttcaatttgaacgattaaccttagccaaagtgtggcgtagttagtcacgaaccaaacaggccctaggtacgtctgaatacaaggcgatgccctttgacatgccttccctgatccataccgtagaaaacttgaattgcttagaggagcctttctctctcgatgaaattaactctattgttagcaagcttccaccagacaaatcgctaggcccggacgacttcaacatagacttcataaagaagtgttggcctatagtttctcctgacttctatgcactttgccagggcttttacgatgggacaatctgcatgcaaagtattaatg

SEQ ID NO: 94844 - DNA, 1700 bp, Zea Mays
atggtaaaaacgacattaaataatatataatctaaatgtgattttttttaagaaaaggactaaaataaaaaaaaatcggctccgctccgcaccagccgcgcatgttgacttcagcgaacgctgcatttttcaccgctatgcttcagtttgagcccccttgccccttctttgcttgggcaggcaagccagagccagccgcgtgaaagacaccgagcgcagacaggttggagttggacataacctctccctctcctcggcgcctcagccgggcatggcgtgcggcggcaggggcggcacggggtggtcctctctgccggcggacctgctgctcagcatattcgccctcctccctgccgacgctcaccgcgtccgtttccgcgccgtctgcgcggactggggcgccgccgccgccgcgtggcgcccgcgcccttggctcgtcggctcccgcaccgaccgctccggccagggcgccagcgaaatttcgtcattctggctcgcccccagcgtcgccctcctgcccttcgccgcgaacgtgccatcggggctggagtacctctcctcgtcccacggctacctcgcgctctcggacccgaggatcagccccaaggtcatcctcctcctcaaccccttgacaggcaggcgcgtccgcctcccgcccatcggcttcttcaagaagtggctcgacttgaccaccatcgtgctgtcgggcgaccccgccacggccaccgagtgggccgcggtggccgtcgggttcccgacgacctgcctcgcgtactacagctccgtcactggggcgtggacgcggctcgatttcagcgtgaccggctacgccgctgtcgagcactacagggggcggttctatgtggccttcaagtcctcgatctgcatctgcgaggtcgacggggacgcgcccgcggtcatcccactcgagcacgtcgacgcgaacggcgacgccgtcgtctcggacaacgacaagctccctggcgaagggaggcgcgtcgtcgagacgcacctggtggagtgtgaccgccagctgctcctcgtctcggtgcacgacgacgtcatgtacaactcggacgacgacatggcgggcgtggacgacgggggcatcaagatcggcagcgggttcgcgcgtgcggtggaggtgcacagggtggattggctcggggataggacggtgcggctggtgcgcgtggtggacctcggatggaacagtctgttcctggggcggaatcgcgcgttcgcgctctcgcgggcggagttcccctggtaccgcgctcgcgtcaatcgcatctacctcgtcgaccgtggccacccggacggggtcgtcagggtgttgggcatggaaagacagcgggggcgccacctggagatcttgaccatcaaacctgacgacggccggcgagaatcggccgggtgggcgcgccgtggatggttcttccccaactactagccactgtggtcattttgtctctatgggtgtttttttcatagccgcctaagcctggatagctaaaccgtggtttcggcaatgcaagttacacttgtttgattgcattagctaggaagtatttgttccaagtttcttccttctttgtaagtcatcaacacatccttaaaatcaacatccgaagtatagtgttctttcatggttttcaagccaaaaaaattgaaatcaagttgtgaaagcatgatgcaac

SEQ ID NO: 94845 - DNA, 772 bp, Zea Mays
acaaaaaaaacacgatcatatgacattcacgtatctcttggctagctgcttgccccccgcggcggcggcggctaggatcccaccgagggcgcccgcgaccatggcgctctcgatcccggcgtacatgaggccaatgacgcccagcgtattcccgacgcggcggccagagctgccgcaggcgttgagcacgcggttggcgcggatcttggcggtctccccgggctcagcgcccctggcggcgtcgcggaggcccaggacggcgccgccaacggcgccggagaggtacccgacgcccgtatagaaagtgaggttctcaccccacgagcgtcgttgcgccagggcctcctcctggaagaggaactccggcgaagtggggaggtcgtagagcgtccggtagctgtagggcatgttgaggtcctggtacgggttgtacagccggcgttcggcgtcggagcggtcgtcggatcctgatgggaacatccgagggtcatccatggcggcggcggcggcggcggggtggagctgctagggtttttggtggtgtcggcggcgggaggcaggagccggggaagtggggaaaggaaaggcaacggagcgttttggtagccgccttttgcgaggtcctactttggcggcctatattcccgccggaattccgatctttttccggtgagaaaagccttcgtggaaatgatcagggacttacggcaactccaaaaattccctaaaaaattcttcccaaaatattttattagggactgttggaaaaaaa

SEQ ID NO: 94846 - DNA, 2063 bp, Zea Mays
aacaaaaaattcggcaccggcaccgcaggcacggcacaccacggccagaccagaccaccagagtgcctccaccctcgaggcctccagtgtccactgcctactcgccccacgccacccaaatcccgtcgggacgacgaagaagccaagccggtgcgccgtataaatctaaccaatcgccatccgcccaccccccaaatcccaccacccttttccccttccaaccctcgggatctctccggcccgccatggaagtgttctactacctcgtgttcggcgcgctcgccgccatcgtggcggcgctggagctcgccaagtccggcaaggaccgcgtcgccacctccccggccttcaactcatttaagaacaactacatcctcgtttactccctcatgatgtctggggactggctgcaggggccctacgtgtactacctctacagccagtacggcttcgacaagggcgacattggccgcctcttcatcgccggcttcggttcctccatgctcttcggcaccatcgtcggatccctcgcggataagcaggggcggaagagggcgtgtgtcacgtactgcatcacctacatcctcagctgcatcaccaagcactctccccagtacaaagttcttatgattgggcgtgtccttggtggcattgccacttcgctgctcttctcagcgtttgagtcgtggctcgtggcagagcacaacaagaaaggatttgatccacaatggttgtcgataacattctccaaggctatatttcttggcaatggtctagtggccattgttgctggcctatttgcaaattttcttgctgataacatgggttttggtcctgtggctccatttgatgccgctgcttgcttcctagcaataggaatggcaattatcttatcatcatggggtgagaactacggagattcgtctgacagcaaggacttgataacccagttcaagggtgcagctaaagccattgcttcagacgagaagattgcattgcttggagccatacagtcattgtttgagggatcaatgtatactttcgttttcctgtggactcctgctctgagcccaaaggatgaggaaattcctcacggcttcatatttgctaccttcatgctttcctcgatgctgggtagctcaattgcttctcgtttgttagctaggaagctgaaggttgaaggttatatgcaaatcgtgttttcagtatcagcctttactcttttcctccccgttgtcaccaatttcctagtacctccctccggggagaaaggcggcagcatttcgttaggaggctgcttacagcttcttggtttctgtacctttgagtcatgtgttggtatattttggccatcaatcatgaagatgagatctcaatatattcccgaggaggcaagaagcacaatcatgaatttcttccgtataccgctcaacctgtttgtttgcgtggtactatacaatgtgaatgcattcccaataactgtcatgttcggcatgtgctccattttccttctcatggcagcagtcttgcagaggcgcttaatggctgtctctgatcttcacagatcgacaaaggctgtaatgatgactgcggaagatgagcctctaaacccttagagatcatcataaaaaggaatcggaagttaaaatggccccaatcctcgacttattcccatggggttgctgaataagattgatatctaaaagttgtaacgactgtaacagaacacggtttttactgtgttataggattggtgctagtgcagtttccggttgtcatggtagagaacatgatgtggctcctgactattgtgccacacacggcagagtatagctcggcatagcctccccacgttttccccatgtttttcttctcgtgttttctgataggattgatatttgtattcaagtgaagtatcatatggaaacccgcatcgtccattttggatgcaaacgctgagtaaagtgagaaagggctcattagagaccgactccttttgtctaacgggtcatctttttttaactgaatcatctcatcaaaacgcctttcttttctggttttgt

SEQ ID NO: 94847 - DNA, 2811 bp, Zea Mays
accacggccagaccagaccaccagagtgcctccaccctcgaggcctccagtgtccactgcctactcgccccacgccacccaaatcccgtcgggacgacgaagaagccaagccggtgcgccgtataaatctaaccaatcgccatccgcccaccccccaaatcccaccacccttttccccttccaaccctcgggatctctccggcccgccatggaagtgttctactacctcgtgttcggcgcgctcgccgccatcgtggcggcgctggagctcgccaagtccggcaaggaccgcgtcgccacctccccggccttcaactcatttaagaacaactacatcctcgtttactccctcatgatgtctggggactggctgcaggggccctacgtgtactacctctacagccagtacggcttcgacaagggcgacattggccgcctcttcatcgccggcttcggttcctccatgctcttcggcaccatcgtcggatccctcgcggataagcagtgcgttgcgccctcctccgccttgggggtgaattcagtcgatttcgttctgttttggtggatacggcgacgaggctgatggattttccgtggtcagggggcggaagagggcgtgtgtcacgtactgcatcacctacatcctcagctgcatcaccaagcactctccccagtacaaagttcttatgattgggcgtgtccttggtggcattgccacttcgctgctcttctcagcgtttgagtcgtggctcgtggcagagcacaacaaggtagctgcccagatgcttctctccatgcacggtgacattgatacctcggagatgacacgcttcaactttaatcctaatcaactcatcgttttccccatgaaaacaccttctattagttatgttttggacctgttttgcttttgtctttctgtacatctgttgccggtactgactacataggttgactgaagctaacaaaagataaaatacttgggaggtttgacttctagagtggcagtacactgtataaaatgacttccaaggtatagaaaatcgaacatacctaaattaaaatacagttatggtgataatttttagaggaaggttttgatattagagtgtaatgcattgcaaaacacagtgcataaggaattcaggataactatattgcagtcttcctgtcacttatcagtagtacagctattttcttttgttggatttgaagcccttgtcagcagatctggactatctggtgttcccatgcttgaccagaacaagccagtaactaaaactgtggtccagtccaattatatttttcaggatgatggacgtccttgtcgataattagcacatttatgtaccaatatgtacaagtatcatgagaagtccattgcctgcatgtcaatgcattgcgctgttctttttgcctatatcaacgttgctcttttttatttttctaatgataaagccattgatggctttgttttctcattcccttttgttcttgctgacaatgggcaattttacactgatattgtacagaaaggatttgatccacaatggttgtcgataacattctccaaggctatatttcttggcaatggtctagtggccattgttgctggcctatttgcaaattttcttgctgataacatgggttttggtcctgtggctccatttgatgccgctgcttgcttcctagcaataggaatggcaattatcttatcatcatggggtgagaactacggagattcgtctgacagcaaggacttgataacccagttcaagggtgcagctaaagccattgcttcagacgagaagattgcattgcttggagccatacagtcattgtttgagggatcaatgtatactttcgttttcctgtggactcctgctctgagcccaaaggatgaggaaattcctcacggcttcatatttgctaccttcatgctttcctcgatgctgggtagctcaattgcttctcgtttgttagctaggaagctgaaggttgaaggttatatgcaaatcgtgttttcagtatcagcctttactcttttcctccccgttgtcaccaatttcctagtacctccctccggggagaaaggcggcagcatttcgttaggaggctgcttacagcttcttggtttctgtacctttgagtcatgtgttggtatattttggccatcaatcatgaagatgagatctcaatatattcccgaggaggcaagaagcacaatcatgaatttcttccgtataccgctcaacctgtttgtttgcgtggtactatacaatgtgaatgcattcccaataactgtcatgttcggcatgtgctccattttccttctcatggcagcagtcttgcagaggcgcttaatggctgtctctgatcttcacagatcgacaaaggctgtaatgatgactgcggaagatgagcctctaaacccttagagatcatcataaaaaggaatcggaagttaaaatggccccaatcctcgacttattcccatggggttgctgaataagattgatatctaaaagttgtaacgactgtaacagaacacggtttttactgtgttataggattggtgctagtgcagtttccggttgtcatggtagagaacatgatgtggctcctgactattgtgccacacacggcagagtatagctcggcatagcctccccacgttttccccatgtttttcttctcgtgttttctgataggattgatatttgtattcaagtgaagtatcatatggaaacccgcatcgtccattttggatgcaaacgctgagtaaagtgagaaagggctcattagagaccg

SEQ ID NO: 94848 - DNA, 3133 bp, Zea Mays
ggctccctccctcctcccctctcccctgtcccctctctctttctcaccgtccacgcgcgactgcgcgggacactggtcaacgccccggtggcaggcggctccgttggggggtgagtctagctccgtctgttgcgccggaataacgcggcgggtgctacctccggccctcgggttccatggggaggaacggtagcgtgaggcgctcggcgttttcgggcgccgcgggtgctgccgcggggccgccgtccttctctgtgaatcccgccgactaccggttgatggaggaggtggggtacggtgcgcacgccgtcgtgtaccgcgcgatcttcctcccgactaagggtgttgtcgcggtcaagtgcctggatctcgatcagctcaataacaacatcgatgaaatacaaagggaggctcaaataatgagcttgatagaccatcctaatgtcatcagggcttactgctcatttgttgtggagcacagcctctgggtgataatgccattcatgacagagggttcttgtttacacttaatgaagatctcataccaggaaggttttgatgagccgatcattggctccattctcaaggaaactcttaaggctctggattaccttcaccggcagggtcaaatacatcgtgatgtcaaggctggtaatatccttatcgatggtgctggggtagtgaagcttggagactttggtgtttctgcttgtatgtttgatagaggtgataggcaaagatctaggaatacatttgtaggaacaccatgctggatggctccagaagtgctccaacctggcactggatataatttcaaagctgacatatggtcatttggaatcactgctcttgaactagcacatggccatgctccattttctaaataccctcctatgaaggttcttctcatgaccctccagaatgcaccacctggtcttgattatgaacgtgacaaaagattctcaaagtcatttaaagaaatggttgcaatgtgcttggtcaaagatcaaacaaagagaccaacagctgagaagttgcttaagcattcatttttcaaaaatgcaaagcctccagagttgactattaagagtatcttatctggtttacctcctctctgggaccgtgtaaaggctctccagcttaaagatgaagcacaattggctttgaagaaaatgccttcttctgaacaggaggccctctccctgagtgaatatcaacgcggcgttagtgcatggaacttcgatatcgaggatctcaaggctcaagcatcattaattcatgatgacgagcctcctgaaataaaagaagatgaggacattgcaagaaacattgaggttgaaaaggacttgtcttcacggaaccatttgggaaagtcatttgcaaatgagtgcaattccaggcagcgagcctttgtcaccactttaaaatcggatggaaacagacccaccacgaatgaagcttttgattttgattttgattttagcgaggctgccactacaagaagggctgatggacatgaaagaaacataagagagaatgattcattgccctctacagcaaagcgagatccagagtcgaatcattggacaagtgacgttgggcagagacaactgtcttctggtgggagcaatagctcaacagctgaaaggggctatggttttgagagggatgcagttgtgcaaacaatacctgaaaaacaaagaagtgaggcgagaaaaacagcaagccttagtggtccactttcactgccaactcgtgcttctgcaaatagtctgtcagctcctattcgatcttcaggaggttttgtagattcatcaggtgacaagtccaaacgaagtgtagtagagattaaaggccgcttttcagtgacatctgagaatgtcgatcttgcaaaggttcaggaaggtccacttagtagcctctcacggaaatcaccagagggttcactgctaaaaaaatctgccagcactggtgattgtttgattaatactaagctgatgcgtaacgctaatcagctgaaggaattctgcaatagttctgtatcatcttcagtattaattccccaccttaacaaccttgtgcaacagaccatgtttcagcaggatgtaatcatgaacctacttagtaacttgcaacaggatgagaaagttgatagaacacagcctggaatatcttctcaagtccgaacgatggagaatggtaaagtggctgatacagctaactctgagaaggaacggtcattacttgttaaaatttcagaattacagtctaggatgataacactgactgatgaactaattgcagctaagacaaaacatgttcagttgcagcaagagctaaatgctttgtactaccgagaagaaattgaggatgttagggatgaggatatcgaagaaacatagtgtatgaattatctgcctctccctgagacagatcaattacccgcctctccctgaggtcaggggagaacaagagaaggaaagcggcagggagaactagcgatggaaagtggcgatgccgcaaatatttgctggatctagagaccagctgcggttctacggaatttgttctttgaaggttgccgtgcccctggcctgctgccatccagtgtgtataaccgtcttagttcgttttttttttgtggccacaagattgaggcgtggtcatgcagctatttcggccatgcctatcattgggagtagctgtagtccgtaggctaccgggtggttatctatgcagaatttcagaagactgcaaaataaactgtattttatctagcaataggatgtatattggcgcattcgttgatatgtatcatatagggctattcgcaaacatccaaacagagttgtttgcacatatctaataaagtatgcatttactgcatttatcactgccatgtactaaatgattgttttaaaggcattatacattacatgatctgggtaaatcttctctataattggatcttcatgctattttccagcggtgtttctatctcattacatattttacctcctatttcaaatttcactatgcaaataatactatttacaatacaaagcaatgttataaacgattggaaagcaatgttataatactatttagtgatctttctttctttttcttttcc

SEQ ID NO: 94849 - DNA, 2459 bp, Zea Mays
ctcccctctcccctgtcccctctctctttctcaccgtccacgcgcgactgcgcgggacactggtcaacgccccggtggcaggcggctccgttggggggtgagtctagctccgtctgttgcgccggaataacgcggcgggtgctacctccggccctcgggttccatggggaggaacggtagcgtgaggcgctcggcgttttcgggcgccgcgggtgctgccgcggggccgccgtccttctctgtgaatcccgccgactaccggttgatggaggaggtggggtacggtgcgcacgccgtcgtgtaccgcgcgatcttcctcccgactaagggtgttgtcgcggtcaagtgcctggatctcgatcagctcaataacaacatcgatgaaatacaaagggaggctcaaataatgagcttgatagaccatcctaatgtcatcagggcttactgctcatttgttgtggagcacagcctctgggtgataatgccattcatgacagagggttcttgtttacacttaatgaagatctcataccaggaaggttttgatgagccgatcattggctccattctcaaggaaactcttaaggctctggattaccttcaccggcagggtcaaatacatcgtgatgtcaaggctggtaatatccttatcgatggtgctggggtagtgaagcttggagactttggtgtttctgcttgtatgtttgatagaggtgataggcaaagatctaggaatacatttgtaggaacaccatgctggatggctccagaagtgctccaacctggcactggatataatttcaaagctgacatatggtcatttggaatcactgctcttgaactagcacatggccatgctccattttctaaataccctcctatgaaggttcttctcatgaccctccagaatgcaccacctggtcttgattatgaacgtgacaaaagattctcaaagttgtgaccagtcatttaaagaaatggttgcaatgtgcttggtcaaagatcaaacaaagagaccaacagctgagaagttgcttaagcattcatttttcaaaaatgcaaagcctccagagttgactattaagagtatcttatctggtttacctcctctctgggaccgtgtaaaggctctccagcttaaagatgaagcacaattggctttgaagaaaatgccttcttctgaacaggaggccctctccctgagtgaatatcaacgcggcgttagtgcatggaacttcgatatcgaggatctcaaggctcaagcatcattaattcatgatgacgagcctcctgaaataaaagaagatgaggacattgcaagaaacattgaggttgaaaaggttgaagcaaaatgcaatggaatatctgtatgtaactgtcaccttttggcccttcaacaggacttgtcttcacggaaccatttgggaaagtcatttgcaaatgagtgcaattccaggcagcgagcctttgtcaccactttaaaatcggatggaaacagacccaccacgaatgaagcttttgattttgattttgattttagcgaggctgccactacaagaagggctgatggacatgaaagaaacataagagagaatgattcattgccctctacagcaaagcgagatccagagtcgaatcattggacaagtgacgttgggcagagacaactgtcttctggtgggagcaatagctcaacagctgaaaggggctatggttttgagagggatgcagttgtgcaaacaatacctgaaaaacaaagaagtgaggcgagaaaaacagcaagccttagtggtccactttcactgccaactcgtgcttctgcaaatagtctgtcagctcctattcgatcttcaggaggttttgtagattcatcaggtgacaagtccaaacgaagtgtagtagagattaaaggccgcttttcagtgacatctgagaatgtcgatcttgcaaaggttcaggaaggtccacttagtagcctctcacggaaatcaccagagggttcactgctaaaaaaatctgccagcactggtgattgtttgattaatactaagctgatgcgtaacgctaatcagctgaaggaattctgcaatagttctgtatcatcttcagtattaattccccaccttaacaaccttgtgcaacagaccatgtttcagcaggatgtaatcatgaacctacttagtaacttgcaacaggatgagaaagttgatagaacacagcctggaatatcttctcaagtccgaacgatggagaatggtaaagtggctgatacagctaactctgagaaggaacggtcattacttgttaaaatttcagaattacagtctaggatgataacactgactgatgaactaattgcagctaagacaaaacatgttcagttgcagcaagagctaaatgctttgtactaccgagaagaaattgaggatgttagggatgaggatatcgaagaaacatag

SEQ ID NO: 94850 - DNA, 1218 bp, Zea Mays
gtcggggtcatcaagagcagctttgctatattatacaaatttttatgaactttaatagagtttttctaaaggatttataaaatttatcggggtcggctgaccccgataaaccccctaaattcgcccctggatccatataataatagagagtaaggaggacaccgttaaagacaaatcccatttattcaggtccattcccaggttccccagagatcgagccgcttgcactggcatatcgatccatctgaaccagagggatcagatggtgtttaatattcttgcttgaatggcactagtagtatatacacgaacacgacaaacacaagtccacaggccatgcatgcacgcacgcacgctcggaagcgcaagcgcgtcagtgcttgcggtggtggttgttggcggcttcggggccgtcgcggtcggcggcctgcttgaggtggtgcgtgggcgtcggcgtctgcatgagcgcgagcgcgcgctcgaactgcgcccagcgctgctccagcgtgccgttgtagccgacggacatgcggacgaggcccggggagatgcccgcgcgcgcgcggtcctcgggcggcatctcgctgctggtgctgctgccggagcaggacatgagcgtctcgtagtagccgaggctgacggccatgaggccgaactgggtggtgttctggaggtggtgcatgaggcggttggcgcgctcctcggtgcccatgtcgaggcacagcatgccgccgcagccgtagcccgggttgcccatggcggccaggcgcgcgtggtgcgggtggcccgggaggcccgggtacagcacgcgcaggcccagcccctgcatccgctcggcgaacgccagcgcgcggcgcgagtgctcctgcatccgcagcggcaggtgcggcagccgctccgacagctcgaacgccaccttggcgttcatcgtggggcccagcagcatcagcgccccctcctgcaggtccatcatcgcgttcaccaggctcgccggcccgcagatcgcgccggcgatgatgtcggcgccgccgctgatgaacttggagacgctgtggacgacgacgtcggcgccgaggcgcgcgggcgacaccaccacgggggtgaaggtgttgtccaccacgagcttggcgccggcctcgtgcgccacccgcgcttcagggtggccagctcggaggcggcggacagagtctgggccattgggacggggaccgtgcgttg

SEQ ID NO: 94851 - DNA, 1406 bp, Zea Mays
cgccaacacaagaacacacacaccaaattccaaatctcgggcagctcatttcgctcaaccactcccccaccggctgccccctcgtcgcagctaaggtttcacctcccgctcgtcctcacatccgtcatgatcgcgatggacggctgccatgccatgcctccccgcgtctccagcaccaacctccccgcgtctccagcacctagtggccacggcggtaggtccggccgtccggctctctctgctgccgtgttctttgtcacgattcattcctgcctttatggttgtttaatgtcgtctgtttttttgccatgtggttctgccctgttgccatttgaatgcctagttttacgtgtccagtgtacttgacatgcggactccagccaaaattgaccccacatgtcagtgactggatttgataaacgaacgcatcgattgtgccagcatctttattttattattatattattttggtgacttaaaaattcagcagcagcagtaatcatttcacatatcatgaccttgcttgccgcctcctagaccacggtacctatgtgtgtgcgtgcgcgcgtgcgtctacaaatacatacccatgcatgctcctcacacaccttgccaagaaatagagatgagaggatgagaggggctcgatcgggagaaagaagggggaaagatatgaagctacttgcttctgagtggaatgttgtctggttcaaggtcttgctttccgatttgaggatgatccatgcttgcatgtgtagttttttttgttcctcagatctacaagatctcggaccaggcttcattcccctcaggaatagcttcaaaataataccgccggagagttattaggaggagctgctagtactacataaacttgtgttcttggtctttgattctgaaatattttcttggagttttcgtgagtttcctggttgttcttgtagtacagtggggagtactactgtgttttccactcctagctagctagatcttacttttccacacagtgcctttttttttgtttgcttgcttgctgcagagatcgaggtcgaggagcagcaagattggtgtaatgatggcctacttcctcttctctttcttctgtgtatctggcaggtgatgaaagttttcatcattacattttgattgggagaatcttcgctctctctctctctctctctctctctctcctctctatatagcacgttctctatctcttttcttcttcgtattcattgttcctcctctccatctctctactatgcctgcacggactgttgttacggtgctcacatggttttgtagagcatggtatttaaacaaggctggtgtaaactttatatggagatttgaatggtttgtactagtttttggccaacctccaacatttttgaagtgttgagagc

SEQ ID NO: 94852 - DNA, 150 bp, Zea Mays
atgtttatatggagatttgaatgggtctctagtctttggccagcctccaacatttttgaagtgttgaaagcatcttcaagagtctttctaaagcctagtctctaaatcgttaattagagagccatttgcacaaaaaactttttcacactc

SEQ ID NO: 94853 - DNA, 3182 bp, Zea Mays
cttccatttccacaagacccttgcgtgctctctctctctcctcttggcgacgactgggtggcaggtgcccaggtcttcttgggacccttcgccggcgacaagcaccaccaggttcagtcatgagtgggcttctcatgagcttccctaagtgatgcttcatatgttttctaacatgtaacatctcccgatgttatccatgtactggatatatccttagaagtcagagatgcagaagtctgatcatcatgagcagaagctaacttcaccaagagggttaatccataagatacttcgtcgtacaaatagcaggcgttctcccactgcagctgaccaacaaccttctcctgtatctccagaaacaagcaactcatcaatattctcaaagcaaaaggatgttgatgatgccatcaaggattcagaaaagctgagcacacatactatcagaattgaagatgagaaatctgatttgctagggtctgaaatttattctggaaagcttacattagataacaaaacaaaaagttcatcaaatgaacagtctggatcaggatctagtagcaattgctttgatgctaggctcagcactgaagccctaatatggggttctaacatccttaagcttgaggatattgtatctgtatcatataattctggtctccggtatttcaccgtgcatgcttgtcctcttgaaaaaatatccagtggactatcctgctttatgaagcctagaagaacccaaacggacttgaagttcgtatcctcttctccgcacgaggcctttcggtgggttaatagttttgcggaccagcaatgttacgtaaacctgttgcctcaccccatggcatctagcaagaagcattcttctgaactcattcagtttgatgccatgtttgatccttatgttaaatgtcggtctccaccaaagatacttgtcatcttgaatcctcgatctggacatggtagatctagcaaagtttttcatggaaaagtggaacccatatttaagtatcttaggaactttggtattgtatgtgtgggtggtgatggaattgtaaatgaggtcctcaatggtcttctatgcagagatgatcaaaatatgtctgcctctgtaccaataggtataatacctgctgggtctgataactcacttatttggacagtcttgggtgtcaaggatccaatttctgcagcattgtcaattgtcaggggaggtcttacacctattgatgttttttctgttgaatggattcaaagtgggactatgcattatggtacaaccgtatcatattttggttttgttagcgatgttcttgagctctcagagaagtatcagaagcattttggtcctttacgatactttgtagctggttttctcaaattcctgtgtttgccaaagtacagttttgaattggaatatcttccagtatcagatgttaatggcgccgagcataaaattttggtaggacaagaaaaggttgacgcgtctgatctatatgatgatgtaattcggagatcaagagcagaatgtttaccacgcgcctcaagtttatctagcattgattcaataatgtctacaggcatcatgtctggggcagagctggaggtttgtagtcctcgtgcaaataatgaaccttctgaggttgttcgtggacttgatccgaaatcaaagcgcttatcgttaggaagagctagtacatttaaagaaccagaagaagtgctccatccccactcccatggtacatctactcccagctggcgtagatctaagtcaaaatcaaggactgaaaaggcaaagccaggcttgtctgctacacacgatgcaaaatcttctaaggttaatgcagacaaagaggacacatcatccacaatttctgatcctggacctgtggctgtatgggattcaggaccaaagtgggacgatgaacctaaatgggataatcaacctaactgggaacccgagacttcaattgagctccatagccctcgcgaggatattgagcttggtctgactaaggagctggtacctagtttagatgaaaggtggacagttaggaaaggacgctatcttggtgtactggtgtgcaaccattcatgcaagactgtgcagagtctgagctctcaggttgttgctcccaaggctgaatatgatgacaattgtttggacctgctgttagttggtggaagtggaagactgagattactgaggtttttggtgcttttgcagtttggaaagcacatatctcttccaaatgtagaatatgtaaaggtgaaatctgtgaggctcaaagcaggcccaaatacacacgacggatgtggtatcgatggcgaactactccatgtcaaggggcaagttcgctgtagtttgttgcctcaacaatgtcaattgatgggcaggccagtgaaaaaccctgtacagtagctgtaaatacactatgcggactgtctgcagctctgaggtcagcccagaatcttgcacctgtggtgtgtacaagcggcgaaccatggattttcgtctgcatccacatgtcagtaattatattcagaagtgagaacatgaacatcctagctggcactcagctccagagatgtacatttgtggttgacgagcagaaggtgctgagtgggtgctgtttcatccatatgtaaagccaaagcctatctcggacagcagcttgttgcgcacctcttgcttttgcctttttctcgtccgatagaatgcatctactatacagccatcctgatgagtgtacttggttgctccagaacatagtgtccacctccaccagccgggtgtctttggaggttccctgatgccggccacttgatactcattgtagggacaacaccccagtgcccgtgtccttgatcagtctgttgtgtttgcgaagtgtgaataagatataggactgtttgattcccggtacagcgcagggtttcagcagaaagggctggatggatgatgttttgtggcgatgctgcctcgttgagtctttaaaacgggtgtaactcttcttcttttgtgagtcgtgatgatgtatgaaccgtgtactgatttgtaaaccttgcctggcaggcatacaactgtttctgaggtgtggtattctctgccggggaataagcagcgtagcttctcctttcgtacgctgccagcaaagcagcgctcgtgctagtatgaacaactt

SEQ ID NO: 94854 - DNA, 876 bp, Zea Mays
agggatcaatacacgaacgaatttcattttgtggcggtggctaagaactagtttatgaagaagtcccacatagcacaatagtaaaagcaatactaactggatcaggcaatcagagttgtagccaccagctttacaattcaatcccagcaaaatgttcaagataagctagatacctggtggaatccgtattcgcgggataggggcacaccgagctctgtaatgcaagcatggaggcgatcgtcgcttccatacaacttggggtacctcttgatgcacacgtcgagcgtctgtgcgagtgcagcggcgagtgggaagctgagcgcgatgccgccacctccgaaagccatgctatggctgaagtatgtgttagcggagtggctctcggacagcgccccgacgtacaccatttccctctagtcgtacttgctgagcacggcgaccaggttgtccgcgcgcaggacggtgtcgtcgtcgacaagcgcaacccaccgcgcccccgcccctccgccgacgagccgcacgacctcagcggcgatgcgtgcgatccggagccccgacgggtggcccgtggggttggtgtacctgaaccgcgaggtgtccgcggacacccggatcggcgggagggagcccacccagggggtgctaggccccggcgcgccgggcgcgcccgcgtcgagcccgacgttgccgcgcatagtggaggctggagggttcaccacaagtggacgtactcgcggcggcgtggccagagatgcgccgaccccgcaacgccaaagacgatgtggccgagcgagagagacgaggccgcgccggggcccggggctgcggcgcccgcattcgacagcgccgagtgctcagaggcaaccgcgccccctc

SEQ ID NO: 94855 - DNA, 306 bp, Zea Mays
atggtgttgtacgagacgctccggctgtacagcgcggtgccgttgatcgtgaggcgggcgacgacgggcgcggaccactgcggcgtgaaggtgcccaagggcaccctcctgctgatcccgatcgcgatgctccaccgcgacgaggaggtgtggggcgcggacgccggcgcgttcaacccgctccagttccgggacggcataggcagggccgcgatgcacctgaacgcgctgctgtccttcttcctgggcccgcggtcgtgcatcgggcaggacttcgcgatgccggataactgtaatctttgctga

SEQ ID NO: 94856 - DNA, 2334 bp, Zea Mays
ctgccattcccctgcggccctgccccatactcccgtgtcttcccggccttcttcggatggccagacccctccttctccaaaaatcccagaataccttgggctcccgagcaggagagagcaatgcaacgagccatccggatagccgcggctgcgacaaggcgagcgctgtcgtcgtcggcggcgagggcatcaccccctcctccccgcggacccctggctcctggctggggcgccactaggtggctctgcagcgggcgggaggcgctgagctacgacgtggtgatcgtgggcgcagggcccgcggggctcgccgcggcgatccggctgaagcagctctgccgcgctgctgacaccgacctctccgtatgcgtcctggagaagggctccgaagtcggtgctcatgtgctgtcggggaatgtgtttgagccccgagccttggacgagctcattcccaagtggaggcaagaggattctccaatcagagttcctgtttcatctgacaagttctggctgttaacgaagaaccaagcttggacactaccatctccatttgacaacaaaggaaactacgtgatcagcttgagccaattggtgcgttggatggccacaaaagctgaagagttgggtgttgaagtgtatccaggttttgctgctagtgagatactttatgatgaaaatcaaatagttacaggagtcgcaaccaatgatgttggtattgctaaggatggtaccaaaagggaaacttttcaacctggtgtagaactaagagccagcgactttgaaaatacagggcgaataacactgcttgctgagggttgccgcggttcgttatcagagaaaataataagaaatcacaagctcagagagagagggcaagggcaacatcagacatatgctcttggaattaaggaggtttgggagattgaagaaggaaagcacaatccaggttctgttattcatactgttggatggcctttggatactaaaacatatggaggatcattcctgtaccaccttgatgatagacagttggcaattggtctggttgttgcgttgaattatcgaaatccgtttctgagtccctatgatgaattccagaaatttaagcagcaccctgctgttagaaaacttttggaaggtggaacagctattcagtatggtgcacgtactctcaatgaaggtggtttccagtcaataccatatccaattttccctggaggtgcaattattggatgctctgcaggatttctaaatgttcccaaaataaaaggaacccatacagctatgaaatcaggtatgcttgcggcggaagcaactttcaagtccctcgttgaaggatcttcgatggaactgtactgggagaacctcaagaagtcatggatatgggaagaacttcataaagctaggaattatagaccagcatttgaatacggattaattccgggtatggttttgtctgcactggaacgctacatattcaaagggaagtcaccttatacattgaagcatgggagacccgatcatgaagcaacagacacggccaatctgcatgcgcctattcaatatcctaaaccagatggacatataacatttgatgtcccaacatctttatacaggagcaatacaaaccatgagcatgatcagccgcctcatctccgcttgagggatcctacagtacccgaacgagtaaatgttgcactgtatgcagcgccagaatcacgctattgcccagcccgggtttacgaatatatctctgatgagaaaggtgacccaaagcttcatataaatgcacagaattgtcttcattgcaaggcttgcgacatcaaagatccaaagcagaacatcgagtggacagttccagaaggtggaggtggtcctggttacacagtaatgtagaatgctcaatgatgaaaatatgttgccttcaaaaataataacggctcattcaccactggtgtcaaactggaccaaatccctggctaattgggttggaagttacaccagacatctagcaatgagcaacttccttaaagcagtagacaggatgtcaggatgttcctagagctatgtaccgatcaggatcagtcagggaaagaagcgtgcatcacatggatgtggtgactgtaaaactattgggaagatgcaatttgtcgaccaataacaggcgctgtaagagagatctgtcccaaacgaaagatcgtaaggtgagatggagaatggcccagagctgggaatgtattaaaatagacagagtagataggccaagccccttatatatgggtatataggtaaatacatgaggactaatccaaaaccctagcgaggttgctaaca

SEQ ID NO: 94857 - DNA, 2183 bp, Zea Mays
ctgccattcccctgcggccctgccccatactcccgtgtcttcccggccttcttcggatggccagacccctccttctccaaaaatcccagaataccttgggctcccgagcaggagagagcaatgcaacgagccatccggatagccgcggctgcgacaaggcgagcgctgtcgtcgtcggcggcgagggcatcaccccctcctccccgcggacccctggctcctggctggggcgccactaggtggctctgcagcgggcgggaggcgctgagctacgacgtggtgatcgtgggcgcagggcccgcggggctcgccgcggcgatccggctgaagcagctctgccgcgctgctgacaccgacctctccgtatgcgtcctggagaagggctccgaagtcggtgctcatgtgctgtcggggaatgtgtttgagccccgagccttggacgagctcattcccaagtggaggcaagaggattctccaatcagagttcctgtttcatctgacaagttctggctgttaacgaagaaccaagcttggacactaccatctccatttgacaacaaaggaaactacgtgatcagcttgagccaattggtgcgttggatggccacaaaagctgaagagttgggtgttgaagtgtatccaggttttgctgctagtgagatactttatgatgaaaatcaaatagttacaggagtcgcaaccaatgatgttggtattgctaaggatggtaccaaaagggaaacttttcaacctggtgtagaactaagagggcgaataacactgcttgctgagggttgccgcggttcgttatcagagaaaataataagaaatcacaagctcagagagagagggcaagggcaacatcagacatatgctcttggaattaaggaggtttgggagattgaagaaggaaagcacaatccaggttctgttattcatactgttggatggcctttggatactaaaacatatggaggatcattcctgtaccaccttgatgatagacagttggcaattggtctggttgttgcgttgaattatcgaaatccgtttctgagtccctatgatgaattccagaaatttaagcagcaccctgctgttagaaaacttttggaaggtggaacagctattcagtatggtgcacgtactctcaatgaaggtggtttccagtcaataccatatccaattttccctggaggtgcaattattggatgctctgcaggatttctaaatgttcccaaaataaaaggaacccatacagctatgaaatcaggtatgcttgcggcggaagcaactttcaagtccctcgttgaaggatcttcgatggaactgtactgggagaacctcaagaagtcatggatatgggaagaacttcataaagctaggaattatagaccagcatttgaatacggattaattccgggtatggttttgtctgcactggaacgctacatattcaaagggaagtcaccttatacattgaagcatgggagacccgatcatgaagcaacagacacggccaatctgcatgcgcctattcaatatcctaaaccagatggacatataacatttgatgtcccaacatctttatacaggagcaatacaaaccatgagcatgatcagccgcctcatctccgcttgagggatcctacagtacccgaacgagtaaatgttgcactgtatgcagcgccagaatcacgctattgcccagcccgggtttacgaatatatctctgatgagaaaggtgacccaaagcttcatataaatgcacagaattgtcttcattgcaaggcttgcgacatcaaagatccaaagcagaacatcgagtggacagttccagaaggtggaggtggtcctggttacacagtaatgtagaatgctcaatgatgaaaatatgttgccttcaaaaataataacggctcattcaccactggtgtcaaactggaccaaatccctggctaattgggttggaagttacaccagacatctagcaatgagcaacttccttaaagcagtagacaggatgtcaggatgttcctagagctatgtaccgatcaggatcagtcagggaaagaagcgtgcatcacatggatgtggtgactgtaaaactattgggaagatgcaatttgtcgaccaataacaggcgctgtaagagagatctgtcccaaacgaaagatcgtaag

SEQ ID NO: 94858 - DNA, 2158 bp, Zea Mays
ctgccattcccctgcggccctgccccatactcccgtgtcttcccggccttcttcggatggccagacccctccttctccaaaaatcccagaataccttgggctcccgagcaggagagagcaatgcaacgagccatccggatagccgcggctgcgacaaggcgagcgctgtcgtcgtcggcggcgagggcatcaccccctcctccccgcggacccctggctcctggctggggcgccactaggtggctctgcagcgggcgggaggcgctgagctacgacgtggtgatcgtgggcgcagggcccgcggggctcgccgcggcgatccggctgaagcagctctgccgcgctgctgacaccgacctctccgtatgcgtcctggagaagggctccgaagtcggtgctcatgtgctgtcggggaatgtgtttgagccccgagccttggacgagctcattcccaagtggaggcaagaggattctccaatcagagttcctgtttcatctgacaagttctggctgttaacgaagaaccaagcttggacactaccatctccatttgacaacaaaggaaactacgtgatcagcttgagccaattggtgcgttggatggccacaaaagctgaagagttgggtgttgaagtgtatccaggttttgctgctagtgagttacaggagtcgcaaccaatgatgttggtattgctaaggatggtaccaaaagggaaacttttcaacctggtgtagaactaagagggcgaataacactgcttgctgagggttgccgcggttcgttatcagagaaaataataagaaatcacaagctcagagagagagggcaagggcaacatcagacatatgctcttggaattaaggaggtttgggagattgaagaaggaaagcacaatccaggttctgttattcatactgttggatggcctttggatactaaaacatatggaggatcattcctgtaccaccttgatgatagacagttggcaattggtctggttgttgcgttgaattatcgaaatccgtttctgagtccctatgatgaattccagaaatttaagcagcaccctgctgttagaaaacttttggaaggtggaacagctattcagtatggtgcacgtactctcaatgaaggtggtttccagtcaataccatatccaattttccctggaggtgcaattattggatgctctgcaggatttctaaatgttcccaaaataaaaggaacccatacagctatgaaatcaggtatgcttgcggcggaagcaactttcaagtccctcgttgaaggatcttcgatggaactgtactgggagaacctcaagaagtcatggatatgggaagaacttcataaagctaggaattatagaccagcatttgaatacggattaattccgggtatggttttgtctgcactggaacgctacatattcaaagggaagtcaccttatacattgaagcatgggagacccgatcatgaagcaacagacacggccaatctgcatgcgcctattcaatatcctaaaccagatggacatataacatttgatgtcccaacatctttatacaggagcaatacaaaccatgagcatgatcagccgcctcatctccgcttgagggatcctacagtacccgaacgagtaaatgttgcactgtatgcagcgccagaatcacgctattgcccagcccgggtttacgaatatatctctgatgagaaaggtgacccaaagcttcatataaatgcacagaattgtcttcattgcaaggcttgcgacatcaaagatccaaagcagaacatcgagtggacagttccagaaggtggaggtggtcctggttacacagtaatgtagaatgctcaatgatgaaaatatgttgccttcaaaaataataacggctcattcaccactggtgtcaaactggaccaaatccctggctaattgggttggaagttacaccagacatctagcaatgagcaacttccttaaagcagtagacaggatgtcaggatgttcctagagctatgtaccgatcaggatcagtcagggaaagaagcgtgcatcacatggatgtggtgactgtaaaactattgggaagatgcaatttgtcgaccaataacaggcgctgtaagagagatctgtcccaaacgaaagatcgtaag

SEQ ID NO: 94859 - DNA, 1909 bp, Zea Mays
aattgatgtccccaggccgcctccatccaacaccaagccacagccactggtcaccggtacactctgatccgaacaatggacgcgacgcaactgaaccgatcgatggacgccacgccgacgcggctcttccttggcgcgctcctcttcctcgtccccgccgcgctcctcctcctgctccgcgcgcggggcaggcgccgcctccccccgggcccgccgtccctgccgctgctcggcagcgtggtgtggctcaccaactcgcccgccgagatcgagcccctgctgcggcgcctcttcgagcgttacggccccgtcgtggcgctccgcgtcggggcgcgcttgtccgtcttcgtcgcggaccgccgcatcgcgcacgaggcgctcgttgaccgcggcgcgacgctggcggaccgcccggcgctcgcgtcggtcaagttcctcgacgagagcgacaacaccatcacccgcgccagctacgggcccgtgtggcgcctgctgcgccgcaatctcgtcgccgagacgctgcacccgtcgcgggtgaagctcttcgcgccggcccgtgcatgggtgcgccgcgtgctcgtcgagaagctcggggaggccgggcccgacgccgcgccgccccgcgtagtggagacgttccagtacgcgataaactgcctcctcgtgctcatgtgcttcggcgagcgccttgacgagcccgccgtgcgcgcgatcgcttctgcgcagcgggaggcactcatctaccgctccaagaacatgcaggtcttcgccttcctccctgccgtcaccaagcacctcttccgcgctcggctagataaagcgcgggcgctgcggcggcgcgtcaaggagctcttcgttccgcttatcaacgcgcgccgggagtacaagaagcggggagaggaaccgagaagggaaaccacgttcgagcactcgtacgtggacacgctgctcgacatcaagcttcacgaggacggcgatcgcccgctcaccgacgatgagattatcctcctatgctccgagttcctcgacgccggtacggacaccacgtccacagggctgcagtggatcatggccgagcttgtgaaaaacccagccatccaggagaagctctacagcgagatcaaggccgccacagacgacaacaaggaaggggtgtcagaggaggacgtccacagtatgccatacctcaaggcggtgatcctcgagggtctccggaagcacccgccggcccacttcgtgctgccgcacaaggcggcggaggaaatggagatcggcgggtacctgatccccaagggcacagttgtgaacttcatggtggccgagatgggccgggacgagcaggagtggaagaacccgatgcagttctcgccagagcggttcctccccggcggcgatggcgagggcgtggacgtgacgggcaccaaggcgatcaggatgatgccattcggcgtgggccggaggatctgcgcggggcttggtatcgccatgctgcacctggagtacttcgttgccaacatggtgcgggagtacgagtggaaggaggtgcccggcgacgaggtagacttcgctgagaagaacgagttcactgtcgtcatgaagaagccgctgcgcccgcgccttgtgcctaggaggtctcacttgaactagaaatactttaccattttctattctacattttcctcgttttgtgatgtatgtaaacatctcatagctataaaaaaatacggttctacaataattaatcggcagaaactgtaatgttcattcgctagtttcatcttcgtgtcgatcgtggatggcttgtgaatatggaaacatgattagcaaaactatgctaattataaataacagtgctgctcttctgaaaacttaaactgttgatgcatctgtcttcagatgctcttggttc

SEQ ID NO: 94860 - DNA, 1983 bp, Zea Mays
aattgatgtccccaggccgcctccatccaacaccaagccacagccactggtcaccggtacactctgatccgaacaatggacgcgacgcaactgaaccgatcgatggacgccacgccgacgcggctcttccttggcgcgctcctcttcctcgtccccgccgcgctcctcctcctgctccgcgcgcggggcaggcgccgcctccccccgggcccgccgtccctgccgctgctcggcagcgtggtgtggctcaccaactcgcccgccgagatcgagcccctgctgcggcgcctcttcgagcgttacggccccgtcgtggcgctccgcgtcggggcgcgcttgtccgtcttcgtcgcggaccgccgcatcgcgcacgaggcgctcgttgaccgcggcgcgacgctggcggaccgcccggcgctcgcgtcggtcaagttcctcgacgagagcgacaacaccatcacccgcgccagctacgggcccgtgtggcgcctgctgcgccgcaatctcgtcgccgagacgctgcacccgtcgcgggtgaagctcttcgcgccggcccgtgcatgggtgcgccgcgtgctcgtcgagaagctcggggaggccgggcccgacgccgcgccgccccgcgtagtggagacgttccagtacgcgataaactgcctcctcgtgctcatgtgcttcggcgagcgccttgacgagcccgccgtgcgcgcgatcgcttctgcgcagcgggaggcactcatctaccgctccaagaacatgcaggtcttcgccttcctccctgccgtcaccaagcacctcttccgcgctcggctagataaagcgcgggcgctgcggcggcgcgtcaaggagctcttcgttccgcttatcaacgcgcgccgggagtacaagaagcggggagaggaaccgagaagggaaaccacgttcgagcactcgtacgtggacacgctgctcgacatcaagcttcacgaggacggcgatcgcccgctcaccgacgatgagattatcctcctatgctccgagttcctcgacgccggtacggacaccacgtccacagggctgcagtggatcatggccgagcttgtgaaaaacccagccatccaggagaagctctacagcgagatcaaggccgccacagacgacaacaaggaaggggtgtcagaggaggacgtccacagtatgccatacctcaaggcggtgatcctcgagggtctccggaagcacccgccggcccacttcgtgctgccgcacaaggcggcggaggaaatggagatcggcgggtacctgatccccaagggcacagttgtgaacttcatggtggccgagatgggccgggacgagcaggagtggaagaacccgatgcagttctcgccagagcggttcctccccggcggcgatggcgagggcgtggacgtgacgggcaccaaggcgatcaggatgatgccattcggcgtgggccggaggatctgcgcggggcttggtatcgccatgctgcacctggagtacttcgttgccaacatggtgcgggagtacgagtggaaggaggtgcccggcgacgaggtagacttcgctgagaagaacgagttcactgtcgtcatgaagaagccgctgcgcccgcgccttgtgcctaggaggtctcacttgaactagaaatactttaccattttctattctacattttcctcgttttgtgatgtatgtaaacatctcatagctataaaaaaatacggttctacaataattaatcggcagaaactgtaatgttcattcgctagtttcatcttcgtgtcgatcgtggatggcttgtgaatatggaaacatgattaggcctttttcgtttgtgttggattggtgggtcggaacgatttctgaccggattgcttctctaatttatataaactttgattaggctctgttcgtttctcccggaatgaccctggaatttttcaggttgatcaaaacttacataaattagaaaagcaataa

SEQ ID NO: 94861 - DNA, 437 bp, Zea Mays
cacagggctgcagtggatcatggccgagcaggagtggaagaacccgatgcagttctcgccagagcggttcctccccggcggcgatggcgagggcgtggacgtgacgggcaccaaggcgatcaggatgatgccattcggcgtgggccggaggatctgcgcggggcttggtatcgccatgctgcacctggagtacttcgttgccaacatggtgcgggagtacgagtggaaggaggtgcccggcgacgaggtagacttcgctgagaagaacgagttcactgtcgtcatgaagaagccgctgcgcccgcgccttgtgcctaggaggtctcacttgaactagaaatactttaccattttctattctacattttcctcgttttgtgatgtatgtaaacatctcatagctataaaaaaatacggttctacaataattaatcggc

SEQ ID NO: 94862 - DNA, 2176 bp, Zea Mays
ctcgaactttccaccgttcacattaatagcttttcctcttctttccccatccaccctcgcaccctcaccgaaaggagaaggcttcagccttcaagcgcacacagccacgcaaatcccctcttcatcaacctcgactcgagtccgcgcgcgtccccgaatcgagaggagatgagtcgtccgcatgacggtcacaggtccttctttcccatggggaatcccttcaggatgattctcccaagaggagcccgcctgtcaccgaagctcactgagctgctcacttcgtatgaggatggcctggcctcgagcttgaggaaggtcaagccagaggccacctcagaggtgttcacactatcatggatgaagctcgcagtggagtgcttatcagagctgcacaccaatatagccaccctgattactgagcttgagttgcccttatcagactgggatgagaagtgggtggacatttacctgaacagcagtgtgaagctgctggacatctgcattgccctgagctcggagctctctcggttggatcaagggcagctgcttgtgcgatatctcctgaatgtgttggactctgggagcgacatgccatcccaggagcagatcaggagagctgaggtgtcgcttaaggaatggatagagcgagcaagtgaaaggtctccgaggcttgatagttgcttggcagcgctacaggagctttctggaaacctttgcctgatgaaggttaggcattctgctaaagggaaagtgctcatgcgagcattgtatggaatcgaggctgttaccgtcttaatctgcagtgtacttgtagctgtactgtcgggtaccttcaagccactggttgactttgatgtccctgagaaatttggttggtctacggccttcattgatcttcagaaggccataagcggtgaacttagcaggcaactgtccagaggtagtgttgcagcgttaaaagagctggaggatgttgatgtatgtgctagacagctgcatacattgacttgcactgctcagcttgaagaggagaatgccagcctggctcattcatttagccgttcaaaggaagtggtcctgacagatactacagcccagggaagaggccatgtggataatctcaagttggctgatgatagtagctgtcagcatgaagtgatcatgctgcaaagtattactacagaaggaggaattggtacagctgatatcaaggaggataccgagaccattggccatacaagggaagtgatggcgcctgagaaaataattgacagaggacaccaagatgataacacaaagcaggacactggtgttgtcactgatatcagttgcttggaaaggagagaggaactgctgaactgcatctcccagatgtcgaaaagcgctgaaaggctccagttggggttggactcgctgtcgaagcgggtggataacttcttccatattgtgcttacagggcgtgatgcactactttgtaatctcaggttttcaaacggcggcaaggttgctgcagaggtcaggtcttaatatgccatctcatgtttgtgccatgtaatgcgtgtatagacagctcagcggcccatcgtgatgtgtggtgcttctgacttctggcccctgctcagctccaccaacactaagccggggccagatctcagaagcattgtgcatgatatgtgcctctagctgtgctgtgcaaacgcttatatagcttccctttttggttaagtatgaactagtgttctgttgagtaaatagtgctgttaagttggtgtcgggtggaatgtacaccatctagagttgagcaactgtatgtatgctcatgtgtcctggtaacggaggtgaaaatgagttgcaaatgttgatccctgtttgtctgttggataacctaaactggtaatgtacaaatttcaatgtatttgtacatcatgttggcatcataagttcgacctagagtgctgttggtataagtaggaactacataccctttttgtgagtagggactggaatgttcgcgagttggtgtcggtggaatgtataacctctagactctagagtagagtaactgtatgtatgctcgtgtgtgctggtaatggagatgaaaatgagttgcagacagcaaaatgttggtccttgtctctctgttggataacttaaactggtatgtacaactttcttt

SEQ ID NO: 94863 - DNA, 987 bp, Zea Mays
atgtctcgcgcccgtggccagtgtgcgtcgtcagcggcggaagctgcgctgcgtgcgcggcgtctcaccgttctcgtccctgagcttcaccgccttgtacacgctggcccccgccaacgcgcccagcgtcggggccagcaggtagatccagagctgccggtagttccccgccgccacggccggccccagcgtcctcaccgggttcatggacccgcccgtcgtcggcctggcgacgaggatgttcagcgttacggccgctcccaccgcgatcccggcgagttcacccactgcgcgggtgtcggtggcgacggcggtgacgacgaagaggaggttgaaggagatgatgaactcggtgaagaacgcctgggcggtggagacggtggcgtcgggcacggtgacgccgccggagaggaacgggtggaagacgcccttgagcgcgaaggcggcgcagacggatgccagcgcctggacggccacgtacgcgggcacctgcagccaggggaagtggcgcagcgccgcgaaggcgatggtgagcgacgggttcaggtgcgccccggagatgtgccccgtcgacaggatcacggtcgccaccgccagccccgcgcacgccgcgttcccgaacgggctgatcgcgccgccgtacttctggttcacgatcggcgccgccgtcgcgaagaagatgaggatgaacgtgcccacgaactccgcgcccagctgcgtgcagcagccaccacgcaaatgttttcagcgcgcggtcttgcgggtgagcgagacgtccggcgcggggatctcgacgacgcaggtgtgcgtcgccacgccccacccctccaccgccggcagcggcaggcacttgcaccgcggcatcgacttgcgctcgtacgacagcgagtccacccggggcccgccgctggagaacagcggcgccggcgtgccgggcgtcgccggcgccgacccgttcgggggcgtcgaccccggctccatggctag

SEQ ID NO: 94864 - DNA, 3459 bp, Zea Mays
atgagccaacccaacggcgtcctgaaaagtgtccggctgttgcagctcgacctccgtcttcaatggttcgcccaggcgtgcggtgaagatggcgatctggtgctgctccgtgagggtgtcacagtgggacaggtgcgcgaggaaggcctccgtgtagtcggcgacagacccttgcagacgaaggtggcacattttgctgagggggtgttgctgcgagttggcgggcaaatcgcagggggagggtgggggaaaaaatgcaggcgcaagatggctggttccggtaccaaggtgtttgggaaactgggatttctattggaaaactggaagaggattacaaaagggggaggtaatcacccggctactcctaggagccaggatctacatgaaactaaacattgggtgctgcatgagtgtgtagaaaagttgcagcttctgaacactcctgaagaaacagagcgcatgattaatgaagctcctgaagtacatgttgatccccagatggatccaagttatgaatccgctgaagaacccgattataagaaagctgttgattggaccatgcatcggaacggaccagatctattatttccaggaagaaaagggacaaaattgaattctgtggagaatcatacacaaaatagtctggatgcaagcggtcacattagcagtctacctacagaggatgtggaccatagattaggtgctggaagtaacattaatttaaacaatatggcaccagagcctgcatcacttggagttttatcaaatgacactgagccagaaaaagtttggcactacaaagaccctaatggaaatgttcagggaccgtttactcttttgcagttatccaattgggcaagttttttcccacgtgacctgagaatatggcttacatttgagagtgaggagaactcactactgttgactgaagtgctcccaaagcagcagaaagattttattcagccttcaacagttactaccagtgataaatcaatatgggcaggctctggtcaagatagaattaactcaaatgcaaataactcttcctcccctagcttgtctgctgagtgctatgatccaacaaaatatctaaagcctctaggtggaacgtcaccatcaagatctctgaaagattctcatgctttgcatgaggtccagaatcaggttaacgattcatccacaattctttcttcagctggttcatatgtaccaaccagttctcatgatgaaagggtctcaagagacagggttgatgagtggaacagtagtcaggacaatggtggcatttggaatccaaccatgaatcatagtcggaagagtaatgcacagcaacatcctgacggttttacagggaaggaccaaatgctaactgaatctaaatgtagttcacatatggtctcagttcttaccccacaacaatctgagagagaccctgccacttctcttagtactacaagtcgtccggagtgcaaaaccatgtgccggcaggaaggttcttcatggagttcagctacaaatgctggagttcatgaccttcagttaactattgctttaacaaagccagagacatgttctccaacaaatcctgttgaagacagagattcgagttctgcttctgcggtgtcttgtcagtcaggggctcctgcctgcattccccaacccgatccaacatctacatgtaattcaagtaagattgaggcaaccatggatctgcataaaacatgccagcctgacacatcaaatgaatcattcggccggcttcctgaacctcaaagtggctcactcttttccttgaaaactctaaatcttgagtccgagcaccctagttctacgccaaaactggaggggaaggaaacttccatgaaccagtcaggatcaacatcagtagcacatgagaatttagctacaaagacacgtgtccgcccacctaccagtaaaattgatagcttgcaaccacttaaggaaagatcatgtccaacagaaagggactcaatcactcaattagagcatctgtttgaagagaatgtggtaaagagaaataacgaagtggtcaatcctgtatctgatgctgaagggattgctgtatcagatgtgttggaatcgttaacagaacaagattgtgaaaaatacagtacacatggagcagattgtgaaaaatacagtacacatggagcagcgcctttacaaaatttggtgccagcttcagccgaggaagaacaaccacaatgctccagtcctattgcattgtccccttggggggaaccaagttactatcagggtgaagctgttgattctgctctatggggcgtccaggatggtaatgacatgtggtcaatgccttcaccaacacctggtctccagccttcatcagctgatggaaaaaacgcttcatgcatcatagaggaggcgagagcggaccatggagatggtgcatttgtcgaaacattaccaagacaaggggacgaaaagacggaacatgcaaactcaagtgtctcaggttctggagtgccagaacaggtaaaaccaaaagcaagcactgcatcaggtccatctctagatgggagcacaaaagctttgggttggcaactgctgggctcatctctagaggggagtgcaaaagcttcaggctggaaaccgccagctttatcgattgaagggattgctaatgcctcaggttcgcaagcattgtatcctacgcaagggagcacaaaatcttcaggttgtcagcgatcaagttcatccccagatgggagtagaaaagcctcaggttggcaacagtcaagtacatcaccggtggggagtggaaaagctcatggctggcaacgatcaggttcttttacccagggtggtacaaaagctgcaggctggcaaccctctggttcttctacagatcggagtgcaaaagttgatggctggcaacgaacaagttcatctccggagggaaacagaaaagcttcaggctggcattcatcaggtcgtgagagctcaaagatcacatatggtgccagtgaaaaccgtaaatcattttctagccaccaagcgacgacaccaacagggagacactctttggcaaggaggcagggaagcagcgacaagggtgctgctggttgggaagagagtctaggaaacacttgggaagcatcaaagagacaacagagaaacagcgacaagaatgcaggctgcggagaggctctcggaagcaacaggacctggcacccatcgtctggtaaccccagtcggagcagccaggggaatcaccaacatgacaggcattctcacggcagtgattcgcggcggggtagctcaaactaccctcggaggtccgaccatcgtcatgaccatggcagtggtggttcgtcaagaccctcgtcaagagggcagccccagaggggggtttgtaaatactacgagaatggccactgctggaagggctcgaaatgccagtacctgcaccgatga

SEQ ID NO: 94865 - DNA, 1164 bp, Zea Mays
atgcctggaacaagcagtactacttcgttgacatataaataccttgagcaagttggtgttgattttgatgataaaaatagctgggagtatcttttcaagttatattggttggatctgaaagggaagcatttactaacgattgaagagctaaaaagtgcaaagaactattggactgttcctactactgctggtaggagagagaaagaggagtcatctgatgaactatatgatgcaagcaatgaccaagatgctacgtttgacatttcctcaaagaaacaaagacagaataactcttcaggaaaaagaggacaaaaacgtaaaaaagatggtggcattacttcaaggaagcgtggaatctcaattaatagtgctggaagcttaccgaatggatcaacaggtgaagggatgtccttggcaggtgacacaaaatgggcatcatctgagttattggaattcattggtcacatgagaaatggtgatagttcttatatttcccagtttgatgtccaggttcttttgctcgaatatataaagcaaaataacctctctgatcctcgcagaaaaagtcagattatctgtgatgcaaggcttagcaatttgtttagaaaaccacgtgttggtcattttgagatgttaaagcttttggagatgcattatcttgtgaaacaggttccaacattgaatgcagatagtgaaagagcatttgattcatactcggcccaagtaaatcatggaggatataatgagttgtccgataaattaggttctgataagaggaggaaggctcatatgaagattgaaagagaatcgacaattaatccagaggattatgctgccattgacatgcacaatatcaatctgatttacttgcgccgcagtgttatggaggatcttattgatgaggttgctgttttctctgacaaaattgctggggcttttgtgaggataagaatttccggtcttggcaacaagcaagatatgtaccgactggtgaaagttctcggtacacataaagttgcagagcgatacactgttggtaagaagacaacagattatgctcttgagatatctaatttagaaaaaaaagagattatcacaatggacacgatctcaaatcaggatttcacagagctgaatacctttaggatgtggtatattgtttaa

SEQ ID NO: 94866 - DNA, 840 bp, Zea Mays
aaaagaaaggactgcagcccgcgcccgccacgcctttctctcttccgtgcagctgcagactgccgtgccggtgcggtgcgccccgctcccgtccggccggaccccaaaaaaaaaccacccagaccgctgcgattttttacgggaaaggcttccccctgtttacggctttacgccaagcccgccagctcgcccgttgcattcccgtttcgagcttccgccctccctcctgtgtactatctctttccctctgcccaccgctcgcagtcgtacaccaaccacttcatttcggggccgtgagagagaggccgcgcggcggcgacgaggcccggagcgagggtggaggacgacttagggtttttggtcggctgatccatggacagggggacgggcccgggcgccgaggtgctctcccccggcgaggccgagtggcccccagagctccgcctcccgccgccgcctcctcccgtgccggagcccccagggccgcatccgcccgcccctgactccgcttcgatgcgaatgcccgcacctcatctacacctgcagcttcctcccgcggcggcggcgaggaaggacccgtctccgcctcgccacggggagggcttcgatgaccagctgttcctcggatcgctcatgggggctgcggccccgctccagcatcagcaccaccaccagcagcagcccgccgccgcggcaccggtgaagaggaagagagggaggccgccgaagaacagggacggtgcggcgccggtgcctgcgccggtcaagccggtgagcaagaaggatgaggaggtggtgtgcttcatctgcttcgatgggggcaacctcgtggtttgcgac

SEQ ID NO: 94867 - DNA, 2407 bp, Zea Mays
atctatctatattatatataaaaatcgcatttgactaatataataatatatatcataaatatttgttttgtatacattatgtagttagataaactcagaataatataacttgatactatactaaaaattatattgttttctgaatagggagcacaaaattgactcaaaataaaaggaaagaaaagaacgaagtaggtgtacacttgcactcgcaaaacaaaaaagaaacccgcacctctcttggacttggaaaaggaaaaaaaaaagaaccgcgcacgcttcttcttccctcccccacaaagggaagaaaaaaaatttccgtgtacggtttcgcccggcgccgcctttggcagttgctttgcttgctcttgccctgttgagctccaaaggatctccatttcaccactcccatcgatcccactaccggtccgcatcaagcagccggcgatggggtccgcgtccgcccgcatcgccaccgccgccgtgcacctcgtcaccgcggccgccatcctcctcatgctcgcgcgaggcggcgaggccgtcagtctctggctcccgccgccgaccgccggaggagggggcttcctcggcggcgcggaccgttacctgactcgggaggagcactggatgaaccaaaccctggatcacttcaacccgacggaccatcggcaattcaaacagcggtactacgaatttctcgactactaccgagctccaaatggcccgatcttcctatacatctgtggagaatctacgtgcaatgggattggcaataactacttagctgtggtggcaaagaaatttggtgctgcattggtttctcctgagcatcgatactatggaaagagttctccttttaacagtttgacaacagaaaatctacagttcttgtcatcaaagcaggctttatttgatcttgctgttttccgccaatattatcaggaaaccttaaatgccaagtataatcgctctggggcaaacagttcttggtttgtttttggagggtcatatgctggagcactcagtgcttggttcaggttgaagtttcctcacttgacatgtggaagccttgcaagttcaggggttgttcttgctgtatacaactttaccgattttgacaaacagattgggatctctgctggtcctgaatgcaaggcagcacttcaagaaataacaggacttgttgatggacagcttcagtctggccgtaactcggttaaggagttgtttggagcgacaaagttagaaaatgatggtgacttcctctacttactggcagatgctgctgctattgcgttccaatatggtaatcctgatgtcttgtgctccccactagctgaagcaaagaagaatgggacagatttggtggaaacatttgctagttacgtgaaagattattacattggaaaatttggggcgtcagtagcatcatatgatcagcaatatttgaagaacacaactcctgctgaatcctcatatagactatggtggtaccaagtttgcagtgaggttgcatatttccaggtggcaccaaaaaacgatagtgttcgttccccaaagatcgacacgaggtaccatttggacttgtgcagaaatgttttcggcgaaggagtctaccctgatgtctttatgacaaacttatactatggaggcacaggaattgcaggttctaaaattgtttttgcaaatggatctcaagacccatggcgccacgcttctaagcagaaatcatcagacgaattgccatcatacctaattgagtgcaagaactgcggacactgcagtgatctctctggatgccctcaagctccttcaaacattgaaggtgattcatccaagtgctcacctcccgaagctctgaacaaagtaaggaaggagattgtcgatcacattgacctgtggctatcagaatgccaagagcaaggacatgacaaggagccatggctgggaagcagatggagcatagctgctatttgatcaatctgtgaagctataagcatgtgctgctagagtaaccaaggcaaatatgctttctttttcttgcagcactgtggtttatcgtttcggcaaacaatgtgggctgctgagtaagaggacatatctggtgcacataaaaaattggtgcacatggtgcatatattaaattatcaccactcattttagatctaacgtctttagttgatcattcaatttacaaataacaccttccaggcttccaccactacacaccaccacgttggagggtgcttttagcaaaatataccaaacaactagaaacgttagatctaaaatgagtggtgatgatttaatatgtgcagcatgtgcaccaatcttccatgtgcattagatatgttctcgctgagtaatccacctgtggcgaataaataaagcagtcagttctcagtct

SEQ ID NO: 94868 - DNA, 2551 bp, Zea Mays
atctatctatattatatataaaaatcgcatttgactaatataataatatatatcataaatatttgttttgtatacattatgtagttagataaactcagaataatataacttgatactatactaaaaattatattgttttctgaatagggagcacaaaattgactcaaaataaaaggaaagaaaagaacgaagtaggtgtacacttgcactcgcaaaacaaaaaagaaacccgcacctctcttggacttggaaaaggaaaaaaaaaagaaccgcgcacgcttcttcttccctcccccacaaagggaagaaaaaaaatttccgtgtacggtttcgcccggcgccgcctttggcagttgctttgcttgctcttgccctgttgagctccaaaggatctccatttcaccactcccatcgatcccactaccggtccgcatcaagcagccggcgatggggtccgcgtccgcccgcatcgccaccgccgccgtgcacctcgtcaccgcggccgccatcctcctcatgctcgcgcgaggcggcgaggccgtcagtctctggctcccgccgccgaccgccggaggagggggcttcctcggcggcgcggaccgttacctgactcgggaggagcactggatgaaccaaaccctggatcacttcaacccgacggaccatcggcaattcaaacagcggtactacgaatttctcgactactaccgagctccaaatggcccgatcttcctatacatctgtggagaatctacgtgcaatgggattggcaataactacttagctgtggtggcaaagaaatttggtgctgcattggtttctcctgagcatcgatactatggaaagagttctccttttaacagtttgacaacagaaaatctacagttcttgtcatcaaagcaggctttatttgatcttgctgttttccgccaatattatcaggaaaccttaaatgccaagtataatcgctctggggcaaacagttcttggtttgtttttggagggtcatatgctggagcactcagtgcttggttcaggttgaagtttcctcacttgacatgtggaagccttgcaagttcaggggttgttcttgctgtatacaactttaccgattttgacaaacagattgggatctctgctggtcctgaatgcaaggcagcacttcaagaaataacaggacttgttgatggacagcttcagtctggccgtaactcggttaaggagttgtttggagcgacaaagttagaaaatgatggtgacttcctctacttactggcagatgctgctgctattgcgttccaatatggtaatcctgatgtcttgtgctccccactagctgaagcaaagaagaatgggacagatttggtggaaacatttgctagttacgtgaaagattattacattggaaaatttggggcgtcagtagcatcatatgatcagcaatatttgaagaacacaactcctgctgaatcctgtaaatgccaatcccaatattcaatgttaccaaatatcatgatttaagagtttgaatgaaactatgtgcatggctattgttaatgtgttattgagcactgtttctattttattgaccacgcttttgactattggttctatttagcatatagactatggtggtaccaagtttgcagtgaggttgcatatttccaggtggcaccaaaaaacgatagtgttcgttccccaaagatcgacacgaggtaccatttggacttgtgcagaaatgttttcggcgaaggagtctaccctgatgtctttatgacaaacttatactatggaggcacaggaattgcaggttctaaaattgtttttgcaaatggatctcaagacccatggcgccacgcttctaagcagaaatcatcagacgaattgccatcatacctaattgagtgcaagaactgcggacactgcagtgatctctctggatgccctcaagctccttcaaacattgaaggtgattcatccaagtgctcacctcccgaagctctgaacaaagtaaggaaggagattgtcgatcacattgacctgtggctatcagaatgccaagagcaaggacatgacaaggagccatggctgggaagcagatggagcatagctgctatttgatcaatctgtgaagctataagcatgtgctgctagagtaaccaaggcaaatatgctttctttttcttgcagcactgtggtttatcgtttcggcaaacaatgtgggctgctgagtaagaggacatatctggtgcacataaaaaattggtgcacatggtgcatatattaaattatcaccactcattttagatctaacgtctttagttgatcattcaatttacaaataacaccttccaggcttccaccactacacaccaccacgttggagggtgcttttagcaaaatataccaaacaactagaaacgttagatctaaaatgagtggtgatgatttaatatgtgcagcatgtgcaccaatcttccatgtgcattagatatgttctcgctgagtaatccacctgtggcgaataaataaagcagtcagttctcagtct

SEQ ID NO: 94869 - DNA, 315 bp, Zea Mays
atgccgagcgtcggcgtgaagatctacatcgtcttcttcaagctcttgctccgccaccgcctccagtcgctggcctccgcggggggccttgacaacgtggccttcggggtctcctgccgccccgacgaggccaccgcgccgcctaaccctgccttctcctccgccgcctccaaggacctccacatcgaccccaactcctcgctctccgtctgcatcttcctcccgacgccctgcacgcgcacccgcgccgcgctagcgaccccaccccgaccacccccggcgtgccgtaccgaggctacctcccgcacgccgtag

SEQ ID NO: 94870 - DNA, 1108 bp, Zea Mays
agagaaaaaaagtcaaacaaattataatttgaaaccgaaggagtaatagtttacaagaatagagctagcacaagtacttctgcagagcatggtattagcagagtaagtgttgacgtataaggaaatgaaaagaaaatagagaaaagctacatcatcatcctctctagatctttacacttgatatccacgatcatcacaaatttttcgccatcgtcaacagctagatgcatcgtcctcccaccctggcccatgtctctctcgccacagagcttcaagcagaaacgggagagatccggagagggaggacgagccacaccaaaggctggttaatcaagtagtaaaacaagcagcagcgaccgcctcgacggacggacggacggaccgtgtcgtcaggcgcggaagcagccaacgaagcgcggcaggtggaggtggtgctggtgctggtgctgcgcggcggcggcggcggcgccgtcgaggtcgacgaggtggtgggcgcaggcgccgtggaggtcccggccgatgaggcgctcgagctggacgaagcggtcgacgcggcaggggatggcgagggcgccctggtgccggaagccgtactcgcgctcggcctcctccagcagcgcgccgaagagcgggtgcttgaggtggcccagcggcaccgcgaaccggcgctgctcctccccctccaggcccacgcgcaccgtcacgcaccccttgggcgctgctgccgccgccgccgccgttgccgttgccgtcatgtgctgctggtgctttccgggcatgacggtcgccagatcggtggagctctcgatcggtgtcgcttgcttggttggtcgctgctcggttgcaagaagaacaaggggaagggacggactcgaggggctggtggttagaggcaggaagagaagggccacgggtcggagctggagatggcgaggcggaagacggtgaggggggagtcgcgtagggaggtgggcacgttggacatggccgcctactcctccactagtatgtctcttcgcaacaacgacgacgaagacgattcgggtctgccttgccttgtgtggactggagtcagtcggtttgctgtttgtgaggagagctagctgcg

SEQ ID NO: 94871 - DNA, 2689 bp, Zea Mays
ctcctctcgggcaaagcaaaaaccttttggagatttatcacgatctgaggatccatggcgaaggactacccagcttctccgaaagctcagcagctccaggaatccaagaagcagcgcctgacatacatcctcgtcgtaagcgcgctctgcatcgccttctacgtccttggcgcatggcagaacaccacgcttccaaagcccataggcaactcggcgatcacccgggttggctgcgatcccactgccgccacggcacagtcctctggctctgtgccgtcgtttgggccaggctccggcgaggtgcttgacttcgacgcacaccaccggctcaccatcaacaacacggacggcgatggggaactgcagcagttcccggcgtgccctctcaacttcagtgagtacacgccgtgtgaggaccgtaggcgcgggcgccggttcgaccgaaacatgctagtgtatcgggagcgccactgtcctggcaaggacgagcaggtccgatgcctcatcccagcaccgcctgggtacaggacccccttcaagtggcctcgtagcagggactacgcctatttcaacaacatcccccacaaggagctcagcattgagaaggcggtgcagaactggatccaggttgagggcgacaagttcaagttccccggtggtggcactatgttcccgcgtggtgctgatgcctacatagatgacatcaataagctcatctcgttatcagatgggaagatcaggacggctgttgacacaggttgcggggttgctagttggggagcttacttgctgaagagaaacatcatcgccatgtcatttgcgccgagagacacgcacgaagctcaggtgcaattcgcgctggaaagaggtgtccctgccatcattggcgtcatggcgaagcagcggttgccttacccatctagggcgttcgatatggcacattgctcgcgctgtctgattccttgggatgaacacgatggactgtaccttgctgaagtcgataggattctgaggccaggaggatactggatcctctcgggacctccgatcaattggaagacacaccacagggggtgggagaggacgaaggacgacctcaagcgggagcaggacaagatcgaggatgttgcgaggagcctttgctggaacaaggtggttgagaagggggatctgtccatctggcagaagcccaagaatcaccttgagtgtgccaacattaagaagacatataagacaccccatatctgcaagagtgacaatcctgatgctgcctggtacacacagatggaagcctgtgttactccactgcctgaagtgagcaaccagggagaagtggctgggggagcggtggagaaatggccagagagggcgttcttggttccccccaggatcaaaaggggcatgattccaggactggacgccaagaagtttgacgaggacaagaagctttgggagaagagggtggcctactacaagcgcaccataccaattgcagagaacaggtacagaaatgtgatggacatgaacgccaacatgggtgggttcgctgcttctctagtgaagtaccccgtgtgggtgatgaatgtcgtccctgttaactccgaccgggacaccctcggggcaatatacgagcgagggttcatcggcacgtaccaggactggtgcgaagctttctcgacgtatccaagaacatatgacctcctgcatgctgacaatctgtttagcatctaccaagacaggtgcgatataactggcatcctcttggagatggacagaatattaaggcccgagggcacagctatcatccgcgacacagtcgacgtgctcacgaaggtccaggcaataaccaagcggatgcggtgggagagccgcatcatggaccacgaggacggccccttcaacccggagaaggtcctcatggcggtcaagacgtactggaccgccgaagccgaggaggagcactagcacacgagtgacaccgagctcacttgaaagcgtgaaccaagcctgttctacacttctactaccggtcgagagggatggcgtcagcgttttgcgtctcagtgtagtatgtatgtcccttttcaccttttctctagttctttgtagctagctacaatcagatgggaaggtaagggagagttttgagacggggggggggggggttggttggtcctctagttgagatacaggaagcggttttgtagcaggggaaggtttcgctggtcttgcgtaggttcctggccctgtttcacgaggggttgaactaggttttagtttgtaatgcgatggcaccgggcaggcattgttaatcgtatattggggtgaccataatagtaacaggtatttatttagttttcatctgaaaaaaaaaagtgcttggaaatttgaactgtcggtgcatttctgatgcaaccagattctggttgttccgttgtggaagtagcagtcgacggtccctactgtggctatcactagacagaagacatccatatgggttttggcttattgcttccctgcactggcttggcccatgaacatgttcagctgggttgtctttgtacaatctcgcacatactcgtcaacgggcagcagcccaagaggaattgacgaaacgccaggcgctacgtattttcagtgtcatgataataataatagcagcagcagcaatagcaataataataataat

SEQ ID NO: 94872 - DNA, 2905 bp, Zea Mays
cgtttttctaccggcgccggaaagctctaggcgctgttgcgtggatcatatctcctccggtctcctcgtcgtcctcttcgaatctatctgcagttgagcacctgatcagagctcgcataaataggcaggacccgtggtgctactctcctgtccccttccggccttttccccccttctggagcttggggggaggcactctgcaccttcgtcttcgtcttggcgtcctccagcgctctgccttcctgagctggcttcttgtccgcaggatccatggcgaaggactacccagcttctccgaaagctcagcagctccaggaatccaagaagcagcgcctgacatacatcctcgtcgtaagcgcgctctgcatcgccttctacgtccttggcgcatggcagaacaccacgcttccaaagcccataggcaactcggcgatcacccgggttggctgcgatcccactgccgccacggcacagtcctctggctctgtgccgtcgtttgggccaggctccggcgaggtgcttgacttcgacgcacaccaccggctcaccatcaacaacacggacggcgatggggaactgcagcagttcccggcgtgccctctcaacttcagtgagtacacgccgtgtgaggaccgtaggcgcgggcgccggttcgaccgaaacatgctagtgtatcgggagcgccactgtcctggcaaggacgagcaggtccgatgcctcatcccagcaccgcctgggtacaggacccccttcaagtggcctcgtagcagggactacgcctatttcaacaacatcccccacaaggagctcagcattgagaaggcggtgcagaactggatccaggttgagggcgacaagttcaagttccccggtggtggcactatgttcccgcgtggtgctgatgcctacatagatgacatcaataagctcatctcgttatcagatgggaagatcaggacggctgttgacacaggttgcggggttgctagttggggagcttacttgctgaagagaaacatcatcgccatgtcatttgcgccgagagacacgcacgaagctcaggtgcaattcgcgctggaaagaggtgtccctgccatcattggcgtcatggcgaagcagcggttgccttacccatctagggcgttcgatatggcacattgctcgcgctgtctgattccttgggatgaacacgatggactgtaccttgctgaagtcgataggattctgaggccaggaggatactggatcctctcgggacctccgatcaattggaagacacaccacagggggtgggagaggacgaaggacgacctcaagcgggagcaggacaagatcgaggatgttgcgaggagcctttgctggaacaaggtggttgagaagggggatctgtccatctggcagaagcccaagaatcaccttgagtgtgccaacattaagaagacatataagacaccccatatctgcaagagtgacaatcctgatgctgcctggtacacacagatggaagcctgtgttactccactgcctgaagtgagcaaccagggagaagtggctgggggagcggtggagaaatggccagagagggcgttcttggttccccccaggatcaaaaggggcatgattccaggactggacgccaagaagtttgacgaggacaagaagctttgggagaagagggtggcctactacaagcgcaccataccaattgcagagaacaggtacagaaatgtgatggacatgaacgccaacatgggtgggttcgctgcttctctagtgaagtaccccgtgtgggtgatgaatgtcgtccctgttaactccgaccgggacaccctcggggcaatatacgagcgagggttcatcggcacgtaccaggactggtgcgaagctttctcgacgtatccaagaacatatgacctcctgcatgctgacaatctgtttagcatctaccaagacaggtgcgatataactggcatcctcttggagatggacagaatattaaggcccgagggcacagctatcatccgcgacacagtcgacgtgctcacgaaggtccaggcaataaccaagcggatgcggtgggagagccgcatcatggaccacgaggacggccccttcaacccggagaaggtcctcatggcggtcaagacgtactggaccgccgaagccgaggaggagcactagcacacgagtgacaccgagctcacttgaaagcgtgaaccaagcctgttctacacttctactaccggtcgagagggatggcgtcagcgttttgcgtctcagtgtagtatgtatgtcccttttcaccttttctctagttctttgtagctagctacaatcagatgggaaggtaagggagagttttgagacggggggggggggggttggttggtcctctagttgagatacaggaagcggttttgtagcaggggaaggtttcgctggtcttgcgtaggttcctggccctgtttcacgaggggttgaactaggttttagtttgtaatgcgatggcaccgggcaggcattgttaatcgtatattggggtgaccataatagtaacaggtatttatttagttttcatctgaaaaaaaaaagtgcttggaaatttgaactgtcggtgcatttctgatgcaaccagattctggttgttccgttgtggaagtagcagtcgacggtccctactgtggctatcactagacagaagacatccatatgggttttggcttattgcttccctgcactggcttggcccatgaacatgttcagctgggttgtctttgtacaatctcgcacatactcgtcaacgggcagcagcccaagaggaattgacgaaacgccaggcgctacgtattttcagtgtcatgataataataatagcagcagcagcaatagcaataataataataat

SEQ ID NO: 94873 - DNA, 2635 bp, Zea Mays
caacacccccgctttctttatttatgaaaggttagctagggcgccgctgacaacatgtgagcgtgttcggcattactccacttcactccctccctccctcacctctggctcatcagtgcctgcctcactaacctcaccattactgaaatgcagagctcgcataaataggcaggacccgtggtgctactctcctgtccccttccggccttttccccccttctggagcttggggggaggcactctgcaccttcgtcttcgtcttggcgtcctccagcgctctgccttcctgagctggcttcttgtccgcaggatccatggcgaaggactacccagcttctccgaaagctcagcagctccaggaatccaagaagcagcgcctgacatacatcctcgtcgtaagcgcgctctgcatcgccttctacgtccttggcgcatggcagaacaccacgcttccaaagcccataggcaactcggcgatcacccgggttggctgcgatcccactgccgccacggcacagtcctctggctctgtgccgtcgtttgggccaggctccggcgaggtgcttgacttcgacgcacaccaccggctcaccatcaacaacacggacggcgatggggaactgcagcagttcccggcgtgccctctcaacttcagtgagtacacgccgtgtgaggaccgtaggcgcgggcgccggttcgaccgaaacatgctagtgtatcgggagcgccactgtcctggcaaggacgagcaggtccgatgcctcatcccagcaccgcctgggtacaggacccccttcaagtggcctcgtagcagggactacgcctatttcaacaacatcccccacaaggagctcagcattgagaaggcggtgcagaactggatccaggttgagggcgacaagttcaagttccccggtggtggcactatgttcccgcgtggtgctgatgcctacatagatgacatcaataagctcatctcgttatcagatgggaagatcaggacggctgttgacacaggttgcggggttgctagttggggagcttacttgctgaagagaaacatcatcgccatgtcatttgcgccgagagacacgcacgaagctcaggtgcaattcgcgctggaaagaggtgtccctgccatcattggcgtcatggcgaagcagcggttgccttacccatctagggcgttcgatatggcacattgctcgcgctgtctgattccttgggatgaacacgatggactgtaccttgctgaagtcgataggattctgaggccaggaggatactggatcctctcgggacctccgatcaattggaagacacaccacagggggtgggagaggacgaaggacgacctcaagcgggagcaggacaagatcgaggatgttgcgaggagcctttgctggaacaaggtggttgagaagggggatctgtccatctggcagaagcccaagaatcaccttgagtgtgccaacattaagaagacatataagacaccccatatctgcaagagtgacaatcctgatgctgcctggtacacacagatggaagcctgtgttactccactgcctgaagtgagcaaccagggagaagtggctgggggagcggtggagaaatggccagagagggcgttcttggttccccccaggatcaaaaggggcatgattccaggactggacgccaagaagtttgacgaggacaagaagctttgggagaagagggtggcctactacaagcgcaccataccaattgcagagaacaggtacagaaatgtgatggacatgaacgccaacatgggtgggttcgctgcttctctagtgaagtaccccgtgtgggtgatgaatgtcgtccctgttaactccgaccgggacaccctcggggcaatatacgagcgagggttcatcggcacgtaccaggactggtgcgaagctttctcgacgtatccaagaacatatgacctcctgcatgctgacaatctgtttagcatctaccaagacaggtgcgatataactggcatcctcttggagatggacagaatattaaggcccgagggcacagctatcatccgcgacacagtcgacgtgctcacgaaggtccaggcaataaccaagcggatgcggtgggagagccgcatcatggaccacgaggacggccccttcaacccggagaaggtcctcatggcggtcaagacgtactggaccgccgaagccgaggaggagcactagcacacgagtgacaccgagctcacttgaaagcgtgaaccaagcctgttctacacttctactaccggtcgagagggatggcgtcagcgttttgcgtctcagtgtagtatgtatgtcccttttcaccttttctctagttctttgtagctagctacaatcagatgggaaggtaagggagagttttgagacggggggggggggggttggttggtcctctagttgagatacaggaagcggttttgtagcaggggaaggtttcgctggtcttgcgtaggttcctggccctgtttcacgaggggttgaactaggttttagtttgtaatgcgatggcaccgggcaggcattgttaatcgtatattggggtgaccataatagtaacaggtatttatttagttttcatctgaaaaaaaaaa

SEQ ID NO: 94874 - DNA, 2150 bp, Zea Mays
ccgctttctttatttatgaaaggttagctagggcgccgctgacaacatagctcgcataaataggcaggacccgtggtgctactctcctgtccccttccggccttttccccccttctggagcttggggggaggcactctgcaccttcgtcttcgtcttggcgtcctccagcgctctgccttcctgagctggcttcttgtccgcaggatccatggcgaaggactacccagcttctccgaaagctcagcagctccaggaatccaagaagcagcgcctgacatacatcctcgtcgtaagcgcgctctgcatcgccttctacgtccttggcgcatggcagaacaccacgcttccaaagcccataggcaactcggcgatcacccgggttggctgcgatcccactgccgccacggcacagtcctctggctctgtgccgtcgtttgggccaggctccggcgaggtgcttgacttcgacgcacaccaccggctcaccatcaacaacacggacggcgatggggaactgcagcagttcccggcgtgccctctcaacttcagtgagtacacgccgtgtgaggaccgtaggcgcgggcgccggttcgaccgaaacatgctagtgtatcgggagcgccactgtcctggcaaggacgagcaggtccgatgcctcatcccagcaccgcctgggtacaggacccccttcaagtggcctcgtagcagggactacgcctatttcaacaacatcccccacaaggagctcagcattgagaaggcggtgcagaactggatccaggttgagggcgacaagttcaagttccccggtggtggcactatgttcccgcgtggtgctgatgcctacatagatgacatcaataagctcatctcgttatcagatgggaagatcaggacggctgttgacacaggttgcggggttgctagttggggagcttacttgctgaagagaaacatcatcgccatgtcatttgcgccgagagacacgcacgaagctcaggtgcaattcgcgctggaaagaggtgtccctgccatcattggcgtcatggcgaagcagcggttgccttacccatctagggcgttcgatatggcacattgctcgcgctgtctgattccttgggatgaacacgatggactgtaccttgctgaagtcgataggattctgaggccaggaggatactggatcctctcgggacctccgatcaattggaagacacaccacagggggtgggagaggacgaaggacgacctcaagcgggagcaggacaagatcgaggatgttgcgaggagcctttgctggaacaaggtggttgagaagggggatctgtccatctggcagaagcccaagaatcaccttgagtgtgccaacattaagaagacatataagacaccccatatctgcaagagtgacaatcctgatgctgcctggtacacacagatggaagcctgtgttactccactgcctgaagtgagcaaccagggagaagtggctgggggagcggtggagaaatggccagagagggcgttcttggttccccccaggatcaaaaggggcatgattccaggactggacgccaagaagtttgacgaggacaagaagctttgggagaagagggtggcctactacaagcgcaccataccaattgcagagaacaggtacagaaatgtgatggacatgaacgccaacatgggtgggttcgctgcttctctagtgaagtaccccgtgtgggtgatgaatgtcgtccctgttaactccgaccgggacaccctcggggcaatatacgagcgagggttcatcggcacgtaccaggactggtgcgaagctttctcgacgtatccaagaacatatgacctcctgcatgctgacaatctgtttagcatctaccaagacaggtgcgatataactggcatcctcttggagatggacagaatattaaggcccgagggcacagctatcatccgcgacacagtcgacgtgctcacgaaggtccaggcaataaccaagcggatgcggtgggagagccgcatcatggaccacgaggacggccccttcaacccggagaaggtcctcatggcggtcaagacgtactggaccgccgaagccgaggaggagcactagcacacgagtgacaccgagctcacttgaaag

SEQ ID NO: 94875 - DNA, 2211 bp, Zea Mays
cgtttttctaccggcgccggaaagctctaggcgctgttgcgtggatcatatctcctccggtctcctcgtcgtcctcttcgaatctatctgcagttgagcacctgatcagagctcgcataaataggcaggacccgtggtgctactctcctgtccccttccggccttttccccccttctggagcttggggggaggcactctgcaccttcgtcttcgtcttggcgtcctccagcgctctgccttcctgagctggcttcttgtccgcaggatccatggcgaaggactacccagcttctccgaaagctcagcagctccaggaatccaagaagcagcgcctgacatacatcctcgtcgtaagcgcgctctgcatcgccttctacgtccttggcgcatggcagaacaccacgcttccaaagcccataggcaactcggcgatcacccgggttggctgcgatcccactgccgccacggcacagtcctctggctctgtgccgtcgtttgggccaggctccggcgaggtgcttgacttcgacgcacaccaccggctcaccatcaacaacacggacggcgatggggaactgcagcagttcccggcgtgccctctcaacttcagtgagtacacgccgtgtgaggaccgtaggcgcgggcgccggttcgaccgaaacatgctagtgtatcgggagcgccactgtcctggcaaggacgagcaggtccgatgcctcatcccagcaccgcctgggtacaggacccccttcaagtggcctcgtagcagggactacgcctatttcaacaacatcccccacaaggagctcagcattgagaaggcggtgcagaactggatccaggttgagggcgacaagttcaagttccccggtggtggcactatgttcccgcgtggtgctgatgcctacatagatgacatcaataagctcatctcgttatcagatgggaagatcaggacggctgttgacacaggttgcggggttgctagttggggagcttacttgctgaagagaaacatcatcgccatgtcatttgcgccgagagacacgcacgaagctcaggtgcaattcgcgctggaaagaggtgtccctgccatcattggcgtcatggcgaagcagcggttgccttacccatctagggcgttcgatatggcacattgctcgcgctgtctgattccttgggatgaacacgatggactgtaccttgctgaagtcgataggattctgaggccaggaggatactggatcctctcgggacctccgatcaattggaagacacaccacagggggtgggagaggacgaaggacgacctcaagcgggagcaggacaagatcgaggatgttgcgaggagcctttgctggaacaaggtggttgagaagggggatctgtccatctggcagaagcccaagaatcaccttgagtgtgccaacattaagaagacatataagacaccccatatctgcaagagtgacaatcctgatgctgcctggtacacacagatggaagcctgtgttactccactgcctgaagtgagcaaccagggagaagtggctgggggagcggtggagaaatggccagagagggcgttcttggttccccccaggatcaaaaggggcatgattccaggactggacgccaagaagtttgacgaggacaagaagctttgggagaagagggtggcctactacaagcgcaccataccaattgcagagaacaggtacagaaatgtgatggacatgaacgccaacatgggtgggttcgctgcttctctagtgaagtaccccgtgtgggtgatgaatgtcgtccctgttaactccgaccgggacaccctcggggcaatatacgagcgagggttcatcggcacgtaccaggactggtgcgaagctttctcgacgtatccaagaacatatgacctcctgcatgctgacaatctgtttagcatctaccaagacaggtgcgatataactggcatcctcttggagatggacagaatattaaggcccgagggcacagctatcatccgcgacacagtcgacgtgctcacgaaggtccaggcaataaccaagcggatgcggtgggagagccgcatcatggaccacgaggacggccccttcaacccggagaaggtcctcatggcggtcaagacgtactggaccgccgaagccgaggaggagcactagcacacgagtgacaccgagctcacttgaaag

SEQ ID NO: 94876 - DNA, 345 bp, Zea Mays
aaacctagccgccgtcgcgtcgtggtgctggagcttgtcacggggctgaggcccgtggacgtgggcagggagcggcgggacgtcgacgcgccggtgctgggcgagggccccgccgtgatggccagcgtcgaggcagtggtggagctggcgttccggtgcgtggggccagacaaggacgatcggcccgacgcccgggaggtggtggccgagctcgcgaggatccagatgatgctccccgagcttcccggccggatcgcacagaattgagctaatcacatcctgacatcttggcttctatgctgctatcttgactaagaattaacatcacatcctgaaggaacactt

SEQ ID NO: 94877 - DNA, 1510 bp, Zea Mays
gctggaacccatctctgtctcgctggctttgcgcgcacgggaccgcgttcgggacgacaagcatcccagattcgcagatggcggctggcctggtttctggtttgggaaaaaaaagcgcggtttggccgcatgcccgccccccctccaaaccaaaacagaggccccgagagcggccgagcccccggcataccggaactggacgaggttgttggtttgacagttcactcgcgccttatcccaagccccccaaccccgtccacggtgcgccaacctctcgttgagaagaggaatttgtcccaccatctgcagagcagagcagagctgtcccctactgaactagttgtcgtacgccacgggtcaactcatcccctgccgctactggacagtggacactgctgggtttccacttgttttgctcgccatcgcatgccgggaacacgagatgcccaaaacagcagcgcggccggcgccaacccgcccgtgaacccgaccattttttgccgcaacttgcaatgcaaccaccgcctccgccccggccttgtccaatatatgctcccgtccttgtcccggacgttccacacttccactcatcaggaaaacgcccagcccgaaagtcagattagaatgcacttgacgctcagccccgcgaggacgacgagggaggcggcgcacgcgcggtccgcgagcgaaccgtgccaccccgcgctcgcgcgcctccacggcaccgtccgcgcgctcagggcgtggtccaggtcctgcggcggcggcagcggagacgcggacagccacggctcctcctcctccactggccacggcctcgcgctgctggaggcagtcctggccgcgctgggcgacctgctcgccacgccgcgggccgcggcggccctccgcgccgccgccgacgaggacggccaggtcctggaccgcttcctcgtgctcgcggacgcgcacggcacgttcgggtcggcgctgctcgcggcgaagcagagcgtgtcggacgcgcaggccggcgcgcgccgcggggacggcgcggtggtcgccgcgtcggcgcgcgcgcgcaggcggactgagaaggagctgcgccgcctcgccgccgcgatgcggcacgcctcgaggcacgcggacgccgcggacactggagtggtcggcacggtggtggcggaggcggccgtggccgcggcagaggcctcggcggtcgtcttctccggctgcgcggccatgtcgcctggcgtgtcggacatggtacggacggtgccttcgcacaggtggctagcgaggttgggcgtcgcatcggaggccaggaaagtggcgccggagctggcgccagcggcactgcgaaggctggaggagctcgagggtcgcattgccgggctggagtgcgagagcgagaaggtgttcaggaggctgctgcaggctagagttgtgctcctcaacatccatagccccctgtgattcctccactgtgttacatacagttgcagtcaaaatttcagaggattgaactagaaaa

SEQ ID NO: 94878 - DNA, 1796 bp, Zea Mays
caagtgggcaaattattccgcgttggcagccgccctcctccccaaggaccccaactttccagtgcggcaccggcctcctttacacctcattgccagtttcccaccgccaggcgccagccactctcacggttgccaccctagcacgcgctcgccgtcgccacgctctatatctcgcgcctctcgccttccactctttctatacccgcccgctcgcctccctggtacgcttcgtgccgccgccgcaacctcctcctccccgtcacagattgcagatcatttaacataaatggctgactcagaggacattcagcccctagtctgtgacaatggaactggaatggtcaaggctggctttgctggagatgatgctccccgtgctgttttcccaagtatagttggtcgtccacgccacactggtgtcatggttgggatgggacagaaggatgcttatgttggtgatgaggcccaatccaagaggggtatcctgactttgaagtatcccatcgagcatggaatcgtaagcaactgggatgacatggaaaagatctggcatcacaccttctataatgagcttcgtgtagcaccagaagagcacccagttcttcttacagaggctcctcttaaccctaaggctaacagggaaaagatgacacaaatcatgtttgaaactttcagtgttcctgctatgtatgttgctattcaagctgtcctttccctttatgctagtggccgtaccactggtattgtcctggattctggagacggtgtcagccacactgtcccaatctatgaaggctatgccctcccgcatgccattcttcgtctcgatcttgctggtagggacctcactgattccctcatgaagatcctgactgagaggggttactctttcacaaccactgctgagcgggaaattgtccgtgacatcaaggaaaagcttgcatatgtcgcgctcgactacgaacaagaactcgagaccgccaagagcagctcatcagttgagaagagctatgaactgcctgatggacaagtgatcacaataggcgcagagcgcttcagatgcccggaggttctcttccagccatccttcattggtatggaagctccaggaatccacgagacgacctacaactccatcatgaagtgtgacgttgatatcaggaaggacctgtatggcaacattgtcctcagtggtggatccaccatgttccctggcatcgccgaccgcatgagcaaggagatcactgcgctcgcgccaagcagcatgaagatcaaggtcgtcgctccaccagagaggaagtacagtgtctggatcggaggatcaatccttgcatccctgagcacatttcagcagatgtggatctcaagggctgagtatgaggagtctggtccagctattgtccacaggaagtgcttctagacgtcacctagccttaattctcctctggaaataccttcgtttgatgacatatctatgggtggttgctctgctatagctcgcagtttttgtgtttgccaatatatccggtaacattgtggagtcagccgtccactgtatgaagtatgtagtttggttatatatatattgattgtattatttactcgattctatgggttcttggatacctggaatgtgcatgatatttttaaatttttgtaacaatgtgtactccgtaacaaagttcgcgtttgaaacatcgtttctgctgctttaatgtaggtttgttcattctccgactgatttgggcactggcgtgttgcttctccaattttttgtgtggtgcttatgttctcac

SEQ ID NO: 94879 - DNA, 102 bp, Zea Mays
atggtgactattgggtgttcaggggcaattcatgcacttgtgcagctattgagtaatggaagtcaacagggtaaaaaggatgcagcaacatcactgtttaac

SEQ ID NO: 94880 - DNA, 468 bp, Zea Mays
ataaatttagcaaaatataccttctccttctaaaaaaacaatctacacttgaatttataaaaaaaaacagttatattcaaatagattctctataagaatatgtatatgattaatccaatgaaatttaaatgaggtggtgttcgatggagcctcacccagcttggagaaacttctccaaaatgttcaaaacgaagccatcaattggtgcttagctgattaaagggtttaggctggctccaacaagaccctctaaagggtcctgtaccctaaatttagaggacgaggacgtcctctaaacggtcctctaaatttagagaacgttgctggatcctctatatgtagagtttctctaaacggttctctatctatttgaatactttaaacaaccggtttaataaaactaaaatatgtaaaatacatttgagagtatgacaaatacgtatgtacaaaaattaaaaaaattaaaaa

SEQ ID NO: 94881 - DNA, 2029 bp, Zea Mays
actgcgcgtgttgccacttgccactgagcttcgtgtcgacatctcaagctgctcgacccatgtgtgggcatctcggtcatttcgcgaaggccgcgcatcctataaatgagaccccttcctcctcccctgccgttgttgttggcttcgtggtccgtgtttaacgggcgtagagagagaaagagaacagagcgagagagggggaggacgaagccctccgcgtcgtctcctgctgttccatcccacatctattctgcctcggcttgcaccttcgacctcgctgaaagttctgacctcaaactgaaaggggcctgtgaagcgtttccttgcggcagtgcaatggaggtatttggcaaatctgtgattgctgagcccagcaatgtgattttcttgtccgcaatccttaacacagaaggatcaaaccctagtcacaagtgtgacaagaggtgccagaacgagaacatttttgggaacatgtaccgttgcaaactgactggaaccactcacatctgtgacaaaaactgtaaccagagaatcctctatgacaaccataactcgctctgccgagtgagtgggcagttttttccgctctctccattggagcagcaagcagtgaggggtatccgcaggaagcacgaagtggacagcaatgaaggctgctcctttaagcgcaggcgtggtgcacagctgcatccttcccccttcgagaggtcctactcagctgtgtctccaatcccgagccaggttggagatggcatggacctgagctagagctaacgagacttccttttcttcagccaaccacctaattccgttgtctaccctttttccctttggttacaggatggaactataagagattccttctttgtagacttttatgaagggatataagactccttagatgcaccgaataaatgtctatgtagtttctattctgtttcatgggaccttgttgtaactcgtgaactttgattgagcacctattcggatttagtagcacgttcagaaaatcattcgctgcttatcttttttcacacttccgagttagttattttgtgtgtttttttactttgtgttcaactaagtttccttctaattttgattctttaatgcaatttattataattgaggtgtacatttgtccatcaatgtaaatatgtgaaagattctttggcactgtaatccaggcacagggaactgactgcctttgctgactgaagtttttgtacagttgttactagtgttttgcttgtcaagttcctaatcaagcttgaatcatttacggtctgttctcatatagctcaactctatctgtttcttaactcttttttacaggttatgtttctaacgcttaatgttttcctcatgttcttttttgtcttgtttcccccctaacatttgttgtgtatgcaggaccatccaggttcaaatcgttcttgggaaatgttttgttcttctttatataactatattgctaacttattttcatttgttaattattttgctttattttgatttgcaggtgaacatctctggttctattttcatcgtcgggtaacaagaaactaatcagggagtctcttcccatttcttgcagtggaggaatgtttagctacagccgcgcagcatgctttccagagcataaattggtggaagagaagtttgatgctaccactttgccagaagaaccgagccagacacaataacatcaaactgagtctgagatactgcactttacaaattctttcgatattggcagattgaagaccaacaagatttgaagagcagcaagatcagcttgcacctgcagtttgaagaaatcctttcaaagaagactgcttgcggcaatcttgccttcactccacaagcatgtgctgtgttatgcgtaccatgtaatgattgtagtacttgacaactgataccaaagtagtggatgcttttctttcgcatgaagtcatgttgatttttgtacgttctaacagcgtctccatcaatatcctattgaatctcccatacttctatacctata

SEQ ID NO: 94882 - DNA, 849 bp, Zea Mays
actgcgcgtgttgccacttgccactgagcttcgtgtcgacatctcaagctgctcgacccatgtgtgggcatctcggtcatttcgcgaaggccgcgcatcctataaatgagaccccttcctcctcccctgccgttgttgttggcttcgtggtccgtgtttaacgggcgtagagagagaaagagaacagagcgagagagggggaggacgaagccctccgcgtcgtctcctgctgttccatcccacatctattctgcctcggcttgcaccttcgacctcgctgaaagttctgacctcaaactgaaaggggcctgtgaagcgtttccttgcggcagtgcaatggaggtgaacatctctggttctattttcatcgtcgggtaacaagaaactaatcagggagtctcttcccatttcttgcagtggaggaatgtttagctacagccgcgcagcatgctttccagagcataaattggtggaagagaagtttgatgctaccactttgccagaagaaccgagccagacacaataacatcaaactgagtctgagatactgcactttacaaattctttcgatattggcagattgaagaccaacaagatttgaagagcagcaagatcagcttgcacctgcagtttgaagaaatcctttcaaagaagactgcttgcggcaatcttgccttcactccacaagcatgtgctgtgttatgcgtaccatgtaatgattgtagtacttgacaactgataccaaagtagtggatgcttttctttcgcatgaagtcatgttgatttttgtacgttctaacagcgtctccatcaatatcctattgaatctcccatacttctatacctata

SEQ ID NO: 94883 - DNA, 1184 bp, Zea Mays
actgcgcgtgttgccacttgccactgagcttcgtgtcgacatctcaagctgctcgacccatgtgtgggcatctcggtcatttcgcgaaggccgcgcatcctataaatgagaccccttcctcctcccctgccgttgttgttggcttcgtggtccgtgtttaacgggcgtagagagagaaagagaacagagcgagagagggggaggacgaagccctccgcgtcgtctcctgctgttccatcccacatctattctgcctcggcttgcaccttcgacctcgctgaaagttctgacctcaaactgaaaggggcctgtgaagcgtttccttgcggcagtgcaatggaggcacagggaactgactgcctttgctgactgaagtttttgtacagttgttactagtgttttgcttgtcaagttcctaatcaagcttgaatcatttacggtctgttctcatatagctcaactctatctgtttcttaactcttttttacaggttatgtttctaacgcttaatgttttcctcatgttcttttttgtcttgtttcccccctaacatttgttgtgtatgcaggaccatccaggttcaaatcgttcttgggaaatgttttgttcttctttatataactatattgctaacttattttcatttgttaattattttgctttattttgatttgcaggtgaacatctctggttctattttcatcgtcgggtaacaagaaactaatcagggagtctcttcccatttcttgcagtggaggaatgtttagctacagccgcgcagcatgctttccagagcataaattggtggaagagaagtttgatgctaccactttgccagaagaaccgagccagacacaataacatcaaactgagtctgagatactgcactttacaaattctttcgatattggcagattgaagaccaacaagatttgaagagcagcaagatcagcttgcacctgcagtttgaagaaatcctttcaaagaagactgcttgcggcaatcttgccttcactccacaagcatgtgctgtgttatgcgtaccatgtaatgattgtagtacttgacaactgataccaaagtagtggatgcttttctttcgcatgaagtcatgttgatttttgtacgttctaacagcgtctccatcaatatcctattgaatctcccatacttctatacctata

SEQ ID NO: 94884 - DNA, 787 bp, Zea Mays
actgcgcgtgttgccacttgccactgagcttcgtgtcgacatctcaagctgctcgacccatgtgtgggcatctcggtcatttcgcgaaggccgcgcatcctataaatgagaccccttcctcctcccctgccgttgttgttggcttcgtggtccgtgtttaacgggcgtagagagagaaagagaacagagcgagagagggggaggacgaagccctccgcgtcgtctcctgctgttccatcccacatctattctgcctcggcttgcaccttcgacctcgctggtgaacatctctggttctattttcatcgtcgggtaacaagaaactaatcagggagtctcttcccatttcttgcagtggaggaatgtttagctacagccgcgcagcatgctttccagagcataaattggtggaagagaagtttgatgctaccactttgccagaagaaccgagccagacacaataacatcaaactgagtctgagatactgcactttacaaattctttcgatattggcagattgaagaccaacaagatttgaagagcagcaagatcagcttgcacctgcagtttgaagaaatcctttcaaagaagactgcttgcggcaatcttgccttcactccacaagcatgtgctgtgttatgcgtaccatgtaatgattgtagtacttgacaactgataccaaagtagtggatgcttttctttcgcatgaagtcatgttgatttttgtacgttctaacagcgtctccatcaatatcctattgaatctcccatacttctatacctata

SEQ ID NO: 94885 - DNA, 492 bp, Zea Mays
atgtatgagcttggattcttcatgaggcatcttggtggtggggaactgaatgacaaggaggctttggaactagagaataaggttgaagccatgggttatggacctagagctatgctcttcggcggggaggaccaaatgcttaattatgtgcctgatgctgatgaatcgaaaattgtaaagaatattacccgaagcatcgggttcccaaagatcgaggatcgactcagcaaaattaagaagtgcaaactctcccatagcctggcttatacaagtatcaagggacttacgctgagcgaagctctaaaaattcagcaggaaaaggaggaggatgaacacgaagcaaatctttcaaaggttcaggacaaagtaacaaaacttcaaaatgctttggaagagaaggataacaaaataacatctttgaagagcaatcttgccgaaccaaaagaagaaaaagagcaggcagaaaaaacccacaatgataatttggtgtaa

SEQ ID NO: 94886 - DNA, 78 bp, Zea Mays
gttttccattttcagaattggaatttaagtataattttcaaattcaaaccaaagaagtcgaaatggctttgatttttt

SEQ ID NO: 94887 - DNA, 1064 bp, Zea Mays
ttcatgacaacgaatcatgattcttccattgcagtatcctgacactggtgagcagacatccatgattattccgttacagctctaaacaaatcaggatcagatgtgatcatttcatcacacaagaacagcacacagagagacgtaacatatatgcacaagcacaaggcatccacaacacacactgctatacacgtacgtgcgtaacaccatgccgtaaaccctactacatttgcttggccatggcgttgatgatggcgagcgcgatggccgtgaggtgcatggcgccggcgacgttcctccgcacggcctccctcacgacggcgggctggcccttgaacccctccatgcacatgccgtcgttcgtcagcgcggcgctcgcccacgtctgcacgctgttcacctggaacctgacgctccgcccggcctgcccgctggcgctggcactggcgctggccggctccttgccgaggcgctccattgcctccaccgactgccgcagcaggtccacggcgtcctcgagcatgcccacgcagtctgccgccgcctcggccgccacgggcacgaggtggtggctgctcgcgccgcccgccgccattgccttcatcgcggccgtcgccctccgcgcgccgtccagcgtgaccgtcagcgccgccagcgacaggcgcgccgggctggccccgacctccgccgcgtacggggccagcgtcgcgttgcacagggccgggtagtccgtccccgcgcaccacgacctgatgaagccgccgccggctgtgctggtgctggtgctggcgctcggggtcggccgcgccgtgacggcgccgcaccacgaccagcacgagagcgcgagaagcaacaaccacatcaaggcgttgctgcgtgacatggcgcacgggacggacgggagcacgtaaaactacgacgacttcgacgtgtttcttattactgctagtgctgcctcgatcttctgtctagcatcgagttatatagggggcaggacgaattaatggaggataagggcgcgcgcggcctgtacgcgtatgactggcctaaccggcacgtcgtgt

SEQ ID NO: 94888 - DNA, 953 bp, Zea Mays
gtcttttggtattcgctttgacacgcagacttcagggcgccagccttctgcgaactgtctctacccttgacgaaggaaaaggcagccttctcaccgtcggacccggcgatgcagcggcacgtcgcctccggccggccgtcgggcacggacggctccgacttttcttaccgcatggtcgtcgaatcccggtaccagagggtcgccgagggcagatcccgcctcgcgcgcctcatcctcgtgcaggcgctgcacctagtggccggaggcttgcttctattgctgtcgttgtccaagggggcggcggtgaacaagttcgccgtgctgtccatggccgcgggattcctggctatagtggtgggggaattagggcgattgcggaccatggcagtgctgcttcggctttacacaagcttgtcatcaattgcggttgcattctctgtgacgtgcattatccggtcagagttgttcttgaaggttatgaagcaaaacacagaggccatcacaagctacgaaatgcttgatgcggttcgtgttgctcttggtatcctgctgcaaatggtggttatagctacaactaccagactcctgcagaatatgtctcctcccaagagagcttcatgaatgctatgacattttagctttgtttcaagtagtaagggatacaaacttcgagttaaaaatattggccaagtgcgatagtcttgtaccgaagatgctactggtgtacaactgtcaggaaatcgtggtttacttgtttcctcttttgtttttgttttacttcttcccttttctggatctggaaaattcgtagtcgttggcgagctttgcaagctaaaggctaacggagcatatgtgtttttaattccgtcttcatgtttgtgtccatgtttctgctgcgctggaagttgctactcaggctatttctttcatgtcctgaattcaactcgggggac

SEQ ID NO: 94889 - DNA, 1671 bp, Zea Mays
agtgtccacaaagatcccgggctgctccttcctcccagaggaagcgtacaaacctggaggggaactgcccgtctcctcggctgacccgtccacctccttcttttcccctcgtgtccgccgctacacgcgccgccggaaccctagcctccaccgccacaggcagcagggatggagaaaggagcctcggaggcgtcgcccccttgcgctcgctgcggcaagcccgctcagcttcaatgccccaagtgtgtcgaacttaagttaccgcgtgagaatgcagctttctgcacacaggattgttttagggcagcatggagctctcacaaatctgttcacccaaagcctggtgcaccggcatcccagcagtctccagaaggttggaaatattgtctgagaaaagggcgggaacgtgcattgcaacttcctcgttttgattggacaggtccattgagaccacatccaatatcaaagatgcgtgtggtgccagatgaaattgagaagcctgattgggcgcttgatggaattcccaagatagaaccagatagtgatttgcagaaaagagtagagattaagacccctgatctcatagaaaggatgagagtaacatgtcgaattgcaagagaggttttagatgcagctgctcgtgtaattaaaccaggaattacaacagatgaaattgatagagtcgtccatgaagagacaattgctagaggtggatacccatctccattgaattactatttcttccccaagtcatgttgcacgtctgtcaacgaagtcatttgccatggaattccagatgccaggaaacttgaggatggtgacattgtaaatgttgatgtaactgtatactataaaggtgttcatggtgatttgaatgagacatattttgttggaaatgttgatgaagcttccaaacaccttgtacgttgtacctatgagtgcttggagaaagctattgcgatagattcatgtgcagttaaacctggagttcggttccgagaggtcggagaagtcataaacagacatgtttcaatgtcaggtttatctgtggtgaaatcttattgtggccatggcataggggaactgtttcactgcgccccaaacattcctcattattcaagaaacaaggccgttggtatcatgaaagctgggcagacatttacaattgaaccaatggtcaatgcaggggtttggaatgatcgtctgtggcctgacgattggactgcagtgactgcagatggtaaacggagtgctcaatttgaacatacacttttggtgacagaaacaggatgtgaagttttgacggcacggttaccctcatcaccggacgtttttccatggttgaagaagccgtgatggggaacgccaccaacagcaagtgatactgttacactgggtcagcaaaaagttttgttctgctctatcagtcggccaaagctgaaattttcaaatattctagatcagagtgattagcatgctactgctgaacagtcgcagcaattgtctatcgtgcggaactatttctgggagtgtgtattgttaagtcggttttcttcgagttatacgagacgtatggcttcttgagatgtgtcaccaatatgattatgccatcagtttacttttgatttcacagaacacaatttccatcatttcgagtaggttattttttat

SEQ ID NO: 94890 - DNA, 1863 bp, Zea Mays
gtccaaacagcaccagggaacagggtcccatggggtggtggtctggaggggaactgatttggtcaccagcctgagcccctgactgtgcagtgtccacaaagatcccgggctgctccttcctcccagaggaagcgtacaaacctggaggggaactgcccgtctcctcggctgacccgtccacctccttcttttcccctcgtgtccgccgctacacgcgccgccggaaccctagcctccaccgccacaggcagcagggatggagaaaggagcctcggaggcgtcgcccccttgcgctcgctgcggcaagcccgctcagcttcaatgccccaagtgtgtcgaacttaagttaccgcgtgagaatgcagctttctgcacacaggattgttttagggcagcatggagctctcacaaatctgttcacccaaagcctggtgcaccggcatcccagcagtctccagaaggttggaaatattgtctgagaaaagggcgggaacgtgcattgcaacttcctcgttttgattggacaggtccattgagaccacatccaatatcaaagatgcgtgtggtgccagatgaaattgagaagcctgattgggcgcttgatggaattcccaagatagaaccagatagtgatttgcagaaaagagtagagattaagacccctgatctcatagaaaggatgagagtaacatgtcgaattgcaagagaggttttagatgcagctgctcgtgtaattaaaccaggaattacaacagatgaaattgatagagtcgtccatgaagagacaattgctagaggtggatacccatctccattgaattactatttcttccccaagtcatgttgcacgtctgtcaacgaagtcatttgccatggaattccagatgccaggaaacttgaggatggtgacattgtaaatgttgatgtaactgtatactataaaggtgttcatggtgatttgaatgagacatattttgttggaaatgttgatgaagcttccaaacaccttgtacgttgtacctatgagtgcttggagaaagctattgcgatagttaaacctggagttcggttccgagaggtcggagaagtcataaacagacatgtttcaatgtcaggtttatctgtggtgaaatcttattgtggccatggcataggggaactgtttcactgcgccccaaacattcctcattattcaagaaacaaggccgttggtatcatgaaagctgggcagacatttacaattgaaccaatggtcaatgcaggcaagtttatgtactatatagccccatcaaatcccatatcttatgatttacagttcaaaatttttctccaacacctgagcattgagcattactgtaaaagtgttcatattctgtaggggtttggaatgatcgtctgtggcctgacgattggactgcagtgactgcagatggtaaacggagtgctcaatttgaacatacacttttggtgacagaaacaggatgtgaagttttgacggcacggttaccctcatcaccggacgtttttccatggttgaagaagccgtgatggggaacgccaccaacagcaagtgatactgttacactgggtcagcaaaaagttttgttctgctctatcagtcggccaaagctgaaattttcaaatattctagatcagagtgattagcatgctactgctgaacagtcgcagcaattgtctatcgtgcggaactatttctgggagtgtgtattgttaagtcggttttcttcgagttatacgagacgtatggcttcttgagatgtgtcaccaatatgattatgccatcagtttacttttgatttcacagaacacaatttccatcatttcgagtaggttattttttat

SEQ ID NO: 94891 - DNA, 1747 bp, Zea Mays
gtccaaacagcaccagggaacagggtcccatggggtggtggtctggaggggaactgatttggtcaccagcctgagcccctgactgtgcagtgtccacaaagatcccgggctgctccttcctcccagaggaagcgtacaaacctggaggggaactgcccgtctcctcggctgacccgtccacctccttcttttcccctcgtgtccgccgctacacgcgccgccggaaccctagcctccaccgccacaggcagcagggatggagaaaggagcctcggaggcgtcgcccccttgcgctcgctgcggcaagcccgctcagcttcaatgccccaagtgtgtcgaacttaagttaccgcgtgagaatgcagctttctgcacacaggattgttttagggcagcatggagctctcacaaatctgttcacccaaagcctggtgcaccggcatcccagcagtctccagaaggttggaaatattgtctgagaaaagggcgggaacgtgcattgcaacttcctcgttttgattggacaggtccattgagaccacatccaatatcaaagatgcgtgtggtgccagatgaaattgagaagcctgattgggcgcttgatggaattcccaagatagaaccagatagtgatttgcagaaaagagtagagattaagacccctgatctcatagaaaggatgagagtaacatgtcgaattgcaagagaggttttagatgcagctgctcgtgtaattaaaccaggaattacaacagatgaaattgatagagtcgtccatgaagagacaattgctagaggtggatacccatctccattgaattactatttcttccccaagtcatgttgcacgtctgtcaacgaagtcatttgccatggaattccagatgccaggaaacttgaggatggtgacattgtaaatgttgatgtaactgtatactataaaggtgttcatggtgatttgaatgagacatattttgttggaaatgttgatgaagcttccaaacaccttgtacgttgtacctatgagtgcttggagaaagctattgcgatagttaaacctggagttcggttccgagaggtcggagaagtcataaacagacatgtttcaatgtcaggtttatctgtggtgaaatcttattgtggccatggcataggggaactgtttcactgcgccccaaacattcctcattattcaagaaacaaggccgttggtatcatgaaagctgggcagacatttacaattgaaccaatggtcaatgcaggggtttggaatgatcgtctgtggcctgacgattggactgcagtgactgcagatggtaaacggagtgctcaatttgaacatacacttttggtgacagaaacaggatgtgaagttttgacggcacggttaccctcatcaccggacgtttttccatggttgaagaagccgtgatggggaacgccaccaacagcaagtgatactgttacactgggtcagcaaaaagttttgttctgctctatcagtcggccaaagctgaaattttcaaatattctagatcagagtgattagcatgctactgctgaacagtcgcagcaattgtctatcgtgcggaactatttctgggagtgtgtattgttaagtcggttttcttcgagttatacgagacgtatggcttcttgagatgtgtcaccaatatgattatgccatcagtttacttttgatttcacagaacacaatttccatcatttcgagtaggttattttttat

SEQ ID NO: 94892 - DNA, 1875 bp, Zea Mays
gtccaaacagcaccagggaacagggtcccatggggtggtggtctggaggggaactgatttggtcaccagcctgagcccctgactgtgcagtgtccacaaagatcccgggctgctccttcctcccagaggaagcgtacaaacctggaggggaactgcccgtctcctcggctgacccgtccacctccttcttttcccctcgtgtccgccgctacacgcgccgccggaaccctagcctccaccgccacaggcagcagggatggagaaaggagcctcggaggcgtcgcccccttgcgctcgctgcggcaagcccgctcagcttcaatgccccaagtgtgtcgaacttaagttaccgcgtgagaatgcagctttctgcacacaggattgttttagggcagcatggagctctcacaaatctgttcacccaaagcctggtgcaccggcatcccagcagtctccagaaggttggaaatattgtctgagaaaagggcgggaacgtgcattgcaacttcctcgttttgattggacaggtccattgagaccacatccaatatcaaagatgcgtgtggtgccagatgaaattgagaagcctgattgggcgcttgatggaattcccaagatagaaccagatagtgatttgcagaaaagagtagagattaagacccctgatctcatagaaaggatgagagtaacatgtcgaattgcaagagaggttttagatgcagctgctcgtgtaattaaaccaggaattacaacagatgaaattgatagagtcgtccatgaagagacaattgctagaggtggatacccatctccattgaattactatttcttccccaagtcatgttgcacgtctgtcaacgaagtcatttgccatggaattccagatgccaggaaacttgaggatggtgacattgtaaatgttgatgtaactgtatactataaaggtgttcatggtgatttgaatgagacatattttgttggaaatgttgatgaagcttccaaacaccttgtacgttgtacctatgagtgcttggagaaagctattgcgatagttaaacctggagttcggttccgagaggtcggagaagtcataaacagacatgtttcaatgtcaggtttatctgtggtgaaatcttattgtggccatggcataggggaactgtttcactgcgccccaaacattcctcattattcaagtacgtttcttgcaactatttcttatttatatttcttgtattagtgcagtaaatatgacgctgctgtgcaagctatgtcataaaggcttcacagctggggagatatgctggtgttttttaatgcaggaaacaaggccgttggtatcatgaaagctgggcagacatttacaattgaaccaatggtcaatgcaggggtttggaatgatcgtctgtggcctgacgattggactgcagtgactgcagatggtaaacggagtgctcaatttgaacatacacttttggtgagtactatgagtttctagtttgtcttcgaggatcaattctggaagctgtttgtcatgcagatgtttacgttgtgcaagaaagaacaaatgtgtcacgtgcaatgctattaattctgtgggcgtgggaaaatttaaagggagcttttacccccttcaacttgttatatatgctgttctatgctccaggtgacagaaacaggatgtgaagttttgacggcacggttaccctcatcaccggacgtttttccatggttgaagaagccgtgatggggaacgccaccaacagcaagtgatactgttacactgggtcagcaaaaagttttgttctgctctatcagtcggccaaagctgaaattttcaaatattctagatcagagtgattagcatgctactgc

SEQ ID NO: 94893 - DNA, 615 bp, Zea Mays
cacgccacccatctcaccactgcaccactgcgcgcttcgtactgctggccgggctgctccagcaccaggaacgctcgctcctgctcgtcgacgttagattttcccagacgcgcgagctccccagcaactccaacacgttgctcgcctcgctcagtcttcaagccatcgtgccgctggttctagccaaagtcgggcgcgttctttccttcgccaggcagcgcctccagtcgtcgtttcttttccacggctgcacgctcaccgactcaagcgcttggccatggagctcggtttcgtgtgtgcctgtgctgggtcgccgggtcacgtgctcgtctgttttgatgctgtgcacgttccggcttgtggaactcgccggcgttgtcagctactactagacctcacagtggtactgtgatgccgccgtggagacgtctactgtgccatctattctctgttgtctcgctacacctgattggcatcctcgtccttgtctcgatctcgctacggcagcatcggcgctctcgatatcgtcctgagttcactccgcgtgctgcgacgtctcgctcacctcctcgccaagtcgtcgtcgccctcacggttatcgggtcgattcgatca

SEQ ID NO: 94894 - DNA, 1476 bp, Zea Mays
aaacaggatgcttgcacgcaaaggaccagaagccgcctcaccgcccgttccattccgttccgccggctatatcaccgtccccaaacaccgcggcggcattcagtgattcagccgccagtcccgctcgtctctgccaagtcccgcgcgctcgagcatcgatcagccgctggcgccgcgacgagcgacgacgccgcgccagtcgcagatggccgccgtctcgctcctgcgatccgcggcgctcgggctggtggtcctcgcgtcggcgctgccggcggctcggccgtggagcaaagagggtcacgtgctcacatgccaaatcgcgcagggtctgctggagcctgacgccgcgcacgccgtgcggaacctgctcccggacgacgccggcggcgacctgtcggcgctgtgcgtgtggccggaccaggtgaggcactggtacaggtacatgtggacgggcccgctccacttcatcgacacccctgacgaggcctgcagcttcgactactcgagggactgccacggccccgacggcgccaaggacatgtgcgtcgccggcgccatcgccaacttcacgtcccagctgctgcactacaggcacggcagcgccgacaggagatacaacctgactgaagcccttctgttcctgtcgcacttcatgggagatgttcatcagccaatgcacgtggggttcaccagcgaccaaggcggcaactccatagagctgcggtggttccggcacaaatccaacctccaccacgtgtgggacagggagatcatacagacggctctcgccgacttctacggcaaggacatggacgccttccgcaagcagctcgagcacaacctcaccaagggtacctggtccgacgatgtatcggcttggacagactgccaagacctctcgtcttgcccaaccaagtacgcgaccgagagcataggcctggcgtgcaaatgggcgtacagcggcgtccgcgaaggggagacactgtccgacgactactttgactcgaggctgccgatcgtgtcgcgccggatcgcgcagggcggggtgcggctggccatgttcctcaaccggatcttcggcgcgcacaaccgcgacgtgccgccgccgtcttctactcttcttgattgatggatggacccgaacccgatctgcctgccgcgtcacagactcacattctaatctaattcatgtggttgaagtctctttgcttctttttaagtaaatatgtaattcataattggcagcagctcgtgcagtccaagccatggatggccctgtaacctgactcctgttgcgttagtctctgtctgtataccgatatatatacagttatacacacaaataatatactcctttctcattagttcactacgggtagtaataggaggagaggacacgggggtgatttgtgacgttatacattctagatttctctgatttatacatgtgagggatatctcaactgaactttcact

SEQ ID NO: 94895 - DNA, 1990 bp, Zea Mays
cagatcccgcactcctcgctcgcgttctccctccaccgcccccaactcctcgccgtcccaccgccccgaaccacccacacccaccactcacctccatcccccacctctgcactcccgcaattcgcgtcgccgacaacccgccccgctcggcggcggagacaaagagcgcgccgagcgcgcggcggcgggcgtagccatgctccacaagttcgcgctcgcgttcaagaccaagaccatcgagttcttcgccgaggaggacgaagacgaggacgccgaccggttagcgcgctctccggcgccgggggcggatggggtccttgcctggcagcgggtggtcgtgctgaagcccgacccgccgaaccctaaccctagcgcggatggggaggggaaggcggcgtccgggcaggaggccgccgtcgccgcggcgcttgcgacggcctcgtcgttccaggcggcgtacctgcacctgcaggccgcccacgcgccgttcctgccggatgcggcggcggccgcggacgccgccgctgtgtcgcacctccggaggctgtcggagctcaagcggatcgcgaggagcgggccggtgggcccgcccgtgacggacggtggcggggccctcacggcgcacctcgaggcccaggtgcgcgagaaccaggcactgctgcggtcgttcgacgccgtggtgaaccgcctacaggccgcgctcgacgccaaggacgccgcggccgccgcgctgcggctggacctcgaggcgctcgacgacgccaacgcgcggctcgcgggccgcctcgaccgcgcgctcgcgcctccgccgggcggggacgccgtcggcgcgatgctgtccgcgggcgtcttcgactccgtcctacgcgaggcgctccgcgtcgcgcaccggttcgcccgcgcgcttgccgaggtcctgcggtgcgctgggtgggacctggccgcggccgcagaggccgcttaccctggcgtcgcctactccaagtccggccactgccgctacgcgctcctctcccgcgtctgcctctccatgttcgacggcttcgactcctaccagttcggcgccacagccgacaccacggagcttggaggaacccagctggcagcccgcaggaacgagtcactgcagcaattcatcgagcactcagatgcagatcccatggagctgatgaattctagcccggactgtgactttgcccgattctgcgaccgcaagtacagacagctgatccatccaggcatcgagtcctcactgttcgggaactcagagtgcgggacactgccggtggtgagcgtggccggcccactctacgagctgttcgtcgcaatggcaagctcgatctggacactccacaggttagcctgggcatacgaccccgcagtcggcatattccaggtcggccggggcgcagagttctcgacggtgtacatggagaacattgtccggtcgaagaagtgttttgcggggagcaaggagcccgggaagccggtgcggccgaaggtcgggttcacggtggtgccgggcttccggctcggagggacagtgatccagtgtacggtgtatctggatcacgggaagagggaagaagacattacagattcggtttgagctggagtggaaactatacaggcaaagaaaggaaactgtacattcccaaagaaaaaggaggttatgtaaaggcgatcaagaacagtgcgtggaaataacctgcaggatcgaagtcgctgctcgatgatgagtataaagaaagctatttatcttttgatttagttttgttttttttgtgggctgtacaaaggtcaacgggtgaagagagctttgtgttctaacagagtcgaagggttattaccatctgatcttgggtaacttaattatttgtgtgtaggtcgattccatctgtaaatgtatatttatgagggagtacgtgctcgcgggcctcttatatatttagaagaaaaccagctaatgcattgtcctactgattaatga

SEQ ID NO: 94896 - DNA, 3247 bp, Zea Mays
ggcgctcggacgacggcgtgcaccgtgccgcgcgtcgcgaggtccgcgcatgtgcgagtgcagccgggcacaccacgggttcgttgcctcctcgctcgaccgtagtccgtgcccggggcaagaaagcaggatggggcgagtttcctctgggtgggtgtgcacgtacgtattcatttgcacccacgttgccggtgtcagactccatgatacagcctctcaagtcccccaactacttggcgaaagtagcaagcagtacgctgccgttcctatccgtctcaaagcgaacgacccatccagcatcaatgcctgagcggcccctgaggccctgaccccaaactgccaacaaatcttgcaaccaatgaggcaacaacgaccccctgccgactcgctacaaagcaaacgcccttttccgttttcccatcgctgcacacaaacagaagcaggcacccaccacggcaccacccccaaacaaaaaccgcgggtcgcccggcacgcacccccgccgcgcccgcgccagaggatccgtccgacgcgacgccacggcaggacggtcccgatcccaatcctgccactgccagtgccaccctgtgacccatcgatttgcttgccattccaccacctctctctgctccactgcagcagtgctcctcctcctccaccaccacgcggtccatctcactctcacaggctccaattggcatctcgtctcgcgctcgctttccccagtccactcgcgctctcgtttcccggagcttcgcgatgcagcgccttctcgcgctggtggcagccctgctggtgctgctggcgtcgcgtccagcgctggccaccgacccctacgccttcttcgactgggacgtctcctacgtcactgcggcgccgctcggcgtcaagcagcaggtgataggcatcaacggcaagttcccagggcccgtcgtgaacgtcagcaccaactggaacgtcgtcgtcaacgtgctcaacgacctcgacgagcccctcctcatcacctggaacgggatccagcaccggaagaactgctggcaggacggggtgctcggcaccaactgccccatcccgcccggctggaactggacgtacgagttccaggtgaaggaccagatcggcagcttcttctacttcccctccaccggcctgcagcgcgccgccggcggcttcggcggcatcgtcgtcaacaaccgcgacgtcatcgccgtgcccttcgcccgccccgacggcgacatcaccatcttcatcggcgactggtacaacaagaaccacacggatctgaggaagatgctggacaaggggaaggacctcggtattcccgacggcgtgctgataaacggcaagggcccgtaccggtacaacgacagcctcgtgccgcccggcatcgagtacgagaccttcaatgtgcatccgggcaggacgtaccgcatccgggtgcacaacgtggggacgtcgacgagcctcaacttccggatccaggggcacagcatggtgctggtggagacggagggctcctacacgtcgcagcagaactacacgagcctggacgtccacgtgggccagtcctactccttcctcgtcgccacggatcagaacgccagctccgactactacgtggtcgccagcgcgcggcaggtgaacggctcccagcccctctggcgccgcgtcacgggcgtcgccgtgctccgctactccacctccgggggccccgcgtcgggcgccctacccgacccgccgcaggaccaggacgacagggccttctccatgaaccaggcgcggtcggtccgctggaacctgagcgccggcgcggcgcggcccaacccgcagggctcgttccgctactcggccatcagcgtgacgcaggcgtacctgctgcggggcgcggggcccgtgtggatcggcggcaggcggcgcgcggcgctgaacgggctgtcgtacgcgccgcccgagacgccgctgcggctggcggacgcgtacggggtggagggcgtgtacacgctcgacttccccgagcgcccgccgctccggggcgccgcccccaggatcgcgcggtccgtcatcaacggcacctaccgcgggttcatggagctcatcttccagaacaacgacaccaggatgcagagctaccatatggacggctacgccttcttcgtcgtcgggatggactacggcgagtggacggaggacagcaggggcacgtacaacaagggggacggcgtggcgcgcagcacgatacaggtgtacccgggcgcgtgggcggcggtgctggtgtccctggacaacgtcggcgtctggaacgtgcggtcccagaacctagactcgtggtacctggggcaggaggtctacgtcagggtcgtcaaccctgaggacaccggcaacaagaccgagatggccatccccgccaacgctctctactgcggccagctccacaagtaccagaaggagcagactccgcaccacaagatgggggcgtctgctgcggcgccacgctcgtcggtgtccctagcgcgccggctgctcgcgacggcgctgctcctcgccggatccttcgtgttcgcgccgtagagtgagtggcaaccgttacttctgcaccgaggcggcacccgtttatgtaggtttgattaggattaggcgtaggccgcgtcattacctatgagaattgttcatatgccagcagtgctggcctccgcctggtttcctatggtacagttctccctcgctttcattgtgtgtgtgtgtgcgtgtgttagttagcctctgttaggaagggtcgatggtttctctctgattagttcattccttttgatggtgattccgatcttagcgtttttgtatcgcacctcatgtagtcctgttcttcaactggctaagaacgttttactggacatcgttttagaatgtgagctgtggggattcatttctaaacaagaaaatcgtgagtggctgagaacattttggtcgacgtttttagtatggaccagcgacggcgcccgccatgcggggctgggagctgggtgccaaatatcaacgcctgtgtccggagtagtttagtgcaaacgagtttaaacgttactccttcgtcctcaaataaatcaattttaaggtcttctaaagtcgaacgatctataatccagtcgaatttataaatagtgtagaaatattcaaaatactgatattttttctaacttggtagctagatacctcgttattatgtatgctaattatttatattttgtttagcaaa

SEQ ID NO: 94897 - DNA, 1461 bp, Zea Mays
atcctccggctcctgccagacctaggctatttcccgatcagacctgttatttcccgatcagacctattcctctctcggcctcccaccgccaccggcggcgacgagtaactcgcccgctgaccccagcaggcagccatgggagggcacggcgggttgaacatcctgccgcagaagcggtggaacgtctataacttcgacaaccgtgagaaggtgcaaaaagacgaggccgccgccgcccgggaggagcagctccagcgcgaggcggaacgccgccgcgagtcggatctacgcctcgctgcactacgccgtaaccgcggcctggtccaggcggagacgccccccgctcctccatctcaccccgccggccccgctgatccggcggacgcccttccttccccggcggacgcccttccttccccggcaacggatggagaccacatcaacctcttctcaggtggatcaggcgtcgccactgatttcgatgcgctcgcctcggccagtggtgggaggggcgcggctcgggagcgggagcctgatgccgaccctaaccctaagaagcggaagaagaaggaagaggaggtgagggttgtggggcccgatgaggagaagtacaggctgggctacggccttgccgggaagggcgtggcggtgccctggtacatgtcgagccctgcagcggcagcggccaaggaggggaggggcagagatgcaagggagggtaacggggtgaagaggagtggagggaagaagagcatcgaagagctgagggaggagaggaagaagagagaggccaaggagaaggaacgcgagcgagccatccttgttgctgcagggaggaaggagagacaggtggatcgggggcgccagtcaagatgggctcggtgatgtaaggattttcatggtataatgtccaagaatactaaggaattaaggataagtcatcgaaccgggcatggcctgactaccttaccatgcagatgcatgtggctgcaaaaattacaccgttcagttgccaaaggatagttgtgagcagtccaagagcatcatgatatcagtaacaagaagattgtatcatttgttggaaatcaatttatttggatctttttttgtaaaatattccgtgtaatatactgagaatgcaatgaagtcatgaagctagcagtacatgtaacacaggtgttgcttgctgtttgtaaagctatttacttggattgccccgcccttcccccctttttttgaaatttcttcaatggcagataacttcaacttgcctgagtatcgttaggagcatcccgaaccatctccctgcaaagttgtattgcatgctactggcacgattgttgttttttttttgcatgatacagaaaccaaacaacaatcacttttccagtgattcgtgtaaatacatcatgtggatcaaaatacatgctattgtactccgcacccccacccccacccccg

SEQ ID NO: 94898 - DNA, 762 bp, Zea Mays
atgtcgccgcaccgccgctgtgaacggatccgtgcatcccgtggcgcaggggaggagccggccatcctcagggtggcgctgggctccggcaagctgcgcatcgaggggtcgctgggctccgccgctcccgcccccgtgcgctcgccgacacgagtagagggcctcgcggctcgcttcgagtggtgcatcaacttcagcctagatggacgataccttgccactgctggagaggaccacgtgatccatgtgtgggaggtgtccaagggagaccgaaagggcgagttactcggggaagcttcggtggcaaaggagaatggtggtggttgcagtccatttctcgcgattgttgggaatgattcactggagatggctgcattgtcgttcacctacactgaagggggctatgtggacaagaagagaaggccgaggaagcagaacaatcacaagtctgtagggtccgatcatctggttgttcctaagtgtgtgtttggtttcacagacaagccagtctgctcacttctggggcatgctgccgatgttcttgatctgtcatggtccaaatctcagaagaagcttcagtacaaaagtcagatagatttaagaattaggaaaaagaagtcaggccagaagaagataactggcttccagtttgctcctggaagctcctcggaagttctgattacttctgcggattcgagaatacgagttgttaacggcgatgaatttgtccaccgccgccgcaaaggaaggaaagagagctag

SEQ ID NO: 94899 - DNA, 3557 bp, Zea Mays
gcgatggatgacgctttgctctcggcctttctgcaatccctttaccaggtcatggtgtaccttctgaaggaggagcagtctgaacgccatctcgaggaagggaggaagcaattagtctctaagctgggcatgatccaagctgccctcgggaccgccgagaagaagacgcagctgtccgcgtcggaggaggcgttcttcgccagcctgaaagacgtcagctaccaagggtcggaggcgctggacgagtactgctacgaggtccagcgccgcaaggtgatccgtcccgccacccgtctgcgtaacagcaccgtaactaccgtcttgaatccttcacgcgcgatgtttaggcataatatggagaacaagttcaaggattttgccgacaggattgatggcatcagaaatatacaagagatgctcctggacctccaagcgcagaatggtcagccatgtgatggtggcgggaacgagcggacctccttgcttcctccgaccgtggtgtgcggtagacacggcgatgaggagaagatcgtagagatgcttcttcgacctgacccgaagcccggcaatgtcgtggcggtcttgccgatcgtgggggaggcctacatcgggaagacaaccgtggctcagctggtcctcaaggccgagcgtgtggcgaagcacttcgagctgaagctgtgggttcatgtgacacatcagttcagcatagaaaggatcttttcatctatcatagaatccatacagtgctctcaatttcaaagccatagcctcaacaccctccacacgagcctggaccggctgctgcgagggagaaggtacctcctcgtcctggacgactactggaacgagagctgggaggactgggacatgctcaagcgttcgttcctcagcggtgctccaggaagcaagatcatagtgacgacgaggagcgagaatgttgctgggcttgttcgtacgttaggcccgcacaggttgcagcgtctggaagaagaggactgcttgtcattgttcagccagtgcgcccaaggcacggagcatcatgcacatgtcccagacgacacaagactgaaggaagaagttctacgcaagtgcaggggtgtacccttcatagcagcaagcttgggatacaccattagactgcgccaggagaacgacagaagcaagtgggcagatattttgcgggaggagaaatgggactccagcaccagccatttcaacagagccctacggctgagctacgtgcagctggattaccatctcaagccctgcttcgcgtacagctccatcatcccgcataagttccagttcgagaaggaatggctcatcaggcactggatggctcagggcttcatacctgacgccggcagcgacgatacagtcgaggacaccggaagagcctacttcaagtctttagtcagccagtccttcttccagatagcgcacgtcgaccgcaccggggaagagcacaggtacgtcctgtcagagatgatgcacgacctcgcctcgaatgtctcgggcgcggactgcggatgctacctgatgggacgacagcgctacagcgttccagtgagagtccggcatttgacggtcgtcttctgtaaggatgcgagccaagacatgttccaggtgatctcctgtggcgagtccctgcacacgttgatagctctgggtggttccaaggatgtggatctgaagatccctgacgacatcgataagaggtacacaaggctacgagctttagatctgagtaactttggtgtgactgctctgcctagatcgatagggaagctgaagcatctccggtgcctccagcttcaaggcaccaggatcagatgcttacccgagtcgatctgtgagctgtacaatcttcagacgctggggctcaggaactgctatgagctggaagagttgccacacgatctgaagagcctttgcaagctaaggcacatcgatctgctaatggctcctgatgatcctcgccacaaagtctgcagcttgagatgcatgcccaaggatatagggttgctgacgaaccttcaaaccctgtcaagattcgtcgtaagcgagaggtctgtcgtccaccctcacagaggtgggataggggagctggccgatctgaacgacctccgtggggagcttctcatttcaaacatgcatctcgttaaggacgtgcaggaagccacgcaggcgcagctgagttccaagcggttcctccagaagctggagctctcgtgggacaaccaagaagaagctacgcaaccttccaagaagatcctccaaaagctgaagctttcccctagcagcaacgagattgaagaagccgaggcaatagtagatcgcctaaaggcacccaccagcatcaaggagctcaccatctcgggttacaccggcatggcatgccctagctggcttggttctgcaggctacgcggacctggtcactgtgagcctctgcgatttcaagaggtgtgacactctcccttgccttggattactgtcccatctggaaaatctccatcttaaaggctgggatagcttggtctccatcagttgccgtgagttttgcggtgactgtttcggggaaagtggagtacgccggagcttccgatcactgaagaagctgcattttgaggggatgaccagactgcagcgttgggaaggggacggggatgggagatgcgctctgtctagtcttctcgagcttgttcttgagaactgctgcatgctggaacaagtgactcacagccttccgtcgctggccaagatcacagtgacagggtcagtcagtttccgtggcctccggaatttcccatcgctgaagcgcgtgaacgtagacgctagtggcgactggatatggggatcatggcccaggctttcttctccaacatccatcaccctctgcaacatgcctacagtgaacttccccccaaggatcggacagttgcatacatctttgcagcgcctggagatcagccactgcgagcagctgcagcacataccagaggactggccaccgtgtaccctgactcacttctgtgtgaggcactgtcctctgcttcgtgaactgccagagggcatgcagcgcctgcaagcgttggaagacttggagatcgtttcttgtgggaggcttaccgaccttccggacatgggtggtcttgattcgttagtaagactcgagatttcagactgtggttcgattaagtccctgccaaatggaggcttgcctagctcagttcaggtcgtgagcattaacaactgccctctgcttgcaaactcttgcatcaatgagggaagtgcctatcgtgcaaaggtcaagagggtattagtatggattgatgggcttctgcttgaccgcttcttgtgacttgtaactagcccagctatgttatcccgaatggccgaatcctgacaaagatctatgtagagaatagagatactgaagtacttgatgctgtgttatttctttgtattgatcgatgtaacaaacttgaaaatcattggaaccttcttcatccagaacagaagtgtcgtgttctttctcttctgcagtgcttgcag

SEQ ID NO: 94900 - DNA, 1971 bp, Zea Mays
acgagttttcatttcgtggcggaagccggaagggagactcctttcccttggcgccggcgcgccgccgtgccgccaccacccttcgaaccatagctgggcgccatcatcttcccgcagagccgctcactcatcatgtgcttgcgtgcgcgtattctatgatcacgggcgctcatctacctccgctccgagcagcccgggcgatctcggcccggctctgcctgtcgcggcgtctctgctgcaacggttccagaaacggcggtgagagtcctccagacactgcacagcgcaatggtgacggtgtccgtgagggagcggaggaggtggcaggcctgaacgctggccgcttcccacgtgaagtagtactccagctgccaccaccgcgaggccagccggagaacgatgacgatgacggcgaaaccttttcccctggtcaagattccaggaggcggttctttggggatgtgaggctggaggcggacaggatctttaggatcctgctgcaggacggcccggggttcagcacccgccacgcgctcgatgaaatgcgcccgaaggtgtctattgagctggtgagggaggtgctgttcaggattgttgtgtccgtggacagtgtgaaccgtgagaggtacccgaagctggcgtataagttcttcatatgggcggggcagcaggaggggtaccaacatagcacaagcatgtacaacctcgtcatgaaggttttcgccgagtgtggggaggtgaaggcgatgtggcggctgtttgaggagatggcagccaaggggctacctgtctcttcccggacgttccacctcttgatatgtgcatctgtgaaggttgggttgaggcggagactggtggagaggttcatcaggtcaagtactttcaattaccgcccatttagaaatgcatttaatgcaatattgtacacacttctgaccatagagcagtactcactgattgagtgggttcacgagaaaatgatccttgaggggtactcacctgatgtcttgacatacaatgtggtgttgcgtgcaaagtatatgcttgggaagttggatcaattccatcaattacttgatgagatgggaaaaaatgggcttacgccggacctccatacttacaacctgttgcttcatgtacttggtaagggagacaaacccctcgcagctctcaatttgctgaactatatgagtgatgtcggatgtaggccaaatgtgctccatttcacaaatttgatagatggtcttggccgtgctggcaacctagaagcctgcaggtatttctttgatgagatgatgaagaaagggtgtgacccagatgttgtctgctatactgttatgatcgcaagctatgtggcagctggggaatttgaggaagcccagaggttttttgatgatatgctgatgagagggcagcttcctaatgtgtacacatacaattcaatgatacaggggctttgcgcagtcggggagtttgataaagcattcactatgctgaaggacatggattcacatggatgcacaccaaacttctctgtgtacagtagtctagtaaggagactgcggaacgctgggaaggatactcaagctaataatgtcattaagtacatgacagataagggtcattatcttcatctgctatcaaggtttggagggtttagaagatgctgagaagcctgagatgagagatgcccccctacttaggtgcagaggttcatttcttttggctgtttgcatttctgacagatggattatgagggaggatactatggaagtggttactctatatttttttatgcttgatgtagcacatgtcctgcaggattctttgtttgttgatgaagtacagaaaaagaagtgttgtatgctgttcttgtttgagataggggacactagtcatgagtcatcaataaatcatgtttccctgttcctctgatctgatataatgaaaaagatttaattgctccctcaa

SEQ ID NO: 94901 - DNA, 346 bp, Zea Mays
gatcagccggcgtggacaccggcggtgcaggaggtggagggcgacggctccgcacctagggtgcggctcggtgatatcggcggccccgtcgtcgaggatccagccgcgccgcgctccacgacgcccaccgcgcgagagggtgaggacataggtacgacgcccgtggtgcggcagtttgagaccatgagcttatccgacgacccgacgcacgtgggcgcgggcaagaaaggcgccaaagcagaggagtggaaagacaaggccgcggacacggtgcgcggtgcggacggtggcggtggcggtggcgctagctacacggacactctcaagaacgcggctgccggcacca

SEQ ID NO: 94902 - DNA, 515 bp, Zea Mays
aacccacgcaccaactctcgccattgccagtcaagctcgctataagcagccagatattcaggaccaccgatcacgatcccaaaaacagcggctctgtgtcgcgacgtcgacggcgatggacgctccggccatgttcgcgcgcaagcaagtccccgatgacttcggcctccggaacatcggcgaagctgaggacgaaggagccggggcccaggcccaggcccagctgcaccgcgacgagaagcagcacaagccggccgtgctgaagaaggtgaaggagaaggtgaagaagatcaagaacaccctcgccggccacggccacggccacgacggtgagcacggcggcggcgagcgcatgggagacgcggacgccggcagcgacagcagcgaggaggcggaggaggacgcggcggagagggaggccgcgctggagaagggcggctacatggaagatgtcgaggacaagcccctcgtcatggagccggagcccaaccccgagctgcacggcgcgccgagta

SEQ ID NO: 94903 - DNA, 733 bp, Zea Mays
tgcaggacaatcagcatgctaataacaagcgcaccaagcacaataccggctccactgggagcattgctgcactgccaggcaccaacagacagggcgaagacggtgactgcaatggtcctgacatgaggaacaccactgaccagtcagcgaaggagctggcctcaatgaaggagaggaacagggccatcgaggaggagctgaaggagctgcacgaacggtactcggagatcagcctgaggttcgcggaggtggaaggcgagcggcagcagctcgtgatgaccgttcggtcgctgaagaactccttgcggtgactgactcgtgctgcttcactcacactgtagctacaaagattttagacgataccggtgggcgttgtacaggtgggcgagcgactggatgggctttttctctccgaagagagaggctccagaccagaggctcggggagaccaggccaggcgagacgggcaccccgggtatgtaccaatggggtgcctgcggtgtggtctgtccgtatcctcaagagttacagtacacagcatgtagatctcgtcacaataacattctttcgttttctttgttccgcattggcgtgtgtgcagtaatatgagttgtaatagttctttcttaccctctctggagtgtgttgtgctgtataatttccatggtgtcattgtgttgtggagaaaggaaaatgagaaggaaagagtggcctgtcagctttatctcagaaa

SEQ ID NO: 94904 - DNA, 875 bp, Zea Mays
caaacacaactgagggagcagctaaggatgcaatatgagtgttcagctcatttggctattataagtgatcttgaggccaatgtggagagcttggataatgaactccagacacaggctaaaaagtttgaggccgacatagcagaaataatgagtgcaaaggtggaacaagagcaacgggccattaaggctgaggattctctgaggaagataagatggaataatgcaactaccgcagaacgacttcaggaggaattcaaggtgttgtcttcacaagtatcttctgctttcagtgcaaacgaacaacagcttgtgcaagcaagaaaagaggttgcggagctgcagctgcagaagagccagttagaagagttacttcagaaggcccaaggagatcttggatcagttcaggatcagcaccgggtgaaggtccagcagttaataaccctagtggatttcaagtcaaaggagatagacaggctactgatggagctcaaaagcaagagtgatgagttccataaccaaaaaagatgtgatgaggcaaagctgaatgctctgtcagaagaaatcgacctactcaattccaagatcgacaagctatccagtgagagaaatgagctattcgaaaagaatgagcagaaagaaaaggaattagctggaattagcgaaaaggacatgcaattgcaagacaaaactgctgagattacttcactaaataaagagcttgtattcctcaaggaccaagtgaagatgcatttggacgaactgcacagtttaaaacgtttgaagaacgagagggaggaaacaattggaaaactgcaaatagatattgggtcactgaaactccagtgcgacaacttgaaaacttcgctgtccaagaa

SEQ ID NO: 94905 - DNA, 707 bp, Zea Mays
cagcacctcacgtaaccgcatcgcaccgcgatgccgaccctggtggcgtcacgcggcgcggtggcttcttccgcgcgcggcattgcaatgccgccaccggtggacgctcccgtgaaggagtagctagctggcccggcggcagtggcagcgggcgaggcgaagggagcggagaggtcgttgtctgttccgggagcgagcgcggcgccgccgacacgacatgttcaagtcgcggtggcgcggcggcggcagggccaaggccacgttcaagctgcagttccacgccacgcaggtgcccgtgcagggatgggaggcaatgatggtggtggtgacgccgcaggacgcaggccggccgacggcgcggtcggagcccgcggaggtcaccgatggcgcgtgccgctgggcggcccctatcatggatgccaccaggctccccgccggcaaggacaagatctaccagttcctcgtctatgagaccgggtcgagcaaggcggcgttgctgggggaggccacggtgaacctggcggactacgccgacgcgttgaagccgtcggcggtgacgctcccgctcaagggcagccccggcacgctgctgcacgtgaccatccagcgggtggtgggtggcgccggtgggtacggagacgacgcgagtgagagcggcgacgcctcgccggtggcaaagacgccacagagaagaacgacactgcaga

SEQ ID NO: 94906 - DNA, 261 bp, Zea Mays
atggacgatgtgtacatctcggaggagtacgtggcccggcggcacgccgagcggagggccgcgcggatcgccgcggcttcttgctgcggagaggagaccatcaagccgcgggcggacagcgagcagaagaggtggtcgacggagaagggaagaaagcggcctgccgacggcggcaatgccgacacgaatgtcggcggcggtggcgccgcctgctggctggtagggcagcaggacgccgttcttagctacttctcggcttag

SEQ ID NO: 94907 - DNA, 1959 bp, Zea Mays
cattatttttgtcaggcttggtcttctgctgacttgacctcacacgctcgagggcgtctgggcgtgaaacttgtttagcaactgctccctcatttccactgcaaaaccccatctccgacgttgttgccgttgtacacttgtacggtcgcgtatatatctgcgccccagtggccctccctctctctctcatcacaccaaagccagcagcaggcacgagcagcctccagagacccagtgcgttctcagagccaagcagcttgcaatataatggcgtcgtcgctcaagttcacggtgcggaggcggcccgcggcgctggtggcgccggcgtccccgacgccgcgggagctgaagcggctctcggacatcgacgaccaggacgggctgcgcttccacatccccgtcatccagttctaccgccggagcgcgctcatgggcgggcgggacccggcgccggtggtccgggacgccgtggccagggcgctcgtgcactactacccgttcgccggtcggctcagggagctggaaggccgcaagctcgccgtggagtgcacgggcgagggcgtgctgttcatcgaggccgacaccgacgtgcgcctcgaccacttcggggacgcgctgcagccgccgttcccgtgcctcgaggagctcatcttcgacgtccccggctcgtccgaggtgctgggctcgccgctcctcctcttccaggtgacgcggctggcgtgcgggggcttcatcctcggggtgcggctgcaccacacgatggcggacgcgcaggggctggtgcagttcctcgacgccgtggcggagctggcgcggggcgcggcggcaccgacggtccggccggtgtgggggcgggagctgctggaggcgcgcgacccgccgcggccggccttcgcgcaccgcgagtacgacgaggtgccggacaccaagggcaccatcatcccgctggacgacatggtgcaccgctccttcttcttcgggcgccgggaggtggcggccgtccgcgccaacctcccgccgggcctccgctcgcgcgcctccaggttcgacctcctcacggggctcctgtggaagtgccgcaccgcggcgctcgccccggacgccgacgaggtgatgcggatgatctgcatcgtgaacgcccgcggcggcaagtccggcgccgccatccccgagggctactacggcaacgccttcgcgttcccggtggccgtcgcgacggccggggacctcgccgcgaggccgctcgggtacgccgtggagctggtgaagcgggccaagggcgaggtggacgtggagtacatgcgctcggtggccgacctgatggtgctacgcgggcggccgcacttcacggtggtgcgcgcgtacctggcgtccgacgtgacaaaggccgggttcggcgacctggacttcggctggggcaagccggtgtacggcgggcccgccaagggcggcgtgggcgccatccccggggtggccagcttcctcatcccgttcaagaacgccaagggcgaggacggcatcgtcgtgcccatgtgcctgcccggccccgccatggagacgttcgtcaaggagatggacaagctgctgagcgcgcccgcagacgcagaggcagagcagcagaaggatgcgttccccgtcatcaggtccgcgctctgaagtgagctctctgctgaggcagccgcgcgcacggcgccgatcgaaccatcgttttcgcttcgtgctacagcaagcatataggtaatcatcagcgggtcctgagcagctgagcttgtgtaacgtagtgggtgtgggtgtgggtgaaccatagtacgttgacgtgcgtggagctacgttgatgtatacgtatgtaatgcgcgcatttggccggctatatgggttgttgtgacgttgtatgtatattttggtaccttttcatccaataattcatatacacttcttcccttttcaattcaaattcgt

SEQ ID NO: 94908 - DNA, 2000 bp, Zea Mays
cattatttttgtcaggcttggtcttctgctgacttgacctcacacgctcgagggcgtctgggcgtgaaacttgtttagcaactgctccctcatttccactgcaaaaccccatctccgacgttgttgccgttgtacacttgtacggtcgcgtatatatctgcgccccagtggccctccctctctctctcatcacaccaaagccagcagcaggcacgagcagcctccagagacccagtgcgttctcagagccaagcagcttgcaatataatggcgtcgtcgctcaagttcacggtgcggaggcggcccgcggcgctggtggcgccggcgtccccgacgccgcgggagctgaagcggctctcggacatcgacgaccaggacgggctgcgcttccacatccccgtcatccagttctaccgccggagcgcgctcatgggcgggcgggacccggcgccggtggtccgggacgccgtggccagggcgctcgtgcactactacccgttcgccggtcggctcagggagctggaaggccgcaagctcgccgtggagtgcacgggcgagggcgtgctgttcatcgaggccgacaccgacgtgcgcctcgaccacttcggggacgcgctgcagccgccgttcccgtgcctcgaggagctcatcttcgacgtccccggctcgtccgaggtgctgggctcgccgctcctcctcttccaggtacgtgcgtgacggcgtccttgtactctctgctcatcctcgtttggtgacgcggctggcgtgcgggggcttcatcctcggggtgcggctgcaccacacgatggcggacgcgcaggggctggtgcagttcctcgacgccgtggcggagctggcgcggggcgcggcggcaccgacggtccggccggtgtgggggcgggagctgctggaggcgcgcgacccgccgcggccggccttcgcgcaccgcgagtacgacgaggtgccggacaccaagggcaccatcatcccgctggacgacatggtgcaccgctccttcttcttcgggcgccgggaggtggcggccgtccgcgccaacctcccgccgggcctccgctcgcgcgcctccaggttcgacctcctcacggggctcctgtggaagtgccgcaccgcggcgctcgccccggacgccgacgaggtgatgcggatgatctgcatcgtgaacgcccgcggcggcaagtccggcgccgccatccccgagggctactacggcaacgccttcgcgttcccggtggccgtcgcgacggccggggacctcgccgcgaggccgctcgggtacgccgtggagctggtgaagcgggccaagggcgaggtggacgtggagtacatgcgctcggtggccgacctgatggtgctacgcgggcggccgcacttcacggtggtgcgcgcgtacctggcgtccgacgtgacaaaggccgggttcggcgacctggacttcggctggggcaagccggtgtacggcgggcccgccaagggcggcgtgggcgccatccccggggtggccagcttcctcatcccgttcaagaacgccaagggcgaggacggcatcgtcgtgcccatgtgcctgcccggccccgccatggagacgttcgtcaaggagatggacaagctgctgagcgcgcccgcagacgcagaggcagagcagcagaaggatgcgttccccgtcatcaggtccgcgctctgaagtgagctctctgctgaggcagccgcgcgcacggcgccgatcgaaccatcgttttcgcttcgtgctacagcaagcatataggtaatcatcagcgggtcctgagcagctgagcttgtgtaacgtagtgggtgtgggtgtgggtgaaccatagtacgttgacgtgcgtggagctacgttgatgtatacgtatgtaatgcgcgcatttggccggctatatgggttgttgtgacgttgtatgtatattttggtaccttttcatccaataattcatatacacttcttcccttttcaattcaaa

SEQ ID NO: 94909 - DNA, 1696 bp, Zea Mays
caccggccgcgcccgcctcgcggtccggctggccttgcctcctcctcctactcgcttctctcagcctcaggccgacgcgcagcccagggccatcgtcgtcgcggaggtgaggtggaagggacacagggcctccgcgctcggctcgctgcggcgtgccgcggtcaggcgcaaccgcacatgggaggacgccgacgcagcgtgggaggaggagttcgagagcgtcgacaccctcgcggtcgcgtcgcagcgggagggcgttgtgttccacccatgggagctcgccttccgcgtcgtcagcgatattaacaaaggcccaaagaacaaaccatcaattctgggaactacttctctcaatctagcagattatgcattgacggctggagagataattctttcgttgtctataactggtggtgcacctgaacaagcctcatcccttcatctcactctgagtatggttgaattaagagcttttcaagaaacatctaatgcatcacagcgatctgctgcaaccttgccattgtccccatcatctggtgattctcttcctggaggaaaatatgaggttttggttattaaagcagggctgaggaaggtaaaaattctcacagatctggtgtcgacacgaaggcctaagaagacttgccagggaggtggcaaagataagttatgtgttaacagtgatggtgctgaatatccatgcgatactgagtctcttgatgacgatctagatgatagagttaaggaagatgaatttggagattcaactatcaggaagtctttcagttatgggtctctgcaatctgacaactatgttggtggcctagtttatgcccatgcaaagattgttggggagcatgaggaccggatatattatagtaaccgaaaaactgatgtcagtttccatgtagagaaaggattgccatcaaccacagagaatgggttgctaactgctaagcgcagtatacttccttggagaaagaggaaactgagtttacggtcgctgaaggctaaaggtgaacctctcttgaaaaaggcatatggggaagagggaggtgatgatattgaatatgatcgacgcttgctaacatcatttgatgaatctgtttcagagggatcaagaggatatggatcagcaaatactatggtgtcaaaatttggtgatgacaattttgtcattggaaattaggagttgaaggagataattagctgtgatgatcgtatgaagctttcatcccagatgttctttgcatcaatagaccagagaagtgagcgagcagctggggagagtgcatgtacaacacttgtggctgttattgcagactggttccaagaaaatcagaatattatgcctatccagtcacagtttgacagccttatccgtgaaggatcactagagtggagaaacctttgtgagaacgagacatatagagagcgttttcctgacaagcactttgatcttgaaattgtccttcatgccaaaattcgcccgctgacagtttcccctagcaaatcttttattagatctgtcttattatgactatggatgagacttttgtgatgtaattgatgagactatggatttcaatattgttatgtgattgtgtgtgagatgttttatgtgaaaatatgttgtgctatatagttgttgttatatttgttatgttgtggaatgtggtgtaaaataaaaataaac

SEQ ID NO: 94910 - DNA, 318 bp, Zea Mays
tcctgtggcaaccaggcgggaggttggtggaagtgcagcagcgcagccacagctcgcgttgactaccaccatggatgcttagccactgagcagctgaagtttcagcaactctcccgttatccgcctgtgcagtatagtatcatcgtgatcgcgagagcagcagcagtgggtttgccgtatctttttttaccaatgtatgtctatatatgtaagtatcaaatctgcaatgtgttaatcaccatttccgctggggcggccgcacgagtactttacgcatcagtatatgtgcagcatcaaatattccattttcatgaccat

SEQ ID NO: 94911 - DNA, 570 bp, Zea Mays
atgacgggttatgtcgtggatcgcgctatcgatagtcatcgcattacgccagacgatattgtcaccgtggggcgcgatgcgtgggcgaaagataatccggtgtttgtcggttcttcactgatgtttttgaaagagggcgatcgcgtatcggtacgtgatttaagccgtggtttaattgtggattccggaaatgacgcttgtgttgctctggctgactatattgccggtgggcaacggcagtttgttgaaatgatgaacaactatgccgagaagctgcatctcaaggatacgcattttgaaacagtgcatggtctggatgcacctggccagcatagctcggcttatgatttagctgtgctttctcgtgctatcatccacggcgagcccgagttttatcatatgtacagtgagaaaagtctcacctggaacggtatcacccagcaaaaccgtaacgggttgttgtgggataaaaccatgaatgttgacggcctgaaaacgggtcatacttctggtgccgggtttaatctcattgcttcggctgtagatgggcagcgtcgtctcattgcagtg

SEQ ID NO: 94912 - DNA, 438 bp, Zea Mays
atggacattcgcaaggtggataactcgcaaatcactaaccgcatgcgcagtcgcgactatgacatgatgccgcgcgtatggcgggcgatgccgtggcccagttccgatttacagatttcctggtcatcggaatatatcaattccacttataatgcccccggcgtgcaaagcccggttatcgactcgctgatcaaccaaattattgccgcgcagggaaataaagaaaaattactgccgttggggcgagcactggatcgcgtattaacgtggaattattacatgctgccaatgtggtacatggcggaagaccgtctcgcctggtgggataaattctcccagccggccgtgcgccccatctatagcctcggtatcgatacctggtggtatgacgtcaataaagcggccaaactgccgtccgccagcaaacagggagagtag

SEQ ID NO: 94913 - DNA, 183 bp, Zea Mays
atggcggctggaggcagtgggaattggggctgcacctccttctcagccgggacaatgaagggtaggggatcgaaggggaggggaggtagctgccaactagggttaaaaacaggtcagaaaacccttgaatctcttgagaggatttggtttggggatttgtttgtggatgagatatattcctag

SEQ ID NO: 94914 - DNA, 762 bp, Zea Mays
gcaaccacagcgaccacgacgacgaggacatcccacccacgcgagaggtctgaaacccaaggcaaaccaaccgaccgattaacccaccaccgcctcgcctcgtctccgctctcttcctcggaccaagccgggccgttcggcgggaggcaggggaagcacgggcaggcagccatgaacggcatcaaccccaacggcgggttcctgtcgtacgggaacatggagagctacgcgatgtgggtggcgaccggcgtggcgtcggccttcttcgcgtccctcgagcgctgctcctgcatccacctccacaccgcggaggacgacggcgacgaggaggaggaggacctcgaggaggcccgccgctccttctcccgcccgatccctgagtactactacgaccggtccggctcctccgcctccgtcgccaagatgtgacctgaccgaaccgcgcctccctccgcccaagaaatgcgtggtgatacgatccgtttcttgatctattatgtgctcttgcttgattcgttgagtctctagccaagaagatgaacaacaacaaaaatatatatggtgctgcgtatgcccattgtaacagttgatgagatctgtgactccccgtgtgtcccgtgagtttgctgatgatttcgttcccccgttttttttattctttcccccttattatggggtcccaaattgatgcggagatctcgagcgactctgcaaatttcagatgagtggtcatttcaagattccaatgttcgtctgcattta

SEQ ID NO: 94915 - DNA, 1681 bp, Zea Mays
acgggacgggagtccgccttaggttgtaggctccgttcgatcataagcaacacaacacccttccgtttgcgtcgctcctccggcctcccctccctggtcggtcgatcgcgaggatgacgccggcgagcgtggtcgccgcgcccaggagcgtcggggcgttgcccttggcggcgttcccggcgcccgcgagggccggggtgcggaggaacggccggtcctcgaggcccgcggcgtgcggcggggacgaccagcagccgccgtccatggccgcgatgccggcgtcgctgcgcgccatccaggccaggaggaagcaggaggcggcgcagcgcggggtgccgcgggcgacggccacgagcgcggccgggtgcgccgtggcggccctcgtcaaggccgtggaggccgtccagggcgcggcggccgggggcgccgcggaggccgcgcgcggcgccggggacgccgtggcgtgggtgttcagcaaggtccacctccagtcgcccgacctcgccgtcgggctgctcgggatggtcgcctgctgcctcggcacgatcgtggaggcggagaggtgccgcgtggaggcgaggaagcccgaggcggcgccggcgggcaacgcgggggccgaccgccccgacggcaacggggcccccgcggaggagcccgaggaccacgacatgccgcagctggtggaggcggacgtggagaaggcgctctgggcccagatcggcatcttgcatggcggcggcggcctgttcggggacagcagctacggggcgcaggaggaactcgacgaggaagaggtcaaggagatcgacagcgcccgcgcgcggcgccggaaggcggcgtacgagatggccatcgcctcaggcggcgccagctcgctcatcctgtccaactacgcgcagctcctgtacgagatcgacaaggacatcgagagggcggagatgtacttcaagcaggcggtggccgccgagccggcggacggcgaagcgatgcggaggtacggcatgttcctgtggcacgcccgcggcgacacgggcggcgcggaggacatgttcaccggcgccattgacgcggagcccgagagcagccaccaccggagcagctacgcgtggttcctatggatgaccggcggcgtcgagacctgcctcatggacaccggcaggcagagcgacggcaacgacgcggattgaaccgcgcagctagcgcccttgggatcggagacacaatccaaaagcagacaagaaaaagacgacgacgcgacgaccttacctttaccaccggcaagtgccccggccggccggcgggccggccatttagatggcgcgtctaggtatcgccgtacgtcgtgccgcatgcatgcatgcccggcggcgcaagatggctatgcagcaagcgtagtatatatcatccatgagcagcgccggccgttgtagataggtgcaagttttccagtgtgctagatgaatgcgcgtcaaggagccacagccagcccatgcagggccaggaggcgaacaataataatgttggcaaagctgctagcgcatgttagagcgtgtgatgaatagtactatagtagtatgtggaataaaatcatccgtcgtgagatagtagcaatgctgttatatataactgcgtttgtgagcaacaacaacaatatatatatctgtgtttttatatatctaga

SEQ ID NO: 94916 - DNA, 1186 bp, Zea Mays
acatgatttattacctgcatttgttctttacatgctacagtctagagtatatggtttttgtagggcatggtccagagtagttgctggaggtgtttcccatgcacgttccatgttcaattatacacaatcttatcttgcacaatccattcccacatcagcatgggcattccgcattatctccttgcgcaaactgcattctctatcgcagacagtgaagcaagagaagtttcttatttcgagaatatcataatatctgcatttagcatgagcataacattagcaatcgctctttcttttcgatggatctcctatggaaaaagaagagcagccaagtaaaccgtgggaatgtttttttgttgttgtcttgtgttcgatggcaacacccaggtcgtgaaggcaatcgagaacgcgatccccgtgcggcacgccgccgccgccgccgccgcggagatcgaccccgcgagggaggaggagctgagggccatggaggcggagaaggcggagatcgaccgcgcggcggcggcgcgggtgcggcgggagctgtggtgcgggctgacgtacctggtgatccagacggccgggttcatgcggctcaccttctgggagctgtcgtgggacgtgatggagcccatctgcttctacgtcacgtccatgtacttcatggccggctacgccttcttcctccgcaccaagaaggagccgtcgttcgaaggcttcttcgagagccggttcgcggccaagcagaagcgcgtgatgcgcgcccggggcttcgacctccgcaggtacgaggagctccggagagcctgcggcgtggcggcgccgccgctccaggcccggaccccctgcgcgagcgcgggcgcggcgcgggagagcggccattgccactcctactgccattgccattgatcttggcctcgctcggttcattcctttctttttttctttgttgttcatgcccatttggtggggatgatgattcgtgtatccatctgatgcgcgcgcggatgcaaaaaaaaaagaagcatactgaattgaggtttaaacttggaaccagggcgtccaaatgatgcataagccatgtccaactgttcgtccaaatgatgcatctgctacgtctgagtctgactagagaccatcatcactcgttcttgttatcacaattcacagtagaagtcctcgcatggtg

SEQ ID NO: 94917 - DNA, 3407 bp, Zea Mays
gaaatatgttttcctgagccacgtacagttattatatataagtgtgcgtagtttgaggctgggtggcagtagaatttatgaccaaaacgagtggtaaattttgatctggctcctatagggaaggaccaggaccgggtttgatccgatcagacggaccccgtgttggaaggcggaagcatataggaataggaacgcgagctggactcgagactcgagcggggcaaacggatcctatcgcctgtcgcgtccttgtcatcgtcgtgtgggcggtataaataccctgcaacacccaccaggccacacccaaccccaccttcattgattgattacagcccgttcatccttccttcccccgtcgaatcccaccttccttcccccgcccgttaagcagccgagtcagcagcaatggcggccgtgctgaggagagcccgtggcgcagtgcttcgcgtcgtcgtcgtcgtcgtcgccggcgacgttcgggctccggcggttcctgcaggagcagccggcgttccgccccgccgtgccgcccgaccgcttcatgcccctggccgaccggatccgggacctcggggtcggcgtcgcattcccgcggatcaacctcgacggcctcgtgccgcccgcgccggcgccggcgccggccaagcgggagccggacgcggcgctgcccgcggcgagcctcacggtggaggaggcgcgcaaggtgctgcgcgccacacagatggaggcggcccgcgcgcggattcgggagtccggcgccggcgccgtgccgtacgccgacttcctgcgcctctgctgcgacgccgccggcccggacgcgggcccctccgtcgcgcgcgcgctcgacgagtccggatccgtcatcgtgctcggaaagaccgtcttcctcaggcccgacatggaaaagattcaaagaaagggcgctgttctaaaacgataataagagatgttgccacccaaagtttgggcaattttactccgctccaagatgggagtttttcttctctcaaaaccaggagataaaaaccttaattttaactccccctgtccaaatcttagaggatacaagaatctgaatctgactccgatgaatgaacatgaggagaattcacctaaccctcttctagacaccattaatttcgaaataaagaagttagtatttcatttggtaaatatatattggcaaagtgtagtatttcaatagacaatttacagatgtagccccatcacatgccagtggtggagggtcgaattgatgaatctgttaacttgtataaacttagttaaaaataagttaagtatataagtaaaaaaaagtttattgtagagtaaaattgttaatctgaatgtttatgccactttgatttgattttaagcgtaggggaatcttctgattttgcggggagtaaaccactaaaggttcattgtttgatttttcattatatgtggcacagaaatatcttccctttgataaaacaactaagggagttctatttttttgacatcagataaaaatactttttcacctttcctgtttgtgttacatcctatgtttatcagaccatgctgttctagttactaacttactattgctaatcattttttttctcctagctgaatgcattatcgtcaccatccatttgaataataggatactgatgcagggctcaaaagttatggctaacctgctttccttttgttttgggtgaccgaaacaaagtttggtgaacacttcacatgccatgtgactcagattagtgtcatagcattctttggcagcactagaactctagaagcacctttaaccttttttttaagaaaaacttgtctagttgtgttttcggtggctacagccagacagtttggcaaattgcccccattgcggtggtggtgccgtggtgggctgttaaaaaaaaggacatttaaaaactcttttagggctagcgtggcaactccattttctattgagaaatgaactaattttccttgtgaaaatggaaattatcttcggtaagccatgggattgagttggattcttagagaggattttagttccaaactagccctcaatcctatggattctaggagaggattcgagtttccaaactagctccggtaatccaagggatctagtcagattttcggagaggatttgggtttcgaaactagccctcaatcccatggattctgggagatgattggagttaaaaatctagctcttacatgatttattacctgcatttgttctttacatgctacagtctagagtatatggtttttgtagggcatggtccagagtagttgctggaggtgtttcccatgcacgttccatgttcaattatacacaatcttatcttgcacaatccattcccacatcagcatgggcattccgcattatctccttgcgcaaactgcattctctatcgcagacagtgaagcaagagaagtttcttatttcgagaatatcataatatctgcatttagcatgagcataacattagcaatcgctctttcttttcgatggatctcctatggaaaaagaagagcagccaagtaaaccgtgggaatgtttttttgttgttgtcttgtgttcgatggcaacacccaggtcgtgaaggcaatcgagaacgcgatccccgtgcggcacgccgccgccgccgccgccgcggagatcgaccccgcgagggaggaggagctgagggccatggaggcggagaaggcggagatcgaccgcgcggcggcggcgcgggtgcggcgggagctgtggtgcgggctgacgtacctggtgatccagacggccgggttcatgcggctcaccttctgggagctgtcgtgggacgtgatggagcccatctgcttctacgtcacgtccatgtacttcatggccggctacgccttcttcctccgcaccaagaaggagccgtcgttcgaaggcttcttcgagagccggttcgcggccaagcagaagcgcgtgatgcgcgcccggggcttcgacctccgcaggtacgaggagctccggagagcctgcggcgtggcggcgccgccgctccaggcccggaccccctgcgcgagcgcgggcgcggcgcgggagagcggccattgccactcctactgccattgccattgatcttggcctcgctcggttcattcctttctttttttctttgttgttcatgcccatttggtggggatgatgattcgtgtatccatctgatgcgcgcgcggatgcaaaaaaaaaagaagcatactgaattgaggtttaaacttggaaccagggcgtccaaatgatgcataagccatgtccaactgttcgtccaaatgatgcatctgctacgtctgagtctgactagagaccatcatcactcgttcttgttatcacaattcacagtagaagtcctcgcatggtg

SEQ ID NO: 94918 - DNA, 1679 bp, Zea Mays
gcaacacccaccaggccacacccaaccccaccttcattgattgattacagcccgttcatccttccttcccccgtcgaatcccaccttccttcccccgcccgttaagcagccgagtcagcagcaatggcggccgtgctgaggagagcccgtggcgcagtgcttcgcgtcgtcgtcgtcgtcgtcgccggcgacgttcgggctccggcggttcctgcaggagcagccggcgttccgccccgccgtgccgcccgaccgcttcatgcccctggccgaccggatccgggacctcggggtcggcgtcgcattcccgcggatcaacctcgacggcctcgtgccgcccgcgccggcgccggcgccggccaagcgggagccggacgcggcgctgcccgcggcgagcctcacggtggaggaggcgcgcaaggtgctgcgcgccacacagatggaggcggcccgcgcgcggattcgggagtccggcgccggcgccgtgccgtacgccgacttcctgcgcctctgctgcgacgccgccggcccggacgcgggcccctccgtcgcgcgcgcgctcgacgagtccggatccgtcatcgtgctcggaaagaccgtcttcctcaggcccgacatggaaaagattcaaagaaagggcgctgttctaaaacgataataagagatgttgccacccaaagtttgggcaattttactccgctccaagatgggagtttttcttctctcaaaaccaggagataaaaaccttaattttaactccccctgtccaaatcttagaggatacaagaatctgaatctgactccgatgaatgaacatgaggagaattcacctaaccctcttctagacaccattaatttcgaaataaagaagttagtatttcatttggtaaatatatattggcaaagtgtagtatttcaatagacaatttacagatgtagccccatcacatgccagtggtggagggtcgaattgatgaatctgttaacttgtataaacttagttaaaaataagttaagtatataagtaaaaaaaagtttattgtagagtaaaattgttaatctgaatgtttatgccactttgatttgattttaagcgtaggggaatcttctgattttgcggggagtaaaccactaaaggttcattgtttgatttttcattatatgtggcacagaaatatcttccctttgataaaacaactaagggagttctatttttttgacatcagataaaaatactttttcacctttcctgtttgtgttacatcctatgtttatcagaccatgctgttctagttactaacttactattgctaatcattttttttctcctagctgaatgcattatcgtcaccatccatttgaataataggatactgatgcagggctcaaaagttatggctaacctgctttccttttgttttgggtgaccgaaacaaagtttggtgaacacttcacatgccatgtgactcagattagtgtcatagcattctttggcagcactagaactctagaagcacctttaaccttttttttaagaaaaacttgtctagttgtgttttcggtggctacagccagacagtttggcaaattgcccccattgcggtggtggtgccgtggtgggctgttaaaaaaaaggacatttaaaaactcttttagggctagcgtggcaactccatttt

SEQ ID NO: 94919 - DNA, 483 bp, Zea Mays
gtgctgtactaacagctatttcaaagattggacactcagcatatgttgattctccactcgggccagatgcgtttcgggaatatgaaaccttacttattcaggaccatgatgagcttcttaagaagtctgagaatttagacagacataaagaaagcattcataaagaggcgagtgattttacctctgacgttgataattattctaagtggggttctggggtgcattatggctctaattctgaatccagcccaacgaaaagggatttttttatgacgaaatgggccaggtagaagcaagagggagaagactatttgtagctgtgcgtcacttttcgatgattttctctcctatttcctcaagggtttttgttttgccctctgaaggcataattgctgactcaagcctgtcgaatcatcatgaggattcccttggctctggtttaccctccatatctactggtaaaccttttgatagtgacgaggt

SEQ ID NO: 94920 - DNA, 2526 bp, Zea Mays
atgacagcccctgtggctcttccaaatgatcgagcagcagtctcccattctgcaagggttgacttattccgagacactagttgcaacatagaaaaggaggtgttggccagtatgggaaatgaccaagattcgactgctgctggaacaaatcctggtttcagagttggggagatcaggtttggcaatggagatgtttattctggcacattgttggggaacacaccagagggttcaggccagtatcgctggtcagatggttgcacctatgacggtgagtggacgagagggatgaggcatgggcaaggaaagacgcaatggccatctggagccacctatgagggcgagtattctcgcggctatgtatacggtgaaggcacctatacgggtccagataaaatcatctacaagggacggtggaagttgaatcgcaagcatgggcttggatatcagacatatccaaatggagacacgtttgaaggttcgtggattcagggagaaatagtaggtcacgggaagtacacatgggcaaatgaggacacttacgttggcaacatgaaaagtggcaggatgtcagggaaaggaactcttacatggaaaaatggggactcatatgagggtaactggatagatggcatgatgcatgggtatggaatctatacatggaatgaatgcgggtattacattggaacatggacaaggggactgaaggatgggaaaggtaaattctatccggaaggttgcagagttcctgttaacgatgagctgtatatcaaaaatctaagaaaccgtggtgtactgcctgatattagaaggcagaatcatggctcacgcatacttcactcttcctcggttgacatggggaacatgaaggttggtataaccaggcaatcttcagatgttttgtacaaaaggaatccaactgagcagcctcctttgaagaatgtgtctttggaaagacggtggagccttgaggtggctattgaaaagtttattggccatgaatcgattgaaagttctggtcaagaaagcttggaaaacttgagtgattctcgtatgcccatactggaaagagaatacatgcaaggcgttctaatcagtgaggtggttcttgacaggagtttttcagactcctcaaagaagacaaaacgccgccagaagaaaatggtaagggacacaaaaaggcctggagaggcgataattaagggacacagaagctatgatttaatgctcagcctgcagattggaatcagatatggtttggatcatttaaaatatgtggtgccatttgcatggtacattgaaaggtacacagttgggaagattacaccaattcaaaaacgtgaagttcatgcttcagattttggaccaacagcaagtttctggatgaatttctcaaaagaaggatctcggcttactccttcacattcagcggaagattttaaatggaaagactactgtcccatggttttcaggaatttgagagagatgttcaagattgatgctgcagactatatgatctccatatgcggaaactctgctcttaggcaactatcttcccctggaaagagtggaagtgtctttttcttgtcacaagatgatagattcatgattaagactctccgagaatctgaagtgcaggttcttttacgaatgcttccaaagtattatgatcatgtccgtacctatgagaacaccctcataaccaagttttttggcctccacagggtgaaaccttctagtggccaaatgttccggtttgttgtaatgggaaacatgttttgcactgaattgagaattcaccggaggtttgatttgaaaggctcgtctttaggccgctctactgacaaaattgaaattgacgagaacacaactctgaaggatttggatcttaattattccttttatcttgaaccttcctggcgtgaggctctactgaagcagattgaaacagatagtgattttttgagaacacagcggataatggattacagcctactgcttggtgtccattatagagctccacagcacttgcggacacgtgcatcttatcaccggagcatggcagcagatagattgaccgttgtttctgaagaagatgctcaggaggaggatgcccttagccatccagaaggattagtcctggttcaaagcagtggcgagaacagtgttgttgttggtcctcacataagaggcagccgtttgcgtgcatcggcagctggatttggcgaggtagacctgctgctgcctggtaccgccaggcttcagatccagctaggagttaacatgcctgcaagggcagagcaaatctccaaggaagacggaagcaaatcatttcgcgaggtgtacgatgtcgtgctttacctgggcatcattgacatattgcaagagtacaacaagtcaaagaaaatcgagcacgctgtcaagtccatgcaatatgactctgtctccatctctgccgtcaacccccggttctactcggagcgtttcttgaagttcatccagaccgtcttccccgagaattcatag

SEQ ID NO: 94921 - DNA, 100 bp, Zea Mays
ggaggaggcaggggttggggtcgagctcaagcagtgtacctatttttgatatcagctccacgtcgaaacgaatggcatcgcaacctcctcgatcctgcac

SEQ ID NO: 94922 - DNA, 835 bp, Zea Mays
aaaccgggggcggtgggcggcagcactgccgtgctcctgctggcagacgatgctttggaggtcaggaaacatgacgtcgtttccatgacagcgagcaaaggatcctgctggcggacgatgaacttacacagattacaaatagacgagaacaacatatcaggccccatacctagctgttttgccaacttaacaagcattaaacatttgtaagtgtcaagtatctttattttctgcccatccctgatgcttccgatttgtaaaattagtaaatgattctggttccaattttaccttttagttacatgaataatctctatctctactacttattaagacggtaagggtagcctgccgttctgccgttctgcgatctcagccgtccattctatcgtgtaaacaatctcagccatccgatcccgacgtccgatcccgcacagccatcaggcacgcagcgtcccggccgtttccaaaaaaccctaatctccagcaccccgccgcttgccagccgccagccatcaggcatgcagcgtcccagccgcccctgccgcttgccaccgcggtctccagcgtccccgccgcttgccagccgccagccgcggtctgcagcgccccggccgccgcttgccaccgcttgccagcttccacccgtggcctccagcgtccccgctgtttgccaccggatccgagatcctgcccttgtccttcatccttctccaatctgctcaccccctcctccgcgcgagccgcagccggccccgctcgcgtccccctcgcctataccctgtcgccccaccgcccacgcctcagccacccgccgtccagagcccaaccctag

SEQ ID NO: 94923 - DNA, 396 bp, Zea Mays
atgaatgtgacattttccacaagaacgagctatagatctaatttgattcttcctttcctcctgtggtgggatcaatcagatacgaaatggccaaggactgctgacgatgatgacgacatggccaccatcgctgccctcaggctgctaaccgtttcactgaccatggagcttcaccatcgagagctgggagtttggagaacaaaattattggtagtgaagaggttcctaggagccttgcttgttcttgcaagcattgactactgtgataatcatgtaagattcggatatgaggccttggaattgaggaatggtggatctgattattttggcaaaggtgttcttaagtctgagggtattatactagctttatttgccatgcactcgcattcaccatag

SEQ ID NO: 94924 - DNA, 2089 bp, Zea Mays
tttttttctctgactcgcgaactaaacgaacccaagaacgagctaaaagaagatgactatgtggctcgttaacacgagccgcaccctagcgctggctttgccgtagcccgtggttcctttgcgctttttggccatttcggcccaattctcgacggcttcccttcttagttcttccccttcatccgaaaccctcgcactctagcggcccgcacaaagccgccggagcgccgcgccaccatgtaccggcttttccgccgcagcttctccatggctgccgagggttccgccgccgccgcctcttcctctccacccccctccacctccatgtcctcgaccccgcggcaacatctgccggacgagctgtaccgccgcatcatgaatgtcgggcgcccaagcatcccgttatcccccgtcctggagcaatggaatcaagaaggccataccgccaagaagttcgtcatccaggccatcgtcaagaagctcgtcggcctccgccgcttcgcccacgcactcgagctgtcgttctggatgaccgaccgcaggcacctccacctttcggtcggtgacgtcgcgtaccggctggacctaatcagcaaggtgcacggccttgagaaagccgtcgagtacttcggcatggtaccgaagcagctgaggaagccgcagtgctacggctccctcctgaaatgctatgtggaggcgaaggccgtcgacaaggctgaggagcacttcgcgaagatgcaggagatggggatgacgagttcttacgcatacacttggatgatgaagctttacctacagactgggcagcttgaaagagtgcacgccatgttccaggacatggaagagaaaggtgtgaagcctgatactttcagtgtggaggctatgttagctgcgtacattgctgctgaagatgtccagggggttggtaaggtgctcgacaaggccaatccacacgagaagcttgtgacttggcatgggcatgcttcggcagcgagcttgttcatgaaatctgggatgcaggtgggggctgtcatggctctcgtggaagccgagaggcggatatctccaaagagcagtagaatcgcatacgctttcttactcaagacatatactgaactggggatgcatgctgaggccggacgcatttggagtgtctacaaatccaaagtgccgccgtgcaacacgatgtacatgtcgaggctaagcgcgttactcaggacgaacgacattgatggggcggaagcgacactgaaagagtgggaaacggtgcctcttcgctatcatgatttcagattaatcaacgtaatggtcgatgcctactgcagagaaggtctcgtggagaaggcagtagctctcgtggatggcgccatcaagaaagggaggacaccttacgctaatacctggtataagttggctggtgggtttttcaaaactggtcaggtaccagaagcagtggacatgacaaggaaggctcttgattccgcgactcctccatggagacctgacctcgcgaatgtgctgatgagcctgaaccactttgtggaccagaaggatgtaggagcagctgaggagatggtgagtacgctacagaagctggttcctttgactagggatgtttaccattgcttgctgaagacctatgtccgtgcgggaaagccgccgtccgatctgctggagcgtatgaaggaagacggccttgaggctgatgaggaaacagagagaatcctcgcgggagaatgcgagcgagtagacatgcacccgttgtcaatcactaaccatctgattggttagtcgcaccgtctcatcctgtatcagtgcatgcattgattttatttaagtctttgtttggttgcctgtatacttaaagcgtgagctgcatgagtggatgcaaactaatttattttgagaccgtttgactgcatctgctcatacgtcaaaatcttcggtttctagccggcctggatggcacgagcctggtttgtgaggcccaggcaaccaaacaggcagtaagtaatcacttttctctgttcatctgttcctttgttcttgaattcttctcattagttgaagccatggccactgcttacat

SEQ ID NO: 94925 - DNA, 2096 bp, Zea Mays
tttttttctctgactcgcgaactaaacgaacccaagaacgagctaaaagaagatgactatgtggctcgttaacacgagccgcaccctagcgctggctttgccgtagcccgtggttcctttgcgctttttggccatttcggcccaattctcgacggcttcccttcttagttcttccccttcatccgaaaccctcgcactctagcggcccgcacaaagccgccggagcgccgcgccaccatgtaccggcttttccgccgcagcttctccatggctgccgagggttccgccgccgccgcctcttcctctccacccccctccacctccatgtcctcgaccccgcggcaacatctgccggacgagctgtaccgccgcatcatgaatgtcgggcgcccaagcatcccgttatcccccgtcctggagcaatggaatcaagaaggccataccgccaagaagttcgtcatccaggccatcgtcaagaagctcgtcggcctccgccgcttcgcccacgcactcgaggtcccagctgtcgttctggatgaccgaccgcaggcacctccacctttcggtcggtgacgtcgcgtaccggctggacctaatcagcaaggtgcacggccttgagaaagccgtcgagtacttcggcatggtaccgaagcagctgaggaagccgcagtgctacggctccctcctgaaatgctatgtggaggcgaaggccgtcgacaaggctgaggagcacttcgcgaagatgcaggagatggggatgacgagttcttacgcatacacttggatgatgaagctttacctacagactgggcagcttgaaagagtgcacgccatgttccaggacatggaagagaaaggtgtgaagcctgatactttcagtgtggaggctatgttagctgcgtacattgctgctgaagatgtccagggggttggtaaggtgctcgacaaggccaatccacacgagaagcttgtgacttggcatgggcatgcttcggcagcgagcttgttcatgaaatctgggatgcaggtgggggctgtcatggctctcgtggaagccgagaggcggatatctccaaagagcagtagaatcgcatacgctttcttactcaagacatatactgaactggggatgcatgctgaggccggacgcatttggagtgtctacaaatccaaagtgccgccgtgcaacacgatgtacatgtcgaggctaagcgcgttactcaggacgaacgacattgatggggcggaagcgacactgaaagagtgggaaacggtgcctcttcgctatcatgatttcagattaatcaacgtaatggtcgatgcctactgcagagaaggtctcgtggagaaggcagtagctctcgtggatggcgccatcaagaaagggaggacaccttacgctaatacctggtataagttggctggtgggtttttcaaaactggtcaggtaccagaagcagtggacatgacaaggaaggctcttgattccgcgactcctccatggagacctgacctcgcgaatgtgctgatgagcctgaaccactttgtggaccagaaggatgtaggagcagctgaggagatggtgagtacgctacagaagctggttcctttgactagggatgtttaccattgcttgctgaagacctatgtccgtgcgggaaagccgccgtccgatctgctggagcgtatgaaggaagacggccttgaggctgatgaggaaacagagagaatcctcgcgggagaatgcgagcgagtagacatgcacccgttgtcaatcactaaccatctgattggttagtcgcaccgtctcatcctgtatcagtgcatgcattgattttatttaagtctttgtttggttgcctgtatacttaaagcgtgagctgcatgagtggatgcaaactaatttattttgagaccgtttgactgcatctgctcatacgtcaaaatcttcggtttctagccggcctggatggcacgagcctggtttgtgaggcccaggcaaccaaacaggcagtaagtaatcacttttctctgttcatctgttcctttgttcttgaattcttctcattagttgaagccatggccactgcttacat

SEQ ID NO: 94926 - DNA, 97 bp, Zea Mays
ggatctctccaaggtttccagagaattgctcatcaatgtactcctcagtgtaggcaagctagagattcatataggacttcgccgaagcaagataacc

SEQ ID NO: 94927 - DNA, 942 bp, Zea Mays
gacccctagtcggtggccgtagctccatgacctcgacgcgcggtggcggaggttcctcgatccggagtagtggcggcggttcctaggtcagtggcggtggctccccgatctagagggcgagcgacagcggggcccttgtgcgggcaagcggcggcgtccccgaggccccaaggaggcgacacttccaaggccggcgagcaagcgatgtccgtcgacgtgcgagtagcgacggcgacgcatgagacgcgaggttcgagcgagcggcgtcacggaagacgcgagatgcgcgcagcgatgatcgcgcgcgacatcctccgatccggcgcagtttgggcagcccgagtgacgacctacatttgtgcttgtgtcatcgacgacgtccttcggccactacttccttcggttcatgttttcttttcgattattgtgttttatgcctaccacatgtattatttacgctaaaaactgtacgattttatgcttgaacacggagttcgtatatcaatttactccatgcatattttttgcatgcgcattggaaaggcaattcattgatttatgatgttcgtaatttgcgcgcatgcaatagaaactcccacgattttgccataatttttagatctgtataaaaatagaaatcgcatacatgcggctgccatgtttttcaaatctgtcataaaaattggatcgtaataacaacctactagatgtatcaacctctcacattgactcggtatttacgcttataattaagggattttatgctaaaaacttaagttttttacgctctacccggagatgcgtccaccagtgaacaacatgccagattttttacgcagtgtaacgaattgcataaatatctacaccgtgtagtataatttgtatcagtatacatcataaactagttctaatgcgttcagctgcatggctgttggagggatc

SEQ ID NO: 94928 - DNA, 2063 bp, Zea Mays
atgttcagtcgccgtcgcccgtcgcgccgcacgggtcaggaactcccagaaaagccgaggaggcagcctcgctgtgctcctgctgctgctccgcccttccgaccgatcgaggtggcgcaaagcagaggaaaaccccaggccgcaaccctcgcaaacactcaagtcctcgtcccttccgcactctcctcttcaactccagccgctttcaccgccaatcagaggtccaccaccaccaccaccacatctcttcgcatccaaccgccccgtaggatcacaggaaacggggatggcgagcggcggggcggtgagggaggtgggctcggccgccgagctgcaggcggcggtggccggggcgcgggcggcggcggtgcacttctgggcgtcctggtgcgaggcgtccaagcagatggacgaggtcttcgcgcacctcgccgtcgacttcccccacgcggccttcctccgggttgaagctgaagaacaacctgaaatatcagaggcgtatggagttacagcggtgccatattttgttttctgcaaggaaggcaaaactgtcgatactttggagggagcaaacccagccagcttagccaataaggttgcaaaagtagctgggcctgctagtgttgctgagtctgctgtacctgctagccttggagttgctgctggacctgctgtacttgaaaacatccaaaagatggcacagcgaaatggatcttctgctgttgaaagcataagctctggtagcacagaagatgcattgaataagcgattggagcagcttgtcaattcccatcccgtgtttttatttatgaagggaaccccagagcaaccaaggtgtggtttcagccgtaaagtgattgacattttgaagcaggaaggggtgaaatttgggagctttgacattcttacagacaatgatgttcgcgaaggcatgaagaaattctccaactggcccactttccctcaactctactgcaaaggtgagctgcttggtggatgtgatattgttgttgctatgcacgaaagtggtgaattgaaggatgtttttgaggagcacaacattacccttaaaccacagggaagcaaaaatgaagaagcaggtgaacctgagtctgcaactgagaagggcagtgcagtttctgaatcaatcaagcttactgatgctcagaaaactcgtttggaaagccttattaactccagcccggtgatggtattcatcaaaggtacacctgaggaaccaaagtgtgggttcagtgggaagctggttcacatacttaagcaagagaacattcctttctccagttttgacatcctttcagatgatgaagttagacaggggctgaaggtcttctcaaactggcctagttaccctcaactgtacataaaaggtgaactggttggcggctcagacatagtgatggagatgcataagagtggtgagctgaagaagatactatctgagaaaggggttcgtcaaaaaggaaatctggaggacagattgaagtccctgatttcctctgccccggtgatgcttttcatgaagggcaccccagatgctccacgttgcggcttcagttcgaaagttgtgaacgccttgaagaaggaaggggtcagctttgggtcctttgacatcttatctgacgaggaagttcgacagggtttgaagacatactccaactggcctaccttcccccaactctactacaagtcggagctgattggtggctgtgacatcattcttgagatggagaagagcggagagctgaagtcgaccctgtcaatgtagacacctaacctagcattcttgcctcgctggcgttcctatcatattgcctgcattggatcattctactatgacgtttgtgccaatgtattcatagatccacgtttggtgcctgcagtgccacattgctagaatcgtgacatctgcagatggaataacttgagagcttgttcggtactgattgctcttttatcaccagtctatttagcggatgagagttttttttgttcgggtattgtcacgatatattgcagagtatgagtaattgtgtgtatttaaa

SEQ ID NO: 94929 - DNA, 750 bp, Zea Mays
aacttaaagcaaaccttacggtatcgaaatcagacattatttcgtacacgtacaacaccgtgatagatgcccggtcctattcactagcagtacccccaacagcattaaaatcgaatatcatttttgtactaccacctaaccaaatcaaatattgttaccactaatgtctttcatattctaaagctcttagctgcaccctacggttgacggaataatctccttcacttcgttgatgaaaccatcctgccccgtaagttacgtttgcatttggtcaaaacaaaactgtacgcaaaattcaatccagaggagaaaaagcagacggcgtggaatacggaaaagaaagaaaaaaagagaagttgcgcacttggatctcagcaagatagttgtgtcatcaggaagccttcgtaacgagggcctaacacatgcatcaggaagataacgcagtacttcttgaacagcatcatcgatccgtgttatccagcaacgacccacgcagagcaaaaaagaaccaaaacaaaatcgcaactaaatatacggcaccgaagaaacagatggattatcctgcgaggcagtatcaggcacctcagacggatctgaatgagcaagaacacctcagacggatctgaatgagcaagaacacctcagacagggaacgagttgggaagcataggtcgatggtgtgaggaggccgtgatgtggcgactagggtttccgccagacgatggcgctcactatcttgcgcgacccctc

SEQ ID NO: 94930 - DNA, 2358 bp, Zea Mays
gaatattcttcttcgttctcgcgtttatctgtgcagccctgcctttcttctcccgttccccgcggcctgcgcgcgcgttctctccctcacctccgcccctctctccctctctctcgctccgggcgacggctgggcgaccgccgctttatccgtgcggcccttccttttgttctcccgtcacccaaaccccccttcgagctctatctgtctcttcctctcgaggcgacgcctgggctaccgcgccgctactgcggcctcccgcgacaggtgcctagtctccatcaggtgccatgtcttcttcgggctcttcaccggcgacgtgcactgccagctctgcatgtatacacccaagtcctttactgggtccgccgccgcccctacgtacttcgttaggtttagtatgttgttaagtttgtaattctagggtctggagggaagcatagatctcaagaggggtgaaatttggtggtaatttcctgagaatttcaaggagacaagggcgtggaggttgtttctggagggatctgtgagcacagcagcagaaatttgaggttggtggtagcctgttgatccacgatggtgggtaaggagctggtggtgcaaaggaatggccctgttgacatacgtgagattgctgcaaaggccacgcttcgggaggtgcggcagagcgggcacacctacgtcgaactacggcgtgtcgggaagcgtgtcatcttcttctgcaccatctgcctcaccgagtgcttcagcgacaatgtgctgtttgaccacctcaagggaaacctgcattcacggcggtatgctgaggccaaggttacgctgtttgggcccatgccatggccgtttaatgatggtgtgctcttcttcaacaacttacgcgagaaggatccgctcctgctggactcaagctcacagagcaccagagagcttgccctggttccagagcctgaggtttcagggaatgatactgaggtgacatcaaggctgagagatggttcaacctcctctaatggtgtgaaaggtgcacgctatggtgcaaaaggccgtgctaatggtagaactgctgctgtatctgaagatcacatgctttcaaaccatggaactgatggtcctgttgttattcctggtgtattgctaaaggatgttgtttcagatttgcctgtgcatcttttgggctatgggaatatttcatacaggatctatgaagctagcaagaactgcaggaagataagcaagatctggtgtgcttgggtaggacaaggctcccatggttttgagagttgtaacacttatgagcaatctggatttgccatagtcaacttctcttatacctatgatttaggcaggaagtggtcttctgaggaacaagacctgtctgtctctgctggatctttctttgtaattgatgatgctggacaccgtggaaagcgaatgagaaaatcattctctgatcaagaagcatcttcagaagagtcaaatggtcagaacagctctttacagggcagtaggcaagctattgtgacttgttcaccggtaggtacctcaaatgatcttcaagttggtctcttatcaagcaaggcagcaaggagagagttgaggaagcagaagcgaatagcagctgagaaagtgtgtgatctttgcggcagaccaatgctctctggaaaggatgttgccaccttgctgaactgcaatacaggaaaactagcttgcagcagtagaaattcaagtggggcttaccatctatttcacacttcctgccttttacactggactattctgtgccaatacgagatgctgaacgatgaaatagctaggaaggggaagagcaaccgaggaaggaaggcaaagaatgcacctaagagaagcaaaataacgtccatagtttgcccagaatgtcagggtactggaattcacgtcaacggagatgaacttgagaagccaagcatttctttatcagagatgtttcgcttcaagatgaaagcaatcgaagctcacaaagcatggctgaagagacctgaagtgcttgaaaactgttccactgggcttcatttcccctcagaacatgtggagaactctgaggagaaggtgatgccactcaagtcacttcccttctatgccgctgatgggtagaaagatagttgatggcagctactggaggatgctgcagttgttgatgtaaataagctcgcttgacagttgtggaacagtgttgtcagatgctcacctacgtgcattatctcagttaacctgtgtccgccagatgataactaagacatttaaactggcaactggcaactacacgtacgcagtccatttcgttgggttgggttgggtttgctgcttacagcttccagtttc

SEQ ID NO: 94931 - DNA, 2399 bp, Zea Mays
gaatattcttcttcgttctcgcgtttatctgtgcagccctgcctttcttctcccgttccccgcggcctgcgcgcgcgttctctccctcacctccgcccctctctccctctctctcgctccgggcgacggctgggcgaccgccgctttatccgtgcggcccttccttttgttctcccgtcacccaaaccccccttcgagctctatctgtctcttcctctcgaggcgacgcctgggctaccgcgccgctactgcggcctcccgcgacaggtgcctagtctccatcaggtgccatgtcttcttcgggctcttcaccggcgacgtgcactgccagctctgcatgtatacacccaagtcctttactgggtccgccgccgcccctacgtacttcgttaggtttagtatgttgttaagtttgtaattctagggtctggagggaagcatagatctcaagaggggtgaaatttggtggtaatttcctgagaatttcaaggagacaagggcgtggaggttgtttctggagggatctgtgagcacagcagcagaaatttgaggttggtggtagcctgttgatccacgatggtgggtaaggagctggtggtgcaaaggaatggccctgttgacatacgtgagattgctgcaaaggccacgcttcgggaggtgcggcagagcgggcacacctacgtcgaactacggcgtgtcgggaagcgtgtcatcttcttctgcaccatctgcctcaccgagtgcttcagcgacaatgtgctgtttgaccacctcaagggaaacctgcattcacggcggtatgctgaggccaaggttacgctgtttgggcccatgccatggccgtttaatgatggtgtgctcttcttcaacaacttacgcgagaaggatccgctcctgctggactcaagctcacagagcaccagagagcttgccctggttccagagcctgaggtttcagggaatgatactgaggtgacatcaaggctgagagatggttcaacctcctctaatggtgtgaaaggtgcacgctatggtgcaaaaggccgtgctaatggtagaactgctgctgtatctgaagatcacatgctttcaaaccatggaactgatggtcctgttgttattcctggtgtattgctaaaggatgttgtttcagatttgcctgtgcatcttttgggctatgggaatatttcatacaggatctatgaagctagcaagaactgcaggaagataagcaagatctggtgtgcttgggtaggacaaggctcccatggttttgagagttgtaacacttatgagcaatctggatttgccatagtcaacttctcttatacctatgatttaggcaggaagtggtcttctgaggaacaagacctgtctgtctctgctggatctttctttgtaattgatgatgctggacaccgtggaaagcgaatgagaaaatcattctctgatcaagaagcatcttcagaagagtcaaatggtcagaacagctctttacagggcagtaggcaagctattgtgacttgttcaccggtaggtacctcaaatgatcttcaagttggtctcttatcaagcaaggcagcaaggagagagttgaggaagcagaagcgaatagcagctgagaaagtgtgtgatctttgcggcagaccaatgctctctggaaaggatgttgccaccttgctgaactgcaatacaggaaaactagcttgcagcagtagaaattcaagtggggcttaccatctatttcacacttcctgccttttacactggactattctgtgccaatacgagatgctgaacgatgaaatagctaggaaggggaagagcaaccgaggaaggaaggcaaagaatgcacctaagagaagcaaaataacgtccatagtttgcccagaatgtcagggtactggaattcacgtcaacggagatgaacttgagaagccaagcatttctttatcagagatgtttcgcttcaagatgaaagcaatcgaagctcacaaagcatggctgaagagacctgaagtgcttgaaaactgttccactgggcttcatttcccctcagaacatgtggagaactctgaggtggaatcagaggcacactgttcgtaatgttctgttaacacaggtataaatccactcacaccagtctccatttccctttgcaggagaaggtgatgccactcaagtcacttcccttctatgccgctgatgggtagaaagatagttgatggcagctactggaggatgctgcagttgttgatgtaaataagctcgcttgacagttgtggaacagtgttgtcagatgctcacctacgtgcattatctcagttaacctgtgtccgccagatgataactaagacatttaaactggcaactggcaactacacgtacgcagtccattt

SEQ ID NO: 94932 - DNA, 675 bp, Zea Mays
tgtattcctgtttcataataattgctcttatagattagagagcatggacctgtttacctttttgtacattttttacctgaaaacatagcagttatgtttccaccaaattccaaatgttctgtaatgacttctctacacttgatttatgcaggcttaccatctatttcacacttcctgccttttacactggactattctgtgccaatacgagatgctgaacgatgaaatagctaggaaggggaagagcaaccgaggaaggaaggcaaagaatgcacctaagagaagcaaaataacgtccatagtttgcccagaatgtcagggtactggaattcacgtcaacggagatgaacttgagaagccaagcatttctttatcagaggtctggagcacatattcactcttctgctgtcagtccctgatttttcattcaggcaacttcttgcaaattacttctatagcagccgagcacctgaattggttggatatggcacttgcagatgtttcgcttcaagatgaaagcaatcgaagctcacaaagcatggctgaagagacctgaagtgcttgaaaactgttccactgggcttcatttcccctcagaacatgtggagaactctgaggtggaatcagaggcacactgttcgtaatgttctgttaacacaggtataaatccactca

SEQ ID NO: 94933 - DNA, 2266 bp, Zea Mays
gaatattcttcttcgttctcgcgtttatctgtgcagccctgcctttcttctcccgttccccgcggcctgcgcgcgcgttctctccctcacctccgcccctctctccctctctctcgctccgggcgacggctgggcgaccgccgctttatccgtgcggcccttccttttgttctcccgtcacccaaaccccccttcgagctctatctgtctcttcctctcgaggcgacgcctgggctaccgcgccgctactgcggcctcccgcgacaggtgcctagtctccatcaggtgccatgtcttcttcgggctcttcaccggcgacgtgcactgccaggtacgctcctcccccttccccctccacccctcctcttcaattttctgtgcgaaaccgagcagccaaaccctaaactacgctatttgtattcggatctggtctaattacgcgtgcttacatgtattatgtctactaacctcgattgtttttgaattatcagctctgcatgtatacacccaagtcctttactgggtccgccgccgcccctacgtacttcgttaggtttagtatgttgttaagtttgtaattctagggtctggagggaagcatagatctcaagaggggtgaaatttggtggtaatttcctgagaatttcaaggagacaagggcgtggaggttgtttctggagggatctgtgagcacagcagcagaaatttgaggttggtggtagcctgttgatccacgatggtgggtaaggagctggtggtgcaaaggaatggccctgttgacatacgtgagattgctgcaaaggccacgcttcgggaggtgcggcagagcgggcacacctacgtcgaactacggcgtgtcgggaagcgtgtcatcttcttctgcaccatctgcctcaccgagtgcttcagcgacaatgtgctgtttgaccacctcaagggaaacctgcattcacggcggtatgctgaggccaaggttacgctgtttgggcccatgccatggccgtttaatgatggtgtgctcttcttcaacaacttacgcgagaaggatccgctcctgctggactcaagctcacagagcaccagagagcttgccctggttccagagcctgaggtttcagggaatgatactgaggtgacatcaaggctgagagatggttcaacctcctctaatggtgtgaaaggtgcacgctatggtgcaaaaggccgtgctaatggtagaactgctgctgtatctgaagatcacatgctttcaaaccatggaactgatggtcctgttgttattcctggtgtattgctaaaggatgttgtttcagatttgcctgtgcatcttttgggctatgggaatatttcatacaggatctatgaagctagcaagaactgcaggaagataagcaagatctggtgtgcttgggtaggacaaggctcccatggttttgagagttgtaacacttatgagcaatctggatttgccatagtcaacttctcttatacctatgatttaggcaggaagtggtcttctgaggaacaagacctgtctgtctctgctggatctttctttgtaattgatgatgctggacaccgtggaaagcgaatgagaaaatcattctctgatcaagaagcatcttcagaagagtcaaatggtcagaacagctctttacagggcagtaggcaagctattgtgacttgttcaccggtaggtacctcaaatgatcttcaagttggtctcttatcaagcaaggcagcaaggagagagttgaggaagcagaagcgaatagcagctgagaaagtgtgtgatctttgcggcagaccaatgctctctggaaaggatgttgccaccttgctgaactgcaatacaggaaaactagcttgcagcagtagaaattcaagtggggcttaccatctatttcacacttcctgccttttacactggactattctgtgccaatacgagatgctgaacgatgaaatagctaggaaggggaagagcaaccgaggaaggaaggcaaagaatgcacctaagagaagcaaaataacgtccatagtttgcccagaatgtcagggtactggaattcacgtcaacggagatgaacttgagaagccaagcatttctttatcagagatgtttcgcttcaagatgaaagcaatcgaagctcacaaagcatggctgaagagacctgaagtgcttgaaaactgttccactgggcttcatttcccctcagaacatgtggagaactctgaggtggaatcagaggcacactgttcgtaa

SEQ ID NO: 94934 - DNA, 348 bp, Zea Mays
tgactgtgtttttttttttgtattccctgcgtttagtcagctgagttcaaccatggtcacgcgctctgcaaagaccggcttcgccggcgacggaagcacgtccagccatgaccagcgctctgcaaagagaagtatgggtggctgatcgcaactcgcaagagaactgagaagcgatggccatcaagattgacagaagaagtcgtcaaccggcttcattggtcatcctccacaacgaaagaaagaaagcagaggatggtcagattgaaagaaaaaaaaacatgtgtgatggctgttgcacacccatatgtggccgtacctgtgctcgccgatccgaagcaacacgacgaa

SEQ ID NO: 94935 - DNA, 942 bp, Zea Mays
cacttgtttaagccgcgacctgcgtcccagcatcagtcagtgcatcagcattcatcgccccctgcctccccttccattcgccctcctcccactccaccagctcctgcctgcctataaacccagggccgccctttgactctccttccctgtccagtggcggggccgcttcccttgcgttcgcggagagtctgtctgtctgtctagctagctagctagctgccgagagcgtgaggaggaagggggatccatggcggcggagaacgaggagaaggagacggcctgcgcggggtacaagcacgggccgccatgggtgttcaaaggcagcgcattgtaccagctgcatttggtgaaggcgtcgacggcgcgggccttcgtgccgcgggacctccgcctggttgaggccttcggctacacgctcggcggcatgttcctggcgcgctaccacgacagccctgccggcgaattcgacgagctcgtggtgatcgccggcattgtgtggaacccgccgacctcctgcgcgtgggctgccagggtgctggtgaacagcgtcgaagcctgccggcacggccgcaaggaggtaggactgccaagccatgtcgccacattctcgtcaaagaacgaggctgcttcgcttggggatagaccgttggctagaccaaacagcttcctcaacatgctggggatcgggtcgacagccttcgagcaagggaatggccgcgagattgaggtttcagagtccaagggcggctcgtctactcggcatctgtgcaacatcagcctgccatttaccgcaggatcacataaggaccaccagtgggcgggcccagcaatcagaatgtcactcccgagtttcaggcacgtctcgcttgctttgcgaatttcagcggacgtacagtggaccatcctgatcttctcaagtactcctgtcaagtagaatgcagg

SEQ ID NO: 94936 - DNA, 939 bp, Zea Mays
cacttgtttaagccgcgacctgcgtcccagcatcagtcagtgcatcagcattcatcgccccctgcctccccttccattcgccctcctcccactccaccagctcctgcctgcctataaacccagggccgccctttgactctccttccctgtccagtggcggggccgcttcccttgcgttcgcggagagtctgtctgtctgtctagctagctagctagctgccgagagcgtgaggaggaagggggatccatggcggcggagaacgaggagaaggagacggcctgcgcggggtacaagcacgggccgccatgggtgttcaaaggcagcgcattgtaccagctgcatttggtgaaggcgtcgacggcgcgggccttcgtgccgcgggacctccgcctggttgaggccttcggctacacgctcggcggcatgttcctggcgcgctaccacgacagccctgccggcgaattcgacgagctcgtggtgatcgccggcattgtgtggaacccgccgacctcctgcgcgtgggctgccagggtgctggtgaacagcgtcgaagcctgccggcacggccgcaaggaggtaggactgccaagccatgtcgccacattctcgtcaaagaacgaggctgcttcgcttggggatagaccgttggctagaccaaacagcttcctcaacatgctggggatcgggtcgacagccttcgagcaagggaatggccgcgagattgaggtttcagagtccaagggcggctcgtctactcggcatctgtgcaacatcagcctgccatttaccggatcacataaggaccaccagtgggcgggcccagcaatcagaatgtcactcccgagtttcaggcacgtctcgcttgctttgcgaatttcagcggacgtacagtggaccatcctgatcttctcaagtactcctgtcaagtagaatgcagg

SEQ ID NO: 94937 - DNA, 1133 bp, Zea Mays
cacttgtttaagccgcgacctgcgtcccagcatcagtcagtgcatcagcattcatcgccccctgcctccccttccattcgccctcctcccactccaccagctcctgcctgcctataaacccagggccgccctttgactctccttccctgtccagtggcggggccgcttcccttgcgttcgcggagagtctgtctgtctgtctagctagctagctagctgccgagagcgtgaggaggaagggggatccatggcggcggagaacgaggagaaggagacggcctgcgcggggtacaagcacgggccgccatgggtgttcaaaggcagcgcattgtaccagctgcatttggtgaaggcgtcgacggcgcgggccttcgtgccgcgggacctccgcctggttgaggccttcggctacacgctcggcggcatgttcctggcgcgctaccacgacagccctgccggcgaattcgacgagctcgtggtgatcgccggcattgtgtggaacccgccgacctcctgcgcgctggggaggggtgtccgggtgcgctgcacttgctccgcgtggccaacttgctgccctgcgcagctcagctacagcctacagccgcccgtggtttcctactttcctccgtcttcgaaatgcagcagttggatggaactctgaatagtggtgacttgcttgactgagctttttttcagttcttgctgcttctgatctactactgtatgagcttgttttcaggtgggctgccagggtgctggtgaacagcgtcgaagcctgccggcacggccgcaaggaggtaggactgccaagccatgtcgccacattctcgtcaaagaacgaggctgcttcgcttggggatagaccgttggctagaccaaacagcttcctcaacatgctggggatcgggtcgacagccttcgagcaagggaatggccgcgagattgaggtttcagagtccaagggcggctcgtctactcggcatctgtgcaacatcagcctgccatttaccgcaggatcacataaggaccaccagtgggcgggcccagcaatcagaatgtcactcccgagtttcagcggacgtacagtggaccatcctgatcttctcaagtactcctgtcaagtagaatgcagg

SEQ ID NO: 94938 - DNA, 1413 bp, Zea Mays
cacttgtttaagccgcgacctgcgtcccagcatcagtcagtgcatcagcattcatcgccccctgcctccccttccattcgccctcctcccactccaccagctcctgcctgcctataaacccagggccgccctttgactctccttccctgtccagtggcggggccgcttcccttgcgttcgcggagagtctgtctgtctgtctagctagctagctagctgccgagagcgtgaggaggaagggggatccatggcggcggagaacgaggagaaggagacggcctgcgcggggtacaagcacgggccgccatgggtgttcaaaggcagcgcattgtaccagctgcatttggtgaaggcgtcgacggcgcgggccttcgtgccgcgggacctccgcctggttgaggccttcggctacacgctcggcggcatgttcctggcgcgctaccacgacagccctgccggcgaattcgacgagctcgtggtgatcgccggcattgtgtggaacccgccgacctcctgcgcgtgagttcgccttcgctccgcttcatgcctgcattgcattcgcatcttctgtggcctagtttaatcccttgtaggcttcttcgccgctttctcctgcctgattggcctcgatcagggaccccccaacagaaaagaacaggggcaacttgcagtatgcgaaggggaaagaaaaaaaacgaaaaccctcgtgcttgcgccagccggccataaacaagcgccttatcccccatatgattgtacttggcagcacggactgtgccttgcttctttcaattattcgtaggctggggaggggtgtccgggtgcgctgcacttgctccgcgtggccaacttgctgccctgcgcagctcagctacagcctacagccgcccgtggtttcctactttcctccgtcttcgaaatgcagcagttggatggaactctgaatagtggtgacttgcttgactgagctttttttcagttcttgctgcttctgatctactactgtatgagcttgttttcaggtgggctgccagggtgctggtgaacagcgtcgaagcctgccggcacggccgcaaggaggtaggactgccaagccatgtcgccacattctcgtcaaagaacgaggctgcttcgcttggggatagaccgttggctagaccaaacagcttcctcaacatgctggggatcgggtcgacagccttcgagcaagggaatggccgcgagattgaggtttcagagtccaagggcggctcgtctactcggcatctgtgcaacatcagcctgccatttaccggatcacataaggaccaccagtgggcgggcccagcaatcagaatgtcactcccgagtttcagcggacgtacagtggaccatcctgatcttctcaagtactcctgtcaagtagaatgcagg

SEQ ID NO: 94939 - DNA, 1344 bp, Zea Mays
cacttgtttaagccgcgacctgcgtcccagcatcagtcagtgcatcagcattcatcgccccctgcctccccttccattcgccctcctcccactccaccagctcctgcctgcctataaacccagggccgccctttgactctccttccctgtccagtggcggggccgcttcccttgcgttcgcggagagtctgtctgtctgtctagctagctagctagctgccgagagcgtgaggaggaagggggatccatggcggcggagaacgaggagaaggagacggcctgcgcggggtacaagcacgggccgccatgggtgttcaaaggcagcgcattgtaccagctgcatttggtgaaggcgtcgacggcgcgggccttcgtgccgcgggacctccgcctggttgaggccttcggctacacgctcggcggcatgttcctggcgcgctaccacgacagccctgccggcgaattcgacgagctcgtggtgatcgccggcattgtgtggaacccgccgacctcctgcgcgtgagttcgccttcgctccgcttcatgcctgcattgcattcgcatcttctgtggcctagtttaatcccttgtaggcttcttcgccgctttctcctgcctgattggcctcgatcagggaccccccaacagaaaagaacaggggcaacttgcagtatgcgaaggggaaagaaaaaaaacgaaaaccctcgtgcttgcgccagccggccataaacaagcgccttatcccccatatgattgtacttggcagcacggactgtgccttgcttctttcaattattcgtaggctggggaggggtgtccgggtgcgctgcacttgctccgcgtggccaacttgctgccctgcgcagctcagctacagcctacagccgcccgtggtttcctactttcctccgtcttcgaaatgcagcagttggatggaactctgaatagtggtgggctgccagggtgctggtgaacagcgtcgaagcctgccggcacggccgcaaggaggtaggactgccaagccatgtcgccacattctcgtcaaagaacgaggctgcttcgcttggggatagaccgttggctagaccaaacagcttcctcaacatgctggggatcgggtcgacagccttcgagcaagggaatggccgcgagattgaggtttcagagtccaagggcggctcgtctactcggcatctgtgcaacatcagcctgccatttaccgcaggatcacataaggaccaccagtgggcgggcccagcaatcagaatgtcactcccgagtttcagcggacgtacagtggaccatcctgatcttctcaagtactcctgtcaagtagaatgcagg

SEQ ID NO: 94940 - DNA, 1485 bp, Zea Mays
atggccgagaccgtcgacgacaaggtcagctacttccaggccgtcaccggcatctccaacacggacctctgcacggagatcctcgccgcgcacaattgggacctgcagctcgcggtgtccaccatcaccgccaacccctcctcgccctccgcttcggcctccacctcctcgcgtgacccggccccttccgctccgctggcggtagatgcagagttcgtcgcgcccccgccgccgatgccgctgccgccccagcagcagccggggatcgcgtggaagctggtgacgctccccttccacgtggtctcgggtggggtcggcctcgtcgccggcacgttccgccttggcgcctgggtagccgggggcgtgctgtcccgctccctctccctcctcggcctcgcggggcaagccggcagcggtgaccgcctgctagagttgccgccgtcagctgccgaggcggccgacttcgtcgctgagttcgagcgcgagttcggcgctggccgcggcccgcgcttcgtggccgaggggttcgctgatgcgctgaagcgagcgcagcgagaattcaggcttctgttcttgtacctccactcccctgatcacccggatacccctgccttctgcgcaaagaaaagaagcccaactgcccaaaggctaaatcagcaaccggctaagctaaccctaaattccctaactcccttccggccttcccttcccgagctctcgtcccgtccacccatcccagattcccagtcgccactcccatcccaggaggccaggacggcaggaccccaacgccccacgccacatccccgcgcccccgcccagcagccagtccccggcggcggccaggccacatccccgcgcgagctacgcctacggcctgcgcggctgcgacctgcgacgagccccgcgcgagctacgcctgcggcctgcgacgagccccgagccccgagcggtgtccaagctgcgactgacaagctgcgaccggcgaccggccccaagctacgactgcgactatggccggcgaccgtccccaacctgcggcgtccccgagccctaggcccgaccggcgtccccgagctgtgcctgcgcgcctgcgccgtccgccgtcgggccctcaggtactcagtagctcactcagttagaagcccaaatccaatgtcaactccacaagacagtagcagtcgtcgcagtggcataggagcagctcctgctgatgttggtagctctagagatcccactccatctgatgcagcaacccaagggacaaggaatgatgttgaaatagatgatgctgcacaggttgggtgtaagaggaagttgaagtctaaagtatgggaggattttgttagagttactgtatctggtaaacggaaagctaagtgcaattggtgtagcaaactattgacagctgaaggtcatggatctcatgtactcaatgcactcatgacttgccttgatgatgaagatgaagcaacgatatattga

SEQ ID NO: 94941 - DNA, 1361 bp, Zea Mays
cctttcggtattacagataaattatatgtcatcttgtagataattggttgtacatatttatatagtagactgagaaacggcaaacccagtgccggaggtctccacatgagtgggtccgggaagggataaactgtgacctggtgactttgtgcgacagctctcaccactgtaccaggcctgcccttcaatattgctttagtagactgctgaagattttatttttgacatgtacctttttgtcctgcagagtccatgttatcagaggagcttattcaaaaagttatgtctggggaagagataaagctggaagacctctctgattgtgaaatcaaacgattccgtcaagctctggcctcaggtgagctcagtaagatgattgaaccgtggacaccttggtggaaaaaaccctcagccagatctatttcccttggcctggatggaagtcagcttatcagacaagtaaacgcagaagacactgctgtaccatatccagatccaaatactgaccaagaggctagcatcaacgaaatccctgaagggccagaatctcctctcccgtcattgaaacagttaacaaggacagagccatctcctttgcttgctgtccacttggttgacattctgtacagttactgcttcacacttcggctctacaacggtgattggcactcagatcctttgggtgcttgcactgtcgccctgtcgatgtcgaaagtcatgggccaggatgctaaacctgagactgtacctgaagcactcgcagcctgcatcgaggagacatgctcaccagcttacaggcatactggtggtttcaggtttgctattggactcgtggacgatatcatcgccattctctccttgggacagaacgcacttatttgtgccttatgcgacttccatcgactcattgaagttggtaagagcatgctcaaggtggagaaagtgggcaagacggagagggcacagaactctccgaagcttcgtagtgcagctaggaagctattcttcatgacttgttgggtccatgagcagccagatgaggcgtggccatctttagctcacatcgtccaggtgcagaaagcatctatggaggagttggagaccgggaattggaaggcggatagaaagagcaaaccacaatccgcggttcttatcgaggagctgtaggcatatggatgtaccactggaaactggatcgcgaggctctgtacccttgtgtatcgctcaggatgaatccaacgagagaccttgtccttgtaatgcagttagttgcttttgtgtacacttttttttgaaaaaaattgtatttgtatacgagtttgaaatcctagttgaagcgatcctgctttactttgcttgtt

SEQ ID NO: 94942 - DNA, 1850 bp, Zea Mays
cgcgccgcacgggtccgaactcccagaaaagccgaggaggcagcctcgttgtgctcctgctgctgctccgcccttccgaccgattgaggcggcgcaaagcaaaggaaaaccccaggccgcaaccctcgcaaacactcgagtcctcgtctcttccgcaccctcctcttcaactccagccgccttcaccgccaatcaggatcaggaccaccaatgggccatgacacttggaaatcctatgcttgggccatgaccaccaatgggccttcgccgagcatcgagaagcctccgcgcccgccgcacgccggaggaaaggaagtccccccatccccaaattcccaaagccaacaccgccgagaaggacagagactggaagcgcaagagcaggcgccgcgcgtgccggcgatggagagggacgtcgtgctctccgcacccgaggccgctgggtcctcgtcctcccccgcctcctcgtcgtactcctccttcgccgagaccagggtcatctgccgcgtgtgtcagaagcagttcgcgcagtacacttgcccccgctgcaacgcccggtactgctcactctcgtgctacaagggtcatagtgttcaatgcactgaatccttcatgcgtgagaatgttatggacgagcttaagcagatgcaacctgaggatgaatcaaagaaaaagatgctagatatcctcaagcggctccacttggaagaagagatggcatcagatggtgaagatgagtccatgttatcagaggagcttattcaaaaagttatgtctggggaagagataaagctggaagacctctctgattgtgaaatcaaacgattccgtcaagctctggcctcaggtgagctcagtaagatgattgaaccgtggacaccttggtggaaaaaaccctcagccagatctatttcccttggcctggatggaagtcagcttatcagacaagtaaacgcagaagacactgctgtaccatatccagatccaaatactgaccaagaggctagcatcaacgaaatccctgaagggccagaatctcctctcccgtcattgaaacagttaacaaggacagagccatctcctttgcttgctgtccacttggttgacattctgtacagttactgcttcacacttcggctctacaacggtgattggcactcagatcctttgggtgcttgcactgtcgccctgtcgatgtcgaaagtcatgggccaggatgctaaacctgagactgtacctgaagcactcgcagcctgcatcgaggagacatgctcaccagcttacaggcatactggtggtttcaggtttgctattggactcgtggacgatatcatcgccattctctccttgggacagaacgcacttatttgtgccttatgcgacttccatcgactcattgaagttggtaagagcatgctcaaggtggagaaagtgggcaagacggagagggcacagaactctccgaagcttcgtagtgcagctaggaagctattcttcatgacttgttgggtccatgagcagccagatgaggcgtggccatctttagctcacatcgtccaggtgcagaaagcatctatggaggagttggagaccgggaattggaaggcggatagaaagagcaaaccacaatccgcggttcttatcgaggagctgtaggcatatggatgtaccactggaaactggatcgcgaggctctgtacccttgtgtatcgctcaggatgaatccaacgagagaccttgtccttgtaatgcagttagttgcttttgtgtacacttttttttgaaaaaaattgtatttgtatacgagtttgaaatcctagttgaagcgatcctgctttactttgcttgtt

SEQ ID NO: 94943 - DNA, 2001 bp, Zea Mays
cgcgccgcacgggtccgaactcccagaaaagccgaggaggcagcctcgttgtgctcctgctgctgctccgcccttccgaccgattgaggcggcgcaaagcaaaggaaaaccccaggccgcaaccctcgcaaacactcgagtcctcgtctcttccgcaccctcctcttcaactccagccgccttcaccgccaatcaggatcaggaccaccaatgggccatgacacttggaaatcctatgcttgggccatgaccaccaatgggccttcgccgagcatcgagaagcctccgcgcccgccgcacgccggaggaaaggaagtccccccatccccaaattcccaaagccaacaccgccgagaaggacagagactggaagcgcaagagcaggcgccgcgcgtgccggcgatggagagggacgtcgtgctctccgcacccgaggccgctgggtcctcgtcctcccccgcctcctcgtcgtactcctccttcgccgagaccagggtcatctgccgcgtgtgtcagaagcagttcgcgcagtacacttgcccccgctgcaacgcccggtactgctcactctcgtgctacaaggcttgcagcaggtaggatatggtaatgtcgcacgggtgtcaacagtcttccctaacgacatcttggcaccccctggcgctgataccacttgtcaggaaccacgccggagagacaaccttcagcaggttgccggcgaactcctacctcccagggtcatagtgttcaatgcactgaatccttcatgcgtgagaatgttatggacgagcttaagcagatgcaacctgaggatgaatcaaagaaaaagatgctagatatcctcaagcggctccacttggaagaagagatggcatcagatggtgaagatgagtccatgttatcagaggagcttattcaaaaagttatgtctggggaagagataaagctggaagacctctctgattgtgaaatcaaacgattccgtcaagctctggcctcaggtgagctcagtaagatgattgaaccgtggacaccttggtggaaaaaaccctcagccagatctatttcccttggcctggatggaagtcagcttatcagacaagtaaacgcagaagacactgctgtaccatatccagatccaaatactgaccaagaggctagcatcaacgaaatccctgaagggccagaatctcctctcccgtcattgaaacagttaacaaggacagagccatctcctttgcttgctgtccacttggttgacattctgtacagttactgcttcacacttcggctctacaacggtgattggcactcagatcctttgggtgcttgcactgtcgccctgtcgatgtcgaaagtcatgggccaggatgctaaacctgagactgtacctgaagcactcgcagcctgcatcgaggagacatgctcaccagcttacaggcatactggtggtttcaggtttgctattggactcgtggacgatatcatcgccattctctccttgggacagaacgcacttatttgtgccttatgcgacttccatcgactcattgaagttggtaagagcatgctcaaggtggagaaagtgggcaagacggagagggcacagaactctccgaagcttcgtagtgcagctaggaagctattcttcatgacttgttgggtccatgagcagccagatgaggcgtggccatctttagctcacatcgtccaggtgcagaaagcatctatggaggagttggagaccgggaattggaaggcggatagaaagagcaaaccacaatccgcggttcttatcgaggagctgtaggcatatggatgtaccactggaaactggatcgcgaggctctgtacccttgtgtatcgctcaggatgaatccaacgagagaccttgtccttgtaatgcagttagttgcttttgtgtacacttttttttgaaaaaaattgtatttgtatacgagtttgaaatcctagttgaagcgatcctgctttactttgcttgtt

SEQ ID NO: 94944 - DNA, 914 bp, Zea Mays
agagagcatggacctgtttacctttttgtacattttttacctgaaaacatagcagttatgtttccaccaaattccaaatgttctgtaatgacttctctacacttgatttatgcaggcttaccatctatttcacacttcctgccttttacactggactattctgtgccaatacgagatgctgaacgatgaaatagctaggaaggggaagagcaaccgaggaaggaaggcaaagaatgcacctaagagaagcaaaataacgtccatagtttgcccagaatgtcagggtactggaattcacgtcaacggagatgaacttgagaagccaagcatttctttatcagaggtctggagcacatattcactcttctgctgtcagtccctgatttttcattcaggcaacttcttgcaaattacttctatagcagccttgcacctgaattggttggatatggcacttgcagatgtttcgcttcaagatgaaagcaatcgaagctcacaaagcatggctgaagagacctgaagtgcttgaaaactgttccactgggcttcatttcccctcagaacatgtggagaaccctgaggagaaggtgatgccactcaagtcacttcccttctatgccgctgatgggtagaaagatagttgatggcagctactggaggatgctgcagttgttgatgtaaataagctcgcttgacagttgtggaacagtgttgttagatgctcacctacgtgcattatctcagttaacctgtgtccgccagatgataactaagacatttaaactggcaactggctgaactattgtttttcgctggattcactaaacatgtacgcagtccatttcgttgggttgggtttgctgcttacaacttccagtttcattgtttctgattactaatgccacgcttctgga

SEQ ID NO: 94945 - DNA, 2239 bp, Zea Mays
acgctcctcccccttccccctccacccctcctcttcaattttctgtgcgaaaccgagcagccaaaccctaaactacgctatttgtattcggatctggtctaattacgcgtgcttacatgtattatgtctactaacctcgattgtttttgaattatcagctctgcatgtatacacccaagtcctttactgggtccgccgccgcccctatgtacttcgttaggtttagtatgttgttaagtttgtaattctagggtctggagggaagcatagatctcaagaggggtgaaatttggtggtaatttcctgagaatttcaaggagacaagggcgtggaggttgtttctggagggatctgtgagcacagcagcagaaatttgaggttggtggtagcctgttgatccacgatggtgggtaaggagctggtggtgcaaaggaatggccctgttgacatacgtgagattgctgcaaaggccacgcttcgggaggtgcggcagagcgggcacacctacgtcgaactacggcgtgtcgggaagcgtgtcatcttcttctgcaccatctgcctcaccgagtgcttcagcgacaatgtgctgtttgaccacctcaagggaaacctgcattcacggcggtattctgaggccaaggttacgctgtttgggcccatgccatggccgtttaatgatggtgtgctcttcttcaacaactcacgcgagaaggatccgctcctgctggactcaagctcacagagcaccagagagcttgccctggttccagagcctgaggtttcagggaatgatactgaggtgacatcaaggctgagagatggttcaacctcctctaatggtgtgaaaggtgcacgctatggtgcaaaaggccgtgctaatggtagaactgctgctgtatctgaagatcacatgctttcaaaccatggaactgatggtcctgttgttattcctggtgtattgctaaaggatgttgtttcagatttgcctgtgcatcttttgggctatgggaatatttcatacaggatctgtgaagctagcaagaactgcaggaagataagcaagatctggtgtgcttgggtaggacaaggctcccatggttttgagagttgtaacacttatgagcaatctggatttgccatagtcaacttctcttatacctatgatttaggcaggaagtggtcttctgaggaacaagacctgtctgtctctgctggatctttctttgtaattgatgatgctggacaccgtggaaagcgaatgagaaaatcattctctgatcaagaagcatcttcagaagagtcaaacggtcagaacagctctttacagggcagtaggcaagctattgtgacttgttcaccggtaggtacctcaaatgatcttcaagttggtctcttatcaagcaaggcagcaaggagagagttgaggaagcagaagcgaatagcagctgagaaagtgtgtgatctttgcggcagaccaatgctctctggaaaggatgttgccaccttgctgaactgcaatacaggaaaactagcttgcagcagtagaaattcaagtggggcttaccatctatttcacacttcctgccttttacactggactattctgtgccaatacgagatgctgaacgatgaaatagctaggaaggggaagagcaaccgaggaaggaaggcaaagaatgcacctaagagaagcaaaataacgtccatagtttgcccagaatgtcagggtactggaattcacgtcaacggagatgaacttgagaagccaagcatttctttatcagagatgtttcgcttcaagatgaaagcaatcgaagctcacaaagcatggctgaagagacctgaagtgcttgaaaactgttccactgggcttcatttcccctcagaacatgtggagaaccctgaggagaaggtgatgccactcaagtcacttcccttctatgccgctgatgggtagaaagatagttgatggcagctactggaggatgctgcagttgttgatgtaaataagctcgcttgacagttgtggaacagtgttgttagatgctcacctacgtgcattatctcagttaacctgtgtccgccagatgataactaagacatttaaactggcaactggctgaactattgtttttcgctggattcactaaacatgtacgcagtccatttcgttgggttgggtttgctgcttacaacttccagtttcattgtttctgattactaatgccacgcttctgga

SEQ ID NO: 94946 - DNA, 2369 bp, Zea Mays
ctcccgttccccgcggcctgcgcgcgcgttctctccctcacctccgcccctttctctctctctctcgctctcgctccgggcgacggctgggcgaccgccgctttatccgtgcggcccttccttttgttctcccgtccccccaaccccccttcgagctctatctgtctcttcctctcgaggcgacgcctgggctaccgcgccgctactgcggcctcccgcgacaggtgcctagtctccatcaggtgccatgtcttcttcgggctcttcaccggcgacgtgcactgccagctctgcatgtatacacccaagtcctttactgggtccgccgccgcccctatgtacttcgttaggtttagtatgttgttaagtttgtaattctagggtctggagggaagcatagatctcaagaggggtgaaatttggtggtaatttcctgagaatttcaaggagacaagggcgtggaggttgtttctggagggatctgtgagcacagcagcagaaatttgaggttggtggtagcctgttgatccacgatggtgggtaaggagctggtggtgcaaaggaatggccctgttgacatacgtgagattgctgcaaaggccacgcttcgggaggtgcggcagagcgggcacacctacgtcgaactacggcgtgtcgggaagcgtgtcatcttcttctgcaccatctgcctcaccgagtgcttcagcgacaatgtgctgtttgaccacctcaagggaaacctgcattcacggcggtattctgaggccaaggttacgctgtttgggcccatgccatggccgtttaatgatggtgtgctcttcttcaacaactcacgcgagaaggatccgctcctgctggactcaagctcacagagcaccagagagcttgccctggttccagagcctgaggtttcagggaatgatactgaggtgacatcaaggctgagagatggttcaacctcctctaatggtgtgaaaggtgcacgctatggtgcaaaaggccgtgctaatggtagaactgctgctgtatctgaagatcacatgctttcaaaccatggaactgatggtcctgttgttattcctggtgtattgctaaaggatgttgtttcagatttgcctgtgcatcttttgggctatgggaatatttcatacaggatctgtgaagctagcaagaactgcaggaagataagcaagatctggtgtgcttgggtaggacaaggctcccatggttttgagagttgtaacacttatgagcaatctggatttgccatagtcaacttctcttatacctatgatttaggcaggaagtggtcttctgaggaacaagacctgtctgtctctgctggatctttctttgtaattgatgatgctggacaccgtggaaagcgaatgagaaaatcattctctgatcaagaagcatcttcagaagagtcaaacggtcagaacagctctttacagggcagtaggcaagctattgtgacttgttcaccggtaggtacctcaaatgatcttcaagttggtctcttatcaagcaaggcagcaaggagagagttgaggaagcagaagcgaatagcagctgagaaagtgtgtgatctttgcggcagaccaatgctctctggaaaggatgttgccaccttgctgaactgcaatacaggaaaactagcttgcagcagtagaaattcaagtggggcttaccatctatttcacacttcctgccttttacactggactattctgtgccaatacgagatgctgaacgatgaaatagctaggaaggggaagagcaaccgaggaaggaaggcaaagaatgcacctaagagaagcaaaataacgtccatagtttgcccagaatgtcagggtactggaattcacgtcaacggagatgaacttgagaagccaagcatttctttatcagagatgtttcgcttcaagatgaaagcaatcgaagctcacaaagcatggctgaagagacctgaagtgcttgaaaactgttccactgggcttcatttcccctcagaacatgtggagaaccctgaggagaaggtgatgccactcaagtcacttcccttctatgccgctgatgggtagaaagatagttgatggcagctactggaggatgctgcagttgttgatgtaaataagctcgcttgacagttgtggaacagtgttgttagatgctcacctacgtgcattatctcagttaacctgtgtccgccagatgataactaagacatttaaactggcaactggctgaactattgtttttcgctggattcactaaacatgtacgcagtccatttcgttgggttgggtttgctgcttacaacttccagtttcattgtttctgattactaatgccacgcttctgga

SEQ ID NO: 94947 - DNA, 327 bp, Zea Mays
atggggctccagagccatcgagaaagctcacgtggaaagcgcaaaactcatctgccctgcacccccgcctatcctctactcctctccattgcagcagcagagctcgccgccgatggacgaggggtcatcgaagagggcgcaggatatcgcgcaacagcgggaggggatgctaaggagatgttgcacgtcctcaccgaattcgagtacgagctctcgctcaccaacctcgtcgagaaggccgcgggcgggggcggcggagccgaagctacgccccgcacccaagacagagggaaaggaccggagcgccgcacagccagcagcagctaa

SEQ ID NO: 94948 - DNA, 1215 bp, Zea Mays
ccgcgcccactcacgcccggccctgccccgcgccctcatcgtctcctcccggcctcccctcaaagcccaccaccgctgcccccacgccacccaccccaccccacccccgcccctaccgcgcggtgcccgagacccagaggccagaccccggctacctttcttcacctccttcccatcgcaatcgcaagcccccggctccggcgctcggcggtcggccaggttcgggagatcacttcgtcgcggcgaggagggagggggtcgccgttagcgcgcggcacttggatgagaagggcagcggtggaggaggatgcggaaggcgtacagggactccatcaaggtgctcgaagctgacatccagcacgccaacaccctaattactatatattcggcatgagcagctgtgatatttccttctttgctgcaactgcaaagggggatcactgatgtcgaggacaagaagcagaaggccgtatgcatggagaagtacagaaagaaagatgaggatggacgggacaccttatctgatattgatgttgagagggaagaggagtgtgggatttgcatggagatgaacagcaaagttgtgttgcccaactgcacccatgctatgtgtatcagatgttaccaggactggagttcaagatcgcagtcctgcccattctgccgtgacaacctgaagaagacctgtcctagtgacctgtggatctatgttgaggaccaagatgtggtcgacatggagacggtgtcgagcgagaacctcagacggctgttcatgtacataagcaagctgcctctgattgtcccagacgtcatcttcagcgtgtatgattcccacatcaaatgacttccgacgcgaccttcccgacgaccttcagccagtgcccagctccagttaatcttatgcccccatgtcctccattttcatgctttgctcaagcttttggaagtgcctgaactgatttggaaccgaaagccttccggtggtgctttagaaacttgtttagtgcctgcatgcatctttaatcatatgcagccactctgtacatatctgacttggctcagttaataggggactgtgcttgccccaaatggaggcagggccgtttgtgtctttctcatgtttccattagcgaagcaacgcaaagttctgggcattggaaggtttctgctgcaatgttagaatgctctctatacttaattagtctggatctacta

SEQ ID NO: 94949 - DNA, 1105 bp, Zea Mays
gggttcttttccttttctgcagtaatcttggaggccgcttgatgcggttctgagccggggcgcaggtgccccgccgtccccgctaccgccgctgcctggcgcgcaaggaagcagctcggcggccggcggaggttcggcgcccccgggcaacttttctggctcacgcaggaggacctcgtgcgctacttcctcaactccatcggcctcttctaccatgtggccgcgcgctccgtgtcctcgctcgggctcgtgcgcaccgacttcctgtccgtgcgccccggccgaggcggccctgtcggccgtgcccctcatccgccgcgcccgtcgccacggagacggcggtcgccgtggtcaccgaagacggccacctgctcggcgagatctcccccgccctcctcgcggcctgcgacgagacggcggccgcggccatcgccacgctctcggcggcggacctcatggcctacgtcgactacttcgggtccccgcccgagcacatctcgcgcgccatcaaggccgggctgaaggacaagggcctcgacgccatgctggcgctggttgaggacgagacgctatcgtcgttctcctccgcgtcctcgtcgtccgacgaagaggcaggccggacgcagctgaggcgcccgtcgtcggggagctacgggcggcggtcagccgaggagccggtggtgtgcagccccgcgagctcgctggtggccgtcatggtgcaggccctcgcgcacagggtgagctacgtgtgggtcctcgacgaggacagcgactgccgccttgctggcatcgtcacgttcgcggacgtactgagggtgttccgggagcagctgctgtgagatctggaagagtgtttgctgtttcctcctcgatcgcatcttgtgctgtaatgagagaagaacatgagctcttgtcacggaccgagcgccttcgtttctcaaaaaacattttggtttggatcagagtatgtatgtgtttgcttgcttgcttggtgcccagtgccaatgaacaacaaccttgaccgtgcgtggtttgcttaaattaaattgcttattaataaatgaggcggcactgtgattgatgctgtcggttattgtgcttataa

SEQ ID NO: 94950 - DNA, 907 bp, Zea Mays
gaagcaaaaatcccctctcccccttctcgtcctcctcccgactcccacccaaaaaaaaaaaaaacttcgaaggaggtttcgatcgcgaaaccgcccagggcccgccccgcaagtgcatggcagtgagcttcctggccaatgaggtgtcggacctgtgcatcggcaagccggccgtgaggtcgctcccgctctccgccgccgccggcgaccttgccgccgcgctccggagggtggcccgctctggcgcaccatcctgcgtcgcggtgactggaccagcgcgcgccgtcgtcggccgggtcggcctcgcggacgtgctctgcttcctgtgcaccgaccccgaagcgctcgcgcgccccgccgtcgtgttctccaagccggtctccgcgctcctgccgaaggacggcgctggagaggtccgccgcgtcgatccccgctcgaggtaaagctcagcccctctccctcttcctctctcctgggtctgtgcaaacgacgcgtgactggaagtctggaactggaagtttcctaaggttcgtcgcgaggaaacacgattttggtcaaatccttataaaagctgcgaaaaatatgtttatcgaaaaaaaacgatgtgcgggctaggtccaacgtccaagtccaagacagacgagcgttcatcctcatcacagttacttggagagtttgatgtctgctttcctggttggaatatgtacagtactcatgtggcggtgagccggtgaagaaaaaaaccgcgcattcaggtccagctcatccgactcactggagacagtcttcccggagattgtcgcatgcagccatgcactgctgtctccttgcgagatgcttgataggattagctggattagttgctcccacccaactaataaatttgggattttttttttgggggggg

SEQ ID NO: 94951 - DNA, 3171 bp, Zea Mays
cccaccgccccattccatccatgacggtcgcccctaacccacggtgtcgactgctccaccgtaagcgcctgtttcaccgccaccgccgacttcggttggtcctcacccgcgcgtggatggcgcacgcgcctctctcctccaagtgcgccgtcgacaccaagctcccctgcctcaccgcgcgatctccagccccgccgcgctcgcaagtcttgagatcgagcagatccaccatcctgcgccctcgccccatcacgcactcaccttggccccgcatccctgcgccgccataccctcggcctcgccctcgcctcatcctcccctgcccccgcaccgcatccaacgcgtagatccagcgtcgtcgccgcgatacctgcccatgccaccgcgtgcgcaccccccgtgccgtcggcaaaccctagcgtgatccccaccctgcccccgtcctcctcacatcatcggctcccccgtcatccatatcccagtggacatctctggcgacgagaggatgacgtcgtccggggtggtggccgcccggacaacccgttgctcgccaggccgagtctcctgagacccttgagcttgctcagtgacggagggatgcttccatggaaggaattgaaatacagatcaagaaactctaggctctagcactactccagctcttctggcatctgaccggagaatttgttctcggatagcgctagctgagcaaggctggtgaggctggagacgtcaggttggctacagtgtcggggatgaacccactcagcgcgttactactcagatcaagctccactagctgggcgaggtcgccgatggaggatgggattggccccgtcaaccggttcccctgcaacgccaacttcgtgaggttcttcatgttcccaatccctgttgggatggtgccgttgaggaggttggattcgaggcccaacgtcgtgagcccgatgaggtcgtcgctggccggtggaatagacccggagatgctgttttcccctatgttcagtgcttgaatctccctcgggaggcgggcaatggagcctggcaactagccaccgagcttgttgttgtcaagggcgaggacctgcaggctgccgcagttggtaagatggtccaggaactcccagccttactcgtcgctcgccgtcagctggttgcccgacatgtacaacgactgtgggcagagcatgccgatgactcactgctcctttgtatccttatgctattgttttcatccgacaacatcaactgcaataaacataagatggagagatttctgcaccatggcaggttttatgttgcctctgtatatgctccaatttccttcccttcacttcctctaatagttttgaagaacagagatggcgagcaatctgccattgcagctgtaggttcgctaaaaagtatggatccaaatcggatcattctgaagaaaattgttctgaccatgtaagcttgggtgcatccatcttcacaaggcaattttacttacttagaatcctgcacccttttatgttccgtcggaggtgtttggttttctatctgtacacaatcactgtaatgttttgtggagttttacaggatatggcgacatgttggttcgcctctaagggctcccgtttagacctcagctaacatagtggctcatcgttcatgctatattatgtgcaggtatccacagagtctcgaatctgaaatcgatcgtgttgtatatgttccacgatcccaacgacgtaaaatggttcaagcctattgagcggtggacaaaacatggtcgtcgtggccgcatcatggagaccgttggtactcatggtgccatgaaatgtttattcaacagcagcatgatactgtgtgcatgagcttgtacaaacacgtgtacctaaaatggccttaacaactctaccacgtataaggttgcctgacgtttcgctagatctgtaccagcaggctatccaaacgacgagaatgaaataaccttggagctagcgtggtgtgtagcctatctaaatatttttaggattagaaaattgttttgtattggtccatcttatacttttctttaacattacaccctcattcttcttggtcttagacgactcttttcagtatcaaatccaaattcatgtttaattgcgtgttgagataatgccaacttattccatgttggcatatgtactacccagtacccacaatcatcggagggtcttataagaaacattagggggtaactctacctacatctatcttatacttgaacatcacacccccattctccttggatcaaatttaaaccaacaacaaattcacttgtatgtggaggcatctattttactacttacaggtatgcatcttgactagctcgctgagggggatggcctggtggatctgttgttggtttgcttgtaggtgattagctagattgtgctgttttaagtcccgacaattcagtttctgtacatgctcgacctttgttgaatctacccttacaggtatcctcggcgtctggtggagctgcgccgcctccacgccactgtcaagcgcttcctcggcgtctgcttcggccactagctgccaatcccatacccgtccagatataagcaagctataatgtgcttttgaaatacaagcgaatattgctatagcatgctgcttgagcttagcattcctctttctttcttttgcagcataagaaacactcttacgaagctcttaccaaatctaacggttacaagattcagttcatacttgggttttgctcattgtattgtcttcaagcagggtatgaggaatagtatagatggaacaatttcttctctgttagtggcacattgtcaatggtgtgtctgacaacattctcaaccacatcatcctagagaacaatgagaacaagcctgtcacaaacagtcgtgacactcaggagatatgccttgaacaaggccttcatatcctcaagatattcgaggattatcatgtcagcaaaacatccatcctgaacgaccttgcctcagcaatgggaaacactccaaacccatacgagcaagccatgtccacttgtgtgaatgaccaagcgatgatgctatcgcatatggtgtggcatgagtctacaatttcactgtagttatgaaaactgatcagtcaatgatgatgaatcatacgaaccttttttacttc

SEQ ID NO: 94952 - DNA, 2076 bp, Zea Mays
cccaccgccccattccatccatgacggtcgcccctaacccacggtgtcgactgctccaccgtaagcgcctgtttcaccgccaccgccgacttcggttggtcctcacccgcgcgtggatggcgcacgcgcctctctcctccaagtgcgccgtcgacaccaagctcccctgcctcaccgcgcgatctccagccccgccgcgctcgcaagtcttgagatcgagcagatccaccatcctgcgccctcgccccatcacgcactcatcctcccctgcccccgcaccgcatccaacgcgtagatccagcgtcgtcgccgcgatacctgcccatgccaccgcgtgcgcaccccccgtgccgtcggcaaaccctagcgtgatccccaccctgcccccgtcctcctcacatcatcggctcccccgtcatccatatcccagtggacatctctggcgacgagaggatgacgtcgtccggggtggtggccgcccggacaacccgttgctcgccaggccgagtctcctgagacccttgagcttgctcagtgacggagggatgcttccatggaaggaattgaaatacagatcaagaaactctaggctctagcactactccagctcttctggcatctgaccggagaatttgttctcggatagcgctagctgagcaaggctggtgaggctggagacgtcaggttggctacagtgtcggggatgaacccactcagcgcgttactactcagatcaagctccactagctgggcgaggtcgccgatggaggatgggattggccccgtcaaccggttcccctgcaacgccaacttcgtgaggttcttcatgttcccaatccctgttgggatggtgccgttgaggaggttggattcgaggcccaacgtcgtgagcccgatgaggtcgtcgctggccggtggaatagacccggagatgctgttttcccctatgttcagtgcttgaatctccctcgggaggcgggcaatggagcctggcaactagccaccgagcttgttgttgtcaagggcgaggacctgcaggctgccgcagttggtaagatggtccaggaactcccagccttactcgtcgctcgccgtcagctggttgcccgacatgtacaacgactgtgggcagagcatgccgatgactcactgctcctttgtatccttatgctattgttttcatccgacaacatcaactgcaataaacataagatggagagatttctgcaccatggcaggttttatgttgcctctgtatatgctccaatttccttcccttcacttcctctaatagttttgaagaacagagatggcgagcaatctgccattgcagctgtaggttcgctaaaaagtatggatccaaatcggatcattctgaagaaaattgttctgaccatgtaagcttgggtgcatccatcttcacaaggcaattttacttacttagaatcctgcacccttttatgttccgtcggaggtgtttggttttctatctgtacacaatcactgtaatgttttgtggagttttacaggatatggcgacatgttggttcgcctctaagggctcccgtttagacctcagctaacatagtggctcatcgttcatgctatattatgtgcaggtatccacagagtctcgaatctgaaatcgatcgtgttgtatatgttccacgatcccaacgacgtaaaatggttcaagcctattgagcggtggacaaaacatggtcgtcgtggccgcatcatggagaccgttggtactcatggtgccatgaaatgtttattcaacagcagcatgatactgtgtgcatgagcttgtacaaacacgtgtacctaaaatggccttaacaactctaccacgtataaggttgcctgacgtttcgctagatctgtaccagcaggctatccaaacgacgagaatgaaataaccttggagctagcgtggtgtgtagcctatctaaatatttttaggattagaaaattgttttgtattggtccatcttatacttttctttaacattacaccctcattcttcttggtcttagacgactcttttcagtatcaaatccaaattcatgttt

SEQ ID NO: 94953 - DNA, 752 bp, Zea Mays
gcttgttattagcgattgctagttaggctcacaatggctagcaaagaacttgcactagcacttagcctctttgttctcttgagcattggatcagccagcgccatcagggtggctagatactccagctctcaagggcaaggagccggagatggtaatggtagcgggtatctgaacggtggtggctctggatccggagttggatctggatccggtgagagtgatggggctggagtccatgcaagcggtgggggcggaggcggggccagttcttggtcgcagccggcgggttctggggctgcggctgggtttggcacagggtacgggtctagttatagctcgcagtcacgttacggctatggcgggtcgactagtgctgggggcagtggtcgcggccgtggtgctggacaaggctcggcagacggtggcggcgggtatggtgccggtggtggcgatggatacggttccagcgtagcgaattccggcaacgtggtctcggccacaccagcgcgtgcagaagctagtgctgacggcaatggcagtggcaggggaggtggctacaatggtgggagtggcggcggcgatggcagcggatctggatttggtgctggacagccttaggctttacacaatacaattctcaagatggaggccagaacacgttgtttagggttcgatttgatgtgatttgtgttacttttcttttatgtacttgtatacccatgactaataaagggctccagcatccgttgtta

SEQ ID NO: 94954 - DNA, 610 bp, Zea Mays
ttcaggtcaatctgtgccttacaaatcaaacggacaaaactgtgggcccttttgaagtatttctggctccaagcatgtcgggtgaagacagagctgttctagtcaatgggccacagaagttgattttacctttggtggaggcttttgagtctatcaaatttgatctgagcatggtgaccacccagctaggagtgcaaaagatttccggaattacaatgtacgccgtgcaggaaaagaagtactatgaacctttgcccgacatagagatttttgttgatgcagaatagcaacaccaaattgggacccatttgacgagctgaagatgcatttgtacttttcattaccatgggaggtctacatagtttacataaagcactggctgatgtatattgatacatgcgattgtcatattgatatcaaattgacttctgtcggatgtcactcaaccttggattaccacattctcactcaaccttgagctgcacattgatcatgctctgctaaagactgcacggattacaattcttcaagctgggaaagttttggcccaaaattactgctgaatgtggccggttgctcttgctggttatctcgtgattttctgtcaagt

SEQ ID NO: 94955 - DNA, 844 bp, Zea Mays
ctctgctgcctcgaagcagggtccagatctctctcccccggctccggcgatggcttcgccttacgccggcggcgtgcagcctccctctcccgctggggcggtgcagcagcagcagcagaaccactctctggcgttccgcgtgatgcggctgtctcgcccctcactccagccagacctggccgctctgctccgcttcgacccacgcgacgtcttcctccctgaggacgcgctcaccggctccgacccgtccgctgccgccaaattcctccacggcctcctccaccctgcggactccgccactgccgtccctggagacttcaccttccgcgaccgcttcctcctccgcgacccagccgacgcgctcgctctgccgggcctcctcgtcctcccccagtcgttcggtgcgatctatctgggcgagaccttctgcagttacatcagcatcaacaatagctccagctttgaggccagggacgtcgtcatcaaggcagaaatacaaacagagagacagagaatacttcttctggatacatcaaaatcccctgttgagtcaattagatctgggggtagatatgatttcattgtggaacatgatgtcaaagaactaggagcacatacgcttgtatgtactgctttatataatgatggtgatggagagcgtaaatatcttccccagttctttaagttctctgtttcaaacccattatctgttaggacaaaggttcgcaccatcaaggtaggtcacctcttgttgtgcaagggtaaataacaactgtaggttctttggttagttgtagatgccatctttagaagtcttaacaggtgtatattttgtatatagatc

SEQ ID NO: 94956 - DNA, 2314 bp, Zea Mays
cacggccgcatccaccacctccgtttccaccccacttgatagcgacgccgccgcacaggaactcaggaacccctctcgcatctcccctcgcttccccgcgacagcgacggccggtcgcttcaagtgacccaagcacctgcgcccctcctttctccttttctcccctcggcccccgtccctctcagcccctatgacctcttccgcttccccgaaccctagccccgtcccagtccccactccgatcaccaccgcgaacgggaccacctcatcaccgaaggatcagccgccgcctccgcctccgctgccgcagcagcagcagcagcaggggggcggccaggaggaggcagaggcggcggatgggggaggcgccgaggctgcggaggcgggagtattagctggtgttgcggccgaggctatggaagtggatgggggctctggcgcgggggatgcggaggcgggcggctcggtggggggaggagtaggcgctggggcgggtggaggagcgcagcaggcctcgccggcgaccgtgttccggattcggctcaagcagtcgcctgcgagcctccgtcacaagatgcgcgtgcccgagctgtgcagaaacttcagtgcagttgcttggtgtggaaaactgaatgcaattgcttgcgcttcagagacttgtgcacgtattccaagctcaaattcaagccctccattttggattcctatacatatcctgaatccagagagaccaacagaatgctctgtattcaatgtgaaagcagattctccacgtgactttgttcagttcattgaatggtctcctcggtcctgccctcgtgcattgctagtggcaaattttcatgggcggatcactatatggacacaaccaacaaagggtcctgtaaatcttgtacgtgatgcaagcttgtggcagtgtgaacatgaatggcgtcaagatctttctgtggtgaccaagtggttgtctggaatttctccgtatagatggcttcctacaaactccactagttcaaacctgaagaccttcgaggaaaaattcctcacccaacagcctcagagtgcagtgggatggccaagtattctatgcgtctgttcagttttttcatcaggttctgttcaacttcattggtcacaatggccttctcaaaactcagcacattctagatggttttctactagcaaagggcttctaggagcaggacccagtggcataatggctgctgatgctattgtaacagaatctggagctttacatgttgctggggtaccccttgttaatccatccactgtagttgtttgggaagtgatgccaggtcttggaaatggtattcaggcaactgcaaagataaatgcagcaagttctgttcctccatctctgaatcccccttcatggccgggttttgctccactagcagcctacctattttctttgcaagattatcttgtttctgagggtgcacagacaaaaaagctgacagacaataatgagactactgaggctgcatcaattcattgttgtccagtttctaatttttcagcttatgtcagtccagaagcagctgcacagtcagctactactaccacctgggggtctggggtcacctcagttgcttttgatccgactcgtggaggatcggtcattacagttgtaatagttgaagggcagtacatgtctccttatgaccctgatgaaggaccttctatcaccggatggagggtgcaatgctgggaatcttcgtgccaacctgttgttcttcatccaatatttggaagccctactagcttaggtgggcagcctcccatgcaaactgtttggtccactagagttaataaaagcattccaccaacggaggatcttaaaaatcctcaaacatatgttccgatgccaacgacatcagatgaacggagctcctctgagtgcagtgttgacagggcgaacagactcagctttgacccttacgatcttccaaatgatgttcgacaactagctcaaatagtttattctgctcatggtggtgaagttgctgttgctttcctccgtggaggagtgcacattttctcaggtccaaattttgatcaggttgacagctaccatgtcaatgttggctctgctattgctccaccagccttttcatcaagcagttgctgcttagcatcagtttggcatgacacgctcaaagatcgaaccatattgaagataatacgtgtgcttcctcctgcaattcttagcacacaaacaaagatcagctcagcagcatgggaacgtgcaatagcagataggtatgttaccaaatttatagacgctgattcctaa

SEQ ID NO: 94957 - DNA, 1487 bp, Zea Mays
cccaatcccatgtggggtcgagagatcaggtgacagaaatttcttaactaccgtgcgatcctgaaacaaaatacaataatcagcacgagggcctgaaggagcaagcagtctcggtctttatcttgtgccctggcttcctataaagctgaagcatctcgcgcggtctctgtcctgcctcgaggagcaagcaagtcgaagcatcaaatggcgcgtcaggagatcgagcacagccacctccccgtccgcgggatcaacctccacgtcgctcaggtcggcaaaggtgacctgggcacggtggtgttcctgcacggcttcccggagatatggtactcgtggcgccaccagatgcttgccgtggccgcggcggggtaccgcgccatcgcgccggactgccgcgggtacggcctgtcggaccagccgccggagaacgaggaggcgtcctgggtctgggatgacctcgtcgcggacgtgctcgccatcctcgacgcgctttccatcccaaaggcgttcttggtgggcaaggacttcggcgccctgccggcgtacgacttcgcgctgcagcacccggaccgcacctgcggcgtggtgtgcctcggcatccccttcagccccgtccccttcgccttcgacaccatgcccgagggcttctacgtcctgcgctggggcgagcctggcagggcagaggctgacttcggccggtacgacgtcaggcgcgtggtgcgcaccgtctacgtgctcttctcccgcgccgacatcccgattgccaaggaagggcaggagatcatggacctggccgacctgtccgcgcccctcccggagtggttcaccgaggaggacctggacgtctacgccaagctctacgagaagtccggcttccgctacccgctccagatgccatacaggtctctacgcaagatgccgcagcggctggacgccaagttccaggccccggtgctcatggtgatgggagagaaggactactgcttcaagttcccggggttcgagaccgccgtgcgcagcggcgccatggacaacttcatgccggacctgaagattatctacatcccggaggggggccacttcgtgcaggagcagctcccggatcgggtcaacgagctcctcctcgacttcctcaatggccaccccgtcgcatcatgatacctagtagcagttgcagcaataatcgcggcgtatctgcatgccatcgcatatgcttggcgcactggttgggtttgaattttctcggaaaataaaagaaaatgtattcttcatgcgtcttgtttgactgatttggggatgctccctgtatctcgactcgatgatgtgggagcaatttgcttcgactcatctgattggggaaatatgttcgtggctactctgattgaagtcaaatctactgtaaacgtaaaagcacggaggctccaagagaatcatcgacatattaaacttcactctatctctactactatatctctcgttatatctct

SEQ ID NO: 94958 - DNA, 1776 bp, Zea Mays
gtcactaggcactagccacccgacctgcctgtaggctgtagctgtctcctatatgctgcgaccctagcctgccttgtcttcttcatcaatcatcaccgcaagcgtgcgcgcaacccagctcccaccgacgactgcaccggccgtcgctgccgcgctacttcggccccttttccggcgacgagcaccaccaggtcatgacaggtccatgcagagtaggaaggcaccttttcgtcactcgaacctgttgcttgacctgcaagtgtcgggcggtgcacctgtgcccttgttgccgcgatgcagattatgtgggttttgagttggacagctgatggagtgcaaatctctggcctgccaggtagctgctaatggagattgacagcctcagagaaggatttgatcgagttgctgagaaacgttcattatcttctgctaaagctctggaagttgttgatcaaatagtgaatgaaattgagcaggctattgtgaagctgcagatgatgaatacagattctactggaaatgttgaccacccatccatccttgcagaactgaaagctaagctcaatgaaatggcaccactaaaccagcttgaaggcagccaaaaggagctcaatgttgctctgagcaaatatctcaaactccttgagaagtctttcaatccagatatatctaaggcatacagaaatgtggattttgaggtccatacagtaaacaatatcatagcgaatcatttctaccgccaaggcctctttgatcttggtgacatgtttgtccatgagtgtggggaactaggcggagcttccttgaagctaccgtttcaggagatgtatgctatccttgaagccatgaaagcgagaaacctcgagcctgctctcagttgggctgccaaaaaccatgatcagctgttgcagaatgggtctatgctggagttcaagctttatcagcttcagtttgttgaaatattgtccaaaggcagtaggggtgaggccaaagatgaggctcttttatatgctaggactcacttggtcccctttgcagccgtgcacaaggaagaattccagaagctaatggcttgccttctatgggttggccggctcgatcaatccccatattctgagttaatgtcatccgcgcattgggagaagctagctgaggagctcacccatcaattctgtagccttctgggccagtcgagggagagcccgctgagtgttgcagtgtcagctggttttcaaggactaccaactctgctgaagctgacgcaagtcatggctgcgaagaagcaggagtggcaagttatgaagcagcttcctgtccccatagacatcgggccagaattccagtatcattctgtctttgtgtgcccggtgctcagggagcagtccagtgacgagaatcccccaatgcggatgccttgtggacatgttgtctccaagcagtccatcatgaagctgtcgaaaagcagctcgagggccttcaagtgcccctactgcccctcggaggctatggcgtcgcattgcaagcagctgcatttctagatgtgttaatcttttctggctgcgcaaaactgcaaacctgttggtacatgtttcccctcctgttccatgttgcaccagtccaataactgtctctctgtaatataaacatctacgtccggataaacatgtagtttcgtctgtattactgatatgtacagttgcatctttgatctttcagtgtgttgcttaagtctcttctggagattaaaggaattcgaaagtgttggtggacaagtgg

SEQ ID NO: 94959 - DNA, 1766 bp, Zea Mays
gtcactaggcactagccacccgacctgcctgtaggctgtagctgtctcctatatgctgcgaccctagcctgccttgtcttcttcatcaatcatcaccgcaagcgtgcgcgcaacccagctcccaccgacgactgcaccggccgtcgctgccgcgctacttcggccccttttccggcgacgagcaccaccaggtccatgcagagtaggaaggcaccttttcgtcactcgaacctgttgcttgacctgcaagtgtcgggcggtgcacctgtgcccttgttgccgcgatgcagattatgtgggttttgagttggacagctgatggagtgcaaatctctggcctgccaggtagctgctaatggagattgacagcctcagagaaggatttgatcgagttgctgagaaacgttcattatcttctgctaaagctctggaagttgttgatcaaatagtgaatgaaattgagcaggctattgtgaagctgcagatgatgaatacagattctactggaaatgttgaccacccatccatccttgcagaactgaaagctaagctcaatgaaatggcaccactaaaccagcttgaaggcagccaaaaggagctcaatgttgctctgagcaaatatctcaaactccttgagaagtctttcaatccagatatatctaaggcatacagaaatgtggattttgaggtccatacagtaaacaatatcatagcgaatcatttctaccgccaaggcctctttgatcttggtgacatgtttgtccatgagtgtggggaactaggcggagcttccttgaagctaccgtttcaggagatgtatgctatccttgaagccatgaaagcgagaaacctcgagcctgctctcagttgggctgccaaaaaccatgatcagctgttgcagaatgggtctatgctggagttcaagctttatcagcttcagtttgttgaaatattgtccaaaggcagtaggggtgaggccaaagatgaggctcttttatatgctaggactcacttggtcccctttgcagccgtgcacaaggaagaattccagaagctaatggcttgccttctatgggttggccggctcgatcaatccccatattctgagttaatgtcatccgcgcattgggagaagctagctgaggagctcacccatcaattctgtagccttctgggccagtcgagggagagcccgctgagtgttgcagtgtcagctggttttcaaggactaccaactctgctgaagctgacgcaagtcatggctgcgaagaagcaggagtggcaagttatgaagcagcttcctgtccccatagacatcgggccagaattccagtatcattctgtctttgtgtgcccggtgctcagggagcagtccagtgacgagaatcccccaatgcggatgccttgtggacatgttgtctccaagcagtccatcatgaagctgtcgaaaagcagctcgagggccttcaagtgcccctactgcccctcggaggctatggcgtcgcattgcaagcagctgcatttctagatgtgttaatcttttctggctgcgcaaaactgcaaacctgttggtacatgtttcccctcctgttccatgttgcaccagtccaataactgtctctctgtaatataaacatctacgtccggataaacatgtagtttcgtctgtattactgatatgtacagttgcatctttgatctttcagtgtgttgcttaagtctcttctggagattaaaggaattcgaaagtgttggtggacaagtgg

SEQ ID NO: 94960 - DNA, 1716 bp, Zea Mays
gtcactaggcactagccacccgacctgcctgtaggctgtagctgtctcctatatgctgcgaccctagcctgccttgtcttcttcatcaatcatcaccgcaagcgtgcgcgcaacccagctcccaccgacgactgcaccggccgtcgctgccgcgctacttcggccccttttccggcgacgagcaccaccagaccatataagttgctatcctatctgctgacgaggtcggtcatgcattgggctagcttccatgttcattttgatccttttcaagcatcatttgtaattcttaaaggtagctgctaatggagattgacagcctcagagaaggatttgatcgagttgctgagaaacgttcattatcttctgctaaagctctggaagttgttgatcaaatagtgaatgaaattgagcaggctattgtgaagctgcagatgatgaatacagattctactggaaatgttgaccacccatccatccttgcagaactgaaagctaagctcaatgaaatggcaccactaaaccagcttgaaggcagccaaaaggagctcaatgttgctctgagcaaatatctcaaactccttgagaagtctttcaatccagatatatctaaggcatacagaaatgtggattttgaggtccatacagtaaacaatatcatagcgaatcatttctaccgccaaggcctctttgatcttggtgacatgtttgtccatgagtgtggggaactaggcggagcttccttgaagctaccgtttcaggagatgtatgctatccttgaagccatgaaagcgagaaacctcgagcctgctctcagttgggctgccaaaaaccatgatcagctgttgcagaatgggtctatgctggagttcaagctttatcagcttcagtttgttgaaatattgtccaaaggcagtaggggtgaggccaaagatgaggctcttttatatgctaggactcacttggtcccctttgcagccgtgcacaaggaagaattccagaagctaatggcttgccttctatgggttggccggctcgatcaatccccatattctgagttaatgtcatccgcgcattgggagaagctagctgaggagctcacccatcaattctgtagccttctgggccagtcgagggagagcccgctgagtgttgcagtgtcagctggttttcaaggactaccaactctgctgaagctgacgcaagtcatggctgcgaagaagcaggagtggcaagttatgaagcagcttcctgtccccatagacatcgggccagaattccagtatcattctgtctttgtgtgcccggtgctcagggagcagtccagtgacgagaatcccccaatgcggatgccttgtggacatgttgtctccaagcagtccatcatgaagctgtcgaaaagcagctcgagggccttcaagtgcccctactgcccctcggaggctatggcgtcgcattgcaagcagctgcatttctagatgtgttaatcttttctggctgcgcaaaactgcaaacctgttggtacatgtttcccctcctgttccatgttgcaccagtccaataactgtctctctgtaatataaacatctacgtccggataaacatgtagtttcgtctgtattactgatatgtacagttgcatctttgatctttcagtgtgttgcttaagtctcttctggagattaaaggaattcgaaagtgttggtggacaagtgg

SEQ ID NO: 94961 - DNA, 1612 bp, Zea Mays
gtcactaggcactagccacccgacctgcctgtaggctgtagctgtctcctatatgctgcgaccctagcctgccttgtcttcttcatcaatcatcaccgcaagcgtgcgcgcaacccagctcccaccgacgactgcaccggccgtcgctgccgcgctacttcggccccttttccggcgacgagcaccaccaggtagctgctaatggagattgacagcctcagagaaggatttgatcgagttgctgagaaacgttcattatcttctgctaaagctctggaagttgttgatcaaatagtgaatgaaattgagcaggctattgtgaagctgcagatgatgaatacagattctactggaaatgttgaccacccatccatccttgcagaactgaaagctaagctcaatgaaatggcaccactaaaccagcttgaaggcagccaaaaggagctcaatgttgctctgagcaaatatctcaaactccttgagaagtctttcaatccagatatatctaaggcatacagaaatgtggattttgaggtccatacagtaaacaatatcatagcgaatcatttctaccgccaaggcctctttgatcttggtgacatgtttgtccatgagtgtggggaactaggcggagcttccttgaagctaccgtttcaggagatgtatgctatccttgaagccatgaaagcgagaaacctcgagcctgctctcagttgggctgccaaaaaccatgatcagctgttgcagaatgggtctatgctggagttcaagctttatcagcttcagtttgttgaaatattgtccaaaggcagtaggggtgaggccaaagatgaggctcttttatatgctaggactcacttggtcccctttgcagccgtgcacaaggaagaattccagaagctaatggcttgccttctatgggttggccggctcgatcaatccccatattctgagttaatgtcatccgcgcattgggagaagctagctgaggagctcacccatcaattctgtagccttctgggccagtcgagggagagcccgctgagtgttgcagtgtcagctggttttcaaggactaccaactctgctgaagctgacgcaagtcatggctgcgaagaagcaggagtggcaagttatgaagcagcttcctgtccccatagacatcgggccagaattccagtatcattctgtctttgtgtgcccggtgctcagggagcagtccagtgacgagaatcccccaatgcggatgccttgtggacatgttgtctccaagcagtccatcatgaagctgtcgaaaagcagctcgagggccttcaagtgcccctactgcccctcggaggctatggcgtcgcattgcaagcagctgcatttctagatgtgttaatcttttctggctgcgcaaaactgcaaacctgttggtacatgtttcccctcctgttccatgttgcaccagtccaataactgtctctctgtaatataaacatctacgtccggataaacatgtagtttcgtctgtattactgatatgtacagttgcatctttgatctttcagtgtgttgcttaagtctcttctggagattaaaggaattcgaaagtgttggtggacaagtgg

SEQ ID NO: 94962 - DNA, 1248 bp, Zea Mays
atggagattgacagcctcagagaaggatttgatcgagttgctgagaaacgttcattatcttctgctaaagctctggaagttgttgatcaaatagtgaatgaaattgagcaggctattgtgaagctgcagatgatgaatacagattctactggaaatgttgaccacccatccatccttgcagaactgaaagctaagctcaatgaaatggcaccactaaaccagcttgaaggcagccaaaaggagctcaatgttgctctgagcaaatatctcaaactccttgagaagtctttcaatccagatatatctaaggcatacagaaatgtggattttgaggtccatacagtaaacaatatcatagcgaatcatttctaccgccaaggcctctttgatcttggtgacatgtttgtccatgagtgtggggaactaggcggagcttccttgaagctaccgtttcaggagatgtatgctatccttgaagccatgaaagcgagaaacctcgagcctgctctcagttgggctgccaaaaaccatgatcagctgttgcagaatgggtctatgctggagttcaagctttatcagcttcagtttgttgaaatattgtccaaaggcagtaggggtgaggccaaagatgaggctcttttatatgctaggactcacttggtcccctttgcagccgtgcacaaggaagaattccagaagctaatggcttgccttctatgggttggccggctcgatcaatccccatattctgagttaatgtcatccgcgcattgggagaagctagctgaggagctcacccatcaattctgtagccttctgggccagtcgagggagagcccgctgagtgttgcagtgtcagctggttttcaaggactaccaactctgctgaagctgacgcaagtcatggctgcgaagaagcaggagtggcaagttatgaagcagcttcctgtccccatagacatcgggccagaattccagtatcattctgtctttgtgtgcccggtgctcagggagcagtccagtgacgagaatcccccaatgcggatgccttgtggacatgttgtctccaagcagtccatcatgaagctgtcgaaaagcagctcgagggccttcaagtgcccctactgcccctcggaggctatggcgtcgcattgcaagcagctgcatttctagatgtgttaatcttttctggctgcgcaaaactgcaaacctgttgtgtgttgcttaagtctcttctggagattaaag

SEQ ID NO: 94963 - DNA, 558 bp, Zea Mays
gtcactaggcactagccacccgacctgcctgtaggctgtagctgtctcctatatgctgcgaccctagcctgccttgtcttcttcatcaatcatcaccgcaagcgtgcgcgcaacccagctcccaccgacgactgcaccggccgtcgctgccgcgctacttcggccccttttccggcgacgagcaccaccaggaatcggttggtgtttatcgctgttcttaaaggtgttgttccctggccatcttagtgtcaaagcagtgaagggtgtagaagaaagaagtgtgacagggaatcaaaggagggctagtcatcctgtcggtggcagtagggtatggtgtcaacagaaaaatgagtgatgttctgactgctggggtgaggaggggagtggtggtgtggtagcactgtatcacattgaggtaaaagcgctgcatgaaggtcggggcctacatatctactcttggtgaagggtgtatttgatagctacagctctccaagagtatgcccaggacactcacacaagacacaaacggacattggatgctggtggaacgactgcagc

SEQ ID NO: 94964 - DNA, 1133 bp, Zea Mays
ataccgaacccggacgcgcctcgtcgtagcgaggcgatgaccagcgcagctgcagcatcctttcttgccataaaaaaccccgcgactctggtcagagagggagagcgagctagaagcctagaaccggcaggaagccagacgagcggagccaccacgcgtgagctgcaacgtaggcggcgggggcatggcgggccggctggcggggcgaggcgggaggccgctgctaggcggaagtggcgggggcgggaagcggggcgggaggccgtcgatggcggtcgtggcggcgctgctgctggcgtgcgcggcgctgctcctgctcctggccctcggcgcgctatcgctgcccggggcctccgacggctccgggggacgcggtgcggggctctcgctctcgcgcccccgctcgcgcttccgcagatccgccttcgactcggggctagagacgcgtggggagaagggggagccgtggacggaggtgctgtcgtgggagccccgcgcgttcgtgtaccacaacttcctctccaaggaagaatgtgaccatttgatttcactggcaaagcctcatatgaagaagtcaacagtagttgattcagcaactggaggcagcaaggacagcagggtgcggacaagttcaggaatgtttcttagaagagggcaggacaaaattattcggacaattgagaaaaggatagcagattacaccttcatacctgtagagcagggtgagggtcttcaagttctccactatgaagttgggcagaagtatgaacctcactttgattacttccatgatgattacaacaccaagaatggaggccagcgtatagcaactcttcttatgtatctttcggatgttgaagatggtggcgagactgtgttcccttcgtcgacaacaaacagcagctcgtcaccattttataatgagctgtctgaatgtgcaaagggtggtctatctgttaaaccaaagatgggagatgcgcttctgttctggagcatgaagcctgatgggtccctagatcccacaagcctgcatggtggatgcccagttataaaaggcaacaaatggtcatcgacgaagtggatgcgtgttcatgagtacaaagtttagatacaaaaagacacagacctgaggt

SEQ ID NO: 94965 - DNA, 1128 bp, Zea Mays
ataccgaacccggacgcgcctcgtcgtagcgaggcgatgaccagcgcagctgcagcatcctttcttgccataaaaaaccccgcgactctggtcagagagggagagcgagctagaagcctagaaccggcaggaagccagacgagcggagccaccacgcgtgagctgcaacgtaggcggcgggggcatggcgggccggctggcggggcgaggcgggaggccgctgctaggcggaagtggcgggggcgggaagcggggcgggaggccgtcgatggcggtcgtggcggcgctgctgctggcgtgcgcggcgctgctcctgctcctggccctcggcgcgctatcgctgcccggggcctccgacggctccgggggacgcggtgcggggctctcgctctcgcgcccccgctcgcgcttccgcagatccgccttcgactcggggctagagacgcgtggggagaagggggagccgtggacggaggtgctgtcgtgggagccccgcgcgttcgtgtaccacaacttcctctccaaggaagaatgtgaccatttgatttcactggcaaagcctcatatgaagaagtcaacagtagttgattcagcaactggaggcagcaaggacagcagggtgcggacaagttcaggaatgtttcttagaagagggcaggacaaaattattcggacaattgagaaaaggatagcagattacaccttcatacctgtagagcagggtgagggtcttcaagttctccactatgaagttgggcagaagtatgaacctcactttgattacttccatgatgattacaacaccaagaatggaggccagcgtatagcaactcttcttatgtatctatgttgaagatggtggcgagactgtgttcccttcgtcgacaacaaacagcagctcgtcaccattttataatgagctgtctgaatgtgcaaagggtggtctatctgttaaaccaaagatgggagatgcgcttctgttctggagcatgaagcctgatgggtccctagatcccacaagcctgcatggtggatgcccagttataaaaggcaacaaatggtcatcgacgaagtggatgcgtgttcatgagtacaaagtttagatacaaaaagacacagacctgaggt

SEQ ID NO: 94966 - DNA, 1430 bp, Zea Mays
atgactttcctgacttcgtcgccgaggctgaggcctccgacggcgaggggcaccgccccgcagggcatcggggcctgctctcgcttccgtacaccaggctctccgaccacttcgtccgcgccgcgcgccgcctcaaggacaaggtggttgaggagacgtgggtgaaagccggacggaaggtgacggactacacgctctacacgggctctctcgggacagcgctgctgctgttcaagtccttccaggtcactggagaccgcggggacctcgccctcgccgctgatatcgtccgcgcgtgcgatgatgcatcgcggggcctgccgttcttgacattcatatgcgggagggcgggtgtctgcgctcttggggcggtgattgccaagcattgcgatgatcagctgagggtcactcagtatctgagctcctttgatgagataacaatcaccgagaaagttccaaatgagttgctgtatggaagggcaggctatctgtgggcttgtttgttcttgaataagcatctcagcgagaagacgatccctctcgatcacattaattctgtggcgaaggacattattaatgagggaagaggttttgcaagcaaggggagtagccctctgatgtacgaatggcatgggaagaaatactggggggctgcgcatggtcttgctggaatcatgcacgtgctaatgcacaccgaactgaaaccagatgagcaggatgatgtaaagaacaccctgcggtatatgatcaagaacaagtttcctagtggcaattatccctcaagtgaaggcaatgaatcagatcacttggtgcactggtgtcatggtgccccaggtgttgctcttacccttgctaaagcatatgaggtcttccatgatgattatttcgagcaatcagctgcagaggctgctgaggttgtctggaaccgagggcttctgaagagagtcggaatatgccacggtgtaagcgggaatgcctatgcgtttctctcactctacaggctaaccggtaatgttgagtacctctaccgggcaaaggcttttgcctgctttcttctggagaaagctgatcagttgatagccgagggggccatgcatggtggtgatcgcccgttttcactgtttgaagggaaagctgggatgtcatacctcctcttggacatggttgatccatctgaatcaaggttccctgcgtatgaactttgagatatactattaccctgcgacttgtgaggctgttcgatgatccatcagtcacgaaaactctgtttgtattttctcgtctagtatgtgatgtgtgcttagacctcggtggtctgttgtgtttgtagatttggcgttcgtgatgttgcaaacttgaatcttctgtgaagtatgtgtgaccatcacattctgctaaatagattataatctcaaacaaacaccccctaa

SEQ ID NO: 94967 - DNA, 1651 bp, Zea Mays
agacgtgcagccagcgccggggcgtccagctaactcgcaaacatttttataacccgagcacgcgtcagacatgggaaacggcggtgggactggcgataagacgaagacgaaggcgacaggagggctcaccggtcgcgaatcctcctcctccagccacgcctcgaaacggcgtcggggcctgcgcggcgagtccatggctgatcgcttcattcccaatgactttcctgacttcgtcgccgaggctgaggcctccgacggcgaggggcaccgccccgcagggcatcggggcctgctctcgcttccgtacaccaggctctccgaccacttcgtccgcgccgcgcgccgcctcaaggacaaggtggttgaggagacgtgggtgaaagccggacggaaggtgacggactacacgctctacacgggctctctcgggacagcgctgctgctgttcaagtccttccaggtcactggagaccgcggggacctcgccctcgccgctgatatcgtccgcgcgtgcgatgatgcatcgcggggcctgccgcgcaggttcttgacattcatatgcgggagggcgggtgtctgcgctcttggggcggtgattgccaagcattgcgatgatcagctgagggtcactcagtatctgagctcctttgatgagataacaatcaccgagaaagttccaaatgagttgctgtatggaagggcaggctatctgtgggcttgtttgttcttgaataagcatctcagcgagaagacgatccctctcgatcacattaattctgtggcgaaggacattattaatgagggaagaggttttgcaagcaaggggagtagccctctgatgtacgaatggcatgggaagaaatactggggggctgcgcatggtcttgctggaatcatgcacgtgctaatgcacaccgaactgaaaccagatgagcaggatgatgtaaagaacaccctgcggtatatgatcaagaacaagtttcctagtggcaattatccctcaagtgaaggcaatgaatcagatcacttggtgcactggtgtcatggtgccccaggtgttgctcttacccttgctaaagcatatgaggtcttccatgatgattatttcgagcaatcagctgcagaggctgctgaggttgtctggaaccgagggcttctgaagagagtcggaatatgccacggtgtaagcgggaatgcctatgcgtttctctcactctacaggctaaccggtaatgttgagtacctctaccgggcaaaggcttttgcctgctttcttctggagaaagctgatcagttgatagccgagggggccatgcatggtggtgatcgcccgttttcactgtttgaagggaaagctgggatgtcatacctcctcttggacatggttgatccatctgaatcaaggttccctgcgtatgaactttgagatatactattaccctgcgacttgtgaggctgttcgatgatccatcagtcacgaaaactctgtttgtattttctcgtctagtatgtgatgtgtgcttagacctcggtggtctgttgtgtttgtagatttggcgttcgtgatgttgcaaacttgaatcttctgtgaagtatgtgtgaccatcacattctgctaaatagattataatctcaaacaaacaccccctaa

SEQ ID NO: 94968 - DNA, 1645 bp, Zea Mays
agacgtgcagccagcgccggggcgtccagctaactcgcaaacatttttataacccgagcacgcgtcagacatgggaaacggcggtgggactggcgataagacgaagacgaaggcgacaggagggctcaccggtcgcgaatcctcctcctccagccacgcctcgaaacggcgtcggggcctgcgcggcgagtccatggctgatcgcttcattcccaatgactttcctgacttcgtcgccgaggctgaggcctccgacggcgaggggcaccgccccgcagggcatcggggcctgctctcgcttccgtacaccaggctctccgaccacttcgtccgcgccgcgcgccgcctcaaggacaaggtggttgaggagacgtgggtgaaagccggacggaaggtgacggactacacgctctacacgggctctctcgggacagcgctgctgctgttcaagtccttccaggtcactggagaccgcggggacctcgccctcgccgctgatatcgtccgcgcgtgcgatgatgcatcgcggggcctgccgttcttgacattcatatgcgggagggcgggtgtctgcgctcttggggcggtgattgccaagcattgcgatgatcagctgagggtcactcagtatctgagctcctttgatgagataacaatcaccgagaaagttccaaatgagttgctgtatggaagggcaggctatctgtgggcttgtttgttcttgaataagcatctcagcgagaagacgatccctctcgatcacattaattctgtggcgaaggacattattaatgagggaagaggttttgcaagcaaggggagtagccctctgatgtacgaatggcatgggaagaaatactggggggctgcgcatggtcttgctggaatcatgcacgtgctaatgcacaccgaactgaaaccagatgagcaggatgatgtaaagaacaccctgcggtatatgatcaagaacaagtttcctagtggcaattatccctcaagtgaaggcaatgaatcagatcacttggtgcactggtgtcatggtgccccaggtgttgctcttacccttgctaaagcatatgaggtcttccatgatgattatttcgagcaatcagctgcagaggctgctgaggttgtctggaaccgagggcttctgaagagagtcggaatatgccacggtgtaagcgggaatgcctatgcgtttctctcactctacaggctaaccggtaatgttgagtacctctaccgggcaaaggcttttgcctgctttcttctggagaaagctgatcagttgatagccgagggggccatgcatggtggtgatcgcccgttttcactgtttgaagggaaagctgggatgtcatacctcctcttggacatggttgatccatctgaatcaaggttccctgcgtatgaactttgagatatactattaccctgcgacttgtgaggctgttcgatgatccatcagtcacgaaaactctgtttgtattttctcgtctagtatgtgatgtgtgcttagacctcggtggtctgttgtgtttgtagatttggcgttcgtgatgttgcaaacttgaatcttctgtgaagtatgtgtgaccatcacattctgctaaatagattataatctcaaacaaacaccccctaa

SEQ ID NO: 94969 - DNA, 1061 bp, Zea Mays
agacgtgcagccagcgccggggcgtccagctaactcgcaaacatttttataacccgagcacgcgtcagacatgggaaacggcggtgggactggcgataagacgaagacgaaggcgacaggagggctcaccggtcgcgaatcctcctcctccagccacgcctcgaaacggcgtcggggcctgcgcggcgagtccatggctgatcgcttcattcccaatgactttcctgacttcgtcgccgaggctgaggcctccgacggcgaggggcaccgccccgcagggcatcggggcctgctctcgcttccgtacaccaggctctccgaccacttcgtccgcgccgcgcgccgcctcaaggacaaggtggttgaggagacgtgggtgaaagccggacggaaggtgacggactacacgctctacacgggctctctcgggacagcgctgctgctgttcaagtccttccaggtcactggagaccgcggggacctcgccctcgccgctgatatcgtccgcgcgtgcgatgatgcatcgcggggcctgccgtaagattaccgagcaagcccctctttcttgttcaagcttggtgctggttgctttggttggatcttcctgttacttagttcataattatatggaggtgtgtggcctggttgtgtaaggcgcaggttcttgacattcatatgcgggagggcgggtgtctgcgctcttggggcggtgattgccaagcattgcgatgatcagctgagggtcactcagtatctgagctcctttgatgaggtgaggcttctgacaaggatagttcctgggtttaggattcaatttgttaactttgtttgtggaatccactgttgccacgtgactgtagaacaacagatgtacatcctaatgttgtatactcagctgtcctttgtgacgttgtagataacaatcaccgagaaagttccaaatgagttgctgtatggaagggcaggctatctgtgggcttgtttgttcttgaataagcatctcagcgagaagacgatccctctcgatcacattgtatgttaatgctgtagttctgttatga

SEQ ID NO: 94970 - DNA, 393 bp, Zea Mays
atgtacctcggcctaaggaccttcacggccgagtccgtcgccggggtcggcgtcagccaggacgcttgcccggtgctcgggctcatcgacgtgggaagcgtcgtggtgatcgaaggatcagtcgtcgagcagcagcagctggcggatgaaagcgtacatacagggagcgaggccgcgtctgtgagcgagggaggcggcgacagcgagagggtcgtggactgcgcgtgcggagcggatgacgacgacggggagcgcatggcgtgctgcgacatctgcgaggcgtggcagcacacccggtgcgcggggatcaaggacaccgacgacgccccgcacgtcttcgtctgcaaccgctgcgacaacgacgttctgtcattccctcccttgagctgttag

SEQ ID NO: 94971 - DNA, 2184 bp, Zea Mays
atgatcgtgcgcacgtacaggcgtagatcccgttccatctccgaaggcgggggcggggtctcgtcctcgcaggaggcgttcgacttcgatgccgacgtcgacgtgctgggatcgtcggcctcgcagccgctcccgccatcgcaggaatcctcctcgatgtgggatttcgacgaggacccgcctccgtccccgccgcggcccgggaaggaggggaggcgaagcgggcggggcggagccagaagaggaggagggttggagctcgcggaagctcccgcgatggcgccgacggtgacgctgatggaggcggaggagtacggagagatgatggagagcgtggacgacgtcacgttcgcgctcgacgggctccgccccgccgcgcagaagcggacgcggcgggccagcctgctcgcgctgctcgggatctgcgactccgccgagcgccgccgcgtgcttcggtcccaaggattggtacagcaaattatcgatgctattttggttctggacattgatgatcctccctgcgctattgctgcaggagctcttttatttgttttggcaagtgatgtccaagacaataatttgctgtcttcagaaacttgtgtccatttcctcctcaaattattaaaccctccggtgaatgttgttgatgccaaagcaccatcaataggttccaaacttcttggaatcagtaaatttcagatgcttaacggttccaataaggatgtggactcttgttcagaggacatacttttaaaagttgaagaaatcctcttaagctgcaaagagatcaaaccagcagacagggattataagagaacaacaaggccggaactatgttcaaagtggcttgctttgttgacaatggaaaaggcgtgcttgtctgctgttgcattagaggatacatctgacatggtcttagaactcggaggaaatttcaaagaaacattaaggcagttgggtggccttgatgatatttttaatgtcatggtgaattgccattcagaattggagaaacttgtaaaggatgcctccactacggttgtggagggaaaagaaggtgctcctctacaaagcaccacactcctcttgaaatgtttgaaaattttggagaatgccacatttctaagtgacaacaacaagacccatttgctcagcatgagtcgaaaattgagccctaaatgccgctcactttcttttgttggtgtcattctcaacattgttgagttactatcagcagacagtagaggtttgagcttattgaatcatcattgcaagtgcaataactcaaagaaaaagagcattttactgaaccgaaggtgccagtattgttcatccaccaaatcagaagcttctcatgttaccctctcttctagtagtgatgtcagtcagtcagaaaggatactcaattgctcatctttttcaagcaatgggacatcaagtggttcatttggagtgaaacatattaatggtgctagtttgaagctcaatgtaagaatggatcgttctaaagcttatccagtcagaggctcaactggttggatttctatgaaagcacaaacttctgattggaactccagagaaatggcaaaaaagcggcgcctatctgaaaatgtacgcactgatttgagtaatggtggtgatgatccatttgcatttgatgatattgatcaagaaccttcaaattgggatctatttggtccaaaaaggaaatcaccacagaagcgagcgaaaagaactaatggagaagtgttggatgattgtggaactgcattaatgggaagtcctaaattatgtcaacctgaagatatttatcagtcagttgcaacttctggttctaaggttgtagatgagtccaatcttttggaggattgccttttggcgtcagttaaggttcttatgaacttggcaaatgacaacccgtctggttgcgaacagatcgcgtcatgtggcggacttaataacatggcctccttgatcattaaacatttcccctcatttgatttctccatgaacagtaacaatcaaatgaatgaaagtgtgtcctctggtgatccgttgtcttcccagaacagcaagtcaccccaaatcaaaactaagcagttgcgggactatgaacttgattttctagttgccatattgggattgcttgtgaaccttgtggagaaggatagccttaataggtag

SEQ ID NO: 94972 - DNA, 1541 bp, Zea Mays
cgccttcccaccccaccccacccccacgcgaagaggaagaggaagaacccagccaaatcctcagtcctcaggctgctcacagttcgtgctatccgctcgcgctcccggtagtctgcctgctcggcaattcggcatggcgctccaggccgcgacgtccttcctcccctcggccctctcggcgcgcaaggaggggtcgtcggtgaaggactcggcgttcttgggtgtccatctcgcggacgatggcctcaagctggagaccgctgctctgggcctacgcaccaagagggtgatcacgtcggtggccatccgcgcgcaggcggcagcggtgtcctcaccatcagtaacccccgcgtcgccgtccggcaagaagacgctccgcaagggcacggcgatcataaccggcgcgtcgtccggtctcggcctggccacggcgaaggccctggcggagaccggcaagtggcacgtcatcatggcctgccgcgattttctcaaggcgtcgcgcgcggccaaagcggccggcatggacaaggacagcttcaccgtcgtgcacctggacctcgcctccctcgacagcgtccgccagttcgtcaagaacgtgcgccagctggagatgcccgtcgacgtggtggtctgcaacgccgccgtgtaccagcccaccgccaaggagccgtcctacaccgccgacggcttcgagatgagcgtcggcgtcaaccacctcggccacttcctcctcgcccgcgagctcctcagcgacctccagtcctccgactatccctccaagcgcctcatcatcgtcggctccatcaccgggaacacgaacacgctggcggggaacgtgccgccgaaggcgaacctgggtgacctgcgcggcctcgccggcggcctcaacggcattggcggctccgcgatgatcgacggcggggagttcgacggggccaaggcatacaaggacagcaaggtgtgcaacatgctgacgatgcaggagttccaccgccggtaccacgaggagacgggcgtgaccttcgcgtcgctctaccccggctgcatcgccaccacgggcctgttccgcgagcacatcccgctgttccgcctgctcttcccgccattccagaagtacatcaccaaggggtacgtctccgaggaggaggccgggaagcggctgtcgcaggtcgtgagcgaccccagcctgaccaagtccggcgtgtactggagctggaacaagaactcggcgtccttcgagaaccagctctctgaggaggccagcgacgccgacaaggccaagaagctctgggagatcagcgagaagctcgtcggcttggcgtgacgacctgatgcccaccgtggccggcgccggcagccggtgacagttttttcctaggacatgttcgttacttgatctcagtcgacgcgtggtgcactcgtgtcagagtgacaggagaggaagtgtgtacactgtacacgtgtaggcatgtttggttgacttttttgttacgaggttttctgataatatagctgtggagagaatctaactataaaaaaaa

SEQ ID NO: 94973 - DNA, 1353 bp, Zea Mays
atgtatgtttcgcacgcagtacacgcacacatatataagtaggctggaacatactcctgtggtaataccgtaatagtaataacaaagctctagtagtagtacgcacttagcaggccccatcaagaccgggcatgccgtcttcgctccagtactgcaacgcgacgcagttggcctccgctcccgctcccgcccccgccgctccgagaccgagactgctgacatcgccgccagttcccggcggcggcggcggcggcgccgtggcagcgaccatttggtgccacgcgctcaggtcgatggcgtagccgcccccgcccacggccgcgtccggctggaactgcaccagctgccgcagcaagtcccctgggaacgtgtcggcgccgaggacgttccctccctgctgcgccggagccgcggccgcggccgaggcagaccctttcgcagcggcgccgcccttggcgccgcgcctgttcttgcggccgccgccgacgggcacgtcgcggagcgtgccgccctcggtccagtggcggcggcacgccttgcagaggtaccgtggctgctcgcggctgtagttgttgtagtagcagaacttggtgttggcggaccggcagcgcgggcactgccgcggcggcgggcgcggcagcggcgggtgccccgcgcccgcgttcctgctggctccctgcctcggaggcggaggcgccgccgcggcactcgtggcgttcgccacgccgccgccactggtggcaccgtatccctgtccctgccaggaacaggaacacaccgctagctagtcatcgcatgtgcatgcatgcatgtctgagtggaactgtggaagagatgtatcagagagtacgctacacgatcgacggatcaggacgtttgtggtactctttaaggtacgtacgtaccatggcaaagggaggcggcggcgccgccctagcagggatcaggtaagagaggtgcgacgaagcggaagaggaagaagaggtcagaaaggaggacggcatggttcgccgggcgccgcggcgacggccagggcagcttgttgttggcggcggagagggcggcgtcgaacggcgcgcgcttgctgcggtgggagtgggagtgccacggtgacgctctgcgcatgtcggtgccggacctgtgatgcgcccccccgctcacgactcctccagctcctggcctctctctagaggtagttagtgctctgctacgtacctccaaaacacagctgaaaggttaattaacagtttctctaagtacgaaatcctaggacgataccctgaatatgatgaagcagaaggatagcagctaggaacggaactgaggtgaaaaacgaaggccaccagccatgga

SEQ ID NO: 94974 - DNA, 848 bp, Zea Mays
gcttcgcatttgtccccgagccaagaagccaaactgcgaaagcatccgcgagaacacgcgctccgcacgtctgaaatccaagaccatcaccaacccaaagtcttgcgccttgcccggtccccgccttttcggagatcgcacccaatggccggctcaaccaaggtgctggccgccatcctgctcgtcgacctcgtcgccttcggcctcgccatcggcgcggtgcagagccgcccctcggcgaggctggagacggacgagaggcaggagtggacctactgcgtgtaccgcacggacgccgccacggcgctgggcggcgccgcgctcgcgctggtgttcgtgggacaggcggtggccgccgccgccagtcgctgcttctgctgcgggtccgtgctgcggcccggcggcgccagggcctgcgcgctcgtcctcttcatctcctcctgggtgacattcgtcatcgctgaggcgtgcttgctagctggtcttttgcaatccgcctaccacactggctaccggaaggtgtttttccagaacccgccggactgcgagacggtgcggaggggcacgttcggagccggcgctgcgtttgcccttttcacctgcgtgctcacctcggcctactactactgcttctccaaggcgcggatctactaccaccgcccggaagccgccatcggcatgactccgttgtaaacagatttaccggtctctctgcagtaacagttttgatagcaactatatatgtctgttaggtttttgcatatattgtgttgggctggtatgtgacagttttttcaggaccatgtatctgactgagttgaactcaatctctactaataattaagatc

SEQ ID NO: 94975 - DNA, 1567 bp, Zea Mays
gcttcgcatttgtccccgagccaagaagccaaactgcgaaagcatccgcgagaacacgcgctccgcacgtctgaaatccaagaccatcaccaacccaaagtcttgcgccttgcccggtccccgccttttcggagatcgcacccaatggccggctcaaccaaggtgctggccgccatcctgctcgtcgacctcgtcgccttcggcctcgccatcggcgcggtgcagagccgcccctcggcgaggctggagacggacgagaggcaggagtggacctactgcgtgtaccgcacggacgccgccacggcgctgggcggcgccgcgctcgcgctggtgttcgtgggacaggcggtggccgccgccgccagtcgctgcttctgctgcgggtccgtgctgcggcccggcggcgccagggcctgcgcgctcgtcctcttcatctcctcctggtctgattggacagaattggtcagaacagagaagaggtcatagcttatgtcattggcaataaagaagaccatcaaacttggttgccgtcttctaaatttactggtgttgaaaaaaagtgacctggtcaatgtaatgtttttaacgacatactgggtcaatgaagacttgagtaggtattcgctcagaaaactgcatgttctgacacaggtcgagaaaacccccgaacccctgccccacccatacacagcgacatcgaagcccatgtgagaacgaccacgaccggggctgagccttagacatgtgctttggcgtgggacagacgaggggatttttttaaccacggcctgaaatacgctcccacggggagtcgaacccagaacctgaggagggctactcagaccacctaaccaattcagctagaggccctttcgcgaaaactgcatgtttagatgtggggtctaggctatatctcttaggagtattctaagtgtgatctagtaatataaccattttccttaatttgtctgataaagatgagtagtaaaaactcatatcatttatgcctgcatgaactctaaactgtgcccacgtttaatttgtttgacaaaaatacagagcggtaaaaattcatatcatttatggctgcatgaactccaaactctgcctgtgtttaatttgtccgataaagatgtagagtaataaaattcataccatttatgcctgcatgaactccaaactttgcctgtgcttatgtttcatcaacatttataaatccttccagtgttttttgttttttgtttttgtgcgaaaagacctctagctgagttggttaggtggtctgagtagtatttcttagatcccgagtttgactcctgtgagagcgaattgtatgtgtggggcaggggtttggtgttttcctcgacctgcgtgagaaggtcttcttaattgtaatgctgttggtcttcttaattgtaatgctgttggtcttcttaattgtaatgctgctggggtggtcttaccctccgcaggttgagttttttttctcttttgtctttgatgaagtgaaactgttaagtactaataaactagccaggcatgtgggttgtactgatggcattcaagc

SEQ ID NO: 94976 - DNA, 1063 bp, Zea Mays
ttttggcccaaaatagaggactaggaggtagtgccgacagaggcacgagcgcctccctcgtcttcgttccgtctctccccacagggaaccgccgcccgtcgcctccagatacgtgcctccggcggaaaatcggtatcgagctcgctttgttcgagtgagtaacgcgcagcgactcctctcccaaccagattttgatggatttcgggcacgcgtggcacaggcacggatatgttagcggatcgggcggccggatcaccgccggcttgctccctctcctcatgattgggcgcgctcatatccctctttttttttttctgcgcacggagactaggttggctctccgtaggcttcccagatcctctccatcctgacctctttctctttgtgcagatcttctgtatagccagcaaggaggcctctccatctcctccgggaaggctgtgcagcaatggagaagtataacagcaagactcagttagcacccttgagagataccccatttgctctccgtggtgctcttggtagttcaagctcataccttgagcaagccaggggctacacgtcttcccctctagcagctctgcgaccaaagatgtcttctactactggaaatcgactcctgcactcgagttgccccctgtcatctcctgtagcaaaccgcccgctgtcgccccaccttcctctgaagaagccacagttcagcgcgactttctcaatctcgcatcgtatattcggtgtcgcgttgggagttgccatcgtatctgtccctctcgccaccaagttcagcctaatgtttggtgtctgagagcgatttgctgcgtctcaagagaaccatcattttccgtttctgtgtctgtttttcatcgtctcggttaccttgcgacacaactgtaggtgccgttggaataatatctttgccatgcttgcagacttgtgtaataagtaaataaacctataaaataccagtttaactgtttgaggagatttgcctcattatggatatacatgctatgaaagtcgattgtcatcgctaattgaaaaaaaaaatataagagacatgttc

SEQ ID NO: 94977 - DNA, 893 bp, Zea Mays
ttttggcccaaaatagaggactaggaggtagtgccgacagaggcacgagcgcctccctcgtcttcgttccgtctctccccacagggaaccgccgcccgtcgcctccagatacgtgcctccggcggaaaatcggtatcgagctcgctttgttcgagtgagtaacgcgcagcgactcctctcccaaccagattttgatggatttcgggcacgcgtggcacagatcttctgtatagccagcaaggaggcctctccatctcctccgggaaggctgtgcagcaatggagaagtataacagcaagactcagttagcacccttgagagataccccatttgctctccgtggtgctcttggtagttcaagctcataccttgagcaagccaggggctacacgtcttcccctctagcagctctgcgaccaaagatgtcttctactactggaaatcgactcctgcactcgagttgccccctgtcatctcctgtagcaaaccgcccgctgtcgccccaccttcctctgaagaagccacagttcagcgcgactttctcaatctcgcatcgtatattcggtgtcgcgttgggagttgccatcgtatctgtccctctcgccaccaagttcagcctaatgtttggtgtctgagagcgatttgctgcgtctcaagagaaccatcattttccgtttctgtgtctgtttttcatcgtctcggttaccttgcgacacaactgtaggtgccgttggaataatatctttgccatgcttgcagacttgtgtaataagtaaataaacctataaaataccagtttaactgtttgaggagatttgcctcattatggatatacatgctatgaaagtcgattgtcatcgctaattgaaaaaaaaaatataagagacatgttc

SEQ ID NO: 94978 - DNA, 871 bp, Zea Mays
ttttggcccaaaatagaggactaggaggtagtgccgacagaggcacgagcgcctccctcgtcttcgttccgtctctccccacagggaaccgccgcccgtcgcctccagatacgtgcctccggcggaaaatcggcacggatatgttagcggatcgggcggccggatcaccgccggcttgctccctctcctcatgattggatcttctgtatagccagcaaggaggcctctccatctcctccgggaaggctgtgcagcaatggagaagtataacagcaagactcagttagcacccttgagagataccccatttgctctccgtggtgctcttggtagttcaagctcataccttgagcaagccaggggctacacgtcttcccctctagcagctctgcgaccaaagatgtcttctactactggaaatcgactcctgcactcgagttgccccctgtcatctcctgtagcaaaccgcccgctgtcgccccaccttcctctgaagaagccacagttcagcgcgactttctcaatctcgcatcgtatattcggtgtcgcgttgggagttgccatcgtatctgtccctctcgccaccaagttcagcctaatgtttggtgtctgagagcgatttgctgcgtctcaagagaaccatcattttccgtttctgtgtctgtttttcatcgtctcggttaccttgcgacacaactgtaggtgccgttggaataatatctttgccatgcttgcagacttgtgtaataagtaaataaacctataaaataccagtttaactgtttgaggagatttgcctcattatggatatacatgctatgaaagtcgattgtcatcgctaattgaaaaaaaaaatataagagacatgttc

SEQ ID NO: 94979 - DNA, 838 bp, Zea Mays
ttttggcccaaaatagaggactaggaggtagtgccgacagaggcacgagcgcctccctcgtcttcgttccgtctctccccacagggaaccgccgcccgtcgcctccagatacgtgcctccggcggaaaatcggtatcgagctcgctttgttcgaatcttctgtatagccagcaaggaggcctctccatctcctccgggaagctattgtgcaggctgtgcagcaatggagaagtataacagcaagactcagttagcacccttgagagataccccatttgctctccgtggtgctcttggtagttcaagctcataccttgagcaagccaggggctacacgtcttcccctctagcagctctgcgaccaaagatgtcttctactactggaaatcgactcctgcactcgagttgccccctgtcatctcctgtagcaaaccgcccgctgtcgccccaccttcctctgaagaagccacagttcagcgcgactttctcaatctcgcatcgtatattcggtgtcgcgttgggagttgccatcgtatctgtccctctcgccaccaagttcagcctaatgtttggtgtctgagagcgatttgctgcgtctcaagagaaccatcattttccgtttctgtgtctgtttttcatcgtctcggttaccttgcgacacaactgtaggtgccgttggaataatatctttgccatgcttgcagacttgtgtaataagtaaataaacctataaaataccagtttaactgtttgaggagatttgcctcattatggatatacatgctatgaaagtcgattgtcatcgctaattgaaaaaaaaaatataagagacatgttc

SEQ ID NO: 94980 - DNA, 827 bp, Zea Mays
ttttggcccaaaatagaggactaggaggtagtgccgacagaggcacgagcgcctccctcgtcttcgttccgtctctccccacagggaaccgccgcccgtcgcctccagatacgtgcctccggcggaaaatcggtatcgagctcgctttgttcgaatcttctgtatagccagcaaggaggcctctccatctcctccgggaaggctgtgcagcaatggagaagtataacagcaagactcagttagcacccttgagagataccccatttgctctccgtggtgctcttggtagttcaagctcataccttgagcaagccaggggctacacgtcttcccctctagcagctctgcgaccaaagatgtcttctactactggaaatcgactcctgcactcgagttgccccctgtcatctcctgtagcaaaccgcccgctgtcgccccaccttcctctgaagaagccacagttcagcgcgactttctcaatctcgcatcgtatattcggtgtcgcgttgggagttgccatcgtatctgtccctctcgccaccaagttcagcctaatgtttggtgtctgagagcgatttgctgcgtctcaagagaaccatcattttccgtttctgtgtctgtttttcatcgtctcggttaccttgcgacacaactgtaggtgccgttggaataatatctttgccatgcttgcagacttgtgtaataagtaaataaacctataaaataccagtttaactgtttgaggagatttgcctcattatggatatacatgctatgaaagtcgattgtcatcgctaattgaaaaaaaaaatataagagacatgttc

SEQ ID NO: 94981 - DNA, 1011 bp, Zea Mays
caaaatagaggactaggaggtagtgccgacagaggcacgagcgcctccctcgtcttcgttccgtctctccccacagggaaccgccgcccgtcgcctccagatacgtgcctccggcggaaaatcggtatcgagctcgctttgttcgaatcttctgtatagccagcaaggaggcctctccatctcctccgggaaggctgtgcagcaatggagaagtataacagcaagactcagttagcacccttgagagataccccatttgctctccgtggtgctcttggtagttcaagctcataccttgagcaagccaggggctacacgtcttcccctctagcagctctgcgaccaaagatgtcttctactactggaaatcgactcctgcactcgagttgccccctgtcatctcctgtagcaaaccgcccgctgtcgccccaccttcctctgaagaagccacagttcagcgcgactttctcaatctcgcatcgtatattcggtgtcgcgttgggagttgccatcgtatctgtccctctcgccaccaagttcagcctaatgtttggtgtctgagagcgatttgctgcgtctcaagagaaccatcattttccgtttctgtgtctgtttttcatcgtctcggttaccttgcgacacaactgtaggtgccgttggaataatatctttgccatgcttgcagacttgtgtaataagtaaataaacctataaaataccagtttaactgtttgaggagatttgcctcattatggatatacatgctatgaaagtcgattgtcatcgcaatctattaactgcatggtgtgttatgtttgctcgtctggagaacgtatgcattgctaaacgttaagtttcacaaggtatacgtatgagcttatgttttgaagcatcattagggcatgtataacccatttaatatagggtctcttgagttgtatttaggaggctaattgaaaaaatatataagagacatgttatttaggaggctaattgaaaaaaaaaatataa

SEQ ID NO: 94982 - DNA, 495 bp, Zea Mays
atggcggcgggtcacaggcggttttgcctgaaggagacgggatttgcggcaatggatcacagcgggcagcggttggcgggatttgagcgcgcgggggatctgagccttagggaggagggcgcgatggggtggatgacggggatcgcggatccctggcgcggaggtaatttgggagcggggcgcggctgccatgaagcgtgcgcgatttgtgggcgcggacagaggttgccatggatggcggtggactgcagagaggagagcgggggcgcagagatggcggctaaagagcgcgcagatggcgggcgagagagacagcagagaggagaggggggtcggaccttccatggaaccacgcggaccttccctggatgtgttgattctccttccaatatggcggacgagagagcggggcgtgagagaggagagcggaggcgggggcggatctggcggcgagatagcgcagattgcgacggacaacacagagcggggctgtga

SEQ ID NO: 94983 - DNA, 874 bp, Zea Mays
tatgttctgtattaggtggtactcctaaatattgcaaaaaagtcatatgttggtgtcttagctgtcacttctgtggcagcaatgttcaccctataatgtggtcacatggtgcaactcttttcatttgttgtcactcacaacttggttcaatatatatttggcagctgggatgtactctgctgctcttggctttaaccaatttttctttattttgtggcctatcagaaaatctcaagttctgtacatatttaaattttatcattgcacaggctgctggacaaattcatggacgtgaggattacagagaaccgacaagtgctaccgggttcttgagcactattgaactaaggattccaaatagttctttggggtctatcgtcggtgctggtggggtcaatctagcagagatccgtcaggtttctggtgcaagactgaggctacatgaggctcatgctggttcttctgagtctgtggtggagatccagggcacactggaccaagcaaaagctgcccagagcctcctgcaaggctttattagtgcaaacagccggcagcaacagcagccctattcttctcgcatgccactttacccaagctggggatagcttctggtctcatggtcgtgtcagaggaaaacagagtcagcagggtttgtcatgtggctgtagatctcggactgcagattagctgtagcgatgatgttgttgaaggaggctgtttaacagtgcaagcaagataacttatacttatgccttaggacaagtaatattgttttcctctgatgaaatacttggtaacgatctgtctctgtatttttatatttgattctgaatgctttgaaccctagtgttacaaaagctgctattttgaggtc

SEQ ID NO: 94984 - DNA, 877 bp, Zea Mays
tatgttctgtattaggtggtactcctaaatattgcaaaaaagtcatatgttggtgtcttagctgtcacttctgtggcagcaatgttcaccctataatgtggtcacatggtgcaactcttttcatttgttgtcactcacaacttggttcaatatatatttggcagctgggatgtactctgctgctcttggctttaaccaatttttctttattttgtggcctatcagaaaatctcaagttctgtacatatttaaattttatcattgcacaggctgctggacaaattcatggacgtgaggattacagagaaccgacaagtgctaccggaaggttcttgagcactattgaactaaggattccaaatagttctttggggtctatcgtcggtgctggtggggtcaatctagcagagatccgtcaggtttctggtgcaagactgaggctacatgaggctcatgctggttcttctgagtctgtggtggagatccagggcacactggaccaagcaaaagctgcccagagcctcctgcaaggctttattagtgcaaacagccggcagcaacagcagccctattcttctcgcatgccactttacccaagctggggatagcttctggtctcatggtcgtgtcagaggaaaacagagtcagcagggtttgtcatgtggctgtagatctcggactgcagattagctgtagcgatgatgttgttgaaggaggctgtttaacagtgcaagcaagataacttatacttatgccttaggacaagtaatattgttttcctctgatgaaatacttggtaacgatctgtctctgtatttttatatttgattctgaatgctttgaaccctagtgttacaaaagctgctattttgaggtc

SEQ ID NO: 94985 - DNA, 2049 bp, Zea Mays
cccccctgcctttttgctctcctgttcaccccttgtgcccgcgctctctcgtggcgacgacttgcgcgaccgccgccaacgccaggcacctaggtcttcgtcggtcctttcttcagagacgagcacccaacagggggctacaagattggttttgatggattatgacaagtctagaagaagtaactccaagaagaggacacattccaattctgatgacggaaagagaaaacggttaaacactaggcatgatgacacatctatgttctctgagccaattgaaaccatctacaggatattgtgcccggtaaaaaagataggcagtgtcttgggaagaggtggtgacattgttaaggcccttagagaggaaactaaagccaagataagggttgctgattccattcctggtgcagatgagagagtaattatcatcttcaattaccaaaatgagcctgaaccgactgatgaagcagctgaagaaaaaaatagtgatggcttagggaacttcaaatcccattgctttgcccaagatgcgttattgaagatacatgataagattgtgtctgatgaaattcatgatgaagtcgccaatgatgaaaagtctgaaagtgcagatgatgtgactgctcgaattttggttcaaggcaatcaagttggctgccttctaggaaaaggtggctccattatacagcaactacgaagtaatactggtgctggaatccgtgtcttgccatctgaaaaccttccccagtgtgcacttaaaagtgatgaactggtgcagatatctggagcaccttcccttgtaagaaaagctctatatgaaatatctactcgtctccatcagcatcctcgtaaggaaaatagacctcttgaagaaataatagatgcaagcacacaaaggaaacgtgaatctccaacactacaacatgaatattcaatgttgccgcacctgcatagtgatcatacacctccaatacccctgcttgatccatatagaagtggaccacaatatcctgttactgaaactgaagagttctctatcagaattctgtgtgcttctgagctcattggttcagttattgggaaaagtggggccaatgttaggcgtgtagagcagcagactggtgctcgcattaaagttcaagagatcgacaaagatgcttctggagaaaggctgatcattatttcatctaatgagataccagctgaaccaatatccccagcaattgaggcactcattttgctccatgataaagttagtgcaccctctgagaaacaccattcaagtacaaggcttgttgtaccatcaagcaaagttggctgtattattggggaaggtggaaaagtgattactgacatgagaagacgaactggggctgaaattcgagtttactcaaaggcagataaaccaaaatacttgtcttttgatgatgaacttgtgcaggctgctggacaaattcatggacgtgaggattacagagaaccgacaagtgctaccggaaggttcttgagcactattgaactaaggattccaaatagttctttggggtctatcgtcggtgctggtggggtcaatctagcagagatccgtcaggtttctggtgcaagactgaggctacatgaggctcatgctggttcttctgagtctgtggtggagatccagggcacactggaccaagcaaaagctgcccagagcctcctgcaaggctttattagtgcaaacagccggcagcaacagcagccctattcttctcgcatgccactttacccaagctggggatagcttctggtctcatggtcgtgtcagaggaaaacagagtcagcagggtttgtcatgtggctgtagatctcggactgcagattagctgtagcgatgatgttgttgaaggaggctgtttaacagtgcaagcaagataacttatacttatgccttaggacaagtaatattgttttcctctgatgaaatacttggtaacgatctgtctctgtatttttatatttgattctgaatgctttgaaccctagtgttacaaaagctgctattttgaggtc

SEQ ID NO: 94986 - DNA, 2733 bp, Zea Mays
cccccctgcctttttgctctcctgttcaccccttgtgcccgcgctctctcgtggcgacgacttgcgcgaccgccgccaacgccaggcacctaggtcttcgtcggtcctttcttcagagacgagcacccaacagggggctacaagattggttttgatggattatgacaagtctagaagaagtaactccaagaagaggacacattccaattctgatgacggaaagagaaaacggttaaacactaggcatgatgacacatctatgttctctgagccaattgaaaccatctacaggatattgtgcccggtaaaaaagataggcagtgtcttgggaagaggtggtgacattgttaaggcccttagagaggaaactaaagccaagataagggttgctgattccattcctggtgcagatgagagagtaattatcatcttcaattaccaaaatgagcctgaaccgactgatgaagcagctgaagaaaaaaatagtgatggcttagggaacttcaaatcccattgctttgcccaagatgcgttattgaagatacatgataagattgtgtctgatgaaattcatgatgaagtcgccaatgatgaaaagtctgaaagtgcagatgatgtgactgctcgaattttggttcaaggcaatcaagttggctgccttctaggaaaaggtggctccattatacagcaactacgaagtaatactggtgctggaatccgtgtcttgccatctgaaaaccttccccagtgtgcacttaaaagtgatgaactggtgcagatatctggagcaccttcccttgtaagaaaagctctatatgaaatatctactcgtctccatcagcatcctcgtaaggaaaatagacctcttgaagaaataatagatgcaagcacacaaaggaaacgtgaatctccaacactacaacatgaatattcaatgttgccgcacctgcatagtgatcatacacctccaatacccctgcttgatccatatagaagtggaccacaatatcctgttactgaaactgaagagttctctatcagaattctgtgtgcttctgagctcattggttcagttattgggaaaagtggggccaatgttaggcgtgtagagcagcagactggtgctcgcattaaagttcaagagatcgacaaagatgcttctggagaaaggctgatcattatttcatctaatgagataccagctgaaccaatatccccagcaattgaggcactcattttgctccatgataaagttagtgcaccctctgagaaacaccattcaagtacaaggcttgttgtaccatcaagcaaagttggctgtattattggggaaggtggaaaagtgattactgacatgagaagacgaactggggctgaaattcgagtttactcaaaggcagataaaccaaaatacttgtcttttgatgatgaacttgtgcaggttgctgggcctccaactattgcaagaggagccctcacagaaattgcttcgaggcttagaactaggactttgagagatacaagtaccgccaataatcctccaccttttgccccttttgatgatcctcctgttgatatgcctagcagaaagttgtcactatatggagggcctgccactgatccaccgtatggaaggcctgccaatgatccactgtatggaaggcctgccattgatccaccattcggaagacctaccaatgatcgaccatatggaaggactgctgttgctcccccatttggaagacctgccaacgatccaccatatggaaggcctaccaacgatccaccatatggacgaccttccggtagtataccatatggaagaccaaacggaagtgcacctcgtgagccttccgatgcatatcctgtagactacttttctaaaagagaatatcctagtggaagtcctatgtttactagtaatgccccatcagctgcttatgagagatatgcagcacccacacgctttcctactagagaatttccctctgctttcagtcctggtgtagatcatatgcctcatcattcctatcgtgaccatgtgcctactgatagctactctagtaggggtacacagcaattaggcatcacaagaggtggaaattcagatgcttatgactataccgaggctgctggacaaattcatggacgtgaggattacagagaaccgacaagtgctaccgggttcttgagcactattgaactaaggattccaaatagttctttggggtctatcgtcggtgctggtggggtcaatctagcagagatccgtcaggtttctggtgcaagactgaggctacatgaggctcatgctggttcttctgagtctgtggtggagatccagggcacactggaccaagcaaaagctgcccagagcctcctgcaaggctttattagtgcaaacagccggcagcaacagcagccctattcttctcgcatgccactttacccaagctggggatagcttctggtctcatggtcgtgtcagaggaaaacagagtcagcagggtttgtcatgtggctgtagatctcggactgcagattagctgtagcgatgatgttgttgaaggaggctgtttaacagtgcaagcaagataacttatacttatgccttaggacaagtaatattgttttcctctgatgaaatacttggtaacgatctgtctctgtatttttatatttgattctgaatgctttgaaccctagtgttacaaaagctgctattttgaggtc

SEQ ID NO: 94987 - DNA, 2736 bp, Zea Mays
cccccctgcctttttgctctcctgttcaccccttgtgcccgcgctctctcgtggcgacgacttgcgcgaccgccgccaacgccaggcacctaggtcttcgtcggtcctttcttcagagacgagcacccaacagggggctacaagattggttttgatggattatgacaagtctagaagaagtaactccaagaagaggacacattccaattctgatgacggaaagagaaaacggttaaacactaggcatgatgacacatctatgttctctgagccaattgaaaccatctacaggatattgtgcccggtaaaaaagataggcagtgtcttgggaagaggtggtgacattgttaaggcccttagagaggaaactaaagccaagataagggttgctgattccattcctggtgcagatgagagagtaattatcatcttcaattaccaaaatgagcctgaaccgactgatgaagcagctgaagaaaaaaatagtgatggcttagggaacttcaaatcccattgctttgcccaagatgcgttattgaagatacatgataagattgtgtctgatgaaattcatgatgaagtcgccaatgatgaaaagtctgaaagtgcagatgatgtgactgctcgaattttggttcaaggcaatcaagttggctgccttctaggaaaaggtggctccattatacagcaactacgaagtaatactggtgctggaatccgtgtcttgccatctgaaaaccttccccagtgtgcacttaaaagtgatgaactggtgcagatatctggagcaccttcccttgtaagaaaagctctatatgaaatatctactcgtctccatcagcatcctcgtaaggaaaatagacctcttgaagaaataatagatgcaagcacacaaaggaaacgtgaatctccaacactacaacatgaatattcaatgttgccgcacctgcatagtgatcatacacctccaatacccctgcttgatccatatagaagtggaccacaatatcctgttactgaaactgaagagttctctatcagaattctgtgtgcttctgagctcattggttcagttattgggaaaagtggggccaatgttaggcgtgtagagcagcagactggtgctcgcattaaagttcaagagatcgacaaagatgcttctggagaaaggctgatcattatttcatctaatgagataccagctgaaccaatatccccagcaattgaggcactcattttgctccatgataaagttagtgcaccctctgagaaacaccattcaagtacaaggcttgttgtaccatcaagcaaagttggctgtattattggggaaggtggaaaagtgattactgacatgagaagacgaactggggctgaaattcgagtttactcaaaggcagataaaccaaaatacttgtcttttgatgatgaacttgtgcaggttgctgggcctccaactattgcaagaggagccctcacagaaattgcttcgaggcttagaactaggactttgagagatacaagtaccgccaataatcctccaccttttgccccttttgatgatcctcctgttgatatgcctagcagaaagttgtcactatatggagggcctgccactgatccaccgtatggaaggcctgccaatgatccactgtatggaaggcctgccattgatccaccattcggaagacctaccaatgatcgaccatatggaaggactgctgttgctcccccatttggaagacctgccaacgatccaccatatggaaggcctaccaacgatccaccatatggacgaccttccggtagtataccatatggaagaccaaacggaagtgcacctcgtgagccttccgatgcatatcctgtagactacttttctaaaagagaatatcctagtggaagtcctatgtttactagtaatgccccatcagctgcttatgagagatatgcagcacccacacgctttcctactagagaatttccctctgctttcagtcctggtgtagatcatatgcctcatcattcctatcgtgaccatgtgcctactgatagctactctagtaggggtacacagcaattaggcatcacaagaggtggaaattcagatgcttatgactataccgaggctgctggacaaattcatggacgtgaggattacagagaaccgacaagtgctaccggaaggttcttgagcactattgaactaaggattccaaatagttctttggggtctatcgtcggtgctggtggggtcaatctagcagagatccgtcaggtttctggtgcaagactgaggctacatgaggctcatgctggttcttctgagtctgtggtggagatccagggcacactggaccaagcaaaagctgcccagagcctcctgcaaggctttattagtgcaaacagccggcagcaacagcagccctattcttctcgcatgccactttacccaagctggggatagcttctggtctcatggtcgtgtcagaggaaaacagagtcagcagggtttgtcatgtggctgtagatctcggactgcagattagctgtagcgatgatgttgttgaaggaggctgtttaacagtgcaagcaagataacttatacttatgccttaggacaagtaatattgttttcctctgatgaaatacttggtaacgatctgtctctgtatttttatatttgattctgaatgctttgaaccctagtgttacaaaagctgctattttgaggtc

SEQ ID NO: 94988 - DNA, 249 bp, Zea Mays
atggctgttccggggaaggttgagtggcccgaactgattggatctgaaattgaagaggcagttgacactatctgtgtagagcggtctgatgtaaatgagatatgtgaaatacaagatggccaaccagccagtacagaagaatgtacaacagtatctccagttacaggccaagacccgcctgtaactgtttatatcacctacgtcctcaacgatcaagttgataaaaatcatattacaagcaaattatga

SEQ ID NO: 94989 - DNA, 1677 bp, Zea Mays
gaggaagaaaaactagaaaccctagcgatgctgcagatccgcctgagcaagattggctcgtcggactccggcggtgccgccgctagcacggcagctggcgccggcgcccccgccgcggttggggcggctgcggcgctcggtggcagcatcctggaatcggtcaccgtggcatgccccgaccacctcgtgatcgcggacctccccgtcgcgaagagcctcggcgccgtcacgacctccgctgccgccgccacgcgcgccatcggccgtcgctcccgtcgcccgctcggggagcgcgtccacatctgctcccgctgcgagttccccatcgccatctacggccgcctcatcccttgtgaacatgccttctgtttatcctgtgcaagaagcgattctagctgctatctttgtgatgagcgcattcagaagatacaaagtgtgaaaatgatggaggggattttcatctgtgctgcaccaatgtgtctcaaatcgttccttaagaaagcagattttgagttccatgtgcctgatgtccatgccaacctcctccaaactaatctagagaaggaagaagaacgcaatgagtcagatgctcctaacatcccctgtgcttctgcaggggatactcaaagacaatctcaaatgcctgaaatgtctactgcacgtgctcctcctccaaggccaggtgtttcacaagatcgtgaagaacgctcccgctaccaccagtccagggagcaaacaccactgaggcctccacccctttcaaaaccaccgttccatggtcgccattcttacccaccaggggatactcaggccgagaacaatccacctcaaggattcgaccggccatacaactgggcttctcaatcacgtcaggagagcccaggtgcggcgactccacttcgccaagaatctgatcacagtactcaggacaggcagcaattgatggctaatgcaccttttatgttcccgccgattccttctcaccagggaaactttatgatgcctatgaatatgaatcagcctttgatctccaacgcaccattcaattaccctctccagcaagatggaaaccctcagtacttttctgcccctttccagatgccgccgctaccagatactggatcagaccaaggttccatgtcaagtgtccagcctccagttggccctatgagcttccctgaggggcttcagcgcccatgggctatggggatgatgggtaatccatttcacccgatggcccttggtcagggaatggttgatggtgcgggtgatcctcagggtggtggtggccttgccttcatgcaagctggttttgggggcatgcctgatggctccatgaatacaggcatgcccgatagaggtgatggaaggggtgttcgagcacagatgcccacgccaatgcaaatgcagatgtcacttcccccacctccgcctacacaacctccatcaggctcgcagcaaacatttaacaggacttgatatattttgttttgcacgaatcgatggttcctctcaaaattccatgtcaattcattgaggaaactgtaattttatcgtctttggcatgtaacctgtgagaactagatggctcagttctattccctggtttgataggagcctgtgtattatgctgtaactgtcctgtttgaatgaagtgttcccaagttacgaaatttt

SEQ ID NO: 94990 - DNA, 2259 bp, Zea Mays
atggggagggaggccgcggccgcggtggcggcggagctggaggactcgttggggaacgctgctgctgccgcggcggcggcgcccgtgctgagcccgctgagcgagacgctgtggcgcgacagggcggcggcgggcggggtcctcctcggggacgtgtcggcgcggctggcgtggcgggacctcaccgtgaccgtggcgctcggcaccggcgacacgcaggccgtgctgcagggcctcacgggccacgccgagcccggcaccatcaccgcgctcatgggcccgtccggctccggcaagtccacgctgctcgacgcgctcgccggacgcctcgccgccaacgccttcctcgacgggaccgtcctcctcaacggccgcaaggccaacctctccttcggcgccgcggcctacgtgacgcaagacgacaacctgatcggcacgctgacggtgagggagacgatctcgtactcggcgcgtctccggctccccgacagcatgccgagggaggagaagcaggccctggtggagggcaccatcgccgagatggggctccaggactgcgccgacacggtggtgggcaactggcacctgagggggatcagcggcggcgagaagaggcgggtcagcatcgccctggagatcctcatgaggccccggctgctcttcctggacgagcccaccagcggcctcgacagcgcttcggcgttcttcgtgacgcagacgctgcgggggctggcgagggatggcggccggaccgtcgtagcttcggtccaccagccgagcagcgacgtcttcttgctgttcgactgcctctacctcctgtcaggaggcagaacagtctactttggcaaggcttcagaggcttgcgagttcttcgcgcaagctgggttcccgtgcccgccgatgcgcaacccgtcggaccatttcctccggtgcataaattcggacttcgacagggtgaaggccaccctgaaagggtcgatgaagacgaggttcgaaagatcttacgacgatccgctggagaagatcacgacctcggaggcgatgagcaggctggtcagccactaccagcactcgcagcactacgtcagcgcgcagcagaaagtagacgagatggcccggctcaaagggactgtgctggactctggagggagccaggctagcttcctgatgcaggcgtccacgctcacgaagcggtcgttcgtcaatatgtccagggatttcgggtactactggctgaggctcatcatctatgtcgtcgtcacgatttgcatcgggactatatacttcaatgtcggcaccggctacagctctatcctggcccggggggcatgcgcttccttcatcttcggcttcgtcacgttcatgtcgatcggggggttcccgtcgttcgtggaggacatgaaggtgtttcagagggagaggctgaacgggcactacggcgtggtcgcgttcgtgatcagcaacacggtgtcggcgatgccgttcctggtcctgatcaccctggtgtcgggcacgctgtgctacttcatggtgcgcctgcacccgggcttcacgcactacctcttcttcgtgctggacctctacgccagcgtcaccgtggtggagagcctgatgatggccatcgcgagcgtcatccccaacttcctcatgggcatcatcgtcggcgcggggatccaggggatattcatgctggtgtcgggctacttcaggctcccccacgacatccccaagcccttctggaggtaccccatgtcctacatcagcttccactactgggcgctgcggggccagtaccagaacgacctcaagggcctgctgttcgacggccagcaggacgacgtgctgcccagcaagatccccggcgagttcatcctggagaacgtgttccagatggacgcggggcggtccaagtggctcgacctggccgtgctgctctgcatggtcgtcgtctaccgcctgctcttcttcgccatgatcaaggccgccgaggacgtcaccccccgggtgcgccgccacgtcgcgcgccggcgggtgcggagccggcggcgccagcagccgctgcccgcccggacgccctcgctccgcggttacgtggtccacgccgccgccagcctgccggccgatcacccgtgaacaacgtaaccgtcagttgtactgcaatatatatgatatgcgtgtgttaagttgttagtagcaaccgctttatagctgtaacgaagatgcaatgcaccggtaagatgatgtgtgttatcaccagct

SEQ ID NO: 94991 - DNA, 1809 bp, Zea Mays
cacagcgaagctaagcaaagcaaaccgaagccggtttcatatcgcaccccgcaccccgctcctccctcctcctgctccggctcccttcctccacagctcgaataaagtcccctcctcttccagtcttcctcctccgcgctccaatcttcccagcggcacggtttcggttcttgcagggtagcacggaggttccttcgttgggggttcttggtctgccttgagcgatttggtgcgccgcggattgttgtggggttgtgagttgtgactgcagagacaagggccgtgtggagagtcgagccatcgaggtcgaggaggagggaaaggaaaaggggggcgcatgggcggccagtggctgggggaggggatgccgtcgtccaacctgcagtgcttcttggactgcaccacccccaccgtcgagacgcacattctccccaagacgaatggacgattgccgaccgacgcctggcaccacgctgagatggacagcgtcgagtacttcaatcttgccgacctctgggaacagtactatgaatggagcgcgtacggcgccggagctacggtgcagctcccaggaggggacagagtagttcagtactatgttccatacctgtcagggatgcagctatacaccaacaaggtcctgactgcatccagaagttttggtgaagataatggcatggatttatggagtgatgatgaggacaacgagaagatgtcgagatcctggagttccacctctgatgaatcattgttcaactgtgatgtgttatggtccaacaggaagcgtccagggcacctgtactttgagttctttgaagtaggttcaccttatggaagggttcctctcattgacaaggtttatgaactatcccagggctttcctggattgacatcactgaagagtgctgagctttcgcctgttagctggatgtcagttgcctggtaccctatataccacattccttaccagcgcagcgtgaaggacttatctgcatgcttcctaacttaccataccatttcctcctcgtttcaagatcacgggcttgagaccatgaccactgattgttgccatccagttgcaaacggcaaacaaaatggccacatggataagaagagcaacaccgtatcactgcctccatttggcctcgcagcacacaagatacaaggttccctctggaccaaccccatgacaggagaccgcagaaagatggacttcctcttcagtgcggcagactcctggctgaagcagcttggagtccagcatcatgacttcaacttcttcatcactcaccccatgtgaactgctgatccggagtggcttgcaaagaaccacatgggtacagtttgaagctagtgatattacctacccaccaccaacggggtagcaaaacgtttacagtacaatgcgctggtgaaatgagtctaacaatcgcaggatagatttatacttgagtttactgctgcagcgaataccaaacatgtcggcactcaaaaaggttttctgtttcttgtttcttggcagaaaaatgtaactgatctgtacagaagttttgcaactaatttggtatccaatgtgggggttgagctgttgcttgtgaactttagtaccctagagaatgttagttccaggatgaaactgtttacgcagactctagctggacctgaatctgtcgatgacaattagttatcttctacagtaaggcagttgtacgcacacattctcattcagtctgattggatacctgcacatgagcgcgcaggctcggacgaggctgactgtgtggatacaccagttttgagcgtttctgt

SEQ ID NO: 94992 - DNA, 3088 bp, Zea Mays
cacagcgaagctaagcaaagcaaaccgaagccggtttcatatcgcaccccgcaccccgctcctccctcctcctgctccggctcccttcctccacagctcgaataaagtcccctcctcttccagtcttcctcctccgcgctccaatcttcccagcggcacggtttcggttcttgcagggtagcacggaggttccttcgttgggggttcttggtctgccttgagcgatttggtgcgccgcggattgttgtggggttgtgagttgtgactgcagagacaagggccgtgtggagagtcgagccatcgaggtcgaggaggagggaaaggaaaaggggggcgcatgggcggccagtggctgggggaggggatgccgtcgtccaacctgcagtgcttcttggactgcaccacccccaccgtcgagacgcacattctccccaagacgaatggacgattgccgaccgacgcctggcaccacgctgagatggacagcgtcgagtacttcaatcttgccgacctctgggaacagtactatgaatggagcgcgtacggcgccggagctacggtgcagctcccaggaggggacagagtagttcagtactatgttccatacctgtcagggatgcagctatacaccaacaaggtcctgactgcatccagaagttttggtgaagataatggcatggatttatggagtgatgatgaggacaacgagaagatgtcgagatcctggagttccacctctgatgaatcattgttcaactgtgatgtgttatggtccaacaggaagcgtccagggcacctgtactttgagttctttgaagtaggttcaccttatggaagggttcctctcattgacaaggtttatgaactatcccagggctttcctggattgacatcactgaagagtgctgagctttcgcctgttagctggatgtcagttgcctggtaccctatataccacattccttaccagcgcagcgtgaaggacttatctgcatgcttcctaacttaccataccatttcctcctcgtttcaaggtatgttttcctcgttttgtttgaaggcatgtttgttcatcagagtgtcagtcactaaactctaccattttcttaaattcttacggcacaataatttgattattctaatatgcttctgtaccagtgccaaacagacgttgtataaccgttgaaattgttatcaacaatcttcatactttttagggtcttgagttgatttcccttttccgatgtttaggatatatgtgttggcatattggttgaaatttcaaactcaggttgtgcatcaaagcatgactacaggatatagtgacagctccttttgtttagtgcagtattctaataaacatctagtcttctaatacttctgttgtgttgtgacttagaacttatttgcatataaaacattagggcttaatgagtgaaaaagttaccgtttgctcaagctcaaatcccatgatatgtattgcaacattattatcgttcacaggaaagagtatttctcatgtctgtgtacctgagaaaagatttccccgaaccattgatatattgcttaatgtacactaaaaaagaggaatgtcaatctggtggcctagacctaggggtggtaatagatcgtgatccaaatgtttcttcacgatttgttatggccctaaataaattttggttcaaaaatgaatagaattagagtccgatccttaaattttatagtgtaaaatttagagcccattgtcacctctaccaggaccagaagaaaggaatttaaactgttgctttctcattcttcttgtaattggttggttgagtggtctttagttttcaaacaatgaactttatatttggaaaaggtgtaactgatgttcagttacgtttctatatctagaaagtttcctactatataacttaatgatgtgctctatactgcataccagttggtatggcacactattcttaaatcaatcgatggcttagcttacaagagtataagagtttccttcaaagctttgttcgtcttgctatgttgcgtccagtttgtcaactttggtttcaaaaggcttcatgtcttagctttaaagtctgtagttaaggaaaccactcaaacaaaaagttagtggcagcagttctttgctcagtaaagagaaggaaagagaccgtgttgtcatgttccacgacttcattacttatccatagacatgcagttgtttcttgaagctaaaaatacctatgttatataacatggaggaagagttgttcaatagaccatctttggagaaagcttgtttggattgcgatatgtgcaaaagcacctaggttcaccagctgtccttcccaagaaaacaaatgatgatatatagagtccaaatcaagccaagatctttaagcttgaatatgctttgcatgtgaatacattgactttcggtcagttatttgttaatgtatgtccttaatcacggctgcaccagcgatgaccttagtactgttttcaaaccctcagtaacctgtgttatgtttctcacagatcacgggcttgagaccatgaccactgattgttgccatccagttgcaaacggcaaacaaaatggccacatggataagaagagcaacaccgtatcactgcctccatttggcctcgcagcacacaagatacaaggttccctctggaccaaccccatgacaggagaccgcagaaagatggacttcctcttcagtgcggcagactcctggctgaagcagcttggagtccagcatcatgacttcaacttcttcatcactcaccccatgtgaactgctgatccggagtggcttgcaaagaaccacatgggtacagtttgaagctagtgatattacctacccaccaccaacggggtagcaaaacgtttacagtacaatgcgctggtgaaatgagtctaacaatcgcaggatagatttatacttgagtttactgctgcagcgaataccaaacatgtcggcactcaaaaaggttttctgtttcttgtttcttggcagaaaaatgtaactgatctgtacagaagttttgcaactaatttggtatccaatgtgggggttgagctgtt

SEQ ID NO: 94993 - DNA, 1902 bp, Zea Mays
ccgaaagaagaatgtcgcacgtggccatgtctcggccgcgccccgctcctccgtcacagcctcatagtcacaggctcccagcctcccgcgtccggagtccggatccggacacgcgctcgaggccacccgcgctgtcccgcctccggcagcgatggcggccgccgcgcgccccgcgtccgcccacctcctcctcctcgccccgctcccttctcctccccgcctttcgcatctcatccacacccgcagactctacgcactcgcccccgcccgccgccctgcggccgcgcgcgcgcgccgcgaatcctctcctccctccgcgccctcccctcctgccccggctgactcgctcgattgcgtcggaactggctcggatgtcgagtgcttcgtcgacgccggcgccgaagacgccgctcccctccttcccgcgctctccgcaggcgcgtcaaaggacgatgggaagagcgagggcgacgcggcggtttcggcttcccctacggggagggagctcttggagtgggcatctctggtgtcgcccttcttcttctggggcacggctatggtggccatgaagggggtcataccccgcacgggtcccttcttcgtcgccgcgatacgcctgctccccgcgggcgcactgctagttgccttcgccgccgcgcgcggcaggaagcagccctccggctgggaggcctggctcgccatcgctgcgttcggactcatcgacgcggcctgcttccagggctttctcgcggagggactgcagaagacatcggctgggctcgggagcgtcatcattgactcgcagccattgacggttgctatccttgcatcactgctctttggagagtcgattggcgcgataggagttggaggactcgtgttgggcgtcgtggggctcttgcttctggaggttccagcactgtcagttgaaggaaatgacacaacaatctggggaagcggggaatcgttgatgttcctctcagctcaaagcatggcagtcggaactatcatggtccgctgggtgtcaaagtactctgatccaattatggcaacaggatggcacatgattattggtgggcttcctttgctagtgatatctgttcttaatcatgatcctgctctgagtggccatattcaagatcttacatggagcgacatattagcacttggttatacatctatatttggcagtgctgtcagctacggtgtatacttttacaatgctactaggggtagcttaaccacacttagttctctcactttcttgacccccatgtttgcatccgttttcgggtacctgtacctgggtgagaccttctcaacagtacagattggtggtgcgcttctcacactggttgccatctacatggttaactacaaaagcattataggtgagaaataagaggctatcacctacttgtgcgacgtttatcacataagggtggttgggtgctgcatgcggcacctattgccacttgttgggttcaggaatctgaagattaagtacagtcatgaagactcgggcaaattatcagattggagagagatgtgctctttttcaggtctagactgtaaatgcagtataaagtggcacaaaaccaaataggtttcatcagctccttcgacaatcctattagattgcctggttatgtctacttctaggttacccagcaacctgtatctctgttatgcgtagctgagagaattataatttataggatgtttccgaattgtagttgctacgtattattatctagggaggtaggggatgccccccccccccccccccccaaacaacccgtgttgcaatggtcagaaacatggaatcagtttcaaggaagaaggaaggctcgtttgtctatgaatctgctccgttttttaaataattactagattttttgc

SEQ ID NO: 94994 - DNA, 1373 bp, Zea Mays
gcgtgcccagtgtctgacaacgcgccccaaccccaaccccaacccagcggtcccagtcccccctccgttctctctgcactctgcagctgccggtgccggccatggcgcgcgccccgagctcgtggacgccgtccctcgccatggtgctcctcgtcgtggccgccgcggccgtggtcgcgtcgtcggaggcggccagggtgcccgccgccgtcggcaactggacgggggaggagctgcgcggggccgcggcgaggcggggcggccggcgctcccggcgccgcgcgttcgagaacggcctcggccggacgccgcagatggggtggaatagctggaaccacttcggctgcgggatcaacgagaacctcatcaagcagacagctgatgcgctggtcaacaccggtctggcgaagctgggctacgagtatgtcaacatagatgattgctgggcggagtctgacagggactaccagggaagcttcgttgcaaacagacaaaccttcccctctggcatcaaggcgctcgcggactacgtgcacgccaaggggctcaagcttggcatctacagcgatgctgggacacggacgtgcagccagaaaatgccagggtcacttgaccacgaggagcaggacgtgaagacattctcgtcctggggtatcgattatctgaaatacgacaactgcaacgacgccggcaggagcgtcatggagaggtatacgaagatgagcaacgctatgaagacgtatgggaagggcatcttcttctcgctgtgcgaatgggggaggcaaaaccctgctacctgggcaggcggcatggggaacagctggagaacgaccgatgatatcgccgacaactggggcagcatgacgtctcgtgcagaccagaacgacaggtgggcttcctacgccggacctggcgggtggaacgatcctgacatgcttgaggtgggcaacggcggcatgtccgaggcggagtaccgctctcacttcagcatctgggcgctcgccaaggctccgcttctgatcgggtgcgacgtgcgggcgatgagccagcagacgatgggcatactcagcaactcggaagtcatcgccgtgaaccaagatagccaaggtgcgcagggaaagaaagtgcagtccagcaatggcttggaggtttgggctgggccgctcagcaacaacaggaaggccgtggttctctggaaccggcagggataccaggcaaccatcaccgcgcagtggtcgagcatcgggctcgcttcttccactgctgtcactgctcgcgatctatgggcgcactcgtcgttctcggctcaaggccagctatcagcttcggtgccacctcacgactgcaagatgtatgtcttgacgccgaactag

SEQ ID NO: 94995 - DNA, 619 bp, Zea Mays
aaggcctgagcctgacttccgaagcaaagctgagagtggtgtggtggtgcgttcttctgtaggtttgggctgggccgctcagcaacaacaggaaggccgtggttctctggaaccggcagggataccaggcaaccatcaccgcacagtggtcgagcatcgggctcgcttcttccactgctgtcactgctcgcgatctatgggcgcactcgtcgttctcggctcaaggccagctatcagcttcggtgccacctcacgactgcaagatgtatgtcttgacgccgaactagctcagaagacaagagcggattgttccatggcgcgtgggatgcaaccattcggtcaggattcagggaagaagagtatgcagtgcaggcaaggatttcaagagaaggaaattcgatatcatttggttatacaggatatgagtgcgaatggaggaataatttatactaatactatggaagtgtatctaaggcgccgtcaaaatgccggtgcctgtgttactggatgtttgtaacgagagttgcagcaataaaattggcttgcccaccaccctttttacgagcatgtggacggatttcagagaacaagagaatatagaaaatgtgcgttctctgtg

SEQ ID NO: 94996 - DNA, 1705 bp, Zea Mays
gcgtgcccagtgtctgacaacgcgccccaaccccaaccccaacccagcggtcccagtcccccctccgttctctctgcactctgcagctgccggtgccggccatggcgcgcgccccgagctcgtggacgccgtccctcgccatggtgctcctcgtcgtggccgccgcggccgtggtcgcgtcgtcggaggcggccagggtgcccgccgccgtcggcaactggacgggggaggagctgcgcggggccgcggcgaggcggggcggccggcgctcccggcgccgcgcgttcgagaacggcctcggccggacgccgcagatggggtggaatagctggaaccacttcggctgcgggatcaacgagaacctcatcaagcagacagctgatgcgctggtcaacaccggtctggcgaagctgggctacgagtatgtcaacatagatgattgctgggcggagtctgacagggactaccagggaagcttcgttgcaaacagacaaaccttcccctctggcatcaaggcgctcgcggactacgtgcacgccaaggggctcaagcttggcatctacagcgatgctgggacacggacgtgcagccagaaaatgccagggtcacttgaccacgaggagcaggacgtgaagacattctcgtcctggggtatcgattatctgaaatacgacaactgcaacgacgccggcaggagcgtcatggagaggtatacgaagatgagcaacgctatgaagacgtatgggaagggcatcttcttctcgctgtgcgaatgggggaggcaaaaccctgctacctgggcaggcggcatggggaacagctggagaacgaccgatgatatcgccgacaactggggcagcatgacgtctcgtgcagaccagaacgacaggtgggcttcctacgccggacctggcgggtggaacgatcctgacatgcttgaggtgggcaacggcggcatgtccgaggcggagtaccgctctcacttcagcatctgggcgctcgccaaggctccgcttctgatcgggtgcgacgtgcgggcgatgagccagcagacgatgggcatactcagcaactcggaagtcatcgccgtgaaccaagatagccaaggtgcgcagggaaagaaagtgcagtccagcaatggcttggaggtttgggctgggccgctcagcaacaacaggaaggccgtggttctctggaaccggcagggataccaggcaaccatcaccgcacagtggtcgagcatcgggctcgcttcttccactgctgtcactgctcgcgatctatgggcgcactcgtcgttctcggctcaaggccagctatcagcttcggtgccacctcacgactgcaagatgtatgtcttgacgccgaactagctcagaagacaagagcggattgttccatggcgcgtgggatgcaaccattcggtcaggattcagggaagaagagtatgcagtgcaggcaaggatttcaagagaaggaaattcgatatcatttggttatacaggatatgagtgcgaatggaggaataatttatactaatactatggaagtgtatctaaggcgccgtcaaaatgccggtgcctgtgttactggatgtttgtaacgagagttgcagcaataaaattggcttgcccaccaccctttttacgagcatgtggacggatttcagagaacaagagaatatagaaaatgtgcgttctctgtg

SEQ ID NO: 94997 - DNA, 656 bp, Zea Mays
aagcagggcacatgctgacatgccccgtgaccgtgccgttgtatcagaataatgccaaggagatggtaccttagcgtaaaccttctccagtcagcaattcgtgttcgttcgttcgttcacagactcgccatcgttattgattgcatgcatatttggtttgctcagttctgctctgacggccttttcttttcccttcagctgatgcgctggtcaacaccggtctggcgaagctgggctacgagtatgtcaacataggtgcgcaccgtgtgtgaactcatcaacctcatttcgtgcctgacgcctgcagtagtacattagcctagtgcttatcttgaaggcttattatccatatatcttctttcagatgattgctgggcggagtctgacagggactaccaggtaaaccggatcaagtttgcccctgcagacgcagcacgctaacccgctaaccaccgccgcaatcgttttcagcactaataatggggagagaggaacttgtagaaagcacaatcgtaaatggagaggaactcgtcattatctggctcctagagaactctaaaaccttttttttagatgcatatatgctaatcaggattttaaaaacagaaagaactagtatgtggactgttttggagttataatgagtgattgaagtc

SEQ ID NO: 94998 - DNA, 452 bp, Zea Mays
gcgtgcccagtgtctgacaacgcgccccaaccccaaccccaacccagcggtcccagtcccccctccgttctctctgcactctgcagctgccggtgccggccatggcgcgcgccccgagctcgtggacgccgtccctcgccatggtgctcctcgtcgtggccgccgcggccgtggtcgcgtcgtcggaggcggccagggtgcccgccgccgtcggcaactggacgggggaggagctgcgcggggccgcggcgaggcggggcggccggcgctcccggcgccgcgcgttcgagaacggcctcggccggacgccgcagatggggtggaatagctggaaccacttcggctgcgggatcaacgagaacctcatcaagcagacaggtacgcacgcctgcctgcctgccccacccactccgcgtctccatccgcaactccgagcgagccacgtttgcttg

SEQ ID NO: 94999 - DNA, 788 bp, Zea Mays
aatatgaaccaaaggagataccaccggatataacatcttggataggttataaattcacttttgttgttagagtcctatcaaagaaaagtgtcaagactattgatccatcctttgaagtgcttatgataaaagaaaaataccagaaggaacctattatatcatttatcagctcaagtggagttgtaccagcagaatcatcttcctctacaatggcagaatacaaggaattaccattgctagtgccaattacctccaaagacatagaaaaaaaggagcgatccacttcacaaccagaacacaccgaagaaactcaagatatggacattgaaccatctggcatttgggaagaatctcagatttcaaacaaaagaagctttggagacccaaactatgacaaacaagaaacaactgatgacaaagatgaccttccacaattcaagaaaatcaggagtacccactctcaaggaaaaagcaaaaaatgatgcatgatagactaagaagacaaagtaaagtagtagactttaaaagatcttgactaaagtaatatatctatattttctgtttcgataaacaacgatagcgctagtgctacatcttttaatgtatataaccatgtagtatcaatagcgctacatcttaagcgtgtagcaccagcagcgctacatattttgatgtatataagcatgtagcatcaatagcgctacatcttttgttaaatataagcacatcttttgatatatataagcatgtagcatcaatagtgctagctatggtgctaatcttacatt

SEQ ID NO: 95000 - DNA, 1816 bp, Zea Mays
aaagcgttgatccgatccacgaaggcaagagagagacaaagtagaagctaaggcgcgagtgataggagggttttggttcagagaggagcggggcaatggcgggtggtcgtggctcgtcggcggcgaggctagcgctgctactggtggtggtggtggcggcggtggcgggcggcgccgtggcggggggcaaggtggtgcacgtggaggaggcgcaccggcggagcatgctggccaatggcctcggctcggcccctcccatggggtggaacagctggaaccatttccagtgcgacggcaacggcgaggtggtcatcagggagaccgcggacgcgctcgtgtcgaccggactcgccgctctcggctacagatacgtcaacatcgatgattgctgggcagagccacaacgtgacgctaagggcaacctggtggccaacaccaagacgttcccgcacgggatcaaggcgctggcggactacgtccacggcaaggggctcaagctcgggatctactccgacgccgggttccagacctgcgccaaggcccagcccgggtccctcggacacgaggagctggacgccaagaccttcgcggcatggggggtggattacctcaagtacgacaactgcaacaacggcgacctgaagccgctggagaggtacccggagatgagcagagcactgatgaaggtggggcggccgatctacttctcgctctgcgaatggggcgacatgcacccggcgacgtggggcgcgacctacggcaacagctggaggaccaccaacgacatcgccgacacctgggacagcatgatcgccacggcggaccagaacgaggtgtggtcggagtacgcgcgccccggcggatggaacgatccggacatgctggaggtgggcaacgggggcatgaccaacagcgagtacgtcgtgcacttcagcctctgggcgatctccaaggcgcctctcatcatcggctgcgacgtcaggcacatgtcgcgggagacgtacgccatcctggccaacaaggaggtgatcgccgtcaaccaagatccgctcggcgtgcaggggaagaaggtgcggatggaggggagcagcgagatctgggccgcgccgctctccgagtaccggacggcggtgctgctcctgaaccggcacgccaaggacgaggccaccatcgccgcgcactgggacgacatcggcctccccgccggcacgcccgtcgaggccagggacctgtggctgcacgagacgttggacgccacgttcacggacaagatgagcttcgacgtcgcgccgcactcgtgcaggatgctcgtcctcaagcccaggatccagatccagtgaactacaccaccgctgccgcatgggcgcgcgtacgtgcggccctcacgacgtcaccacgcgtcgattcatttgtactgcaggctactaattgcagacacgtggaatcaaaatcaccaagaatggttcttgttccttgtatcgtattgtgctctcgactcaaccgagacactgggccctcgtgctggcctcacaacacggcccaccccagttgggaacataaatccaccatacccggcccaggcaggttgtccacaccacggactgcattgcgtgctggatcctcacaaacgcttacatggatattttttcctaatctccgtttctcgtgaggataaatctctgacagtcatcatcgacccgcttaaattataattagtacatacttcttttgttcggctgcgaagaaaatgaggggaatagaggatcgatgtgcaatcaaacagaccctaatggaggcattattcacaaagaattag

SEQ ID NO: 95001 - DNA, 1655 bp, Zea Mays
aaagcgttgatccgatccacgaaggcaagagagagacaaagtagaagctaaggcgcgagtgataggagggttttggttcagagaggagcggggcaatggcgggtggtcgtggctcgtcggcggcgaggctagcgctgctactggtggtggtggtggcggcggtggcgggcggcgccgtggcggggggcaaggtggtgcacgtggaggaggcgcaccggcggagcatgctggccaatggcctcggctcggcccctcccatggggtggaacagctggaaccatttccagtgcgacggcaacggcgaggtggtcatcagggagaccggtgcttcctctctgtctcttcagttttttttgtcgtcgtagtagcagtaacagcttgatcgcttgctgagctgaatagagcagctgactggtttacatctctttctctcctgttccttttctttcttcaactgtgtccgtccgtgctgtgccgcccgtgcatgcgttggtgctcgtcctccagcggacgcgctcgtgtcgaccggactcgccgctctcggctacagatacgtcaacatcgatgattgctgggcagagccacaacgtgacgctaagggcaacctggtggccaacaccaagacgttcccgcacgggatcaaggcgctggcggactacgtccacggcaaggggctcaagctcgggatctactccgacgccgggttccagacctgcgccaaggcccagcccgggtccctcggacacgaggagctggacgccaagaccttcgcggcatggggggtggattacctcaagtacgacaactgcaacaacggcgacctgaagccgctggagaggtacccggagatgagcagagcactgatgaaggtggggcggccgatctacttctcgctctgcgaatggggcgacatgcacccggcgacgtggggcgcgacctacggcaacagctggaggaccaccaacgacatcgccgacacctgggacagcatgatcgccacggcggaccagaacgaggtgtggtcggagtacgcgcgccccggcggatggaacgatccggacatgctggaggtgggcaacgggggcatgaccaacagcgagtacgtcgtgcacttcagcctctgggcgatctccaaggcgcctctcatcatcggctgcgacgtcaggcacatgtcgcgggagacgtacgccatcctggccaacaaggaggtgatcgccgtcaaccaagatccgctcggcgtgcaggggaagaaggtgcggatggaggggagcagcgagatctgggccgcgccgctctccgagtaccggacggcggtgctgctcctgaaccggcacgccaaggacgaggccaccatcgccgcgcactgggacgacatcggcctccccgccggcacgcccgtcgaggccagggacctgtggctgcacgagacgttggacgccacgttcacggacaagatgagcttcgacgtcgcgccgcactcgtgcaggatgctcgtcctcaagcccaggatccagatccagtgaactacaccaccgctgccgcatgggcgcgcgtacgtgcggccctcacgacgtcaccacgcgtcgattcatttgtactgcaggctactaattgcagacacgtggaatcaaaatcaccaagaatggttcttgttc

SEQ ID NO: 95002 - DNA, 1551 bp, Zea Mays
aaagcgttgatccgatccacgaaggcaagagagagacaaagtagaagctaaggcgcgagtgataggagggttttggttcagagaggagcggggcaatggcgggtggtcgtggctcgtcggcggcgaggctagcgctgctactggtggtggtggtggcggcggtggcgggcggcgccgtggcggggggcaaggtggtgcacgtggaggaggcgcaccggcggagcatgctggccaatggcctcggctcggcccctcccatggggtggaacagctggaaccatttccagtgcgacggcaacggcgaggtggtcatcagggagaccgcggacgcgctcgtgtcgaccggactcgccgctctcggctacagatacgtcaacatcgatgattgctgggcagagccacaacgtgacgctaagggcaacctggtggccaacaccaagacgttcccgcacgggatcaaggcgctggcggactacgtccacggcaaggggctcaagctcgggatctactccgacgccgggttccagacctgcgccaaggcccagcccgggtccctcggacacgaggagctggacgccaagaccttcgcggcatgggtgagttgagacaaaaagaagagtcgcatctgccacctcgcgagtactctgtccatttggtctctgtccacgcgcgcagggggtggattacctcaagtacgacaactgcaacaacggcgacctgaagccgctggagaggtacccggagatgagcagagcactgatgaaggtggggcggccgatctacttctcgctctgcgaatggggcgacatgcacccggcgacgtggggcgcgacctacggcaacagctggaggaccaccaacgacatcgccgacacctgggacagcatgatcgccacggcggaccagaacgaggtgtggtcggagtacgcgcgccccggcggatggaacgatccggacatgctggaggtgggcaacgggggcatgaccaacagcgagtacgtcgtgcacttcagcctctgggcgatctccaaggcgcctctcatcatcggctgcgacgtcaggcacatgtcgcgggagacgtacgccatcctggccaacaaggaggtgatcgccgtcaaccaagatccgctcggcgtgcaggggaagaaggtgcggatggaggggagcagcgagatctgggccgcgccgctctccgagtaccggacggcggtgctgctcctgaaccggcacgccaaggacgaggccaccatcgccgcgcactgggacgacatcggcctccccgccggcacgcccgtcgaggccagggacctgtggctgcacgagacgttggacgccacgttcacggacaagatgagcttcgacgtcgcgccgcactcgtgcaggatgctcgtcctcaagcccaggatccagatccagtgaactacaccaccgctgccgcatgggcgcgcgtacgtgcggccctcacgacgtcaccacgcgtcgattcatttgtactgcaggctactaattgcagacacgtggaatcaaaatcaccaagaatggttcttgttc

SEQ ID NO: 95003 - DNA, 1161 bp, Zea Mays
agctcctgactgactgcccgctcgtctgtttgaaacgaaggaggaggtacgcacgccgctactgcaagctagctagcaagaagaggccgctagcaggggtttggcttggtttttggcggacgacatgagcacggccacgggcgtgcgggcggggcggcggttcacggtgggacggagcgaggacgccacgcacccggacaccatccgcgccgccatctccgagttcatcgccaccgccatcttcgtcttcgccgccgagggatccgtcctctcgctcgggaagatgtaccacgaccacagcacgatcagcacggcgggcgggctggtggcagtggcgctggcgcacgcgctgggtctggccgtggcggtggcggtggccgtcaacgtctcgggcgggcacgtgaacccggccgtcaccttcggcgcgctcgtcggcggccgcgtctccctcgtccgcgcggtcctctactgggccgcgcagctgctgggcgccgtcgccgcgacgctcctgctgcggctcgccacggggggcgcgcgcccgccggggttcgcgctcgcgtccggggtcggcgacgggcacgccgtgctgctggaggccgtcatgacgttcggcctcgtgtacgcctactacgccacggtggtcgacccgaagcggggccacctgggcaccatcgcgccgctggccgtgggtttcctgctcggcgccaacgtgctggcgggcgggcccttcgacggcgccgggatgaacccggcgcgggtcttcggcccggcgctcgtcgggtggcggtggaggcaccactgggtttactggctgggccccttcctcggcgcggggctcgcagggctggtgtacgagtacctgcttatcccgcccgccgacgccgtgccgcacacgcaccagccgctcgcgccagaggactactagctagtcggccggcgccggcgccggcgcggcggcgtctccttagttgggccgtgtcctgttgtcaaatttttttatgcatgtgttggaaattatattgtggtgtcttgtgatggttaataatgaggggcatagggtacgtacttgttgatcgccccagcgttggacacggttaatcaggtgatatgcgtctctactaattactatgtgtatgtaataaattccaggtacaaaatgca

SEQ ID NO: 95004 - DNA, 2577 bp, Zea Mays
tctcaaactccaagtcccaaccaattcagcactcggccacttgggtttatcagctctcgggctagctcttctcccacactccagctgcatcctttcggatcggttggcccgtcgctgcagccgcgaccgaactgcccagatgttcacgtcgaatccaccaaaaatccagcgccctcctgctaccagcacgcaccactgccgcctactaccaccctgcgtccttccgtatccacgtatcttatcatggttctctctgctgcccactgcctcccttgccttgcacatctcggcaagcatccgccagcaagaatcgatttgtttatcaccctcgtcggtgaaaaatcaacttcttttcatgcatgtggcctgcttgacgcgagtttatcgaggtcgccatgaacgggagcaagtgtgacagatgcaagtggaggccatggagatggctcgttgcttcgtgggtcctagcggttattctggagcggggcggcgcggaggtgacggagttggatttggaggagcggcggaacgagcggcgcgacctgctggtgctgcgcgacacgctgcggtcggcgctggacctgcactccaactggacggggcctccgtgccacggcgagcggagccggtggcacggcgtgtcgtgtgacggcgacgggcgcgtggtcggcgtgtcgctcgacggcgcgcagcttacgggcacgctcccgcggagcgcgctccggggcgtgtcgcggctggaggcgctgtccctgcgcgggaacgcgctccacggcgcgctcccggggctcgatgggctgtcgcggctccgcgccgttgatctgtccagcaaccggttctcggggcccatcccgcgcggttatgccacatcgctatgggagctcgcgcggctcgaactccaggacaacctgctcaacggcacccttccggcgttcgagcagcacgggctcgtcgtcttcaacgtgtcctacaacttcctccagggcgaggtccccggcacccgcgcgttgcgacggttccccgcgagcgcgttcgaccacaacctcaggctctgtggcgaggttgtgaacgccgactgccgggaccaggaggggctgccgtcgtccggtgctccagcgtatggaagcagcagtccggtcgtgaggccggctggcgacggcggtcgggcggcacggaagcacttgcggttcaggctggcggcgtggagcgtcgtggcgatctgcctcatcgcggcgctggtgccgttcgcagctgtgttcatcttcttgcaccacaagaagaagagccaggaggtccgtctcggtggccgtgccagtggcagtgccacagtgacggcggcggaggacatcaaggacaaggtggaggtggagcaaggccgagggagtggcagccgcagcacggaatccggcaagggggccgagctgcagctcttccgcgctgacggggccagcttcgacctcgacgagctcttcaggtccacggcggagatgctcggcaaggggcggttggggatcacgtaccgggtggccctccaggccggccccgtcgtcgtcgtgaagcggctgcgcaacatgtcgcacgtgccgcgtagggacttcacgcacaccatgcagctcctgggcaagctccggcacgagaacgtcgtcgacctcgtcgcgtgtttctactccaaggaggagaagctggtcgtgtacgagcacgttcccgggtgcagcctcttccagctcctgcatggaaacagaggcgaggggaggacgccgctgccgtggccggcgcggctgtcggtagcgcagggcatggtgcgtgggctggcgtacctgcacaagtccctgccgtacttccaccggccgccgcacggcaacctcaagtcgtccaatgtgctcgtcttcttctcggctcccaacggcaagcagcagaagcaggcggtgccaaagctgacggaccacggcttccacccgctgctcccgcaccacgcgcaccggctggcggcggccaagtgccccgagttcgcgcgccgcggcggcaggcggctgtcgtcccgcgccgacgtgtactgcctcgggttggtgctgctggagctggtgacggggaaggtgcccgtggaggaagacggcgacctggcggagtgggcgcgggtggcgctcagccacgagtggtccacggacatcctcgacgtggagatcctgggcgaccgggggcggcacggggacatgctccggctcacggaggtcgctctcctctgcgccgccgtcgagcccgacaggcggcccaagctgcaggacgtcatcaggatgatcgacgatatcgccggcggcgacggatcagagctggatcgccgttgagctagctccactgtccacgacggcgaagggtgtgggctggtcgacatgatcttcttgatttcagatttatttgatttctgtgtcataatcgtttcgctttcagtttagcttcccttttcaattgtaacattgcaatcgatgctccctgatcgattgccctggtgcagtcagagaaaaggatgtgaactagtgaacttcatatatgtatgtaagcacaggcagaggcccttagagttgc

SEQ ID NO: 95005 - DNA, 755 bp, Zea Mays
atcaaaatagagttcacacgcacaacccgccgccgcacgccgggatctcgatagactctggctgccgcggaaagcggaaagaaggcagggatcgtggccaagatgcagatcttcgtgaagacgctgtcgtcgacaaggacgatcacgctggaggttgagccttcggacacggtggcggacgtgaaggccaaggtgtacgagtcggagggcgtcccgccggccgagcagcgcctcatcttcgcggggaagcagctgcgcgacggctgcacgctggctgactacaacatccccaaggagacgatgctgtccttgtgctgccgcctcctcggaggcggccccaagaagcgcaataggaagacgttcaccactcctaagaagggcacgcacgagcacaagaaccccgggctcgacgccgtgcttgggcggtacaggatcgatgaggccacggggaaggtggagaggctgcgcatgcagtgccctaacccggagtgcggcccaggcgtgctcatggcggcgcacgccgaccggcacgtctgcggcagctgcggcctcaccttcgtcatccagaactagagcgcggcagatagctaggtcgcttcgtactccccccatttgcaatgacaaagcgtttttacctttctagatatgcacttatgtctagatacatagattatcttatacttttttcgttcttttttatttatcgtgttttagttaaaaataaattaattgagtgaatatgttatagggcgtgg

SEQ ID NO: 95006 - DNA, 747 bp, Zea Mays
atcaaaatagagttcacacgcacaacccgccgccgcacgccgggatctcgatagactctggctgccgcggaaagcggaaagaaggcagggatcgtggccaagatgcagatcttcgtgaagacgctgtcgtcgacaaggacgatcacgctggaggttgagccttcggacacggtggcggacgtgaaggccaaggtgtacgagtcggagggcgtcccgccggccgagcagcgcctcatcttcgcggggaagcagctgcgcgacggctgcacgctggctgactacaacatccccaaggagacgatgctgtccttgtgctgccgcctcctcggaggcggccccaagaagcgcaataggaagacgttcaccactcctaagaagggcacgcacgagcacaagaaccccgggctcgacgccgtgcttgggcggtacaggatcgatgaggccacggggaaggtggagaggctgcgcatgcagtgccctaacccggagtgcggcccaggcgtgctcatggcggcgcacgccgaccggcacgtctgcggcagctgcggcctcaccttcgtcatccagaactagagcgcggcagatagctaggtcgcttcgtactccccccatttgcaatgacaaagcgtttttacctttctagatatgcacttatgtctagatacatagattatcttatacttttttcgttcttttttatttatcgtgttttagttaaaaataaattaattgagtgaatatgttata

SEQ ID NO: 95007 - DNA, 904 bp, Zea Mays
aaccaactgagctgagcaagaaggcaagcaccaatcagccagcagtccagcacaatatcatgaacaagcgtcaggtcgccgcggcggtggctgccctcctggcgctgctagccgcatcatcgacggccggcgccgtgacgttcgacgcgacgaacacggcgtccgatacccccggcgggcagcggttcgaccaggccgtcggcctcgactacgccaagcaggtcctgtccgacgcgtccacgttcatctggaacaccttcgaccagcccagccccgccgaccgcaagcccgtcgacgcggtgaccctcgtcgtcgaggacatcggcggcgtggccttcacgagcgccaacgggatccacctcagcgcgcagtacgtcggcggctactccggcgacgtcaagaccgaagtcaccggcgtgctgtaccacgagacaacgcacgtgtggcagtgggacgggcagggccaggcgaacggcggcctcatcgagggcatcgccgactacgtccggctgaaggcggggtacgcgccgggccactgggtgcagccggggcagggggaccggtgggaccaggggtacgacgtcacggcgaggttcctggactactgcgactcgctcaagccgggcttcgtcgcgctgctcaacgccaagatgaaggacggctacaccgacgacttcttcgcccagatcctgggcaagaccgtgcagcagctgtggcaggactacaaggctaagtacgggggctgatgatggtgatgcaaattggtggcggtgcgaagtcaacgcgtcaatggctcaatgcgtttggtatgagatgctattatgtgctagtacgtacactctgtgtgtaaaatatatagagaaaataaaagggatcggataattaaagcaattcggaaaaaaaa

SEQ ID NO: 95008 - DNA, 1426 bp, Zea Mays
ctctctcccatcagcgccgcgcgacccgtccctgcaacctgcgcacaccgtgcccacgaagccccagtcgcctcgccctccacgaccacggtaggccgcaggaccgaccccgacgcgccctgcagccgcccaagccacgcgcgccaggaaccacccgaccccgagccgctggacgccaagacgccgacgcccctgtgccgcgcgaccccgtgccccgacaaccccgcccgcgaccaggaccggccgagcagagcccgacgtccgcgccctgcacccagtgcccgaccaaagaccccggccccgcactgtgcgcgcgcgccacgctgcccgcgccccgccgccgatgccatgacctttcctcttcctctttcctcgccattaatcacaccagtttcttctcgtgtctatggcatctgtttctcgcgtcgcgcagtaagtctccatcactagtgttcatcaagcttcaatagcactaactcgccctttgccatcggctataaaatccgtagcaccctgcactccttccctcctccccagctactcgttccacccgcctcgctcgatccctcgctctatgttctgcccagcgttattcttcgtcgacgtgcaacgacgaaattcgcccctgtgctcggagacctcgctagagttggcgcctcggcttctgtggcgtgccacgatgccatggtggtgccctgcgttcgaatcacctgttgacatcgctgcattcttctctcggggattgattgtgtacgtcgttgtcgccatcgcgagccacctattgaagcctcgtcgttcgttgccgcatcattcttgacctccctacgctgtcgctcccgacgacgctatccttgacgtgaactaaggtagaagacatgatttatttttgcagactaccctcccatctacgcattatattgttcggatcttgtgacgtttgttatttttatataccgaatatttggaatccaaattaattagaaatggttatgtaaattttataactttgtgattaatattttaattagagttttgttatttttatataccgaatatttggaatccaaattaattagaaatggttatgtaaattttataactttgtgattaatattttaattagagtttaaataatcgatttcttgtgtagttagctttataagatacgcttgcaataaaatacatgttttcgtaatttatccacacgtagttttccaaataagaaaattagtctcgttgtttttgtaacaaaaaaagatgattatctttatagaaaatgaatagatttactagctaccccttcagtctacctttatttatacgtagatctatattacagtttattataaaatgtatattaggaatccaaataatagaaatggctttgttagtttcataattatgtgataagcattttaatccaaca

SEQ ID NO: 95009 - DNA, 210 bp, Zea Mays
atggcaagcattctggaagaagctgtgtcaaccgtcaagtatggacagttgctggatctgaaaagtgaagatgcttatgcaagcaatggggagcgtctaccagggttctcggtgttgtgctcgttgttgaatctgataggccttatttgttcagctagtcaccaaaatatatctaaaaacaagaacatggaacctcaacatattcggtga

SEQ ID NO: 95010 - DNA, 1901 bp, Zea Mays
atggccgatttggggagaagggcggcttgcgcggacaatgtagctcatatagtccatagcctattcgaatgccttctaagccggcccgttggcccaactgaaacattagtccgccttctcccccgagacccccgagagtcccctcgctgccgacgccacacaaacgcctccaccctcatgttcaccggcgctgcgggcggcattggcaacctgccacggccgcgcaggccgcggctcggcggaataggacacgggggcgtcatggtgtctccacagggacaggtggctctgggggcacatccgcacctagccgccccgccgtgcaccgactacgacgtggcctacttcaaggcctactcacacatcggcgtccacgaggagatgctcaaggatcatgtgagaactagtacttacagaaatgccataatgcatcacaaagatcttatttcaggcaaggtagttttggatgtgggttgcggcactggtgttctttcgatattctgtgcttttgctggtgccactcgtgtttatgcagttgatgcaagtgatattgcatttcaggctatggagattgtaagagagaatgagctgtctgacaaagttgtggttttgcatggccgaattgaggatgtcgatattgaagaaaaagttgatgtcatcatatctgaatggatgggctacatgcttttgtatgagagtatgctgggaagtgtaatttttgctagggacaaatggcttaagccaggaggtcttattcttccatcgcatgcatcgctttacatggcacctgttacgaattctcaaagataccatgatagtatttacttctggcgagatgtatatggcataaaaatgtcctctatgatgcctcttgcgaaactatgtgcgtttatggagccatcagttgagacaattagtggagagaatgtcttgacatggccagcagtggttgcacaggtggattgttataccatacaagctcagaagctcgaaaccatcactgctgcatttaaatttacgtcaatgttacaagctccattgcatggttttgcattttggttcgatgttgagttcaatggaccagtacgccagaaatcgaagaagcaacctagtcaatcattggatgagaacacccaaaatgccagcccaagcaataggaagagaaaaccagatgtctctattgttctttcaactgcaccagaggatgcccctactcactggcagcagacccttttgtacttgtttgaacctatagaactaaacaaagatcagatcatagaaggctctgttactatctcccagagccagcaacatgctcgcttccttaacatctgcctgaaatactttactggcgaccaatggtatgtcaaagaatctgtgatgcgataatctgggggaaactgaaacatagtaaccttctttctgaataggctcaaatctgttttgtatgaaggacaaccttgctgctggtcattgcggtttaggagcattctgactgtactgggttgtcgtggtagcaaattgataaaaaatggagtgccatttcgagtgcagcttgatcaaaatggtagtgggcctcgacaagtaatatgtgaatctttggctccaaactcaaattgacgaacaaaacatagaacatgttgacaagagtagtaccgttttctttttttttttgttcttttgaataggtacaagctgctggtactttattccccataatagactgctcattcattgtaacgcttctgcagcgtgtagtgcagcatagacggtatgattttacaaatggtagcattgaatttttacgagtggagtttttgaagagtaaaatgcatgaataaaatgtgcatggtgtctggacaagtagaatgcatggtgaatgtcagtttgtttcaatttgg

SEQ ID NO: 95011 - DNA, 1467 bp, Zea Mays
cttgtaactactacaaatttcctaaaacattatataaggatacaatgttctaatgctttgggaagttaggatatgatgttctaatgcttgagctggaatgcaatcaacaagagcatttgagagaatctttcatacatgtgacttattttgaggtggtgctaataaatccacctcttctgtgtagctaattatggagatatattaatctggcttatcttataattttgtgactgcttgcccagttacaggcctgatcagagtttagtttttacccatgattggtggaatataatgtgctacatgtggtgtttgatctgatacaggtatagttaaattaatttagcaccacagtctgagcaaccgcacacttttgatgccactatcatgatctaaacctctactttgtttggccagctttcttctgctgccatgtcttggttaactgctttatcgtagtgaactctcttgcttagtcacattgccataaaacttttacgatggtaattgctcaatggaaattatattgatttagcgtgcttgatctttgtcgtgattgtgtttatatcatgtaggtgttacttagtgtagatgggataatagtgccaatcatgctctcgttatcttgtgttatttttttagctccattgcatggttttgcattttggttcgatgttgagttcaatggaccagtacgccagaaatcgaagaagcaacctagtcaatcattggatgagaacacccaaaatgccagcccaagcaataggaagagaaaaccagatgtctctattgttctttcaactgcaccagaggatgcccctactcactggcagcagacccttttgtacttgtttgaacctatagaactaaacaaagatcagatcatagaaggctctgttactatctcccagagccagcaacatgctcgcttccttaacatctgcctgaaatactttactggcgaccaatggtatgtcaaagaatctgtgatgcgataatctgggggaaactgaaacatagtaaccttctttctgaataggctcaaatctgttttgtatgaaggacaaccttgctgctggtcattgcggtttaggagcattctgactgtactgggttgtcgtggtagcaaattgataaaaaatggagtgccatttcgagtgcagcttgatcaaaatggtagtgggcctcgacaagtaatatgtgaatctttggctccaaactcaaattgacgaacaaaacatagaacatgttgacaagagtagtaccgttttctttttttttttgttcttttgaataggtacaagctgctggtactttattccccataatagactgctcattcattgtaacgcttctgcagcgtgtagtgcagcatagacggtatgattttacaaatggtagcattgaatttttacgagtggagtttttgaagagtaaaatgcatgaataaaatgtgcatggtgtctggac

SEQ ID NO: 95012 - DNA, 1305 bp, Zea Mays
atggccgatttggggagaagggcggcttgcgcggacaatgtagctcatatagtccatagcctattcgaatgccttctaagccggcccgttggcccaactgaaacattagtccgccttctcccccgagacccccgagagtcccctcgctgccgacgccacacaaacgcctccaccctcatgttcaccggcgctgcgggcggcattggcaacctgccacggccgcgcaggccgcggctcggcggaataggacacgggggcgtcatggtgtctccacagggacaggtggctctgggggcacatccgcacctagccgccccgccgtgcaccgactacgacgtggcctacttcaaggcctactcacacatcggcgtccacgaggagatgctcaaggatcatgtgagaactagtacttacagaaatgccataatgcatcacaaagatcttatttcaggcaaggtagttttggatgtgggttgcggcactggtgttctttcgatattctgtgcttttgctggtgccactcgtgtttatgcagttgatgcaagtgatattgcatttcaggctatggagattgtaagagagaatgagctgtctgacaaagttgtggttttgcatggccgaattgaggatgtcgatattgaagaaaaagttgatgtcatcatatctgaatggatgggctacatgcttttgtatgagagtatgctgggaagtgtaatttttgctagggacaaatggcttaagccaggaggtcttattcttccatcgcatgcatcgctttacatggcacctgttacgaattctcaaagataccatgatagtatttacttctggcgagatgtatatggcataaaaatgtcctctatgatgcctcttgcgaaactatgtgcgtttatggagccatcagttgagacaattagtggagagaatgtcttgacatggccagcagtggttgcacaggtggattgttataccatacaagctcagaagctcgaaaccatcactgctgcatttaaatttacgtcaatgttacaagctccattgcatggttttgcattttggttcgatgttgagttcaatggaccagtacgccagaaatcgaagaagcaacctagtcaatcattggatgagaacacccaaaatgccagcccaagcaataggaagagaaaaccagatgtctctattgttctttcaactgcaccagaggatgcccctactcactggcagcaggtgattgttttacacagtatcatattgtttttcttttacctaaagatataggtatgattctgttgaacttcgtacacg

SEQ ID NO: 95013 - DNA, 1388 bp, Zea Mays
atggccgatttggggagaagggcggcttgcgcggacaatgtagctcatatagtccatagcctattcgaatgccttctaagccggcccgttggcccaactgaaacattagtccgccttctcccccgagacccccgagagtcccctcgctgccgacgccacacaaacgcctccaccctcatgttcaccggcgctgcgggcggcattggcaacctgccacggccgcgcaggccgcggctcggcggaataggacacgggggcgtcatggtgtctccacagggacaggtggctctgggggcacatccgcacctagccgccccgccgtgcaccgactacgacgtggcctacttcaaggcctactcacacatcggcgtccacgaggagatgctcaaggatcatgtgagaactagtacttacagaaatgccataatgcatcacaaagatcttatttcaggcaaggtagttttggatgtgggttgcggcactggtgttctttcgatattctgtgcttttgctggtgccactcgtgtttatgcagttgatgcaagtgatattgcatttcaggctatggagattgtaagagagaatgagctgtctgacaaagttgtggttttgcatggccgaattgaggatgtcgatattgaagaaaaagttgatgtcatcatatctgaatggatgggctacatgcttttgtatgagagtatgctgggaagtgtaatttttgctagggacaaatggcttaagccaggaggtcttattcttccatcgcatgcatcgctttacatggcacctgttacgaattctcaaagataccatgatagtatttacttctggcgagatgtatatggcataaaaatgtcctctatgatgcctcttgcgaaactatgtgcgtttatggagccatcagttgagacaattagtggagagaatgtcttgacatggccagcagtggttgcacaggtggattgttataccatacaagctcagaagctcgaaaccatcactgctgcatttaaatttacgtcaatgttacaagggcagacctggtgcagtagtgagagctgtttcaccaagtcaccaagtcatgggttcgaagtaacctctccacattttcgtgggaaaagcttgccttggtttatccctttccgagaccccactcatgtgggagcctccgacattgtgtctaccctttttataagcctacactcgtttcaaagcatgcatatactgctttcttcctgttttgcactcggttgttagctgtaattgggattagacatgcactgtgatgagagacttttttcagtgctttcagttaaagggatgagccttagttgtaagttgtatttcccaacgctgagaatgaggatggcatgctactttttccatgt

SEQ ID NO: 95014 - DNA, 744 bp, Zea Mays
atgccaaattcacagagtggcagacaaatgcagctcgctttccaggcgttggctcagagcccacgattgtctgaccctctgcaataccaatcaattgttgacgctgagtggaacattatttatgataaactggataaatgtgtgaaaagtggagcaaagatagttctgtctcggctagctattggtgatcttgcaacacagcctatctcagataatttgggtctatacagtattttgcagatcgagacattttatgtgctcgccgtgtcactgaagaagatttgcaacgtgttgctgcagcaactggtaatcgggtcctgtgaggtattcgaggaaaagcaagtaggcaatgaaaggttcaacatatttagtggctgcccttctggccagacagcgactattgttctccgtggtggtgcagaccagacttgcgacgtactgaattccgagtctaggctcaagtacatccgccatggcggcacgctcggcacgaggatggttcgggcagacgccgcgaccatcaacttggaccggaggctccaccaacttctcaacgagcatgaggagtctgagagtcacgccgaccatgcgacagcgatccctgtgcaggaatgggggcagaggaggtactcggtggtgaccgtgaggtgccgtgatcgccctaagctgctctcgcccccgtcgatgcgtcgtggtagttgtcgtcctctcccctcacccactcactaccaccacctcggctga

SEQ ID NO: 95015 - DNA, 3966 bp, Zea Mays
atggcgtcggtggaggtgcgcaagtccagggccctgcgggcgcgcagcgggcccagcaagctgcagccggcgcggtcgatgccgctcgactacaggtactcggccggggcgtcgccggcgaacggcgccggcggcgggccggacgcgaacggcgtcgggcggcgggcggctgcggcggaggcggagaacggaggggaggtggtggtgcggttggaggggggcgatgcggactccccgtacagctccacggcggtcacagcggcggaggaggaggaagtgggggagagaggtggaggaggagacgaggtggattcagcggccacggcgacgccgaggcggttgtcgccgagggcagcagcgagccccacggaaggcgacgcccggtggggtgacaccagctcgtacggcgctaagaagaagcatagagttttttgtcagcttccgaatggcgattgggcattatgcacagtaattacaacctctggtgatgagtcggttgtaaaggtttctgaagggaaggtactgagattgaaaaccgagtgtctacaacctgcaaatcctgaaattcttgatggagtggatgatcttatgcagctaagttatctaagtgaaccatcagtactgtacaatctgcagtacagatactccaaggatatgatttatactaaagcaggtccagttttggtggctgtcaatcctttcaagaaagtttcactgtatggtaacgagtacatcgatgcatatagaaataaatcaatggatagtccacatgtttatgcaatagcagatgcagcactttgtgaaatgaaaagagatgaagtcaaccaatctataattataagtggtgagagtggagcaggaaaaacagaaaccgcaaaaattgctatgcagtacctggcttcccttggaggtggaagtggcattgaatacgaaattcttcagacaaatccaatactcgaggcttttggcaatgcaaagacattgagaaatgataactcaagtcgttttggaaagcttatagaaattcatttcagtaccactggaagaatatgtggtgccatgattcaaacatttttgcttgagaagtccagagttgtgcaatgtgcagttggtgagcgatcataccatatattttatcagctgtgcgctggtgcacctgcctctctaaaagagaagttgaatttgaaaaaggtggatggatacaaatatcttaagcagagctgttgctattcaattgcgggtgtggatgatgcccaaatgtttcgaactgtgacgcaagctatgaacattgttcatatcagcaaagaggaccaagagagtgtttttgcaatggtctctgctgttctttggctgggggatgtctcgttcacagtaattgacaatgaaaatcatgttgaaatcatagtagatgaagcttcgaaaacggtttcagaacttcttggctgcagtattgaagatctcaatttagctttatcaaagcgccacatgaaagttaataatgaaaacattgtccagaaacttacccttgctcaggcaactgacacaagagatgctctggccaaatcagtgtatgccagtttgtttgagtggcttgtagaacaaattaataagtctctctcagttggcaagcgtcgaactgggagatctatcagtattcttgatatctatggctttgaatcatttgataagaacagttttgaacagttctgcattaattatgctaatgaaaggttgcagcaacatttcaatcgtcatttgtttaagcttgagcaagaggaatatgtggaggatggcatcgactgggcaaaggttgacttcgaggataatcaggactgtttgagcctctttgagaaaaaaccactgggactattgtctctgctggatgaggaatctactttcccgaatgccacagatcttacttttgcaaacaagcttaagcaacatcttgactcgaattcttgcttcagaggagaaagaggcaaggcatttgctgtccgtcactatgcaggagaggtggcttatgatacttcgggttttctggagaagaatagagatttattgcacatggactcgattcagctccttgccaaatgcaaaacttctctgccaaaaatgtttgcatcgaagatgctagttcaatcagataattctatgtctgttccatatagatctagtgctgctgattctcaaaaactaagtgttgccatgaagttcaagggtcaactgttccaacttatgcaaagactggaaagtacaacgccacactttattcgttgcattaaaccaaacaatttacaacttcctgcaatttatgaacaaggacttgtgcttcaacaacttaaatgttgtggggttcttgaggttgtccggatttcaagatctgggtatccaacaagaatgactcaccagaagtttgctcggcggtatggttttcttcttgaggatgttgcatctcaagatccactcagtgtttcagttgcaattcttcatcagttcaacattttacctgagatgtatcaagttggctacacaaagttgttcttccgaactggtcagattggcaaccttgaagatactcggaatcgtactctgcatggtattttaagggttcaaagctgtttcagggggcatcaagcccgtcatcatgcaagagaacgaacaagaggagttttgactcttcaatcattcattcgtggtgagaatgcacggcaaatttactcctctttgttgaggaaacatagagccgcagttgttttgcagagaaatgtgagatgttggcttgcaagaaggtatttcataaatgtccggaaggcctcagtgataatacagtctggtattcgtggcagtcttgttcgaagatgtaatggcaatattgatctaataaatgtgctaagagagtttgaatcaaaacaggaggcacatggtgaccaaattttgatcaaggcctcagtcctggctgagttacagaggcggatactaaaagccgaggccacagtacgtgaaaaggatgaagagaacgagatgcttcatcagcggcttcagcaatatgaaaaccgctggttagagtacgaacagaaaatgaaagctatggaggaaatgtggcagaagcaaatgcgttcgctgcaatcgagcctttccgtagcaaagaagagccttgttttggatgaaacgcctaggatgtcggactcatcagtggatcagagctgggaaagcaatgggaaccaccatgtcagcagcggttctcagctggtgccacacactggtggacgtgaaatgaacgctggcctcagcgtcatcagccgcctggcagaagaattcgagcagcggagccaggttttcgctgatgacgccaagttcctggtcgaggtcaagtctgggcaggcggacgccagcctaaacccagacatggagctccggaggttgaagcagaacttcgactcgtggaagaaagatttcagtggacggatgagggagacgaaggtgatcctgaacaagctcggcaatggcaacgagtcatcgcccaactctgtgaagcggaagtggtggggcaggctgaacacctccaagttttcgtgagtttattatgtattgattggtaatttgtagatgtaaccggtattttacacgccggtgtggttctagcttcctagagtttctactctacgggtgctgtgaaagtccagtgtgttggactggatttgtattccacggagggcgagttgtatagttctcccacaatggcttccttttgaggggtcaaggaccactgaattgtgatgtaattacttgctgaagtagctgtcgaaggggggagattgtgagtgcttaatattccactatccttgtgctttactttctgcctgttgtagattcatagatttaaatgttggtatggtgtgacataatctatcatccgatgactcgtagcatgtttggtttgagaaataagatagtttattatttctc

SEQ ID NO: 95016 - DNA, 265 bp, Zea Mays
caatccatattgatttgatagaattgagtggatttaaatcctaaataaatcaaaatattttataatttttttaatcttatccaatgattcaatccatataggatgggacgaacgaggcctaaaaggttagcatgccattcttatttcagctacctcgatgggtactcagctttttgcagattcccatacatccgtcggaccagatttactaaaaactacacatctaaatagagtatatctaatcaatgcaaggtaaaaaagggat

SEQ ID NO: 95017 - DNA, 114 bp, Zea Mays
gaatgctgtgtgtgtgtgtcgaccatggtgaatctaggttatttctaggggtgtgcaaacgcattccaaaaaatgtaaatcctacgattttagttaattttcatcacctttaga

SEQ ID NO: 95018 - DNA, 1380 bp, Zea Mays
atggcggcgctgcatgcgatctccatcgccgcggcccctccaccgatcgccttccgcgagacatcatcaccagcaacctccgctggggtgtgaggtgctatgagcatgtgactctaaatctactagtcctagaatggattacagttgtcaggaatttttgttgggactgtgatataaaaaagttgaaactttcatacttacctgccgagaatgcattgttgaagttgcaaagatgtatgtctaagtttattttcacataatagtatattttttctattatcaagaattgtttctcaatacattcatgagttggaaattgtattgtgagcctttctatattatctagtctagctagctctacaatagagctctagtacagacagaacacatgctttcatactcctatggaatagtagaatcaggtagtagaattaggtgttcattaaccatgcaaataattaattcaagttatctaaataggcccttagtttatactgctgaaagtataaaaagtgttccactctcaataccgagaataggaagactccaccatgtatatgtgttcttatcaggtgctcttctttcccgataaaataaaaatcctttgcttcaatctgctacatgatactttgtgtatagataaaggaatacatccatatgatgttcctgggagttagtttgatgtcaatatactccatgcttgctgattggaaaggaaactagttatttcgtttgaagtcatatgctgcttggcgtcattctaatccaagtagctgaggggtcaacagtggctaacttccctgtcactttattccaaagagcaaaagggaatcccaccctagctgtgatattttccctggattatggttgtccaggaatcctacatggagtggaatttatctccgggttaattaaccttggttgccaaactagccctcaatgtgcgggacaagaagggaaatactgctttgcacatagctacacggaaatggaggccccagggatctggaataacaggagcctgatggttgcatcagtagagttgaccacttctcagtattgcgagatgcatcttacatggtcaagaagataattcctattctgagctacttgctcgtgtacaagtctccttatcatgtcctcctttcaagccagtctattctttgcttgattcatcacgggtgcacattattgtaattagaatcttcagagtactcgaaggatagttaaagctgtttggctagtccttcagattactgaaaatatagttaagaacatttgtattttgctatttcgatttccaacagtacaactattggggatgattgtttatgtgatgtggatctatcattgtgcaatactaattaaatttgtatatct

SEQ ID NO: 95019 - DNA, 974 bp, Zea Mays
catttgcgatgatggtgagctcctcgctcaaggccacggcggcggctgctaccatggtggtcgtcgcggccgtcatcgcgtccacggcggacgcggccggctcctactacatcccgacgcctgctacccccgacttcctctcgtcgcccgtcttcctgtgggtggcggccaacgtgatcatcgtgtggctcgtctcctcctcccgccgccgtggcagggcggccgacgacgacaccggcgagccgtcctcggcagcccacgacggcggcggcggcgaggcagtggttccgggcgccgtggacgacgacagcttctacgcgtcggagtacgaggctttctccgacgcgacgctggtgtccaggaggccgcaggcccgggaggcgagcgcgggtcggagaagcgaccgcccccgcgtgcgcaagaagccggccggcggcggccaggacgcggccacgaccccggcgacacgtgatgatgagccgccgccccgcgacggtagacgacggcgtggccaggaggagacggcggcgcctgctgtatcatccgtcgtcgtcgacgaggacgtctcgatggactcgctgtgggcgtccatcgtgcagcagcgcgcggcgcggccggtggtggtgcggaagagcgagtcgtggggcaacgaggagctgccccggctgcagcgcgtggccgagacggcggcgcggcggcaggtgcgcaagtccgtctcggcggtcgtcgccaaggcggcggccgcgacgccgccgcctgcaccaccgtcagcgtccaggcagacggggtggcggacccgggatgtgctcgtcaccatctcccccgacgatctcctccggcgcgcggagagcttcatccggcggcagcgcgagcacctgcggctgcagcggcaggagtccgagcagcgccagctgctgctgcagcagcgtcgcgtccacggggccgcgccgccggcacctctcatccgcgtctag

SEQ ID NO: 95020 - DNA, 109 bp, Zea Mays
aataagtcatgtagtcttcgtgtggaggacagtccgcacagcatctctgctgtccgcacagcatctctgctgtaggacagcagcaacagcagtttttgactgcaagaac

SEQ ID NO: 95021 - DNA, 1110 bp, Zea Mays
tttcaggaccttttgctgttattgatcaacatttggatattactcttccaaattgtcatgatgctgtatgcctcatgctcataatctgcataactaggaagcaccagttggttatgtgcaacagacagctttcttgtcttgataactattttgataaggctctgatgtatctctggccacgtttcaaggtagtgtttgacatgtatattcaaagcttatatcagtgtgatgcgaaaacattatggatagatggtacccatccacaccatattgcaaggtgctacgtggagttcacagcatcccttgttcaacttaatgctgaatgcggagatggtcagcttgatatgaacttggaacgcttgcagtcagctatcgaattcctacttgttaggcttgcccaaacttttacaactaccaagctgcagcacctttttcttctaaataattatgacatggccatctctgtcctgaaggaaactggcgatgaagccaaaaaactgcaaaaatattttgaagagaagttagaaagtaacatgatggcttttgtggatgatttgctgatggaacatttcagtgacttacttcggtttgtgaggagtcatgtctcggaagacctggtatcttacaccgagaacaccaatattgccgacgttgagccagttgtgaagaactttgccatgaagtggagaattgctctagagctcatgcacaacgaagtcataacttcttgtactaaccttttgtctgggatggcaattctaaaagcagctatgactcagttgcttaatgactataacaggctctcagagtgcgtcaaaaaaatcacagggggttcaactttgaacagacatatggtttccatcacatctatttcatatgaaatcaggaaatactcaagaacactctagctgcttataatggtgtcaaagaaattctgataaaaaggttaaacaaaaatatcaccatcgagatttttttgaacattccaaccaggcaaatgctggttgcatttttagtttgatttttgaaattaggtattgtaaatgggacagctcgaacatgttttaatttttgtttgtgactattattgctcatttttatatgctacaa

SEQ ID NO: 95022 - DNA, 3063 bp, Zea Mays
gaaattagttctcgtgttttcggccgtgcgctcgctggcgcaagccgcgcgaatcggatcgctgtccgcctctccatttcccctcgtccgcacacccgagcctcgcttccgcctcccacttcccaccaggccaccaccccgtccggcgatcccgatcgcgagacgagggtagcgagatcgagaggattgtcgcggctgccgggcggcgctccagttccaagtcgaggcgaggaactacacgtgtgatatctgcaactcatatggctgggacccacaagaagcgaatggaagaccgttttggtagttttttctcatttgatgaagattctgaaagtgaggacatatcgctggatgagttggaggaggaacttaaagagcacaagaactgtgatgtactagtaactattttaaccaatggtgaaaaacagcgaggcatggcaacattggttgagggcgacctaggccatactgaagaagctcttattcaagattatattgaggataatgacagccttgttctgttgcacgatcagattcatgactgtgacgttattttgtcacaaataggattaattcttagtgggtttcagacccatatatgttcgataagctcggaaatcagaagcctccaggagaaatcctgggatataagcttgaaattgaagaaccgcaaggtcaggacaagcctgcatagtgcataccatatgttaacatcaataatttcctgtattttcacaaattagcttacaggtaacattaattttcatagcaatttgattgatttttcctctactatattgcaagtgtaacatacagtgcacaatacacttatttattttagctttgttataattaaatgcgctgacatgaaagcttaaacatgctcagttggttgagacaaagcttgctgggtttgttgaagagatagttgctcctcctggtttggtaaatattcttgttaatggagaggtaaatgaaggttatgccagaagtctggagatccttagcagaaagttgaaatttgttcaagtggatccgttgattaatgcatcaaaagctctgaatgatattaagcaagaattggaaaggcttcgacaaaaggcactatccaagatttccagccatattatggagattttctttgctatgagaaaccctgggactaatatacagatattgcaacaaaatttgcttcagaagcacaggtatctcgttctgtttcttaaagagcatggttccgagacatatggtgatttgtgtgcatcatatgttgatacaatgaacaaggtgctgagtacatactttcatgtgtatgtagaagcattggagaagttgaagctagaaattggtgtacccagtgattttaatggacatgataccagtatcatcgatattataataagaggaagggagcatttgagaaatcatggtttcatgttttcgttaggtgaacgtgcaaatattctgaaggagattcatcaacctggcttggttccacatatatctcaaggcaactctcgtacatacccatatgaagttattttcaggagccttcagaagcttctgatggacactgctagctctgagtatcttttcatggaatcattctttggagaagagtcactgttttatcaagtttttgaaggaccttttgctgttattgatcaacatttggatattactcttccaaattgtcatgatgctgtatgcctcatgctcataatctgcataactaggaagcaccaggtaagaaggtataaacacaatgtattaattgtgtaatcaacaaaagaaaatgtgttattgctgatcacacaaactgtaattacttcaaagttaatttcttaaaccacaagattatggatcatttctaaactatttttctttctattatagcacattttgcttgttagttcaccatattgtcctttttttgtttcagttggttatgtgcaacagacagctttcttgtcttgataactattttgataaggttcgttacgagctacaattttgtatgcgtgaaaaatcactctgccgtcaacttccacttgttctgttttttagtttcttatcttgattgtgagttgtgacactcatatctgctttaggctctgatgtatctctggccacgtttcaaggtagtgtttgacatgtatattcaaagcttatatcagtgtgatgcgaaaacattatggatagatggtacccatccacaccatattgcaaggtgctacgtggagttcacagcatcccttgttcaacttaatgctgaatgcggagatggtcagcttgatatgaacttggaacgcttgcagtcagctatcgaattcctacttgttaggcttgcccaaacttttacaactaccaagctgcagcacctttttcttctaaataattatgacatggccatctctgtcctgaaggaaactggcgatgaagccaaaaaactgcaaaaatattttgaagagaagttagaaagtaacatgatggcttttgtggatgatttgctgatggaacatttcagtgacttacttcggtttgtgaggagtcatgtctcggaagacctggtatcttacaccgagaacaccaatattgccgacgttgagccagttgtgaagaactttgccatgaagtggagaattgctctagagctcatgcacaacgaagtcataacttcttgtactaaccttttgtctgggatggcaattctaaaagcagctatgactcagttgcttaatgactataacaggctctcagagtgcgtcaaaaaaatcacagggggttcaactttgaacagacatatggtttccatcacatctatttcatatgaaatcaggaaatactcaagaacactctagctgcttataatggtgtcaaagaaattctgataaaaaggttaaacaaaaatatcaccatcgagatttttttgaacattccaaccaggcaaatgctggttgcatttttagtttgatttttgaaattaggtattgtaaatgggacagctcgaacatgttttaatttttgtttgtgactattattgctcatttttatatgctacaa

SEQ ID NO: 95023 - DNA, 2747 bp, Zea Mays
gaaattagttctcgtgttttcggccgtgcgctcgctggcgcaagccgcgcgaatcggatcgctgtccgcctctccatttcccctcgtccgcacacccgagcctcgcttccgcctcccacttcccaccaggccaccaccccgtccggcgatcccgatcgcgagacgagggtagcgagatcgagaggattgtcgcggctgccgggcggcgctccagttccaagtcgaggcgaggaactacacgtgtgatatctgcaactcatatggctgggacccacaagaagcgaatggaagaccgttttggtagttttttctcatttgatgaagattctgaaagtgaggacatatcgctggatgagttggaggaggaacttaaagagcacaagaactgtgatgtactagtaactattttaaccaatggtgaaaaacagcgaggcatggcaacattggttgagggcgacctaggccatactgaagaagctcttattcaaacccatatatgttcgataagctcggaaatcagaagcctccaggagaaatcctgggatataagcttgaaattgaagaaccgcaagttggttgagacaaagcttgctgggtttgttgaagagatagttgctcctcctggtttggtaaatattcttgttaatggagaggtaaatgaaggttatgccagaagtctggagatccttagcagaaagttgaaatttgttcaagtggatccgttgattaatgcatcaaaagctctgaatgatattaagcaagaattggaaaggcttcgacaaaaggcactatccaagatttccagccatattatggagattttctttgctatgagaaaccctgggactaatatacagatattgcaacaaaatttgcttcagaagcacaggtatctcgttctgtttcttaaagagcatggttccgagacatatggtgatttgtgtgcatcatatgttgatacaatgaacaaggtgctgagtacatactttcatgtgtatgtagaagcattggagaagttgaagctagaaattggtgtacccagtgattttaatggacatgataccagtatcatcgatattataataagaggaagggagcatttgagaaatcatggtttcatgttttcgttaggtgaacgtgcaaatattctgaaggagattcatcaacctggcttggttccacatatatctcaaggcaactctcgtacatacccatatgaagttattttcaggagccttcagaagcttctgatggacactgctagctctgagtatcttttcatggaatcattctttggagaagagtcactgttttatcaagtttttgaaggaccttttgctgttattgatcaacatttggatattactcttccaaattgtcatgatgctgtatgcctcatgctcataatctgcataactaggaagcaccaggtaagaaggtataaacacaatgtattaattgtgtaatcaacaaaagaaaatgtgttattgctgatcacacaaactgtaattacttcaaagttaatttcttaaaccacaagattatggatcatttctaaactatttttctttctattatagcacattttgcttgttagttcaccatattgtcctttttttgtttcagttggttatgtgcaacagacagctttcttgtcttgataactattttgataaggttcgttacgagctacaattttgtatgcgtgaaaaatcactctgccgtcaacttccacttgttctgttttttagtttcttatcttgattgtgagttgtgacactcatatctgctttaggctctgatgtatctctggccacgtttcaaggtagtgtttgacatgtatattcaaagcttatatcagtgtgatgcgaaaacattatggatagatggtacccatccacaccatattgcaaggtgctacgtggagttcacagcatcccttgttcaacttaatgctgaatgcggagatggtcagcttgatatgaacttggaacgcttgcagtcagctatcgaattcctacttgttaggcttgcccaaacttttacaactaccaagctgcagcacctttttcttctaaataattatgacatggccatctctgtcctgaaggaaactggcgatgaagccaaaaaactgcaaaaatattttgaagagaagttagaaagtaacatgatggcttttgtggatgatttgctgatggaacatttcagtgacttacttcggtttgtgaggagtcatgtctcggaagacctggtatcttacaccgagaacaccaatattgccgacgttgagccagttgtgaagaactttgccatgaagtggagaattgctctagagctcatgcacaacgaagtcataacttcttgtactaaccttttgtctgggatggcaattctaaaagcagctatgactcagttgcttaatgactataacaggctctcagagtgcgtcaaaaaaatcacagggggttcaactttgaacagacatatggtttccatcacatctatttcatatgaaatcaggaaatactcaagaacactctagctgcttataatggtgtcaaagaaattctgataaaaaggttaaacaaaaatatcaccatcgagatttttttgaacattccaaccaggcaaatgctggttgcatttttagtttgatttttgaaattaggtattgtaaatgggacagctcgaacatgttttaatttttgtttgtgactattattgctcatttttatatgctacaa

SEQ ID NO: 95024 - DNA, 730 bp, Zea Mays
gaaattagttctcgtgttttcggccgtgcgctcgctggcgcaagccgcgcgaatcggatcgctgtccgcctctccatttcccctcgtccgcacacccgagcctcgcttccgcctcccacttcccaccaggccaccaccccgtccggcgatcccgatcgcgagacgagggtagcgagatcgagaggattgtcgcggctgccgggcggcgctccagttccaagtcgaggcgaggaactacacgtgtgatatctgcaactcatatggctgggacccacaagaagcgaatggaagaccgttttggtagttttttctcatttgatgaagattctgaaagtgaggacatatcgctggatgagttggaggaggaacttaaagagcacaagaactgtgatgtactagtaactattttaaccaatggtgaaaaacagcgaggcatggcaacattggttgagggcgacctaggccatactgaagaagctcttattcaagtatgagttgctgaaagctctagctatgccacttctaaaatcacaatggaaatggcagcacatctgttttttcttttcagaattggtggctatcatactattttatggtactgttgatgggtttttgaatgggataaactttggtggatgtataatatcctttctgaaactctatttgctgcaaagagaaatggtgattatgtcagaaaactccgaataaatgacaaaatttccgttcctta

SEQ ID NO: 95025 - DNA, 417 bp, Zea Mays
cattaactggcaacaccttttgtctgtctgcactatggtctatggctcatgctgcccttctttgcacctcaacaagtacgacatctttgatttttgtgtgttaacaaagattttacctggtcgcaggttcaccttttggcgatctgttaagaagtctgcagtatatacgtgtcaccatgactatacacctacaggaatttacagtctctgtttgttacgaaacaatcgtttgtttttcatgtagacacggcgcaaaaactgccactgcagcagaatttgcgcgctgagagagttgggacttcatgtgtagatttgttgattgatcctggtccatgaaatggtaaaccccaactccatcttttaacctgtattaaggcggcgcctgtcggatgatgcattggcgggcctagttgcggc

SEQ ID NO: 95026 - DNA, 524 bp, Zea Mays
aggacaatagctagacttagatcgcagatcaaatatctaaaagagggagatgcaaacacttccttttttcatctacaggcttgctatcagaaaaagtggaactttatctctgaactagtgcatggggaccagatcgccacctctcaagagcaaaagcaggaggtcttgtttgaatttttctccaatttgttgggcgtagcgaaacagcgtgagttcactctagatttggaggcttgccacagtgctgatgttgatcttggggcttggaccttttcattacagaggaggaggtccgggccactattgctagccttccctcggacaaagccctggggctagacggttatacaggaaggttttataaaacttgttggcacataattaaggctgatctgttggcggcagttatcaccctgcaccaaggtaacgcgcgcaaattgtggatgatgaactctgcgtacctaacccttatccctaagaaagttgatgccaagacaactggagattacaggccaattagtctt

SEQ ID NO: 95027 - DNA, 1900 bp, Zea Mays
gtcgcgggggtttgccatacgaaatcctgggcggcgatcttggcaggattgtcgggtgcttacggaagcggtcgggcgggagggcgggatgcggggctggcggcgggatgcggggtggggtgcggtcgcgggcgagatgcggggtgcgtgcggcagaacggcagaacggtgtggatgcctacgttatacataattagtagtagagtttttcgaaacttgagtggtaaaatatcatttattccgccacacacccatatgccaaattgcattgacagagaacgagagaaaaaaaaatcctaatccaccctcgccgcgagatcgccggtcgctcccatgtcgactccagccgccgctgcgaagcaatacttttgctaccaatgcaaccgcaccgtcctcatcgcggcctccgccgtcgccgccggggagctctcgtgccccgagtgccacggcaacttcctcgaggaggtcaccatccctgccccaaccttcatccagctccctttcccttttgcttccaccacgatccctaccgccagtaccgccccgcgccccgccccagcagccggcaccggcaggcccccttccttctcgtcctcctccgctgcgacctctcggtccgagccccgctacatctcctccatcctcaactccttcgtcggacccggcgaacaacccaacaggatcagcggctccagcatacgtttcgcccctggcacggccacccacaggaacgagcccgagcccttcgacccggtaatgttcttccagaattacatccaaagcctcgtggagggaggcgccaacatccaggtcctcttcgacgatgccagcgcgagcctcggctccggacccggcctagggcgcctcggcggggcaagcttcggggattacttcgtcggcccaggcttggaacaactcatcgagcagctcgccgagaacgaccccaaccgctatggcacgccgccggctgccaagtcggccctctcctcgctccccgacgtcgtcgtgactcacaccatggtcgcagctgcggagggcgctgagtgcgccgtctgcaaggaggatttctctcctggagaggtggccaagcagatgccctgtaaccacatctaccacaccgactgcatcatgccgtggcttgagcttcacaactcgtgccccatctgtcgctttgagcttcccactgacgatcctgattatgaggtgcggaagggctctaattctcagcaggctgttggtattgctgctgctgcatcagggagctctactgctgctgagggacaaatggagaggcaggagaatccaagggtggttgagaggaggttcaatgtgtcgctgccatggccattcagtggattgggagggcaaacatcgcagcaggacgggaacagtggaggcagtggtagcaactcacaaggcagtggctcgcaggatggtggcccacccagcagcaagaattgataaaaaatcagctggaggtatttccaaataaaattctgctaccgttactagatatgtttttttttgaagtggattgtgagtcagtttgaaactatttattgtcacatctaatctcaatttatttgttctgtgttttgactgtggaattactgttttctttttaaccacgagggaaggaaccacccaaatgtagtgaaaatgtcataaaaaggcaatggcatttgtgtatgctataagggtgtgtttggtttggattttgccctcccctaaaagtcaaaagccaaaccaaggggctggatcccgaaaacagttttttctaaaagtcgactttctctcgttgcaaaattgaaattacctgtggacctgctattagcgactttcggatgaaactatatatggaagaacttttagtgatttttagtggtttccaccaaacagt

SEQ ID NO: 95028 - DNA, 319 bp, Zea Mays
taatgagatacaccgcctgaactatacaggggaagcaaaacaagcagggctgcaagaaaagaataatcttatgacacagtaactgaaagaggaataattgaactacttaagaaactgagcaacaatgagtaaatttaggcacaagccacagaaagggtatcttaaagaccaaaaagacaatagctcaaaacaaagaaatatccaatcaaaggattccatgatgtcacatttgaagtatgaaccaagtacttacttgcagatctttggctgcttgctcccgtgatattgctttctgctgcctagaacgttttagcacacc

SEQ ID NO: 95029 - DNA, 461 bp, Zea Mays
gtggccgcgctcggcgagggagaatggcgtcggcgagccgctgggcgtggatggcggaggtggcgggggaggagctggcgaagctggaggcggcgcacccgggccgcttcggcccgctcaaggccgagctcgagcgcttcgtcgccgaccccgccttggacgaggccgcgttcccgctcgtctcaccccgcgccgacgccgctgataccactccggccgcctcgttccattccgctgctccttcgcgcacggtgcccgtgtgcacccaagagtcgtcgacccggaagagaaagccgcgcggcagcgtgcgggagcgggaggaggggaagcggagacggcgggcgagcacgccgccgggagggacgaaggacagggcactcatggccatcgagcgcgcccagcgatgcctagagaggatccgcgccgtcaaacagagtttgcttgccgcctggatccactga

SEQ ID NO: 95030 - DNA, 1426 bp, Zea Mays
gcctctccttcgtttcaccttatcgtgcagtccggcgcggaaaatttcccggtttcctgatgcgtatgccgtttgttgctccaggtggaactggccgctctcctgcacgacgagattacaagtataccaagaacaatgtggaggatataagcgtcgttgagatgtttcttcaagaggtaggattggatgaaggccaaaaggatgaaatagtggcaattattaaggggatggggttcaaaaatgaagtttcaaataaatctattgttgagcccactcttgaatttgcaattgtacaagatgcagatcgcttggatgcaattggggcaattggtattgcaagatgttttacatatggtggtagcaagaacagcgcattacatgatcctagaattctgccacgtgatagcttgtcgaaggaaaagtacatgtccaaggaagagaagcagacatcaatcaatcattttcatgagaagctttttaaactgaaggacatgatgaagacagaggccgggaaaaggagagctgagaaaaggcataggttcatggaggaatttgtggctgaattctacgaagagtggagtggcagggcttgaggttgaacaaccagattttgagcctgtgtcaaagtgtgcagttggcgaaccatttctcaacaacccatgatgatgttgtctacctggcctacttttttgccgatgaagccaggcaaataaacaatggtttgtccagcctattagattggctggacaaatcatacggtcctgtgataagctatcaacccactaccaattccgtggatgaagctggatttttttttccaaacagatgccatggcatcttgctgctgttgtattgaaataatactgctacaatattaccggttacatcacctgaaggtcaagcgttttgccaacacatatacatatgtatctatacatatatatagaagttctatactagatgtaaatgaaacaaatgaagagccctgcttctttcatactgtatatctctcttcagtctcagagtcttattggcaagctcagctcggcaccaacagttcagagcttggtcttgtctctcttggtcagcgtgaccttgaggccgtacttcatgtacatggtgagcgccatcttgggcgcgacggggtggccctcgacgacgtcgacgcggtagcggcggaggatggaggcggcggcgaacttcatctggtagtaggcgaagtccttgccgaggcacaggcgcgggccgccgttgaaggcggtgaacttgtaggcggactcgctcatgaagcggccgtcccggagccaccgctccggcctgtactcccggcagtcgtcgccccagatgctctccatccgccccatggagtacatggcgtagaccaccttggtgcccttcttcagcaccgtcccgtccggaaacacct

SEQ ID NO: 95031 - DNA, 1618 bp, Zea Mays
gctgttggaggttggagccagcctagaactccacttccgtgttagctttgccctcgtgcgagactctggtactcaatttctgaaggtcgaggcgtgaaagaaaaactccggaggtcgaaatggcggcggcggtgcggcgagcggaggagctggtggagagggagatgggcgggcgcgatgcctcccacgacgccgcgcacgcgctccgcgtccgagaccttgcgctctcgctcgcagccgaagagggcctctccgctcccgaccgcctcctcaccgtggaactggccgctctcctgcacgacgttgattacaagtataccaagaacaatgtggaggatataagcgtcgttgagatgtttcttcaagaggtaggattggatgaaggccaaaaggatgaaatagtggcaattattaaggggatggggttcaaaaatgaagtttcaaataaatctattgttgagcccactcttgaatttgcaattgtacaagatgcagatcgcttggatgcaattggggcaattggtattgcaagatgttttacatatggtggtagcaagaacagcgcattacatgatcctagaattctgccacgtgatagcttgtcgaaggaaaagtacatgtccaaggaagagaagcagacatcaatcaatcattttcatgagaagctttttaaactgaaggacatgatgaagacagaggccgggaaaaggagagctgagaaaaggcataggttcatggaggaatttgtggctgaattctacgaagagtggagtggcagggcttgaggttgaacaaccagattttgagcctgtgtcaaagtgtgcagttggcgaaccatttctcaacaacccatgatgatgttgtctacctggcctacttttttgccgatgaagccaggcaaataaacaatggtttgtccagcctattagattggctggacaaatcatacggtcctgtgataagctatcaacccactaccaattccgtggatgaagctggatttttttttccaaacagatgccatggcatcttgctgctgttgtattgaaataatactgctacaatattaccggttacatcacctgaaggtcaagcgttttgccaacacatatacatatgtatctatacatatatatagaagttctatactagatgtaaatgaaacaaatgaagagccctgcttctttcatactgtatatctctcttcagtctcagagtcttattggcaagctcagctcggcaccaacagttcagagcttggtcttgtctctcttggtcagcgtgaccttgaggccgtacttcatgtacatggtgagcgccatcttgggcgcgacggggtggccctcgacgacgtcgacgcggtagcggcggaggatggaggcggcggcgaacttcatctggtagtaggcgaagtccttgccgaggcacaggcgcgggccgccgttgaaggcggtgaacttgtaggcggactcgctcatgaagcggccgtcccggagccaccgctccggcctgtactcccggcagtcgtcgccccagatgctctccatccgccccatggagtacatggcgtagaccaccttggtgcccttcttcagcaccgtcccgtccggaaacacct

SEQ ID NO: 95032 - DNA, 1208 bp, Zea Mays
gctgttggaggttggagccagcctagaactccacttccgtgttagctttgccctcgtgcgagactctggtactcaatttctgaaggtcgaggcgtgaaagaaaaactccggaggtcgaaatggcggcggcggtgcggcgagcggaggagctggtggagagggagatgggcgggcgcgatgcctcccacgacgccgcgcacgcgctccgcgtccgagaccttgcgctctcgctcgcagccgaagagggcctctccgctcccgaccgcctcctcaccgtggaactggccgctctcctgcacgacgttggagattacaagtataccaagaacaatgtggaggatataagcgtcgttgagatgtttcttcaagaggtaggattggatgaaggccaaaaggatgaaatagtggcaattattaaggggatggggttcaaaaatgaagtttcaaataaatctattgttgagcccactcttgaatttgcaattgtacaagatgcagatcgcttggatgcaattggggcaattggtattgcaagatgttttacatatggtggtagcaagaacagcgcattacatgatcctagaattctgccacgtgatagcttgtcgaaggaaaagtacatgtccaaggaagagaagcagacatcaatcaatcattttcatgagaagctttttaaactgaaggacatgatgaagacagaggccgggaaaaggagagctgagaaaaggcataggttcatggaggaatttgtggctgaattctacgaagagtggagtggcagggcttgaggttgaacaaccagattttgagcctgtgtcaaagtgtgcagttggcgaaccatttctcaacaacccatgatgatgttgtctacctggcctacttttttgccgatgaagccaggcaaataaacaatggtttgtccagcctattagattggctggacaaatcatacggtcctgtgataagctatcaacccactaccaattccgtggatgaagctggatttttttttccaaacagatgccatggcatcttgctgctgttgtattgaaataatactgctacaatattaccggttacatcacctgaaggtcaagcgttttgccaacacatatacatatgtatctatacatatatatagaagttctatactagatgtaaatgaaacaaatgaagagccctgcttctttcatactgtatatctctct

SEQ ID NO: 95033 - DNA, 336 bp, Zea Mays
atgaagcgagtggcgctggcgcctcgacggcgcccgccaggtgcggccggaggcagcggacccttcggttggtttagggctcggctggctcgtcgtctccggccgagaaccagcaggcaccgccgtggtcgatccggtgctcgcggtcgcagcagttgccgagggttgcggttgtcggcttccgcgtgccgcgtcctctgccgttggccgtcgtggcctgcggttgctttgcttcttggcgtcgccgaaactgctcacgggcgagcacttgagctggaggctgcagcacgagcgagcaccaagcagccaagcacaggagcagccagcaggcagtag

SEQ ID NO: 95034 - DNA, 405 bp, Zea Mays
caggactcctattgttctggatggggttacaactacaaacttcaatagcttcgtttcaactatcaccttgcacatacctgatgtgacggtcattacacttcaaggtgagccccggactgacaagaagaggtctcaagactcagcgtctctgctaatgcttaagaaattcgaagaactcggagtctgcatatgcgagacgcagccaagcaacatggataataataataatgccagttaatggacaacactgattaatgttggggttactatctccctcccaatgtgatttctgttgaaaatgtttgtgagacactcgatactccgtaaagtatttgctggtacagtacattgccatttattgacttagactgagcttaccaatatgaataaatggagatgcaaaac

SEQ ID NO: 95035 - DNA, 3889 bp, Zea Mays
tttttttttcagttttgaaggactatgttgttcgttctagaaaatcatacatgcatttatctagcaatcttattaaccagagtaactattggtacaatttgaatgtttatatgctaactctttattacatttctctgataggtggtgaagatatataatgaaagcattaataccatagatgattctgaagattgcgtattttctaaagagagcctcaacttacaggtttcctatttcaaagaagctttatttttgattgaagattttttgccacagggttatggggagctgatgaaatcagaatctggttctgcggaactaactaagaagggatatatttcttctaaagtggagtcactgatcaacattttcaaatcgtttggctcgtcagaggaagtgctttgcatgatttttgtagaaagaattacgacagccaaagctgttgaaaggtttatgagaggaaatgtgaacttctctcgtttttcaatttcatacttgactggagggagtacatcaaaagatgctttgagcccagcagtacaaagatttactttggatttgttccgagctgggaaggtgaatttgctttttacaacagatgtcactgaagagggtattgatgtacctaactgttcctgtgtgatacgttttgacttacccagaactgtttgtagctatgtccagtctcgtgggcgtgccagaaaaagcagttcaagttatgttcttatgattgaaaggggtaacttggcgcagcaggaacacatatttcgtataatacgaactgaatactatgttaaaacctttgcactgcataaacaaccaaatactccatcacttgatttgcctctccaagagaagtacatataccatgttgaatcaacaggagcaactatcaccgcagaatgctgtgtcaacctaatttataaatattgtgagaagcttcctaaagataggtattacttgccaaagccttgctttgaggtgggtcttaaggatgggtcatatcaatgtaccttgacaatgcctcacaatgctgcatttcgaagtatagttggtcctccaagtagttcatgtaatttagccaagcagcttgtatgcctggaggcatgcaagaaactgcacgagctgggagaactcgatgatcatctagtacccttgactgaagagcctatggatattgatacagacacaacagataaaaaatgtgtttctggaccaggaacaactaaacgaaaggagcttcatggaacgataaatgttcatggtctatctggaaactggatccatgaaagtgaaactgtgattctgaatgcttacacatttgattttcgttgtgatcaagaaggtgaactttatgctgggttcgttctcttaatggaatcagtacttgatgatgatgtggcacgttcagagatagatctcttccttatacctaataaaatggtgtacaccaccatgactccttgtggaaaaattcaactgaacaaagagcagctgtgtaaaggaaaattattccaagaattcttcttcaatggtatatttggtagattatttcatggttcccgaacggatgaactgcaaagggaatttattttcacaaaaggtcatgaaatacaatggggctcagacaacatgtacttacttttgcctttgaggaactcttcacagatacaacatgatccaaacatatactgggaagccgttgagtcttgctctggtacagtagagcagttgagaaatttgtatctagaagatggaaatctcaaccatgaaaacttatgttcacataaaagaagcaacaagggagaagacatcattcatctggccaataaatctcttcatttttccacagtcaaagattcagttgtactatctcttcatactgggaggatctattctgttcttgacttgattttagataaaactgcagatgactcatttgatgagatgtataatgggaaagcttcaccatttgcttcatttgtggactactaccatcaaaagtatggtattgttattcaacatccagggcaacctttgttgctgttaaagcaaagtcacaatgcacacaacttacttttttcaaaaatgaagtaccaagatggttcaactggcaatcctctgctcgtagaaaaagagcaaattcatgcccgagttccacctgaactactcatccatattgatgtcgcaactgatattctcaaatcattttacttgctcccttctgtaatgcatcgggttcagtctttaatgttagccagccagcttcgcagcaacattagttacattcaacgcataccaagttctctgattttggaagctataacaactttaaggtgctgcgagtccttttctctggagcggttagagttattaggagactcagtactgaaatatgtaataggatgtgatctgttcctaagatacccaatgaaacatgaaggccatctctctgatatgagatccaaggcggtatgcaatgcgacactgcataaacatggaatatggcaatccctgcagggttatatacgtgatgctgcatttgaccctcgtcgttgggttgctcctggacagatatcattgcgcccttttccttgtaattgtggaatcgaaactgcatttgttccttttaatggaggttatatcagtgacgatccatcttttgttgtgggaaaaccatgtgacagaggccacagatggatgtgctcaaaaacagtatctgattgtgttgaagcactagttggagcatattatgttggtggtggcatcgctgctgcaatttgggttatgaggtggtttggtattgatgtcaggtgtgatatggaactagtgcagaaagcaaaatataattctaatgcatctcgaatgtgctatttatcaaaaataaaagatattgaggaactggaagcaaaactgaagtacaacttctcggtcaaaggccttctgcttgaagccatatcacatccatctgtacaggaattaggagttgactattgttaccagcgtctggaatttcttggtgattctgtgctggatctattaatcacacagcatctctatgctacccacactgatgttgatcctggagaattgacagacctgcgttccgcttcggttagtaatgagaattttgcacaagcagttgtaagaaacaatattcataatcatctacagcatggatctggaatacttttggaacaagtaacagaatatgtcaggtccaacttggagtaccatggtaaagagaatcaattccttcaacaagctacatgcaaagcacctaaggttcttggagacatcatggaaagtattactggtgcaatatttatagatgtaaattttgatgttgatctggtttggaagattgttgaaccgttactttctccaatgattacccctgataagcttgcgttgccaccttatcgggagttgctggagttatgtagtcaccttggttgcttcatagagtcaaaatgtactagtgaaggagaagagttaattattgagatgaaggtgcagttgcgagatgaacaactgatagcacaaggacatgacagaaatggtaaaaccgcaaaggcaaatgcagcagcccgaattttggtcgacatgaagaaacggggtctctctcttaaacaatgcatctcgaaggctaatcaattggatattgtctcttcaaaactgcaatcagaattgacaaatttggaatcgcgacatgattgtcctcacatgaatggcactcttagcctaggtctttcctcagcgagagcagcagttgttcttcctctcaaaatggacaaaggtggacctcggactgcactttttaggctatgcaagagtttacagtggccaattccagaatttgaatttgtggaacaaaggtttaggtatg

SEQ ID NO: 95036 - DNA, 1772 bp, Zea Mays
atacgttcccacttccagtgcgccacggttctagcgcccccttgcttcttcttccccgagccgcgtgcccgcgtcaagtaaccaaacctgtcataggctgatagctctcctctccactcctctttcctcgttgattcctgataccatctcgtatcctgtatcaccgcgccaccgacggcgaatccgcggggcggcgccccgaatctgcgctctccgcgctcagatctcccgcctccgcgcttccggatgagccgcccccatttgcccaaggacccggccttcccgcgcaccaacgggtccttggacggcggggcccgcgacctcggcgagattgaggaggttggcgctgcggccaccgtagacgtcgaacagtcccccctgcagtcctcgtctccgtcggcatcgtcgccgccggcggcggcgatttcatcgtgcgggcaatacatgctacaccgggtgcgcaagctggacaccctagcgggcgttgccatcaagtacggtgtcgaggtagccgacattaagaggctgaacggcctctcagctgatctccagatgtttgcacacaagacactgcagattccactcccggggaggcatcctccgtcatcttaccagcagaatggctcatatgagagtgacgacagggaatgtactccacaccgcattcagaatgatatcttggattcaatattgaaaacaccaaagcccaaagtttcgccagctatgagtcttctgcagggatactatggccttgcaccacctccaaagagagatcaaacaagcgaaggcactgagatggcagtttacagtaaaggcaaatctgcttttctggatgttgagccgtggctggagccgccaaattccgacccattccctctccagaataggaaaaccaaaagcttgacgataggttctcttgatggtgatactgatgagaatggtgacagtgaaaggttcgtaaggcggcgccagaaagctgatggtgagctgttaccgagggaggaaaatggcggtgactttctggcaagcgccggaaaaggcttggcactgaggccaaagtctagcagtcgaccagacatgaacaagagccagcagaatctttttgcaatggcggagcctttgtttggcagcggcatgcaaactgtaaggaaatcatccagcactccagagttccaggagccagagaccagcaccagttcatccatatggtcagcaagcaagtggagcataaatacagatgcttttgctcttcctctccccatccctcgttttgacaacattccgaagcccattgctgcttggagaaacaaggcggctcgcgattaataaactgctatataatcttggttatgtgcatgatttttcctgaactccaggaggcccagaacgtgtaattaggttggcaccagcctttacagctttggaagcgaagcagagcaggaccgtaattggctcctgcgagctagaacattctgaagatcagacgcatgtcgtccatgtttccagatggtatctagattaggtttacatgattctcatgttatattgggcatgttgcgccaagagtagcaacgttaatattcggtcatataaattatagatgctagatgacatagaggagacgatatttgcggagggtattcttttgtacacaatgagataatgtagagcatcaaaggaatccacaatgagatatatgtgttgtatgtgtgatcccatacccaaacatggaggaggattgctttatttaactacagattttgtttttcttc

SEQ ID NO: 95037 - DNA, 107 bp, Zea Mays
aaaaacctaaaatcgaagccctaatatctagccgtgttcaatggaatcagaatgagatgcaaaagacaaaacctagcacgaagaacacatagccagagaagtcttcg

SEQ ID NO: 95038 - DNA, 3201 bp, Zea Mays
tgcaagcaaccaaacaacatctcttgtgaaccagactggccacatacacacaaccaaacacgctatactgcatgcactcagccagtccagtctgagccaggctcactagatacgagccaggctcacccatacaagtaaccgaacgccccctaaagttcggtcgcaacgcggccgacgccgccacaagcgcatggcggcgtagacccaaaaacaactgtccccttccgaggtccacctgtctgtcacggcctctcacggaggccgtctgctctctcgcctctcggcgagtcttatcatcccctggcctcgttctaatccacccgagagacgaggtcgagcacgactccagccgcaacgcgcgagcggcgagcctcatcaatcaaacacacgccacacgcgacaagagtacgagtacctaacatacgaatacgagtatacgaccacgagtccacgagcagacgagctcctccgccaccagtgtcatcgcgtcgccgtcgcgtccgcctcgccctcgtccatggcgtccgtgtccacggcgccgcgcgctccactcccggcggcagcgtcgtcctcgttatccgcgcggcaggtggatccgaaccctagcggcagccacttcctcgacgggcggcgcctccgcgtcgtccgccgcctcgccggcgcggccccgtcgcggcgcgctccgttggtctgctgctccgcgcgtagtccggacgcggacgccggcgacgagcgacgccggcggggttgggacgcgatgcttcacgacgccttcaagggtgccgtgcgacggtggagcgagtacgtcagcaattactggcccccaccgacctctgttaaggaggcgggtacggggaagagggttgggaggtctcacgaggaagaggtgatgaatggggatgaagaggagaggaaggttggggaggaagagggaaagtggagctgggcgaggtggaagcggcactttgctctcattgaggagagcgggcgtctcgttgatgagctccagttgcaactccaggctgctgtttatagagaagactacaggactgctcataaactgaggctggctattgctgctacatcaaaaaatgacgctgtgggcagagctatctcggacttaaatatggccatagatgaggagcgctacaaggatgcagcatatatcagagatcatgctggcgcaggactgctggggtggtggtctggaatttctggaaatttgtctgatccatatggtcttattattcgtataagtgctgaacatggtcgatatgtggcaagaagttatgatacaagacagctggcttctgacagccctggtctccctatatttgaaatatactttgcagaggcaaatggtggatataacctacaggcagtgcatctgaaaccagatggtagcgattctgaccaagtgccaaacatgttaagggagaaacttggcattgacagtataaacatatctagcagtccattagggtctaagcatgaagaatttgatggaagtgtaaacatggatgataaagatagtgatgatagcaacatcgctgctggccctggttcgaaaaacttgtcaagcgatctaactgcagttcccaggattaaaatcttgaaagtggtacccatgcagaatgttgatcatgactacataatcaatatctttgatcagatttcagaggaagatgatgacaatgatgatcatgaagttgaaaatgaatcttcagaagatgttgataatgatgataacagtggagtagcagaaacagtttctgcagaagagaatggtgatgaatctggtgacgaaagtgatattgaaaccttggtttcatttgattttgtcagtgagaataacgtctatgcttctcgtccatctgctgaagcttttgaacgaatgccggctagattagaaaaaagagatcgcttctcattttccttctatactgaagaatacagtaaaaagctagatgctggaaaggcccggcagacttcaaaggaaacagttggtttgcatgccgatcagcaggattatgatggttttgtccagcttgatcgtgtaaagttgagtggcagcaacaaaaaactatcgatactacaacttggcatcaagcaaaataacaaggttcagcaaaaactgcatggagttacccactttagtcgtattcagatgcctatattttcagatcctcttaccggtttatatgtgaccacatcaggatttgactcagaaattcttagtttgcaacgaaaatttggtcaatggcgggatgatggttcatctgaggagcatagtgacctattgttctatgagcatgttgaagctgtaaaattaacaggggacaatctcatgccagctggtcaggttgtcttccgtgcaaaagttggtgaacgctatcagctccctcataagggaattatccctagagaacttggagtgattgctaggtacaaggggcaaaggaaaattgcagatcctggtttccaaaaccctcgatgggttgatggagagcttttgataatagatggaaagttcatcagagatggtcctgtgatagctttcttttactggacatctaattttcatcgtttcgaattctttagacggttgaggcttcctgaatagttcccatctaaaagtagttaaagcaggccattctgatttttgcatagttgcatttggagccaacaggagttgcctggcattacattttccgaggacagattctgatgtgaagagggcgcctggcatgaatcaaggggcatctccacccactctgaaaggctgccatgagggtggaaaatagctcacagtcgcaggaagaggaatagcatcctgccaacatgggtgagctgcgggcgcatcataccaattccgcttctgctatgctccgtccaccaggtcaccagcttgtgaccgaggcatcaaaccgccagattttgtgtttctcagagcaagtagaactaaagcacctcaaagatgtaaatttatgcactcccaaatttaggattttgagcgcaatcttggcagttttcatacatgcgaagtgaactagtacgagcaatagttttgtatagcgtgatcaaacagtggcagcaatcagtagcagaggcatacagaccaacacggccacacagatttgttaatatatctaagtttgtttaaccttgcccatttcttaagcaagaactctatttttaatt

SEQ ID NO: 95039 - DNA, 3144 bp, Zea Mays
tgcaagcaaccaaacaacatctcttgtgaaccagactggccacatacacacaaccaaacacgctatactgcatgcactcagccagtccagtctgagccaggctcactagatacgagccaggctcacccatacaagtaaccgaacgccccctaaagttcggtcgcaacgcggccgacgccgccacaagcgcatggcggcgtagacccaaaaacaactgtccccttccgaggtccacctgtctgtcacggcctctcacggaggccgtctgctctctcgcctctcggcgagtcttatcatcccctggcctcgttctaatccacccgagagacgaggtcgagcacgactccagccgcaacgcgcgagcggcgagcctcatcaatcaaacacacgccacacgcgacaagagtacgagtacctaacatacgaatacgagtatacgaccacgagtccacgagcagacgagctcctccgccaccagtgtcatcgcgtcgccgtcgcgtccgcctcgccctcgtccatggcgtccgtgtccacggcgccgcgcgctccactcccggcggcagcgtcgtcctcgttatccgcgcggcaggtggatccgaaccctagcggcagccacttcctcgacgggcggcgcctccgcgtcgtccgccgcctcgccggcgcggccccgtcgcggcgcgctccgttggtctgctgctccgcgcgtagtccggacgcggacgccggcgacgagcgacgccggcggggttgggacgcgatgcttcacgacgccttcaagggtgccgtgcgacggtggagcgagtacgtcagcaattactggcccccaccgacctctgttaaggaggcgggtacggggaagagggttgggaggtctcacgaggaagaggtgatgaatggggatgaagaggagaggaaggttggggaggaagagggaaagtggagctgggcgaggtggaagcggcactttgctctcattgaggagagcgggcgtctcgttgatgagctccagttgcaactccaggctgctgtttatagagaagactacaggactgctcataaactgaggctggctattgctgctacatcaaaaaatgacgctgtgggcagagctatctcggacttaaatatggccatagatgaggagcgctacaaggatgcagcatatatcagagatcatgctggcgcaggactgctggggtggtggtctggaatttctggaaatttgtctgatccatatggtcttattattcgtataagtgctgaacatggtcgatatgtggcaagaagttatgatacaagacagctggcttctgacagccctggtctccctatatttgaaatatactttgcagaggcaaatggtggatataacctacaggcagtgcatctgaaaccagatggtagcgattctgaccaagtgccaaacatgttaagggagaaacttggcattgacagtataaacatatctagcagtccattagggtctaagcatgaagaatttgatggaagtgtaaacatggatgataaagatagtgatgatagcaacatcgctgctggccctggttcgaaaaacttgtcaagcgatctaactgcagttcccaggattaaaatcttgaaagtggtacccatgcagaatgttgatcatgactacataatcaatatctttgatcagatttcagaggaagatgatgacaatgatgatcatgaagttgaaaatgaatcttcagaagatgttgataatgatgataacagtggagtagcagaaacagtttctgcagaagagaatggtgatgaatctggtgacgaaagtgatattgaaaccttggtttcatttgattttgtcagtgagaataacgtctatgcttctcgtccatctgctgaagcttttgaacgaatgccggctagattagaaaaaagagatcgcttctcattttccttctatactgaagaatacagtaaaaagctagatgctggaaaggcccggcagacttcaaaggaaacagttggtttgcatgccgatcagcaggattatgatggttttgtccagcttgatcgtgtaaagttgagtggcagcaacaaaaaactatcgatactacaacttggcatcaagcaaaataacaaggttcagcaaaaactgcatggagttacccactttagtcgtattcagatgcctatattttcagatcctcttaccggtttatatgtgaccacatcaggatttgactcagaaattcttagtttgcaacgaaaatttggtcaatggcgggatgatggttcatctgaggagcatagtgacctattgttctatgagcatgttgaagctgtaaaattaacaggggacaatctcatgccagctggtcaggttgtcttccgtgcaaaagttggtgaacgctatcagctccctcataagggaattatccctagagaacttggagtgattgctaggtacaaggggcaaaggaaaattgcagatcctggtttccaaaaccctcgatgggttgatggagagcttttgataatagatggaaagttcatcagagatggtcctgtgatagctttcttttactggacatctaattttcatcgtttcgaattctttagacggttgaggcttcctgaatagttcccatctaaaagtagttaaaggagttgcctggcattacattttccgaggacagattctgatgtgaagagggcgcctggcatgaatcaaggggcatctccacccactctgaaaggctgccatgagggtggaaaatagctcacagtcgcaggaagaggaatagcatcctgccaacatgggtgagctgcgggcgcatcataccaattccgcttctgctatgctccgtccaccaggtcaccagcttgtgaccgaggcatcaaaccgccagattttgtgtttctcagagcaagtagaactaaagcacctcaaagatgtaaatttatgcactcccaaatttaggattttgagcgcaatcttggcagttttcatacatgcgaagtgaactagtacgagcaatagttttgtatagcgtgatcaaacagtggcagcaatcagtagcagaggcatacagaccaacacggccacacagatttgttaatatatctaagtttgtttaaccttgcccatttcttaagcaagaa

SEQ ID NO: 95040 - DNA, 3139 bp, Zea Mays
tgcaagcaaccaaacaacatctcttgtgaaccagactggccacatacacacaaccaaacacgctatactgcatgcactcagccagtccagtctgagccaggctcactagatacgagccaggctcacccatacaagtaaccgaacgccccctaaagttcggtcgcaacgcggccgacgccgccacaagcgcatggcggcgtagacccaaaaacaactgtccccttccgaggtccacctgtctgtcacggcctctcacggaggccgtctgctctctcgcctctcggcgagtcttatcatcccctggcctcgttctaatccacccgagagacgaggtcgagcacgactccagccgcaacgcgcgagcggcgagcctcatcaatcaaacacacgccacacgcgacaagagtacgagtacctaacatacgaatacgagtatacgaccacgagtccacgagcagacgagctcctccgccaccagtgtcatcgcgtcgccgtcgcgtccgcctcgccctcgtccatggcgtccgtgtccacggcgccgcgcgctccactcccggcggcagcgtcgtcctcgttatccgcgcggcaggtggatccgaaccctagcggcagccacttcctcgacgggcggcgcctccgcgtcgtccgccgcctcgccggcgcggccccgtcgcggcgcgctccgttggtctgctgctccgcgcgtagtccggacgcggacgccggcgacgagcgacgccggcggggttgggacgcgatgcttcacgacgccttcaagggtgccgtgcgacggtggagcgagtacgtcagcaattactggcccccaccgacctctgttaaggaggcgggtacggggaagagggttgggaggtctcacgaggaagaggtgatgaatggggatgaagaggagaggaaggttggggaggaagagggaaagtggagctgggcgaggtggaagcggcactttgctctcattgaggagagcgggcgtctcgttgatgagctccagttgcaactccaggctgctgtttatagagaagactacaggactgctcataaactgaggctggctattgctgctacatcaaaaaatgacgctgtgggcagagctatctcggacttaaatatggccatagatgaggagcgctacaaggatgcagcatatatcagagatcatgctggcgcaggactgctggggtggtggtctggaatttctggaaatttgtctgatccatatggtcttattattcgtataagtgctgaacatggtcgatatgtggcaagaagttatgatacaagacagctggcttctgacagccctggtctccctatatttgaaatatactttgcagaggcaaatggtggatataacctacaggcagtgcatctgaaaccagatggtagcgattctgaccaagtgccaaacatgttaagggagaaacttggcattgacagtataaacatatctagcagtccattagggtctaagcatgaagaatttgatggaagtgtaaacatggatgataaagatagtgatgatagcaacatcgctgctggccctggttcgaaaaacttgtcaagcgatctaactgcagttcccaggattaaaatcttgaaagtggtacccatgcagaatgttgatcatgactacataatcaatatctttgatcagatttcagaggaagatgatgacaatgatgatcatgaagttgaaaatgaatcttcagaagatgttgataatgatgataacagtggagtagcagaaacagtttctgcagaagagaatggtgatgaatctggtgacgaaagtgatattgaaaccttggtttcatttgattttgtcagtgagaataacgtctatgcttctcgtccatctgctgaagcttttgaacgaatgccggctagattagaaaaaagagatcgcttctcattttccttctatactgaagaatacagtaaaaagctagatgctggaaaggcccggcagacttcaaaggaaacagttggtttgcatgccgatcagcaggattatgatggttttgtccagcttgatcgtgtaaagttgagtggcagcaacaaaaaactatcgatactacaacttggcatcaagcaaaataacaaggttcagcaaaaactgcatggagttacccactttagtcgtattcagatgcctatattttcagatcctcttaccggtttatatgtgaccacatcaggatttgactcagaaattcttagtttgcaacgaaaatttggtcaatggcgggatgatggttcatctgaggagcatagtgacctattgttctatgagcatgttgaagctgtaaaattaacaggggacaatctcatgccagctggtcaggttgtcttccgtgcaaaagttggtgaacgctatcagctccctcataagggaattatccctagagaacttggagtgattgctaggtacaaggggcaaaggaaaattgcagatcctggtttccaaaaccctcgatgggttgatggagagcttttgataatagatggaaagttcatcagagatggtcctgtgatagctttcttttactggacatctaattttcatcgtttcgaattctttagacggttgaggcttcctgaatagttcccatctaaaagtagttaaagttgcatttggagccaacaggagttgcctggcattacattttccgaggacagattctgatgtgaagagggcgcctggcatgaatcaaggggcatctccacccactctgaaaggctgccatgagggtggaaaatagctcacagtcgcaggaagaggaatagcatcctgccaacatgggtgagctgcgggcgcatcataccaattccgcttctgctatgctccgtccaccaggtcaccagcttgtgaccgaggcatcaaaccgccagattttgtgtttctcagagcaagtagaactaaagcacctcaaagatgtaaatttatgcactcccaaatttaggattttgagcgcaatcttggcagttttcatacatgcgaagtgaactagtacgagcaatagttttgtatagcgtgatcaaacagtggcagcaatcagtagcagaggcatacagaccaacacggccacacagatttgttaatatatctaagtttgtttaa

SEQ ID NO: 95041 - DNA, 3088 bp, Zea Mays
tgcaagcaaccaaacaacatctcttgtgaaccagactggccacatacacacaaccaaacacgctatactgcatgcactcagccagtccagtctgagccaggctcactagatacgagccaggctcacccatacaagtaaccgaacgccccctaaagttcggtcgcaacgcggccgacgccgccacaagcgcatggcggcgtagacccaaaaacaactgtccccttccgaggtccacctgtctgtcacggcctctcacggaggccgtctgctctctcgcctctcggcgagtcttatcatcccctggcctcgttctaatccacccgagagacgaggtcgagcacgactccagccgcaacgcgcgagcggcgagcctcatcaatcaaacacacgccacacgcgacaagagtacgagtacctaacatacgaatacgagtatacgaccacgagtccacgagcagacgagctcctccgccaccagtgtcatcgcgtcgccgtcgcgtccgcctcgccctcgtccatggcgtccgtgtccacggcgccgcgcgctccactcccggcggcagcgtcgtcctcgttatccgcgcggcaggtggatccgaaccctagcggcagccacttcctcgacgggcggcgcctccgcgtcgtccgccgcctcgccggcgcggccccgtcgcggcgcgctccgttggtctgctgctccgcgcgtagtccggacgcggacgccggcgacgagcgacgccggcggggttgggacgcgatgcttcacgacgccttcaagggtgccgtgcgacggtggagcgagtacgtcagcaattactggcccccaccgacctctgttaaggaggcgggtacggggaagagggttgggaggtctcacgaggaagaggtgatgaatggggatgaagaggagaggaaggttggggaggaagagggaaagtggagctgggcgaggtggaagcggcactttgctctcattgaggagagcgggcgtctcgttgatgagctccagttgcaactccaggctgctgtttatagagaagactacaggactgctcataaactgaggctggctattgctgctacatcaaaaaatgacgctgtgggcagagctatctcggacttaaatatggccatagatgaggagcgctacaaggatgcagcatatatcagagatcatgctggcgcaggactgctggggtggtggtctggaatttctggaaatttgtctgatccatatggtcttattattcgtataagtgctgaacatggtcgatatgtggcaagaagttatgatacaagacagctggcttctgacagccctggtctccctatatttgaaatatactttgcagaggcaaatggtggatataacctacaggcagtgcatctgaaaccagatggtagcgattctgaccaagtgccaaacatgttaagggagaaacttggcattgacagtataaacatatctagcagtccattagggtctaagcatgaagaatttgatggaagtgtaaacatggatgataaagatagtgatgatagcaacatcgctgctggccctggttcgaaaaacttgtcaagcgatctaactgcagttcccaggattaaaatcttgaaagtggtacccatgcagaatgttgatcatgactacataatcaatatctttgatcagatttcagaggaagatgatgacaatgatgatcatgaagttgaaaatgaatcttcagaagatgttgataatgatgataacagtggagtagcagaaacagtttctgcagaagagaatggtgatgaatctggtgacgaaagtgatattgaaaccttggtttcatttgattttgtcagtgagaataacgtctatgcttctcgtccatctgctgaagcttttgaacgaatgccggctagattagaaaaaagagatcgcttctcattttccttctatactgaagaatacagtaaaaagctagatgctggaaaggcccggcagacttcaaaggaaacagttggtttgcatgccgatcagcaggattatgatggttttgtccagcttgatcgtgtaaagttgagtggcagcaacaaaaaactatcgatactacaacttggcatcaagcaaaataacaaggttcagcaaaaactgcatggagttacccactttagtcgtattcagatgcctatattttcagatcctcttaccggtttatatgtgaccacatcaggatttgactcagaaattcttagtttgcaacgaaaatttggtcaatggcgggatgatggttcatctgaggagcatagtgacctattgttctatgagcatgttgaagctgtaaaattaacaggggacaatctcatgccagctggtcaggttgtcttccgtgcaaaagttggtgaacgctatcagctccctcataagggaattatccctagagaacttggagtgattgctaggtacaaggggcaaaggaaaattgcagatcctggtttccaaaaccctcgatgggttgatggagagcttttgataatagatggaaagttcatcagagatggtcctgtgatagctttcttttactggacatctaattttcatcgtttcgaattctttagacggttgaggcttcctgaatagttcccatctaaaagtagttaaaggccattctgatttttgcatagttgcatttggagccaacaggagttgcctggcattacattttccgaggacagattctgatgtgaagagggcgcctggcatgaatcaaggggcatctccacccactctgaaaggctgccatgagggtggaaaatagctcacagtcgcaggaagaggaatagcatcctgccaacatgggtgagctgcgggcgcatcataccaattccgcttctgctatgctccgtccaccaggtcaccagcttgtgaccgaggcatcaaaccgccagattttgtgtttctcagagcaagtagaactaaagcacctcaaagatgtaaatttatgcactcccaaatttaggattttgagcgcaatcttggcagttttcatacatgcgaagtgaactagtacgagcaatagttttgtatagcgtgatcaaacagtgg

SEQ ID NO: 95042 - DNA, 3168 bp, Zea Mays
tgcaagcaaccaaacaacatctcttgtgaaccagactggccacatacacacaaccaaacacgctatactgcatgcactcagccagtccagtctgagccaggctcactagatacgagccaggctcacccatacaagtaaccgaacgccccctaaagttcggtcgcaacgcggccgacgccgccacaagcgcatggcggcgtagacccaaaaacaactgtccccttccgaggtccacctgtctgtcacggcctctcacggaggccgtctgctctctcgcctctcggcgagtcttatcatcccctggcctcgttctaatccacccgagagacgaggtcgagcacgactccagccgcaacgcgcgagcggcgagcctcatcaatcaaacacacgccacacgcgacaagagtacgagtacctaacatacgaatacgagtatacgaccacgagtccacgagcagacgagctcctccgccaccagtgtcatcgcgtcgccgtcgcgtccgcctcgccctcgtccatggcgtccgtgtccacggcgccgcgcgctccactcccggcggcagcgtcgtcctcgttatccgcgcggcaggtggatccgaaccctagcggcagccacttcctcgacgggcggcgcctccgcgtcgtccgccgcctcgccggcgcggccccgtcgcggcgcgctccgttggtctgctgctccgcgcgtagtccggacgcggacgccggcgacgagcgacgccggcggggttgggacgcgatgcttcacgacgccttcaagggtgccgtgcgacggtggagcgagtacgtcagcaattactggcccccaccgacctctgttaaggaggcgggtacggggaagagggttgggaggtctcacgaggaagaggtgatgaatggggatgaagaggagaggaaggttggggaggaagagggaaagtggagctgggcgaggtggaagcggcactttgctctcattgaggagagcgggcgtctcgttgatgagctccagttgcaactccaggctgctgtttatagagaagactacaggactgctcataaactgaggctggctattgctgctacatcaaaaaatgacgctgtgggcagagctatctcggacttaaatatggccatagatgaggagcgctacaaggatgcagcatatatcagagatcatgctggcgcaggactgctggggtggtggtctggaatttctggaaatttgtctgatccatatggtcttattattcgtataagtgctgaacatggtcgatatgtggcaagaagttatgatacaagacagctggcttctgacagccctggtctccctatatttgaaatatactttgcagaggcaaatggtggatataacctacaggcagtgcatctgaaaccagatggtagcgattctgaccaagtgccaaacatgttaagggagaaacttggcattgacagtataaacatatctagcagtccattagggtctaagcatgaagaatttgatggaagtgtaaacatggatgataaagatagtgatgatagcaacatcgctgctggccctggttcgaaaaacttgtcaagcgatctaactgcagttcccaggattaaaatcttgaaagtggtacccatgcagaatgttgatcatgactacataatcaatatctttgatcagatttcagaggaagatgatgacaatgatgatcatgaagttgaaaatgaatcttcagaagatgttgataatgatgataacagtggagtagcagaaacagtttctgcagaagagaatggtgatgaatctggtgacgaaagtgatattgaaaccttggtttcatttgattttgtcagtgagaataacgtctatgcttctcgtccatctgctgaagcttttgaacgaatgccggctagattagaaaaaagagatcgcttctcattttccttctatactgaagaatacagtaaaaagctagatgctggaaaggcccggcagacttcaaaggaaacagttggtttgcatgccgatcagcaggattatgatggttttgtccagcttgatcgtgtaaagttgagtggcagcaacaaaaaactatcgatactacaacttggcatcaagcaaaataacaaggttcagcaaaaactgcatggagttacccactttagtcgtattcagatgcctatattttcagatcctcttaccggtttatatgtgaccacatcaggatttgactcagaaattcttagtttgcaacgaaaatttggtcaatggcgggatgatggttcatctgaggagcatagtgacctattgttctatgagcatgttgaagctgtaaaattaacaggggacaatctcatgccagctggtcaggttgtcttccgtgcaaaagttggtgaacgctatcagctccctcataagggaattatccctagagaacttggagtgattgctaggtacaaggggcaaaggaaaattgcagatcctggtttccaaaaccctcgatgggttgatggagagcttttgataatagatggaaagttcatcagagatggtcctgtgatagctttcttttactggacatctaattttcatcgtttcgaattctttagacggttgaggcttcctgaatagttcccatctaaaagtagttaaaggtaaactgcatttcatctggtactggtttactgtttggcattattattctaccataaagtactccagtattgttatattttaattttactgttgtgtgttcttgtgcttgccaaatttcaatatttgtcaactatttgttcagaggtagtgcttgttggctgttgcaggccatcattgatccaaatttggccttttcagcgtgtggggatagatatacacccagatactagcaatatgtgttccaagaaaactcgcattagactatctccagcagactccctgtttcaaactctactctgcaaacagtgcaatttacagtgtaaaacggtactttgcaccggcctgctggagatggcattaagcccgtacttcccggggcccatgccctggggagccatgtcatgttctgaccatatttcaggccctcctggtttttgaggcccaaatcctgagcccctcgtatggtctagagttctccaggcctaccagggtccttcatggctctttgggccaggggccaa

SEQ ID NO: 95043 - DNA, 3290 bp, Zea Mays
gtggcctcgccgcacaagaaaatcacagcagtacagcaccagaaacagaaaggtagtagatcaaggaacgccagtgcggcgacaatgaccggcagtggaagcacgggcgccaatggcaagagccagagctccagggccaaggcaatgctgctcgccttgggcaagagctttcctgaccaagttctgcctcaggagaaggttgtggagagctacctccaagaaagcagctgcgacgatcccgccaccagggccaagcttcagcgccttttgaagacaaggtacactgttatgtccaaggagctattggataagcacccagagctgaagatggagggtactccgacactgacaccccgccttgacatctgcaatgccgcggtgatcgaccttggtgctgccgcagctcgcgctgcccttgacgaatggggtcgccctgcagctgatattacccacctcatctacatctcatcaagtgaccttcgtctcccagggggcgaccttcacctggctgctcgccttggccttagcccaaacaccgtgcgcacttcccttctcttccttggctgctccggtggtgctgctgccctccgcactgccaaggacattgctgagaacaatccagggagccgtgtcctagtaacagctgctgagaccactgtgctaggcttccggccaccaagttatgaccgtccttatgaccttgttggtgctgcgctgtttggtgatggtgcatcagccgtgattataggagcaggtcccatgacaccagcagaaaatcctttcttggagcttgagttctccacgcaggagttcctacctgggactgataaggtaattgatggcaaaatctcagaggaaggaattaattttaaactagggcgtgatttgcctgagaagattgaaagccgcatagaaggtttctgcaggactctcatgaacaaggtagggataaaggatttcaacgatatattttgggctgtgcatcctggtggaccagcaatattgaacaggcttgagttctgccttaaacttcagccagagaagctcaagattagcagaaaagccttaatgaactatggaaatgtgagcagcaatacaatcttctatgtgctggagtacttgagggacgagttaaagaaaggggcaataagtgaagagtggggattgatcttggcttttggcccaggcatcacctttgaaggactgctagttcgaggtgtaaagaaaaccttcacaagctaatataatggtgggtacatggcaagcataaagattaattatatatacagaaacatcacataaagagcatagatgtctcggtggaagctgagcaccacatagcacatcgctaatattttactgtatttgtgttcttcatctatcaaacagtgtaaggtacttgagtttgcttcctagacattgtagaaataaggcactatacagcctgttgtagtgttgttccactgtactatgcaatgattgcaggattactttaatactgcttgtatggatgagtgaactgattacagtgcaaatatcatattttctaaggaaaagcagagcaattatgtgatgaggcatgaaatacacattacaacaagcatgttacaatgatagatagtagatgtatcatctatcatgatgccctaaacacttcaacaaatgttaaactttaacatcatttcgaatattattacaagacataaaattaagcaagttttgaagtaaacggagcatccattacatcctgatctaaccgcaaaccttgcaaaatgcagtccagtgacaacaagaaggcaacattggatcccacgttgaacgcttatcttcttcaccatcatcattcaaactccaaaatgcatgaattaatgagaagtaacacagatgcctctagcaaatcatggattcaaattcggtgatccctcttcaaaagaaagctcaccaacaaccttcccccaagcaagtttggcatcgcctttcacaagaaactccatcttggcaacaacatccttggcctctgttgacctgcctgccttcaccaaaccctcaaccaaacctttaacagcctcaaacggtggtgctgccttcattgcaaagcagctcttacaaatccacagcgcgtcattaagcttctctttctccaccaaactcctaaacagcaccacatatacctgtgaatgtgcagaaacacccaagtcactccttccctcccgcctcttcatcactttcatcctcttgaacacacgcatagctgccccaacatttccctccttgcagtacccctgcacgagagcattgtaggtaacgtaatttggcgctatctcctttgattccatcacatcaagcagctcctcccccttgactgtctcgcctttcttggagaaccactgtatccggcagttgtaagtgacaacatttggctccaggttgctcaagctgatctccttcaaaagcttcccaaactcatcctcatcatcctgcacggagtaaccagcgaggacagtgttgtaggatatgatgtctggggcagggcggtgcttcaacttcttgttggccatttcgtcgagcagcttccgggcagcagcaagctcagaattcttgaccaatgcatggagcagcacattgtgggaggcgcggccgggcgcgaccccgtgggaggattccgccagggtaatggtggacttgatgtcatcgaggcggccggcgcggaggaacgccgaaaggagcgccgagagggagacgtcggagcgggcggcggggggagacgaggagaaggcccggagcgcgtcgtcgggtcccgggtagagggagagtgcccgcgctaggagacccggggagggcggggtggaggcaaggaggaggtcgaggagcgaggcggcgaggtcggcgcgccggaggcggatcaagcgggaagtggccagggaaaagagctggcgcgaggtgtggaggcgcggcatgtcatggctggagagcgcggaggcgacgagggagtggatgcgggctgggtcagactcggcgcggacggcgagctggaggtcgagcacggaggcgcgggcggaggtggaggtgggcgcggccgggctagggcttgcggtggaggacgccgagggatcgatgtcggggagcgcggagaaggcgcggaggaggcgagcgcaggccgcggcggcggcgcgtgggtgcgcaccgtggcggcggtgtaggaggagggacgccatggtggggaaccgaggactgaggtactgggtttggcagggttttgggcctggcctatttgctctccttctcctttc

SEQ ID NO: 95044 - DNA, 1223 bp, Zea Mays
acttgtcgctcgagatggccttactttagaaaaaaaaaatcctgaccgggcatccctcggctgcagagtcgacctcatccaagttccatttattattttctccgaggaagccctttccccaggcacagatccggctcctcgccgccgccatggccgcccgcctccccctcctggtcctcgccgttgtcgctgcgtccctcctcgctgccgacgcgcggccgtgccacaccttcttcgtcgccttccgcgccgaccccaaccccagcagaggcgacgacgctgtaccccaccacctcggcgccccgcatgtcgctacagtcatcaccgtcttccgtgtccgccgtctcggtccgcacgtcccccacggccaccgtaaccaccaccacctccactccatccccgccaacgtccggatccaccgccccgatctcccgcaccccgccgcggggccccaggagcgcgccagggacatcttcgtggtcgtcatcgggctcctctttggcgtcgcctgcggagcgctcaccgctgcttccgtgtacctcgtctggtccatggtcgccggagctgctgcggtctccgcgtacgacgagctctacgacgacgaggacgaggcgtccgacatcgagagccccaagaaggtcggctacgtcatcatccaggagctcgaggtcgatgaaggcggtaagaactagggccggatttggtggcgctcgtgctcccgggaggtagggcaagttcctgaagtgggttggcctatggccatatgttgagtgaatcgtaatgtctgtatgacaatgtgatgcgcagttgggacttgggagccttaggggtttgccctccatgtgaatatgatcgtgaagcatgcttaagctaccaaatgtgcttgtttctgacgaacctatcaatcaatgttatgcaccactgtgaaactgttcatttgatctgctatctaatgtattatggcctggcttcgagatcagagttatacaatgtgatgggtggttgggacttgggaaccttagagctagtttgggagccacaaacccggttgattttagcccctccaatcccctctggttttgtggctcccaaactggcccttagggttttcctgtttgcttttagcagttttgtgttccaattataggtgttatataatggcttgtctgtcctgatgtaccaaagcttggcttatcggttgtttgaagattatgtggtttgag

SEQ ID NO: 95045 - DNA, 1969 bp, Zea Mays
agctgcaggagattgctcagcccatctccatggaggttgccatggtcgtcagcgcaagagccagcctgctgatcctcgtcatctccctctgctctccgtacaaattcatacagagccccatggacctgggccccctgaacctgctccccaccaccagcaccgcggccgcgtccagcgacttcggcaggatactcttccgcgccccggccgcggtgctgaggccccagtcgccgagggacatctccatgctgctcagcttcctctccggctcgccctcgctgagcagggtcacggtggcggccaggggggcaggccactccatccacgggcaggcgcaggccccggacggcattgtggtggagacgcgctccttgcccggcgagatggagttccaccacgtccgcgggggaggcgaagggcgtgcctcctacgccgacgtgggcggcggggttctgtggatcgagctcctggagcggagcctgaagcttgggctggctcccaggtcctggaccgactacctctacctcactgtcggcgggacgctgtccaatgccggcatcagcgggcagacgttcaagcacgggccacagatcagcaacgtcctccagctggaggtagtcacaggacgaggggagattgtggaatgctcacccagcaaggaggccgacctgttcaatgccgtcctgggaggcctaggccagttcggcatcataaccagggccaggatcctgctgcaggaggctccggagaaggtgacgtgggtgagggccttctacgacgacttgggcgccttcaccagggaccaggagctgctggtgtcgattccggattcggtggactacgtggaagggttcatggtcctgaacgagcggtccctccacagctcctccatcgccttccccgcgagcgtggacttcagcccggatttcggcaccaggagcagccctaggatctactactgcgtcgagttcgcggtgcaccaccaccacggttaccagaagcagtctcaggcggccgtggaggccatctcgaggcggatgagccacatggcgtcccagctgtacagcgtggaggtgtcctacttggacttcctgaaccgggtcaggatggaggaggtgagcctgcggagcgccgggatgtgggaggaggtgcaccacccgtggctcaacatgttcgtgcccaagcccggggtcgctggcttcagggatctgctcatggacaacgtctcgccggatagctttcagggcctcatcctcatctacccactcctcagagacaagtgggacaccaacacgtcggtcgtgatcccggactccgggcccaccgcggacgacccggtgatgtacgtggtcggcatcctcaggtccgcgaaccctggtccagaagaagacggtgacggctgctcccaccgctgcctgcacgagctcctccgcagccaccgccggatcgccgacgccgcggaggcgcgcctcggcgccaagcagtacctgcctcaccacccgaccccggcccgctggcagcagcacctgggccggcgctgggagcgcttcgcggaccgcaaggcccggttcgacccgctgcgcatcctggggcccggccagggcatattccctcggacggcccaggatgctgccgccgctgctgcgtacgggagctagcattttatatatatatatacggcatgaaacagtatagattattaattatcagctgactagctaggatgcgatcttctttcttcttcttcttctctcttcagtttcctctgcattttgagggcatgtggggccggttgttgggttattctgtgaggctctggcctccggggcactttgagaggacctgatggtggtggtggtggtggtgattggtgattggtgaatgtcactgggaattttggaacttttgtacaggttgatggaggaagcacaggctttaagtttataagggaatagacatagcgcttcta

SEQ ID NO: 95046 - DNA, 1552 bp, Zea Mays
tattagtacacctaagttgtcactcaattatcaaaatcaaactagggacattcaaatggttggcttactttttgctacagagttgcctcttcgcatggctgatttcggagtgcttcatagaaatgagcttagtggtgcacttactggtttgacacgggttagaagattccagcaggatgatgctcatatcttctgcagagaggaccaaatcaaggacgaggttaaggctgttttggaattcatcaattatgtttacgagatatttggcttcaaatatgagttggagttgtctacgagaccagagaagtatctaggtgaaattgaaacttggaacaaagcagaacaacaattgacagaagctttgaatgagtttgggaagccgtggaagattaatgaaggggatggtgctttctacggtccaaaaattgatattggtgtgtttgatgcccttaagaggaaatttcaatgtgcaaccttacagctggattttcagctgcccattcggttcaagctgacttattctgctgaggatgaagcaaaaattgaaaggcctgtgatgatacacagggcaatcctaggttctgttgaaaggatgtttgccattcttttggagcattacaatggcaaatggcccttatggctaagccctcgccaggccattgtttgttcagtatcttctggttcagtggaatatgcgaaacaggttcttgccatgctacatgaagctgatttccatgttgatattgatgtgagtgacaggacaatacaaaagaaggtacgggaagcccaggtagctcaattcaactacattcttgtcgtaggcgcacaggaggccgagactggaaatgtctgcgttagggtaagagataatgccgacctggccacaatgagcgttgatggcctcatcacacgtttgagggaggaaatcgtagccttcaaatgattttgatgctgcataatttcctagcacttcgcaatcattgactgttcatttgtgattttgattgagttttcagggaacagtactgagttcctccaaggctccaagtgtattcttgttggtacggttggaagctactaagggcatatttagaagcacctagtttttaataaactggtttataaaaactgagatggttccaaacatatcggtttatatcctagtttttaataatctggtttataaaaactggatttctagtttcttaaaaattaagaagctagtctctcttagctaaaaccaatttatgaaaattaaggtagttctaaacatcataaaccaatttttttcttcataatccagtttctacaaactagagataaaaactaggttgcttctaaatagggtctaaacattgtctttttttattaattatatagatgtgaagttaaatgctacctatagtaaaaagttcctagtaaatactacctgtagtgtcaaaacagcttgttgtatttgactttgcatggtcttaaacatatatattgaccactaaattcttttgtacaatcttaaaatgatgagatcatatgcaacttacatgttcttaaa

SEQ ID NO: 95047 - DNA, 862 bp, Zea Mays
ccggagagtgccatatcccgcgacgccgcagcatccgcttgactccactttatgcaagtgtgcctccggcgaggcctctcgctagttcggcagcacacctcccgcgtccttcccccactgtctctccaccctacccgcttcttccttcaccaatccgcgtccgacccgatgggtgagggttccgttcctggtaaggacgccaaggggaaggggaaggccaagcaccccgcccaggcttcggccctggtcgctcgcgacgactcctacctggaggccgtcacacataagaggattcgcttgttcgaggagatccaggcaaggcaggccgtcgagcggctgaatatcggcggcgaagttatcaagataactctgcctgatggtgcaatcaaagaagggaagaaatggataacaaccccaatggatattgctaaggagatatcaagtggatttgcagctagttgtttgatagctcaagtggacgaaacactctgggatatggggaggccactggaaggtgactgcaaattgcaaatgttcaagtttgataccaatgaaggccgtgacaccttctggcactcaagtgctcatattcttggagaatctcttgagagagcatatggctgcaagctgtgtattgggccttgcaccacaagaggggagggtttctactatgatgcttactacaatgagctgacattaaacgaggagcactttggtgtcattgaaaaccaagctaaaaaggctgttgcggaaaagcaaccatttgaacgcatcgaggtcagcagggcagaagctcttgaaatgtttgctgaaaataaattcaaggttgaaattattaatgagttgcccgaggacaagacca

SEQ ID NO: 95048 - DNA, 246 bp, Zea Mays
atgtcccttctacgcaaggatttacttataagcccttcaaaagggcgggcatgtggcaaaatcatgacgactcctttttctcttccgcagcctcctcaaatgtctctccagggacgagctcaggaacgtcatcgtcatcgtcctgagcagcaccagcgctggcgccagcctctgcacctgaagcaccaggggcctgcttctggaattgctccgcaagcctccgcaggttgtctaggttgtcagggc

SEQ ID NO: 95049 - DNA, 120 bp, Zea Mays
cctttagttttattttttttaaaagatagagctcgtgaagctagatctattttaatagaaggagttagattgaacccgaattttttaaagtggagcccttccaaacaggctcataattat

SEQ ID NO: 95050 - DNA, 649 bp, Zea Mays
actaaccggagccatggcaaagaccgccgcaatgccggcagcggtggcggtgatcgctctcctgcttattacgactctacccgtcgggcgcggcgaggagaggaggcccaccgcggcgcacccgcacgggctccccttcgagagcccgctcgcgctgtctccggccgcttacgacttcttccaccccagcgcgcgcgcccgtcgagatcgcggcgtcgccccggcgccggcgccggcgctcgcgcctcgcgggcagcagcagcagctgagagagtccgcggtccgaggaggaacatcgtcggcaagcgtggccaaggccgaccgggaagaagggggcgtggcgcccgtggatacgcacgggcgccacggccacaaggtggcgggcgtgttcgtcggcgcggcagcggccgcgctggtggctatcggcgttgcgtacgccgtggtgcggcgccgggtcgtggcggcgcgcggtggcgcgggcacgggcgcgggcgcgcccaagtcgaacgcctagcgtagtgtgctggtagcctggtagcttcagggctggtttgcgacgtgtgtcgtgtgtggtagctgtaggtgggctcagatagttgggccgggctgtttgtataaatatggaatgcaaggtgctctttgtttgggt

SEQ ID NO: 95051 - DNA, 900 bp, Zea Mays
tgtcttaagaatctaatttctcattactgtgatgtgcgtttatctgatgcagctcttgaagacatgcccattgccattgaaacagacaaagctaaagcccaacattatgagctgccaactacatttttcaagttagtgcttggaaggaatctcaaatacagttcctgctatttccctgatgattcaagcaccctagaagatgttgaggttgcgatgatggatctgtattgtgagaggtcgaaactacaagatggccaaagcatcctagatgttggatgtggatggggatccctttcactgtacattgcaaagaaatataggaactacagtgtaacagggatatgcaactctactacacagaaggcttttatagaagagcaatgtagggaaaatgagctgtcaaatattgagataatcgtagccgacatcagcaagtttgagatggaacactcttttgacaggatcgtatctatagagatgtttgagcacatgaaaaactacaagtcgcttcttaagaagatatccaggtggatgaaagaggatggcctactattcgttcacctcttctgccacaaagcatttccatatcactttgaggataaaaacgatgatgactggatcacgaggtacttcttcactggaggaacaatgccatctgcaaacctacttctatactttcaggaggatgtatttgtggtatatcattggcttgtcagtggcatgcattatgctagaactagaggaaaggtacacgaatccgaaacatctggccatcctggacagcgcatggagggtgtcgagaaatccttggcggagaggttccaatccctggaatctaaggcgacgatgttcggggaatggcaaccctgcgtcgaggcatccgtggaagagctccgatag

SEQ ID NO: 95052 - DNA, 221 bp, Zea Mays
ttattttttggacgccttaagattttttgggatagatggtgttggaaggcagttgggattaacgatttggtctctcaaacgaatccacccttttctatgtacatgttatgtattagtaatatataatgatagagatccgacaatctgtctttttcacacactaggtttgagggttttcctgtgaggttgtgaaaaactctttatgtgagaaaaaatatttc

SEQ ID NO: 95053 - DNA, 3197 bp, Zea Mays
ggcgggctagccagcactgctggttctgggaggcgtcgctgggcggcgatgcggagcgggagcagcgatggcggcggcgggtacgagaagagcgggatggacacgggcaagtacgtgcggtacacgccggagcaggtggaggcgctggagcgggtgtacgccgagtgccccaagcccagctccgcgcgcaggcagcagctgctacgcgagtgccccatcctctcaaacatcgaggccaagcagattaaagtctggttccagaaccggaggtgccgtgacaagcaacgcaatgagtcttcgaggctccagtccgtgaacagaaagttgactgcaatgaacaagcttctcatggaggagaatgagcgattgcagaagcaggtttcccagctggttcacgagaatgcgtacatgaagcagcagctgcagaatccgtcactggcaactgatgcgagctgtgagtcaaatgcgaccactcctgcaaacctaagggatgcgagtaacccatcagggctccttgcaattgcagaggagaccttgacagagttcctctcaaaggctacagggactgctattgattgggtccagatgcctgggatgaagcctggtccggattcttttggtattgtgaccatttcacatggtggccgtggtgtcgctgcccgtgcctgtggtctggtgaacctagaaccaacaaagatagtggaaatcttgaaagatcgtccatcttggtttcgtgattgtcggagtcttgaagtctatacaatgttaccagctggaaatggtggaaccattgaacttgtttacatgcagatgtatgctcctactactttagttcctgcacgtgacttttggacactgagatacacaaccactatggaggacggcagtcttgtggtctgtgagagatccttaagtggttcaggagatggtcaaagtgctgccacaacacaacaatttgtaagagctgagatgcttcctagtggctatttagttcgccaatgtgagggtgggggctcgattgtgcgaatagtggaccatctggatcttgacgcttggagtgttcctgaagttcttcgtcccctctacgagtcgtctcgggtggttgcccagaagatgacaaccacagcgctacggcaccttagacaaattgctcaagaaacaagtggagaggttgtatatgcgctaggaaggcagccagctgttctacggacatttagtcagaggctgagtagaggctttaatgatgctataagtggtttcaatgatgatggttggtccgttatgtgtggagatggcatggaagatgttatcattgcttgcaactcgaagaagatcaggagcagtagcaatcctgctactggttttggagcccctggacctggaggtatcatatgcgctaaagcatcaatgttgctgcagagtgttccaccagcagtccttgttaggttcctgagggaacatcgatctgagtgggcagattataactttgatgcgtattcagcttcagcattgaaaacaagcccttgttcccttcctgggttgcggcctatgaggttttctgggagtcagatcatcatgccccttgctcacacggtggagaatgaggagatcttagaagttgttcgtcttgaaggacagactcttacacatgacgagggccttttgtctagagatatacatctgcttcagctttgcactggaatggacgagaaatcaatgggatcctgcttccagcttgtctttgcaccaatcgatgagcttttccctgatgatgctccattggtatcttcaggctttcgcgtgatcccgttggacataaaaacagttgagtatttcttacttgtttgtatgtttgggataaagtttgtgcccattccttgtcttttcttgccaccacaaagaataaaatttttacatgtctgctatctgaatttaacccaaactattccttttccaccttgttacggtagtatgttttcttttttgcacgcttagcttttaaacatctttatcttccacaggacggaccaccctctggaagaacgttggatttggcctctagccttgaagttggcgcaaccacgcaacaagtggcagggaatggatctcaggacgtttgcaacctgagatctgtgctgacaattgcctttcagtttccctatgaaacacatctccaggacaccgttgcagctatggcccggcaatatgttcgaagcatcgtttctgcggttcaaagagtatcaatggccatttctccctcccattctggcttgaatactgctgggcagaagttaatttctggctcccccgaagctgctacacttgttcgctggatttgccaaagctaccggtatcacttgggggtggatttggtcagccactcggatcaagctggggaatcacttttgagaatgttctgggaccatcaagacgctgtcttgtgctgctctttcaaggaaaagcctgtgtttactttcggcaaccagatgggagttgacatgttagaaacgactttagtcgctctgcaagatctcacccttgacaagatctttgacgagcctggtagaaaggcactacatgcggaggttccgaaactgatggaacagggctatgcgtacctgccggctggggtgtgcctgtctgggatgggccgccatgtctcctacgagcaagctgttgcttggaaagttctcggtgaggacggcaacgtgcattgcctcgctttctgtttcgtcaactggtccttcatctgatgtgatccaagtgcgccgcggaaactttacgatcagcgtccatttttgcattctctgtagacgagaatggtgcggtgttgctgctactgttagctagacaacggcatgttcaggtagtcttggggaaagccagtattgtgaagatgtaaatttgcgcccgtttccgctaatttaacccgctggacttgctgttgtttgttaaggccaggggcactcgtacgtgagataaaatgttgtgaaattgtatgtgctgaaacataggtttacattgaaattggcatatagaatgttgtgcatgtgtgctaaactgctaataaatagtttcgatattaattaaggggtgtttgaaagcactagagctaaggtgttattttttagataatggaaaaccatcattggagactttctctaccatgcagagtatgaccaacattacatcaccat

SEQ ID NO: 95054 - DNA, 2759 bp, Zea Mays
cataattccaacccactgtgtgtgccgctgtagcagcgcgcgccaccaccgtcaacttctccccacctcgccgccgtctagatttcgtctcctgggctcgagcaaccgaagcaggcttggggtgttctcggagagaatcgttgcctcggccgatgccggccctgatgtaggtttctgctctgctttgcccggtgccaacgtctctcccggagtagcggttccgccgccccatgatctgccagttggaacacatgggcgttcacggaggaggttgctctgctggacagtgaccgcatttggtagcggtggaggaagacgacgaagaggaggaggagtaggccatgaaggaggtggccgaggaaaggtgccttgacccgcagctgtggcacgcgtgcgctggcggcatggtgcagatgccgcccgtgcgctcccgtgtctactacttcccgcagggtcacgcggagcacgcgcatggcggcggggccgcggacctcgccggggcgcgagcgctcccgtcgctcgtgctctgcagcgtcaccggggtgcgcttcctggccgatccggagaccgacgaggtcttcgccaagatccgcctggtgccggtcgcgcccggcgaggtggagttccgagagcccgatgagttcagcgtcgaccccgcggacgcccgggagaagctttcttccttcgccaagacgctgacgcagtccgacgccaacaacggtggcggcttctcggtgccgcgctactgcgccgagaccatcttccccaagctcgactaccgggccgacccgccggtgcagacggtgcttgccaaggacgtgcacggggaggtctggaagttccgccacatttaccggggcacgccgcgccggcatttgctcaccacgggatggagcacgttcgtcaaccagaagaagctcgtcgccggggactccatcgtcttcctgcgcactgagcatggcgagctgtgcgtcgggatacggcgtgtcaagcgggtgtcctgtggtggcatggagtgcatgtctgggtggaacgccccggggtatggggccttgtcggcattcttgaaggatgaggagggtaagatgatgaagagtcatggtgggtacatgagaggtagggggaaggtgaagatcacggatgttgtcaacgccgcaagtctagcagcgagcggacaaccatttgaagttgtgtactacccgagagctagcacaccggagtttgttgtgaaggctgcatcggtacagaacgcgatgaggaaccagtggtgcccggggatgaggttcaagatggcatttgagacagaggattcgtcaaggatcagttggtttatggggacgatagcttctgctcaggttgctgacccaatcagatggccaaattcaccgtggaggcttcttcaggtggcatgggatgaaccggacttgctgcagaacgtgaaatgtgtgaacccatggctcgtggagatcgtatcaagcattccaccgatccacctgggaccattttctccacctaggaagaagctgcgggtgccccaccatccggacttcccgttcgacggccagctgttgaatccgattttccacggcaacccactcggtccgagcaacggcggcggtgctcttcgctgtttctcggacatcgctcctgcaggcatacagggagccaggcatgctcagttcggtctaccactaacagaccgccagcttaacaagctgcacctcggtctgttccaaggcggcggttttaagcggcggcttgacgctatcactccaccatgccctatatccaggggctttgtgatcggcagtgcaccggtcgacgagagcgtctcttgcgtgctgacgatcggcacgccacgggccgcagagagatctgacgacaggaagaaaccacatctaatgctgttcggaaagcctatccttaccgagcagcagatgagctctagagggtcaagggaaacactctcccctgaggccactgggaacagttccgatggcagtgttcagaaaacgggaaacgtatccgatggctccggctcgtcgatctgcatcggttcctcgtcccgaggccgcgaggcttctaggctcgggttcgaatttgaagccgggcactgcaaggtatttgtggagtcggaggatgtcggtcgcaccatcgacctgtccgtctttggctcgtacgaagagctgtacggtcagttggccgacatgtttggaatcgagaaggcagaggtaatgagccacctttgttaccgtgatgctgctggcgctgtcaagcgtactggcgacgagccgttctgtgacttcatgaaagtggcacggaggctcaccatagtagagagcaccgaggggaggctgcagaaacctctcgtcgagtacatggcttgattgcatgactgttcgataaggcactctgaagcttgaggaagactgaagcttggagcgaatatgttttcgtttgcgtttgtctgccgtgaagcggaatcgcgatgtctgtctcgtcgtgtgaaagaaactcgtgtatcggattttcgtctgtcgtgacttggtcgttagaactctgtcgtggtcagttgtgttgcgcttgcgcttgggtcgaagttgatagatggcctctttgatgaactagcttggaataaagttcgagttgtggttagggaatgccagtgccatggcaattcagttgtcgttgtcgatttagttaaaatgcgtgtatttgttgctgcagtttgatagcacttgccaagatatgttgaactt

SEQ ID NO: 95055 - DNA, 2692 bp, Zea Mays
ggaggggcccccgagggatcggttttcggcgggggagccagcggccgcgggcgaatggctggcggcgaggtagcggtcgtggaggaaacggcggtgggggcgccgactgcgacggcgacgccgcctgacttggcggcgcatgccgcggccggtggcggggaggaggcgatgcggatggagggctggctgtacctgatccgatccaaccgatttgggatgcagtactcgcgcaagcgctacttcgtgctcgaggacgccgcgctccgctgcttcaagtccacgccatcctccaagcgcgaggatcctgtcagaagtgcaataattgactcttgtattcgtgtgacagacaatggcagagaaagtgtacataggagtgacttttacatattcacactatataattcttccaatcattatgatcaacttaagttgggtgcgagaagttcagaagaagcagctaggtggatcaggtgcttaatggagtctgccttaaagtcacctagaaaagatgagcacattgttgcttgttcacacagaagatggcaggctttcaggttgagccgccgcaatagccgtatgcactcaatagattggactttattttcatctgctcataacgatccaatggcatctgatgtcattgcaccttctccatggacaatatttggctgtacaaacgggttacgtttgtttaccgaggcaaacgatggtggctctcatgggaagtattgggatgatcatccggctataatggcagttggtgtggttgatgcgaattccgaggctgtctttcagactctaatgtcccttggccaatcaagatctgaatgggacttctgtttgcgggaaggaaaggtaatcgagcatcttgatgggcatacagacataatccaaaagaaattaagaagcgactggttaccatggggaatgagaaagagagatctattacttagacgatattggaggcgagaagatgatggaacttatgtaattctataccactctgttttccactacaaatgtcgtcccgagaaaggctacatccgtgcatgtcttaaaagtggaggttatgtaatatcaccagtcaatcaaggaagacaatcagttgtaaagcacatgcttgccatagattggaaattctggaagtcttatctgtttacatcatctgccaaatatatcactatacgaatgttaggcagagtagcagcactacgagaattcttccgagcgaaaaatggtaattgttcttgcatggagttctcatctggagagttgaccagggacacgggattacctcaaggtgaaaatcagcgaataaatttggaaatgcagcaagaaaatgagaacggaagacttgaaggtcctactgaaggatcactgggtggttctaacaggcacttaagcagtactggttcctttgttcaactcaatgatgcagcagatgagttctttgacgtgccagacgaatcagaatatgatcagagagaagttatgtttccttctgatgagagcttgcatgctgcggaccagcgtcacgctaaactgtccactgctgctgtttttgtaaaaaggttgcatgatcttgcagttcagaaaagaggatacattgacttacagggagctgcagatgctgataatgggccatgttgctatggatatactcttcccaaagattcgagctatacagtgccttctacttgggcaatgacagatcctacaacattcttaatccggggagagacttatttgcacgatcgtataaagatcaaggcaaatagtaccctgatgcaaatggtaggtgctgactggataaaatctgataagcgtgaggatgatctagctggtcgccctggggggctagtccagaaatgtgcagcacaagggggcacccgattcttcttcattgtaaacattcaggttcctggttcaaccacatacagcttagctttgtattatatgatggatacaccattagaaaaggtccctctgcttgaaagatttgtaaatggagatgatgcattcagaaattcaaggttcaagctcattccttacatctcaaagggatcttggattgttaaacagagtgtgggcaagaaagcttgcttggttggacaagcattagaaatcaattattttcgtggaagaaactatttggagcttggagttgatattggttcatcaacggtggcacgaggtgtggtgagcctagtgcttggctacttgaacaatcttgtgatcgaaatggccttcttggtacagggaaacacaaatgaagaactcccggaattcctcctaggtacctgccgactgaattacctggatgcctccaaggcagtgtccatagacgagtgctaggaccccaactgacctcattttttaaagccaagtacaccaaaagacaaaaaaaaaaggctgaatccccattccttgctgccgacacaatcggcaaccctagcccagatgcccattttattgcctcaccgcaaaagtgggggatccattgcaaccgttgtacattctcttcttgccgactgctcaggtattgtgttgtaatgatgatagcaatccatgataaaagccccctcattctttggcatcttatcaccacggcaaaaacggaaagaaaaagtgtattctaccatgccgtctcttctgaccgaatgacgtcagatggtcggatctaacagcaagc

SEQ ID NO: 95056 - DNA, 173 bp, Zea Mays
tttggttgtctatatctttgagtcttatctcctctacttcagcttagcatggcgagcaattcttgacgccgactcatttctatgggtacgatattccttacgaccacatatacaagcgattaatccactctatgtgtacctagtggctagtggcaagtggtggaacacatgtc

SEQ ID NO: 95057 - DNA, 1702 bp, Zea Mays
tgcgagcgcgaggcaagaggagggggagaaggcgacgcggcgcgatcatgcgagcgacggcgggcgtttgagctaacccgcgccaccccccttcctcggagtcggagcgagtcgaggaacggctcgtctgcctctcccgttctccttcctctcctccccagaagatccgatccatcatcgaggactcgccgggaagaatcaaggatatatagataatatacaaacaaaggttcctccagagcccagaggagggaagtcaccggccgtcggcggggaggagatgtcggacggcgcgggctcccggacgggcgtcgctggcgcgctgggcctctcggtcacctcgtcggtggccatcgtcatctgcaacaagtacctcatcagcactctaggcttcttcttcggtcagtacgtgcgagccttcccgagtttcagaactaaccacccacccctccacggcaaaagttcttgtccatcacaatatacactgttgatgcagcgacgacgctgacgagctggcacctcatggtgaccttcttcacgctgtacgttgcgcagcggctgcgcttcttcgagccaaagccgatcgacgcgcgcaccgtcatctccttcggcctgctcaacggcatctccattggcctcctcaacctctgcctcgggttcaactctgttggcttctaccagatgaccaagctggccatcatacccttcaccatagtcttggaaaccctctttctgagcaagaagttcagccagagcatcaaggcctccctcatggttctgctgctgggagtcgggatcgcgtcggtcacggatctccagctcaacctcctcggctcgatcatcgccgtgctcaccatcgctgcgacatgcgtcgggcagattctgaccaaccaaatccagaggaggctgaaggtttcgtcgacgcagctgctgtaccagtcgtcgccgtaccagtccgcggtgctgctcgtcaccgggcctttcgtggacaagctcctcaccaagcgtgacgtcttcgcgttcagctacaccacccaagtcgtggtgttcatcctgctgtcgtgctcgatcgcggtgtgcgtaaacttcagcacgttcctggtgatcggcacgacgtcgcccgtgacgtaccaggtgctgggccacctcaagacgtgtttggtgctctccttcggctacatcatcctcaaagaccccttcagcgcgcgcaacgtggtgggcatcctcatcgccatcttcggcatgggcctctactcctactactccgtcgtcgagagcaggaagaagaccgaggacgctagctcgctgccggtcgccgcgcagatgagcgagaaggactcggcgccactcctcggcgccaagagctcgccgcggacagagaacaaggccgaggaaaccttcgactacatgccgaggacggccaagagcgcgttcaccggccggtgagcgcgtagcttgtaaggagtacgtatctttctagagttgtgggtagacgacgagcaacaaggcgggaatgtgttagtgaaagatgtaacggcggcaagtgacattccaattatcatttttgcgatttctcctctagggtggtctgcgtggtcatggtttaccagagcataaacagcagaatgtgtggtctactggtcttgaccgagcttgaaatagtagattggattggtgataatacaactatacaagacgtgcg

SEQ ID NO: 95058 - DNA, 1618 bp, Zea Mays
tgcgagcgcgaggcaagaggagggggagaaggcgacgcggcgcgatcatgcgagcgacggcgggcgtttgagctaacccgcgccaccccccttcctcggagtcggagcgagtcgaggaacggctcgtctgcctctcccgttctccttcctctcctccccagaagatccgatccatcatcgaggactcgccgggaagaatcaaggatatatagataatatacaaacaaaggttcctccagagcccagagcaggagggaagtcaccggccgtcggcggggaggagatgtcggacggcgcgggctcccggacgggcgtcgctggcgcgctgggcctctcggtcacctcgtcggtggccatcgtcatctgcaacaagtacctcatcagcactctaggcttcttcttcggtcagtaccgacgacgctgacgagctggcacctcatggtgaccttcttcacgctgtacgttgcgcagcggctgcgcttcttcgagccaaagccgatcgacgcgcgcaccgtcatctccttcggcctgctcaacggcatctccattggcctcctcaacctctgcctcgggttcaactctgttggcttctaccagatgaccaagctggccatcatacccttcaccatagtcttggaaaccctctttctgagcaagaagttcagccagagcatcaaggcctccctcatggttctgctgctgggagtcgggatcgcgtcggtcacggatctccagctcaacctcctcggctcgatcatcgccgtgctcaccatcgctgcgacatgcgtcgggcagattctgaccaaccaaatccagaggaggctgaaggtttcgtcgacgcagctgctgtaccagtcgtcgccgtaccagtccgcggtgctgctcgtcaccgggcctttcgtggacaagctcctcaccaagcgtgacgtcttcgcgttcagctacaccacccaagtcgtggtgttcatcctgctgtcgtgctcgatcgcggtgtgcgtaaacttcagcacgttcctggtgatcggcacgacgtcgcccgtgacgtaccaggtgctgggccacctcaagacgtgtttggtgctctccttcggctacatcatcctcaaagaccccttcagcgcgcgcaacgtggtgggcatcctcatcgccatcttcggcatgggcctctactcctactactccgtcgtcgagagcaggaagaagaccgaggacgctagctcgctgccggtcgccgcgcagatgagcgagaaggactcggcgccactcctcggcgccaagagctcgccgcggacagagaacaaggccgaggaaaccttcgactacatgccgaggacggccaagagcgcgttcaccggccggtgagcgcgtagcttgtaaggagtacgtatctttctagagttgtgggtagacgacgagcaacaaggcgggaatgtgttagtgaaagatgtaacggcggcaagtgacattccaattatcatttttgcgatttctcctctagggtggtctgcgtggtcatggtttaccagagcataaacagcagaatgtgtggtctactggtcttgaccgagcttgaaatagtagattggattggtgataatacaactatacaagacgtgcg

SEQ ID NO: 95059 - DNA, 1607 bp, Zea Mays
tgcgagcgcgaggcaagaggagggggagaaggcgacgcggcgcgatcatgcgagcgacggcgggcgtttgagctaacccgcgccaccccccttcctcggagtcggagcgagtcgaggaacggctcgtctgcctctcccgttctccttcctctcctccccagaagatccgatccatcatcgaggactcgccgggaagaatcaaggatatatagataatatacaaacaaaggttcctccagagcccagaggagggaagtcaccggccgtcggcggggaggagatgtcggacggcgcgggctcccggacgggcgtcgctggcgcgctgggcctctcggtcacctcgtcggtggccatcgtcatctgcaacaagtacctcatcagcactctaggcttcttcttcgcgacgacgctgacgagctggcacctcatggtgaccttcttcacgctgtacgttgcgcagcggctgcgcttcttcgagccaaagccgatcgacgcgcgcaccgtcatctccttcggcctgctcaacggcatctccattggcctcctcaacctctgcctcgggttcaactctgttggcttctaccagatgaccaagctggccatcatacccttcaccatagtcttggaaaccctctttctgagcaagaagttcagccagagcatcaaggcctccctcatggttctgctgctgggagtcgggatcgcgtcggtcacggatctccagctcaacctcctcggctcgatcatcgccgtgctcaccatcgctgcgacatgcgtcgggcagattctgaccaaccaaatccagaggaggctgaaggtttcgtcgacgcagctgctgtaccagtcgtcgccgtaccagtccgcggtgctgctcgtcaccgggcctttcgtggacaagctcctcaccaagcgtgacgtcttcgcgttcagctacaccacccaagtcgtggtgttcatcctgctgtcgtgctcgatcgcggtgtgcgtaaacttcagcacgttcctggtgatcggcacgacgtcgcccgtgacgtaccaggtgctgggccacctcaagacgtgtttggtgctctccttcggctacatcatcctcaaagaccccttcagcgcgcgcaacgtggtgggcatcctcatcgccatcttcggcatgggcctctactcctactactccgtcgtcgagagcaggaagaagaccgaggacgctagctcgctgccggtcgccgcgcagatgagcgagaaggactcggcgccactcctcggcgccaagagctcgccgcggacagagaacaaggccgaggaaaccttcgactacatgccgaggacggccaagagcgcgttcaccggccggtgagcgcgtagcttgtaaggagtacgtatctttctagagttgtgggtagacgacgagcaacaaggcgggaatgtgttagtgaaagatgtaacggcggcaagtgacattccaattatcatttttgcgatttctcctctagggtggtctgcgtggtcatggtttaccagagcataaacagcagaatgtgtggtctactggtcttgaccgagcttgaaatagtagattggattggtgataatacaactatacaagacgtgcg

SEQ ID NO: 95060 - DNA, 1607 bp, Zea Mays
tgcgagcgcgaggcaagaggagggggagaaggcgacgcggcgcgatcatgcgagcgacggcgggcgtttgagctaacccgcgccaccccccttcctcggagtcggagcgagtcgaggaacggctcgtctgcctctcccgttctccttcctctcctccccagaagatccgatccatcatcgaggactcgccgggaagaatcaaggatatatagataatatacaaacaaaggttcctccagagcccagaggagggaagtcaccggccgtcggcggggaggagatgtcggacggcgcgggctcccggacgggcgtcgctggcgcgctgggcctctcggtcacctcgtcggtggccatcgtcatctgcaacaagtacctcatcagcactctaggcttcttcttcggtcacgacgacgctgacgagctggcacctcatggtgaccttcttcacgctgtacgttgcgcagcggctgcgcttcttcgagccaaagccgatcgacgcgcgcaccgtcatctccttcggcctgctcaacggcatctccattggcctcctcaacctctgcctcgggttcaactctgttggcttctaccagatgaccaagctggccatcatacccttcaccatagtcttggaaaccctctttctgagcaagaagttcagagcatcaaggcctccctcatggttctgctgctgggagtcgggatcgcgtcggtcacggatctccagctcaacctcctcggctcgatcatcgccgtgctcaccatcgctgcgacatgcgtcgggcagattctgaccaaccaaatccagaggaggctgaaggtttcgtcgacgcagctgctgtaccagtcgtcgccgtaccagtccgcggtgctgctcgtcaccgggcctttcgtggacaagctcctcaccaagcgtgacgtcttcgcgttcagctacaccacccaagtcgtggtgttcatcctgctgtcgtgctcgatcgcggtgtgcgtaaacttcagcacgttcctggtgatcggcacgacgtcgcccgtgacgtaccaggtgctgggccacctcaagacgtgtttggtgctctccttcggctacatcatcctcaaagaccccttcagcgcgcgcaacgtggtgggcatcctcatcgccatcttcggcatgggcctctactcctactactccgtcgtcgagagcaggaagaagaccgaggacgctagctcgctgccggtcgccgcgcagatgagcgagaaggactcggcgccactcctcggcgccaagagctcgccgcggacagagaacaaggccgaggaaaccttcgactacatgccgaggacggccaagagcgcgttcaccggccggtgagcgcgtagcttgtaaggagtacgtatctttctagagttgtgggtagacgacgagcaacaaggcgggaatgtgttagtgaaagatgtaacggcggcaagtgacattccaattatcatttttgcgatttctcctctagggtggtctgcgtggtcatggtttaccagagcataaacagcagaatgtgtggtctactggtcttgaccgagcttgaaatagtagattggattggtgataatacaactatacaagacgtgcg

SEQ ID NO: 95061 - DNA, 670 bp, Zea Mays
ccactcccatcgtcgtttctctctctccggcggctgcgcggcggcttggatcacatcctcgtcggagctaccatggctgggaagcttattgcaaacctgattgtcatgggctctacgattataggaagagctatgcttcaggcatatcgtaaagcacttgataatgcaaataaaactggtgtggcccatgaggcaataaacaatattcgtagagcaagcaaaacaatgaccgaacaggaagcgaggcagatactgggtgtctcagagaattcgacgtgggaagagatcgtacagcgatacgataacttgtttgaaaggaacggcaaatctgggagcttttacctccaatcgaaggttcaccgggccaaggagtgcctagaaacagtgtaccaaaagaacaaacaagatgagcctcctaactgaaatcccgccccttgagtctgctgttgacattcttttccccctcataagagaactgtacataccaacaacggtcgctgctgttgtaccagtagtatgcaatgcggaaccaataagctttgtgtgcagcgactgaaactcctacatgtgtaagactgatcagtaaggtctcactgggctctggctcggtggcgcttacaactttgttattttgccatatgatgattgtgccaaaccattattcttgata

SEQ ID NO: 95062 - DNA, 797 bp, Zea Mays
gcatcagctgcgctgctcaccaggaaggccatctcatccatccttcattgtattgtagtggcatcaccaggaacagcccagccgcaagaagacagacgacagcagcgagtggggatcggaagaaagaggaagcggagacgaaggtgagagagagaggcaaaagggcagccatgacgatgaagcagtcgaggttcaagaggatctgcgtcttctgtggcagcagccaggggaagaaggcgagctaccatgacgccgccgttgagctcggcaaccagctggttgcccggagcatcgacctggtgtacggcggcggcagcatcgggctcatgggcctcgtctcccaggccgtctacggcggcggacggcacgtcatcggggtcattcccaagacgctcatgacaccagagataagcggcgagacagtcggggaggtgcgggcggtggccgacatgcaccagaggaaggcggagatggcgcggcagtccgacgcattcgtcgccctgcctggagggtatggcacgctggaggagctgctggaggtcatcacgtgggcgcagctgggcatccaccacaagccggtcgggctgctgaacgtggacggctactacaactcgctgctgaccttcatcgacaaggccgtggaggagggcttcatcaaccccagcgcccgccgcatcatcgtgctcgcgcccaccgcgcaggagctcatggacaagctcgaggagtacgagccttaccacgacagggtggcgtccacgctcaactgggagaccacgatggaccacctggcctactga

SEQ ID NO: 95063 - DNA, 290 bp, Zea Mays
ctctatgttctttcgtactgttattaactgtggtgtgggctcattgattatattcttagttgggtgatgagcagaatcagtttgagtcaattggtttagatgagtgtcatgaccatctcattaatcttcagaaacttagttgggctctttgacaaaatctcgattgcatacttttgttctttttcagttgtttattacttactaaaatctttcatttgtaggtaaactgaaactgtcgctgcaacaattcttcttgtgatcgttgctccttgccaattcatcgatctgag

SEQ ID NO: 95064 - DNA, 421 bp, Zea Mays
actagccagtatggtactaatttttttttgcaagacacaacaccacagcagtaccggcgctctgggctgaaattttggtgcggcccatacgtttggggcggcccatactccaccgcagcagtcttcttccgcacgacgtcgcgcccaaccgctcggtcagctcgtggagagcccggaggagagttccactacgcaattcgctacctcggcttcgacatcggcgacgtgcagagcccggaggacatcgtcgccgcggaacggctcgtttttttcccggtgtcggcgccttcggctccgccatggacgtcctcaacaggacgggcatgggccgacgcactccgtgagtacatccaaagggaccgccccttcctaggcatctgcctcggtctccattctctccactcgctccccacacctctct

SEQ ID NO: 95065 - DNA, 1180 bp, Zea Mays
gaagggcaggcctggtgcagtggtgatagctgtctgactaagtcaccatgtcacgggttcgaagcagcctctccgcatctgcggaggaaggcttgccttggtttatcccgtcgcatctgcggaggtggtgctgctgtgcatcgctgtgggctgtgaggcggaggcactgcatctcgctgtgaagtggactgctccatcctctctatgatcctgcaccatcaggggttcgggtgacctttgaggatggtggttaactggttaccttgaagatcccggtgccattgattctttgctacttggcctctccactgctggcaacagacccaggtatgtaccattcatcccccggtcttcactatcattcattgctcctctttcacagtttcttgtgatgccctgcatgtttcgtaactctcccaaacgtttgcttcaagcatggaccagggaatgaattagatacctattcttgaccccttcccgcccaaggaggagcaggcaggaactccggtatatggtggtaattggtggcacctttatgtacttctttaggggcagcctaccatggcaggggctgaaagcaggatcaagaagcagaaatatgacaaaaattagtgcgaaatggatactcccatggaggataccagttttgactggaccattttgaagtatcctcagataggctgcaacctgcggatgaaggcaagtgacagaactagtggaggtgttggaccttcaatggatacaattgagaagaccccaggaggtgtccgatagaaggaatcctagtggttatgtgaatccgagtggcaattatgcccaatgaccacgtgagaacatatgtatgtcattgaacgaaattgataaatatgtagccgcactcttgtacagaattggttgatgactataaaattagcagttctagagctatttgtgttttccttgattggtagctcatgccctgtattcctggatagaagaactttgtcaagaactgtacaattcgtagatggcaagctgtctgaacttttatcgtagagcagttccattttatagcattgatctgtgttttcgcacgaacacctgtgtgtcatgtgtggcatattagttgttttagtttctttttccctataaatctgtaataggtaccaactcaccacgtatagtgttctacacgaccttt

SEQ ID NO: 95066 - DNA, 2520 bp, Zea Mays
accgctgacaagcgcactgtggcccttccgcatccataggctgccgccgcgctcccccgccacgagaccctgccccacttcggatgccctttcgaccacacatccccctccgcttcctactgcctcacctccagcaccgcattgcccgcccacccagacctccacgtagatcgctttcctactctctcgcggcggcgttgtcagcggctggaacagagtccgaggaggaggcggttgtgggtagggacgcgccgttagcccctccacgcccaggcggggcgggaagtggagcgcctgggcgtggctgggcacagcagggggcgctcgatgaggaaagtgcggagctcgagcggaaggcctctatcgtcgcacggttcaggcactgccatgagcttctgtggcagactaggtggcgggagatgcgccacgggttggcccagatggtggatgaacaaggttctgattctgctccgactctatgtgatattctgtggtgtggattcagggaatgggattcaagcagcattgtgtgggatgctctagcaaatagttatgctagagctcagatgaatcatgatgctctttatgttcttagtaaaatgaacagcctaaacatgcaaatctcaataaccacctatgatagtttattgtacagtctaagaaaggcagatgtggcactggcgatttttaaagagatggagtcatgtggtattccccccagtgattattcccatggcattctcatagatggactctgcaagcaaggtaaaattggagaagctttatctttccttcaggaaacaaggaaagaggggaaattcaaacccttgggaatgacctttaacacccttatgtccgcattgtgtaattgggggttcattcaggatgcaaaatcagttttctgcctgatgttgaagtatggattaaatccaagcaggcacacatattcaaccattatacatggtctatgtaaagtaggttctgtaaatgaagcattcgatatttttcagagtgtgacagaagaaggaatggaacttgatattgtcacttgcaacagccttattaatggctttcgcttgcatgggcatacaagagaaattccaaaaatgattgagatgatgaggggcctaggtgtcgaacccgatgttgttacttatactatacttattactggccactgtgaaggcggtgatgtcgaagaagggatgaggataagaaaggacatcttaggccaaggtatagagttgaatattgtcacatatagcgtccttatcaatgctctcttcaagaagggcctgttctatgaggtcgaaaacctatttggtgagatatgcagtattggtctggaattggatgtcattgcatattccatcctcatccatgggttctgcaagctaggagaaattggaagagcacttcaagtctggaatctaatgtgctgttctcagagggtaattccaacttcagtaaaccatgtatctattcttctaggcctttgcaagaaaggattccttgatgaagcgaggtcatatttggaaactgtggctagcaaatatcagccatccgatgtagtcctctacaatgtagttattgatggttatgcaaaagtgggtgatattggtaatgctgttcagctgtatgatgcgattattatggctggtatgtgcccaaccattgtaacatgcaactctcttctatatggctactgcaaatttggggatctacatatggcagaaagctattttatggctattcagttaagtgacctgctgccaacaacagttacctacactactttgatggatgcactctctgaagctgggaaagttcattccatgctaagtatttttaaagaaatgactggaaaaggtatcagaccaaatgcaataacttacagtgtagttattaaaggactttgtaagcagttaatgttccacgatgccaaaaatgttcttgatgatatgtatagagaaggttttgatgctgatccaataccttacaacacgcttatacaaggtttttgtgaaactcaggatgctaaaaatgctttctacgtgtatgaactaatggtatgtcgtggagtgatgccctctcctgttacttataacttgcttgttaatgtgctgtgcttaaagggactagttattcacgctgaaatgaaactggagtccttcagaaaacagggtgccgagctgagaaaatttgcatatacaacacttatcaaagctcaatgtgcaaaagggatgccttacaaggctattatgtgggttggcaagcttctagatgcagggtttgaggcatctattgaagacttcagtgcggcaatcaaccgactatgcaaaagacagttcaccagagaagctttgatgctcatatcgatcatgttatctgttggtgtttatccagatattcaactataccgtgtactgggtacagctgtacagaagaaaaatgagtcattctatctacccatattgcaagcccttgctatcaaaactggtatttagtactttgagtctg

SEQ ID NO: 95067 - DNA, 1264 bp, Zea Mays
gcaacctcggtaccagcaggcttaacggacggacggacgtcatgggaaactcctcatctcgcggccgatcagagccgaggcagggcgagcagaggaccatgaagtggagcgtcgatgggttcgcctcactcctggacaagggcgacggatggacctactccagagtgttcgagctcatgggctacaactggtacctgaagctgaacccgagggacaagaagagcggtgacgacggcacggagtacgtctccctcgtgcttcagctggatgacctctcggtgaagccggatactgtcgtgaaggcctccttcaagctgctgatctacgaccaggcgtatggaaagcacagcgagcatcaagttcggcacagtttccagaccgcaagcacgagctcgggagcctcgtgcatggtttccctcgaaaagctgaaggaacggccgtctaagttcatcgtcaacaacagctgcaccttcggtgtcgagttcatcaaagtcaaggcttccaaagtgagcacgacgtctgaaacgctgtttgtgcggaagccgagcgtcttcgacgaggccaggacctacacctgggacatcgaggacttcttcgcgctcaagaactccggccactcgccggagttcgaagtcggaggacacaaatggagtatcggtgtctatacgtccagcgatgggaaccacctcaccttggacctgtgcatgaagaacacagatggtgtccagcatgacggctctgcaaacctggtagaattcagcttggccatcaaacaccaggagggcggcaatcactggaaagcaacaggccggagccagtttacaagcaacgctcgttgctggggatggacgaagttcatctcgctggaggatttcaaggactcctcgaatggctatctcgtcaaaaacaagtgctgcattgaagctgaggttgcactcgttggttcctcaaagatgaagtagtgtgtcctctgtccttgtctatatatgtgtgtgtgggctgaatgactgaatcacacgatagatgtgcagaggtttggacgtgcgtgtgacgtgtcttgtgttgtgtgttcgttttgttcgtgctgaagacactaaaagtgtgcatgccaaataaggttcgatcggcgcccaagatattgctcagttttgttcccacacgcatgtcttcgctggtgcatgcggtatatcatcaactgttatctatttgtaataactggtggcagtgtaagtgctacacacacacggtaaaaaaagtattatat

SEQ ID NO: 95068 - DNA, 522 bp, Zea Mays
atgacaaccacccaaggcaccacagtgaacaaaactgacaccactgcatcaagaacagcccaggcaacaaagaaaccatcgagctctgggcctgcaacgactgcaccaagccacgggttaacggatgtggagaatggcatcagtttggcgaccacaaagagcctgaacagctgggcctgatcgtgcacatccgcaaagaaccagaggcagagcatctgcacaacggcgtcccgcgtggcccaccgcaggaacgtgaaccctgtgagtctcttagcgcccctcgcagcacaggtgaggaggaacactagacgccgcccaggtacgtggtgccccgccacggacgcaaacactgcgcccagcgcggcggagtgcacggcgatgtagccaaggatcgcgaagatatgtgcggaggagagcagcgcgaggaggttgacgatggccgctgcgtcgcgcctggtcagggcaagaaaaccgaattctctgcccagcggcgaggcgggcttcggaggcgccgtctcattg

SEQ ID NO: 95069 - DNA, 124 bp, Zea Mays
gtaataagtgttgtataatttctctaataggaggatggagccaggtgttactttttcatggtctaaaagcaagcaacgcccattaatttttcaaaccattgtcagctctcgggtgaaaactcgc

SEQ ID NO: 95070 - DNA, 511 bp, Zea Mays
aataatcgtgtcgggccgggccaacactacgggtcgaggctacagccccagcacgacacgacgttctttgctcttgcaagcattaggtcgtttctgagaccatattggcgcaatagactacatggtgtttgaggttgctgaattggatggagcagcaatgatttgtcacactaacagcaaaatgaaaggttatttgttggttttaaacgttagtaattgctacgaagtagcgtaatttatatggagcgcatccaatttttattgatgcctgactttagcaatcactccatattttgatctatcttttttataagtttgatttcatgggacttattttataaacttgatctcacaaactttctcttatctggtctttgtatggtggaattatgtcattttataatctttgttcattcagtcaatcgttgtgaactctttctaatcgctcacttcattggccgtgttgtaccaagacatatttgcatggagtaaacaataacatcagttagcc

SEQ ID NO: 95071 - DNA, 221 bp, Zea Mays
attaatccgctacacgtctatagatgccaaacgacgcccgatacgggctaaatgcacgtgggccacaactatgacacaagcacgtcatgccggcctgctaactgtgtcggaccagcccgttagcccgtcgatccatttaattaaatcagcgtaacgacgcccgacacgggctagatgcacgcgggccacaactatggcacagacacgtcatgccggcctgc

SEQ ID NO: 95072 - DNA, 1693 bp, Zea Mays
cgtgggcggtgggccagcgcccacagcgtcaagcgtcacgccgtcacttgcgagtctcctgcctaaagacacaccaaccaatcagagccaacatagcacactgacgtcaggggcccgctggtgtcgggccaattgtcagttactgataagcacgctgtcattatcggggcgtgtgacagtggattcccaaggcttccccgtcacagcgacgttgttaaatagtggccacccattgccgcgttctcttcgctatcccttggttgccgcagcctccaaagccactcccaaacccccgcttccagaaccttctcgaagctccccgccgcctcctccactcgcaccgatggcgaaggaaccaatgcgcgtgctcgtcactggcgccgcaggacaaattggatatgccctggttcccatgattgctaggggtgttatgcttggtgcagaccagcctgttattctgcacatgcttgacattccgccagcagctgaagcccttaatggtgttaagatggagttggttgatgctgcgtttcctcttctgaagggagttgttgctacaactgatgttgtggaagcctgcactggggtcaatgtggccgtcatggttggtggattccccaggaaggagggaatggaaaggaaagatgttatgtcgaaaaatgtttcaatctacaaatcccaagcatctgcccttgaagcccatgcagctcccaactgcaaggttctggtggttgccaacccagcaaacaccaatgctcttatcttgaaagaatttgctccatctattccagagaagaacgttacttgcctgacccgtctggaccacaacagggctcttggccagatttctgagagacttaatgtccaagttagtgatgtgaagaatgttatcatctggggtaaccactcgtcctctcagtaccctgatgttaaccatgccacagtgaagacttccactggggagaagcctgttcgtgagcttgtctctgatgacgagtggcttaatggtgaattcatcacaactgtccaacagcgtggtgctgcaatcattaaagcgagaaagttctccagtgctctctcggctgctagctctgcttgtgaccacattcgtgattgggttcttggaacacctgagtgtactctgatggttcatacggtgttccttctggactcatttattcattcccagtaacatgcagtggtggtgaatggaaaatcgttcaaggcctcccgattgatgagttctcaaggaagaagatggatgccactgcccaagagctgacggaggagaagacgcttgcttactcatgcctcgagtaaattctaccacacccagagagcaattgccaccccaatgttttgaataaaaaaagaaactccaactcgattcatagattctcactcagaactgctgcacgtcgcagtgcaggcgtgttgctggcttcgcccagcttctttttttgcctgtgatttgcacgacatttatatttattgaaatcttgcagaatcgcttgacgatgaaagtggtagcatacttttgttgctttcctggtgcctaactatcttttaaagtttcatttagatcttttctggattccgtagatcccccctcgattctacagtttattagcctgttggaaaattcattgtgtccctaacgaaacctttattgttgggtgcgtcccccccatcc

SEQ ID NO: 95073 - DNA, 1622 bp, Zea Mays
cgtgggcggtgggccagcgcccacagcgtcaagcgtcacgccgtcacttgcgagtctcctgcctaaagacacaccaaccaatcagagccaacatagcacactgacgtcaggggcccgctggtgtcgggccaattgtcagttactgataagcacgctgtcattatcggggcgtgtgacagtggattcccaaggcttccccgtcacagcgacgttgttaaatagtggccacccattgccgcgttctcttcgctatcccttggttgccgcagcctccaaagccactcccaaacccccgcttccagaaccttctcgaagctccccgccgcctcctccactcgcaccgatggcgaaggaaccaatgcgcgtgctcgtcactggcgccgcaggacaaattggatatgccctggttcccatgattgctaggggtgttatgcttggtgcagaccagcctgttattctgcacatgcttgacattccgccagcagctgaagcccttaatggtgttaagatggagttggttgatgctgcgtttcctcttctgaagggagttgttgctacaactgatgttgtggaagcctgcactggggtcaatgtggccgtcatggttggtggattccccaggaaggagggaatggaaaggaaagatgttatgtcgaaaaatgtttcaatctacaaatcccaagcatctgcccttgaagcccatgcagctcccaactgcaaggttctggtggttgccaacccagcaaacaccaatgctcttatcttgaaagaatttgctccatctattccagagaagaacgttacttgcctgacccgtctggaccacaacagggctcttggccagatttctgagagacttaatgtccaagttagtgatgtgaagaatgttatcatctggggtaaccactcgtcctctcagtaccctgatgttaaccatgccacagtgaagacttccactggggagaagcctgttcgtgagcttgtctctgatgacgagtggcttaatggtgaattcatcacaactgtccaacagcgtggtgctgcaatcattaaagcgagaaagttctccagtgctctctcggctgctagctctgcttgtgaccacattcgtgattgggttcttggaacacctgagggtacatttgtttccatgggtgtgtactctgatggttcatacggtgttccttctggactcatttattcattcccagtaacatgcagtggtggtgaatggaaaatcgttcaaggcctcccgattgatgagttctcaaggaagaagatggatgccactgcccaagagctgacggaggagaagacgcttgcttactcatgcctcgagtaaattctaccacacccagagagcaattgccaccccaatgttttgaataaaaaaagaaactccaactcgattcatagattctcactcagaactgctgcacgtcgcagtgcaggcgtgttgctggcttcgcccagcttctttttttgcctgtgatttgcacgacatttatatttattgaaatcttgcagaatcgcttgacgatgaaagtggtagcatacttttgttgctttcctggtgcctaactatcttttaaagtttcatttagatcttttctggattccgt

SEQ ID NO: 95074 - DNA, 712 bp, Zea Mays
gctcttatcttgaaagaatttgctccatctattccagagaagaacgttacttgcctgacccgtctggaccacaacagggctcttggccagatttctgagagacttaatgtccaagttagtgatgtgaagaatgttatcatctggggcttaatggtgaattcatcacaactgtccaacagcgtggtgctgcaatcattaaagcgagaaagttctccagtgctctctcggctgctagctctgcttgtgaccacattcgtgattgggttcttggaacacctgagggtacatttgtttccatgggtgtgtactctgatggttcatacggtgttccttctggactcatttattcattcccagtaacatgcagtggtggtgaatggaaaatcgttcaaggcctcccgattgatgagttctcaaggaagaagatggatgccactgcccaagagctgacggaggagaagacgcttgcttactcatgcctcgagtaaattctaccacacccagagagcaattgccaccccaatgttttgaataaaaaaagaaactccaactcgattcatagattctcactcagaactgctgcacgtcgcagtgcaggcgtgttgctggcttcgcccagcttctttttttgcctgtgatttgcacgacatttatatttattgaaatcttgcagaatcgcttgacgatgaaagtggtagcatacttttgttgc

SEQ ID NO: 95075 - DNA, 598 bp, Zea Mays
cttgagttgagggaagacatcaaagaccttgtcatggcaatgaaggcagtaagcttgatgcattttatccaaagacatggaggtggcaatttcttatcaaaagaaaagcagtttcaagcctaacaaccttcttacataccctagccttcctggaggaggaaacccagcgggaagctcaggaggagttgacctagcgaatggaaatgaggcggggagttccgcaggagttgacctgatgaatgtggatgatgctgcaggttttgcagcagagagccccctggatcaatttggaattcacccaattctggatctgaatattaatattgaaacggggaagagcccatgctgtcgtagaggcctcgtcgagtgcttccgctacgcctaattctgaggatgatgataagcggaaaaaagtgtcccgccaagacgccaatggcaaagagtcagagccgcccataaatggggcgcaacctgaagtaccatccatttcgttcttaaagaaaagaattaaaacagttctaaggtcctgtcgagataggaaccctagggagagcacattacgctctacttacgaggatcttcaccttgaaacggcgag

SEQ ID NO: 95076 - DNA, 2848 bp, Zea Mays
aggccaatacccacattcgctcgctctacccgactaccccgcaagtcgaggccttccgctggctctcgctcgctcgctcgccccgcgactggttgcctctccgccccgaccctgccctgagaccggagacgaccgcgccccgcggtggcgctgcgacccgcgatacgctttgggcactgaaggttggcttacttgacaggaaattccccgtttaattgcatattggacatgtcttgtggcgtttgattggagaatttaattcttcccaacgatttccgttcttcggaggcttccatcttggtttcagttctgcagatctgtgactgagaggggaggaattccagtcagtcgtttatgaatcctggggcctgtgcttactagagggagggcaaggcaagttaggatccgagatgagggggagaaatgactccgggaacagcaagccggttgtgctgtgctgtgtgatgatcgtgtgcctatgcctcctcttcttgtatttctcgggctccaatggacaggctgggagcaccgcatttgagtacgggaccaaattctcacggtcacttggatggggcagtgatgatggttctgaagagtccatttttggaaccggggatgcagatgatgtcaagcctaagagctttcttgtgtgtgatgaccggcactctgagctgatcccctgcttggatcggaacttgatatatcaaatgaggctgaagctggatttaaacctgatggagcactatgagaggcattgccctccacctgaaaggcgttttaattgcttgattcctccaccacatggctataaggtccctataaaatggccaaaaagtcgtgatgtagtatggaaagcaaacattccacacactcaccttgcaaaagagaagtcagaccagaactggatggttgaagctggtgaaaaaatcaagtttccaggtggtgggacccattttcaccatggagctgacaaatacatatcaaatattgcaaatatgctaaatttcaaagataacaatataaacaatgaggggatgcttcgtacagttcttgatgttggttgtggagttgctagtttcggaggataccttctttcttctaatgtgatagcaatgtctttggcaccaaacgacgtgcatcagaatcagattcagtttgcactcgaaagaggaatccctgcatatcttggtgttttgggaacaaaaaggcttccatacccgagtagatcatttgaactagcccattgttcacgttgtaggatcgactggcttcaaagagatgggattcttctgctcgaactagacagattgctacggcctggaggttattttgcttactcctctcctgaagcatatgcacaagatgaggaagatctccgaatctggaaagaaatgagtgcccttgtagaaaggatgtgctggaaaattgcagagaaaagaaaccaaactgttatttgggtgaaacccctgaacaatgattgttacaagagacgagcacatggtacaacgccacctctatgcaaaagtggcgatgatccagattcagtatggggagtgccaatggaagcttgcattactccgtatcctgaacaaatgcacagagatgggggaagtgggctagctccctggcctgctcgattaacaaccccgcctccccgtcttgctgatttgtatgttactgctgacacatttgaaaaggacacggaaatgtggcagcaacgagtagaaaaatattggagtttgttgggcccaaaggtaaaaccagacactattagaaacatcatggacatgaaagcaaattttgggtcatttgctgctgcactcaaggaaaaagacgtatgggtgatgaatgttgtgccacatgatggaccaagcaccctcaagataatctatgatagagggctgataggcagcaatcatgactggtgtgaagccttctcgacctatcctcgaacatatgatcttctccacgcatgggcagtcttctccgacctcgataaaagaggctgcagtgctgaagacctgctcctcgaaatggaccgtatcctcaggcctaccgggtttgccatcgtgagggacaagggcactgtcatcgaattcatcaagaagtacctccacgcgctccactgggaagcagtagcggctgcagatgccgagcccagctcggaatcagaggagaacgagatgatcttggtgatccggaagaagttgtggctaccagaagcaggctcgcacacgtgattcccttcccggcgtctgcagctcagaagcgaggcgccagctgcaccagccatgatttatttctagccctactgcacacatggagatagatttattatttacgaggatacggaaaatatgtggcaggcctggattaaaaaaaggctatttttttctcattctcgacagatatgggacttgatgtttgttctctagtttggttaggaaataaacattctttttcgtcttaatgttgaggctcatttaggtgtttgatgtccatcaatggaagtctgatgtagtctgtagctagtgtatttagtgtttacttgaaagaactactgtacgcggatacgtggtttgcactagagcctcaagcctgcgggtccctcagctcgagacccactcatgcagatctcaacagggataacactccaatataaacaggttacagcgcatccgacaaagttgctctgaaattacatggatttatgctatacggtcaaaattcagcagcttaactatctctatctctatatttaaactctgccctataaacattgcagtatatagtataaaggcatctccaacaacctgtcctataaaaataccatataatttaaaaataa

SEQ ID NO: 95077 - DNA, 2362 bp, Zea Mays
aggccaatacccacattcgctcgctctacccgactaccccgcaagtcgaggccttccgctggctctcgctcgctcgctcgccccgcgactggttgcctctccgccccgaccctgccctgagaccggagacgaccgcgccccgcggtggcgctgcgacccgcgatacgatctgtgactgagaggggaggaattccagtcagtcgtttatgaatcctggggcctgtgcttactagagggagggcaaggcaagttaggatccgagatgagggggagaaatgactccgggaacagcaagccggttgtgctgtgctgtgtgatgatcgtgtgcctatgcctcctcttcttgtatttctcgggctccaatggacaggctgggagcaccgcatttgagtacgggaccaaattctcacggtcacttggatggggcagtgatgatggttctgaagagtccatttttggaaccggggatgcagatgatgtcaagcctaagagctttcttgtgtgtgatgaccggcactctgagctgatcccctgcttggatcggaacttgatatatcaaatgaggctgaagctggatttaaacctgatggagcactatgagaggcattgccctccacctgaaaggcgttttaattgcttgattcctccaccacatggctataaggtccctataaaatggccaaaaagtcgtgatgtagtatggaaagcaaacattccacacactcaccttgcaaaagagaagtcagaccagaactggatggttgaagctggtgaaaaaatcaagtttccaggtggtgggacccattttcaccatggagctgacaaatacatatcaaatattgcaaatatgctaaatttcaaagataacaatataaacaatgaggggatgcttcgtacagttcttgatgttggttgtggagttgctagtttcggaggataccttctttcttctaatgtgatagcaatgtctttggcaccaaacgacgtgcatcagaatcagattcagtttgcactcgaaagaggaatccctgcatatcttggtgttttgggaacaaaaaggcttccatacccgagtagatcatttgaactagcccattgttcacgttgtaggatcgactggcttcaaagagatgggattcttctgctcgaactagacagattgctacggcctggaggttattttgcttactcctctcctgaagcatatgcacaagatgaggaagatctccgaatctggaaagaaatgagtgcccttgtagaaaggatgtgctggaaaattgcagagaaaagaaaccaaactgttatttgggtgaaacccctgaacaatgattgttacaagagacgagcacatggtacaacgccacctctatgcaaaagtggcgatgatccagattcagtatggggagtgccaatggaagcttgcattactccgtatcctgaacaaatgcacagagatgggggaagtgggctagctccctggcctgctcgattaacaaccccgcctccccgtcttgctgatttgtatgttactgctgacacatttgaaaaggacacggaaatgtggcagcaacgagtagaaaaatattggagtttgttgggcccaaaggtaaaaccagacactattagaaacatcatggacatgaaagcaaattttgggtcatttgctgctgcactcaaggaaaaagacgtatgggtgatgaatgttgtgccacatgatggaccaagcaccctcaagataatctatgatagagggctgataggcagcaatcatgactggtgtgaagccttctcgacctatcctcgaacatatgatcttctccacgcatgggcagtcttctccgacctcgataaaagaggctgcagtgctgaagacctgctcctcgaaatggaccgtatcctcaggcctaccgggtttgccatcgtgagggacaagggcactgtcatcgaattcatcaagaagtacctccacgcgctccactgggaagcagtagcggctgcagatgccgagcccagctcggaatcagaggagaacgagatgatcttggtgatccggaagaagttgtggctaccagaagcaggctcgcacacgtgattcccttcccggcgtctgcagctcagaagcgaggcgccagctgcaccagccatgatttatttctagccctactgcacacatggagatagatttattatttacgaggatacggaaaatatgtggcaggcctggattaaaaaaaggctatttttttctcattctcgacagatatgggacttgatgtttgttctctagtttggttaggaaataaacattctttttcgtcttaatgttgaggctcatttaggtgtttgatgtccatcaatggaa

SEQ ID NO: 95078 - DNA, 2589 bp, Zea Mays
cgtcgctgtcgcgcatttgaaccgcgtcaaattcaaagtttttttatgcgtctggttgcctaataaaaaaaagcgtcaaatccgaattttcttttccgtgtatgctctgccgcctaatccaagttcgtaagtttcggtgcgggtgaaccgaactccaagcccgcttcctccaacaagaacccccgagatcggaaccccgcaaaagggagctttatttaaaggggtggtggtctttgctctttgtgttctgtcccccacttcactgctgctgctgtttctttttcagctttgggcactgaaggttggcttacttgacaggaaattccccgtttaattgcatattggacatgtcttgtggcgtttgattggagaatttaattcttcccaacgatttccgttcttcggaggcttccatcttggtttcagttctgcaggttgtgtgtttgtgatctgtgactgagaggggaggaattccagtcagtcgtttatgaatcctggggcctgtgcttactagagggagggcaaggcaagttaggatccgagatgagggggagaaatgactccgggaacagcaagccggttgtgctgtgctgtgtgatgatcgtgtgcctatgcctcctcttcttgtatttctcgggctccaatggacaggctgggagcaccgcatttgagtacgggaccaaattctcacggtcacttggatggggcagtgatgatggttctgaagagtccatttttggaaccggggatgcagatgatgtcaagcctaagagctttcttgtgtgtgatgaccggcactctgagctgatcccctgcttggatcggaacttgatatatcaaatgaggctgaagctggatttaaacctgatggagcactatgagaggcattgccctccacctgaaaggcgttttaattgcttgattcctccaccacatggctataaggtccctataaaatggccaaaaagtcgtgatgtagtatggaaagcaaacattccacacactcaccttgcaaaagagaagtcagaccagaactggatggttgaagctggtgaaaaaatcaagtttccaggtggtgggacccattttcaccatggagctgacaaatacatatcaaatattgcaaatatgctaaatttcaaagataacaatataaacaatgaggggatgcttcgtacagttcttgatgttggttgtggagttgctagtttcggaggataccttctttcttctaatgtgatagcaatgtctttggcaccaaacgacgtgcatcagaatcagattcagtttgcactcgaaagaggaatccctgcatatcttggtgttttgggaacaaaaaggcttccatacccgagtagatcatttgaactagcccattgttcacgttgtaggatcgactggcttcaaagagatgggattcttctgctcgaactagacagattgctacggcctggaggttattttgcttactcctctcctgaagcatatgcacaagatgaggaagatctccgaatctggaaagaaatgagtgcccttgtagaaaggatgtgctggaaaattgcagagaaaagaaaccaaactgttatttgggtgaaacccctgaacaatgattgttacaagagacgagcacatggtacaacgccacctctatgcaaaagtggcgatgatccagattcagtatggggagtgccaatggaagcttgcattactccgtatcctgaacaaatgcacagagatgggggaagtgggctagctccctggcctgctcgattaacaaccccgcctccccgtcttgctgatttgtatgttactgctgacacatttgaaaaggacacggaaatgtggcagcaacgagtagaaaaatattggagtttgttgggcccaaaggtaaaaccagacactattagaaacatcatggacatgaaagcaaattttgggtcatttgctgctgcactcaaggaaaaagacgtatgggtgatgaatgttgtgccacatgatggaccaagcaccctcaagataatctatgatagagggctgataggcagcaatcatgactggtgtgaagccttctcgacctatcctcgaacatatgatcttctccacgcatgggcagtcttctccgacctcgataaaagaggctgcagtgctgaagacctgctcctcgaaatggaccgtatcctcaggcctaccgggtttgccatcgtgagggacaagggcactgtcatcgaattcatcaagaagtacctccacgcgctccactgggaagcagtagcggctgcagatgccgagcccagctcggaatcagaggagaacgagatgatcttggtgatccggaagaagttgtggctaccagaagcaggctcgcacacgtgattcccttcccggcgtctgcagctcagaagcgaggcgccagctgcaccagccatgatttatttctagccctactgcacacatggagatagatttattatttacgaggatacggaaaatatgtggcaggcctggattaaaaaaaggctatttttttctcattctcgacagatatgggacttgatgtttgttctctagtttggttaggaaataaacatt

SEQ ID NO: 95079 - DNA, 2438 bp, Zea Mays
aggccaatacccacattcgctcgctctacccgactaccccgcaagtcgaggccttccgctggctctcgctcgctcgctcgccccgcgactggttgcctctccgccccgaccctgccctgagaccggagacgaccgcgccccgcggtggcgctgcgacccgcgatacggaaattccccgtttaattgcatattggacatgtcttgtggcgtttgattggagaatttaattcttcccaacgatttccgttcttcggaggcttccatcttggtttcagttctgcaggttgtgtgtttgtgatctgtgactgagaggggaggaattccagtcagtcgtttatgaatcctggggcctgtgcttactagagggagggcaaggcaagttaggatccgagatgagggggagaaatgactccgggaacagcaagccggttgtgctgtgctgtgtgatgatcgtgtgcctatgcctcctcttcttgtatttctcgggctccaatggacaggctgggagcaccgcatttgagtacgggaccaaattctcacggtcacttggatggggcagtgatgatggttctgaagagtccatttttggaaccggggatgcagatgatgtcaagcctaagagctttcttgtgtgtgatgaccggcactctgagctgatcccctgcttggatcggaacttgatatatcaaatgaggctgaagctggatttaaacctgatggagcactatgagaggcattgccctccacctgaaaggcgttttaattgcttgattcctccaccacatggctataaggtccctataaaatggccaaaaagtcgtgatgtagtatggaaagcaaacattccacacactcaccttgcaaaagagaagtcagaccagaactggatggttgaagctggtgaaaaaatcaagtttccaggtggtgggacccattttcaccatggagctgacaaatacatatcaaatattgcaaatatgctaaatttcaaagataacaatataaacaatgaggggatgcttcgtacagttcttgatgttggttgtggagttgctagtttcggaggataccttctttcttctaatgtgatagcaatgtctttggcaccaaacgacgtgcatcagaatcagattcagtttgcactcgaaagaggaatccctgcatatcttggtgttttgggaacaaaaaggcttccatacccgagtagatcatttgaactagcccattgttcacgttgtaggatcgactggcttcaaagagatgggattcttctgctcgaactagacagattgctacggcctggaggttattttgcttactcctctcctgaagcatatgcacaagatgaggaagatctccgaatctggaaagaaatgagtgcccttgtagaaaggatgtgctggaaaattgcagagaaaagaaaccaaactgttatttgggtgaaacccctgaacaatgattgttacaagagacgagcacatggtacaacgccacctctatgcaaaagtggcgatgatccagattcagtatggggagtgccaatggaagcttgcattactccgtatcctgaacaaatgcacagagatgggggaagtgggctagctccctggcctgctcgattaacaaccccgcctccccgtcttgctgatttgtatgttactgctgacacatttgaaaaggacacggaaatgtggcagcaacgagtagaaaaatattggagtttgttgggcccaaaggtaaaaccagacactattagaaacatcatggacatgaaagcaaattttgggtcatttgctgctgcactcaaggaaaaagacgtatgggtgatgaatgttgtgccacatgatggaccaagcaccctcaagataatctatgatagagggctgataggcagcaatcatgactggtgtgaagccttctcgacctatcctcgaacatatgatcttctccacgcatgggcagtcttctccgacctcgataaaagaggctgcagtgctgaagacctgctcctcgaaatggaccgtatcctcaggcctaccgggtttgccatcgtgagggacaagggcactgtcatcgaattcatcaagaagtacctccacgcgctccactgggaagcagtagcggctgcagatgccgagcccagctcggaatcagaggagaacgagatgatcttggtgatccggaagaagttgtggctaccagaagcaggctcgcacacgtgattcccttcccggcgtctgcagctcagaagcgaggcgccagctgcaccagccatgatttatttctagccctactgcacacatggagatagatttattatttacgaggatacggaaaatatgtggcaggcctggattaaaaaaaggctatttttttctcattctcgacagatatgggacttgatgtttgttctctagtttggttaggaaataaacatt

SEQ ID NO: 95080 - DNA, 1313 bp, Zea Mays
cttttgtcttgactcctttgtaagtttccctgaaattcttttatctgaccatctctactatttggcagatgctaaatttcaaagataacaatataaacaatgaggggatgcttcgtacagttcttgatgttggttgtggagttgctagtttcggaggataccttctttcttctaatgtgatagcaatgtctttggcaccaaacgacgtgcatcagaatcagattcagtttgcactcgaaagaggaatccctgcatatcttggtgttttgggaacaaaaaggcttccatacccgagtagatcatttgaactagcccattgttcacgttgtaggatcgactggcttcaaagagatgggattcttctgctcgaactagacagattgctacggcctggaggttattttgcttactcctctcctgaagcatatgcacaagatgaggaagatctccgaatctggaaagaaatgagtgcccttgtagaaaggatgtgctggaaaattgcagagaaaagaaaccaaactgttatttgggtgaaacccctgaacaatgattgttacaagagacgagcacatggtacaacgccacctctatgcaaaagtggcgatgatccagattcagtatggggagtgccaatggaagcttgcattactccgtatcctgaacaaatgcacagagatgggggaagtgggctagctccctggcctgctcgattaacaaccccgcctccccgtcttgctgatttgtatgttactgctgacacatttgaaaaggacacggaaatgtggcagcaacgagtagaaaaatattggagtttgttgggcccaaaggtaaaaccagacactattagaaacatcatggacatgaaagcaaattttgggtcatttgctgctgcactcaaggaaaaagacgtatgggtgatgaatgttgtgccacatgatggaccaagcaccctcaagataatctatgatagagggctgataggcagcaatcatgactggtgtgaagccttctcgacctatcctcgaacatatgatcttctccacgcatgggcagtcttctccgacctcgataaaagaggctgcagtgctgaagacctgctcctcgaaatggaccgtatcctcaggcctaccgggtttgccatcgtgagggacaagggcactgtcatcgaattcatcaagaagtacctccacgcgctccactgggaagcagtagcggctgcagatgccgagcccagctcggaatcagaggagaacgagatgatcttggtgatccggaagaagttgtggctaccagaagcaggctcgcacacgtga

SEQ ID NO: 95081 - DNA, 741 bp, Zea Mays
aactatccagccaccattcacccctccgcactccgcctccgccgcctccctgccctcaactccacgcccggcagggtggccgctcgccggcagccaaaccctaggcgatcgcggaggccaaccacgcttcgggcgcgatcagccgccgccatgcagggcttccccggcggcgcccccgatccgcagcagctacaggccaccatgctcgccatcgagcaggcctgctccctcatccagctgcacatgaatccatctgaagcggaaaaagtgataacttcgctgcattcgtctctcatgccttatcaagtatgcagattcattcttgagacatcccaaaaaccaaatgcaagattccaagctgctggtgcaattggtgatgctgcggtaagggagtggggagttcttacagatgacaataaaaggagcctaataatatattgtttaaactatgttatggagcatgcaagttctcctgatggctatgtgcaatcgaaagtttccgctgtggcagctagattactgaaaagaggctgggttgagttttcggaccaagaaaaagcagctatcttctttgaggttgagcaatctatccggggcatccatgggcctaatcgacagtttgctgcaatcaatttcttggaaaccttggtttcagaattctccccttcaactgcttctgctatgagcctgcctaaggaatttcacgaacaatgtgaatactcactcgaagtgcagtttttg

SEQ ID NO: 95082 - DNA, 1749 bp, Zea Mays
atgtcacattttgtggacataagatgctgcggatgtggtatttggcctgccccggtaatcataaacgcgtctgcgcgctctttccggataagagcacggtctgtctctttggattatcccagtaggactgagcagaagaatgagactaatctagtggtggtacgaccagagcgaaggctgcgggatgattttgtcgatgcaggtgcagaccatggaagtggcagagcaactgcagatttcaagaaggcagttccatccttcgatgctaatctgagaaacctgttggatgagcaactaaaaccaggaaggcccttggatcataactcgggcaaggtggcaaacagggcatgcttttcaaagcataaaaccggctgttatgcttacagcctccgcaggcactgcaacaatgggaagctcattcaagcttgccgcatcatcgatgagatggtgttacatggccaagtaccagattcaaagtgttgtgttagattaattcgtggccttgtgagaactggtaatacaaataaagctaggcatgttcttgaggtcatggtgctctcaggtggggttcctgacaccatcacctgcaacatgttgattgggcaactttgctgtgaagggcagctgagttctgcgatgaaagtattggaggatatgaggtttactggttgctctcctagtggcatcactttcaatactttgattaggtgcatgtgcagccatcatttgtatgacagggcagtctccttttggaaagagcagctgaaaataggttggccaccatatgagatgacgagcaccttgcttgttgacctcatatgcaaacaatgtggtcccatgcgggctctggaagtattagatgaacttgatttggagggatgtcaaccacatgttgtcagctacaacactcttatcagtgcgtcatgcaaagcaggctgtttgaaggatgcaaagttgatattaactcgtctttcagctgaaggccttgagccaaatggtacaacctattgcatcttgcttcattccctgtgtgacaagagaaggtggtctgaagtaggtgatttgctcgcacacatgaagcaggcaaatcataagcctgatgttactgcctacaatatctttataaactacttttgtaggtatggacatctggatcaggcaattgatgttctagagatgatggtgagtgagaaatgctttcctgatatagtgacatacaacacacttctgaatgccatctctaaaagggggatggttcaagaagctcttgggattttccattccatcagagaaaatggatgccaggtggttcgcattacatacaacaccctcatagatgctttagcaaaaaggggtgatattattaatgctatgactctatttgatgaaatgattgttgatgggatcaatcctgatgatgtcacttatggttcacttattatggggttctgtaagaagaacatggccaaagaagcactggagcttttgaatcagatgcttgctcttggatttgaggttaaagcaactacattttccatgatgatccaagcattgtgcaaaggttgtaaagctgaagctgctgctgaaatactacgagtaatggtatcaagaaatgtcaaccacaggagtgcattttatctgtctatagtcacaagggttgctaagtcaggtcggcttaaagaggctcaaattctacaccaggaactatacagagcaaggtccctaaagaggattcttaatttattttaa

SEQ ID NO: 95083 - DNA, 1211 bp, Zea Mays
ccccccctgcccatcacctcctctgtcaatttttgcagccaccaaaccctagccccccccccctcaatcccctcctcccaaggtgccaatccttgccgctcggatcgtcgtctcgtggtgcgattctccaaccgttttggtggagggaagaagggaggaaggaaagggggagaacccaaggtggtggactttcggatcattcttagggattttgcccaaacttcggtgaaggcaagtaaaactgtgatggttattccgtctgtcagatgaggagtcttatacttgtttatgttgtgctatcatgttcaaattcatattttcttttgagtaccatcatttgaaaatgttcatgtttcatggatttcgtatgttgagtttgaggtttgattatgttactcaagtggttattatgtggaatggttggaagtaaatgcctagcacatttttatttgggaagaacttatgatgttgtcatgcataatgcactcatcatccattgcattgaagtttcgtcgcgatcttatggtccgaccgtaccggtacattgagcatcatatgttgcccgagaaggggtatggtgcagcttcatatccttagagatatggaggcagaagtcattattgcatttgtagtcatgtgcattcatgggagaggtgttgaatatattatgtggatgtggataatttggacttgtgcatggtgattctacttggcgttgagcttttagttacttgttttcttgctgcaatttactgttcaaaagaaaagaaagaagtcctgaacacgtggttgtgtaagcacagttgatttacaatgtcctatttgttgttgttatgtttacttgctgagatgtgttatctcacatcttgcattgtttgatgcaggcacctaatttctgctttgggaatagagggatgtagcagcacggccactacacctttaataaaggaaccaccatttaataatgttgttaatcagagttggacaagtctagtgaattgctttgttcttggttgagcgtttattttggggtgggctgagtttcttatcccatttgttttgcttcagttgggtcataattaagttttaccacttttgcatttcattttctactatgtgaattatatgtctttatatcttgtatgagcttcatgtttcccctccttgttatgctagttttcaaaggaggtgctgccggattttgctatata

SEQ ID NO: 95084 - DNA, 2292 bp, Zea Mays
agacgaaacctgtttttccgacaatcgagcgccgaaaaaggactgccaccaaccgctcgctttccctcacctccccacctctctcgctccctccctccctccctcccattgcaggatcggcaccgatgcgattcaaccgcggcctcgcatccggtgcggaggtctgcaattggggggaggctcctctccgccgttggaaccgctgcggcgtcgcagcctgtgcgactttcctgctggttcctcatccctcagggacagattttgcattctttggcattactgtttgatggcagacagtagtgctccttctctgtggaggcattggggcaaaaggcagttgaactgaacgggcacatcaatagtctctggcctccaagggaaattgggaaattcagattgaacgtggctgcatcatttttcctttcattggtcttttcagcaacagcgatccattctcgtaggggggagagagagagagagagagagggagagaaatcaaagaggagagtgatcatggagcatgtgatcggagggaagtataagcttgggaggaagattgggagcggatccttcggagagctatatctcggtgttaatatacagaatggagaggaagtgggaataaaattggagcctgtgaaaacaaaacatccacagctgcactatgaatctaaagtttatatgctgctgcagggtggaaacggtatcccacacctcaagtggtatggtgttgagggggagtacaatgttatggtgatcgatcttcttggcccaagcttggaagatttgtttaattcctgcaacaggaaattttctatgaaaacggtgcttatgcttgctgatcaactgataaaccgagtggaatacatgcattccaagggatttattcatcgtgacatcaagccagacaacttccttataggcttaggtcggaaagctaatcaggtctatatcattgattatgggcttgctaagaaatacaaggaccttcagactcataaacacatcccatacagggagaacaaaaatctgactggaacagcacgttatgctagtgtgaatactcatcttggaatagaacaaagcaggagagatgatctggagtctgttggctatcttctgctatattttttaagaggaagcctcccatggcagggccttaaagctggcactaagaaacaaaagtatgataaaattagtgaaaagaaaatgcttacctcggcagagattctgtgcaaatcttacccgccggagttcgtctcatatttccactattgtcgctccctgcgatttgaagacaggccagattactcttcaatgaagaagctctttcgtgatgtatttatacgggaaggataccaatttgattacgtatttgactggactgcactcaagtaccctcaaatgggctccaacaacaagcttgttcaacaaccaagtgcaagaatggctggagttggaccatcagttgagagaacagacaaagcttccatgggacaagagatccgggataggttcactggtgctgttgaggcattcgccagaagaaatccaggctctgggcgccctgcagatcattccagtcattccaggcacaaaagctttgcagattcctttggaacgtccaacgaagcagttgccgactcatcagagaaaacgcgcatcttgtcccggggagggagctcgtcgaaaatgcccgcagctccgtccacccggccgacctcttcgggggactgcagtgaccagaaccgccggtgggtctccggcagcagtggcggcagcgggcgcccgtcccccgcgcagaggctccaccactcgggaggcgccgagaacagcaggtcgtccccgcgctcccccgtggcccggaacgcggccgggaggggaggctccgcctcgcgggacaacacgacgttccgcagcctcgagcgcctcaccatcaccaccagcaggaggaagtgagctgccgaggaccacgccgacgaattctgagagtggaaggcggttactaggccgaggaacttttgcgggatccttgctctctgcagctaaagcaaatcggcaaatagatgatggatggatggttacaaggctgccatgaaaatgcaccctttccccaaaccccagcgtatagtataacgctctccccaaactccaagagggaagacaactccaaagtacaatgcaatcttgattctgtcgatctggcactagttttaaggtgttattgcagaatccctccatttgaccataaattttaaaaacgtatacaagaatctgagttaattttgttta

SEQ ID NO: 95085 - DNA, 1840 bp, Zea Mays
cgtttagattggtctccggatgcatttcctgtatggacgattagttgggatcgtagctcagcaactgcttccttcttccgttgcccgcaatggattcagcgaggagctggttcaccaagctccaaacgagggagaaatccattggcaagaagaaggaattgcctcccaatggcaaggagcccggcgacgatgcgccgtcgagcgcaaccaagcagagggttgcggcggccaagcagtacatcgagaaacactacaaggagcagatgaagcatctgcaggacaggaaagaaagacggtgtagtctagaaaagaaactagcggacgctgatgtgtccgaagaggaggtcaacaacatcctgaagcagttcgagaagaaagagacggagtacatgcggttgcaaaggcacaaaatgagcgtcgaggatttcgagctgctaacaatgatagggaagggagcttttggcgaggtcagagtctgcagagagaagaccacaggaaacgtgtatgcgatgaagaagcttaaaaagtcagaaatgcttcgtcgaggtcaggttgagcatgtgagagccgaacggaaccttcttgccgaggtggaccaccactgcatcgtcaagctgtactgctcgttccaggacagcgagtacctgtacctgatcatggagtacctcccaggaggcgacatgatgacgctgctcatgaggaaagacacgctgacggaagacgaggccaggttctacgtcggcgagacggttcttgcgatcgaatcgatccacaggcacaactacatccatagagacatcaagcctgacaacctgctactggacaagcacgggcacctgaggctgtcggatttcgggctgtgcaaaccgctggactactccaacttcccggacctgaacgagaaggacgtgacgccgcctacgaagtcgtcggcgatgcatggggacgggaagcagcagtcgatgccgaagcgctcgcagcaagaacagctggagcactggcagaagaacagaagaaccctggcttactcgaccgtcggaacaccagactacatcgctccagaagttcttctgaagaaaggctacgggatggaatgtgactggtggtcccttggttctatcatgtatgagatgctagtgggttatcctccattctattctgacgagcctatgactacttgccgaaagatcgtgaattggagaacacacctgaaatttcccgaagaagcgaggctaacggcagacgccaaagatcttataagcaagctgctctgcaacgtcgaccagcgcctcgggacaaagggcgcagaagagataaaggagcacccctggttcagtggactagaatggggaaagctatatgagatagaagccgcgtacctgcctcaggtcacagacgagttggacacccagaactttgagaagtttgaggagtcctcggacggtagtagcgttcagggttcagcaaaggcgggcccttggagaaagatgctttcttcaaaggacctgaactttgtgggctatacctacaagaactttgaacttgtgaacgatcacgatgtccccggcatggctgagctgaagaagaaggagaaggcaaagagaccaagcgtcaagtctctgttcggcgcagattcacctgaaggagacggagggagaggggagccgcagcctgaagtcgacgacgaaacagcctccgcggaaggaagcgcccggaaaccagcagagcctgaactgaccagaagcctcagctcgccatccacgtgaaacaaatgtgtgcgtcatgttgtatgtactctttgttaattgattcacgagctaatagcgatcgtaccgtgctg

SEQ ID NO: 95086 - DNA, 1424 bp, Zea Mays
atttgtagtgaaaagcaaggagaaggaaaaacgcgaaagctttccccctgctcaccacctgctggctgctgctacagtgctactgccattacgccaccacacgagcttgcgcggcgactcggcggcggtggacgaagcgggacgccatggactcccgccagggccagcagcccaactacaagatttatattaggatgatgaaaacagttctgcttgacgtgaagtccactgataccatagatcagattaagtctaagattggtgctttagaggggattgacaatagccagcaagagctcttttttgctggaagtcatttggagaaggacaacagacttgctgattacaacatcatgacaaactcttgtgtcgacctttatgtaactgatgggatgcagatctctgtcagtatcccctctgtttggaagaccatcaagctcaatgtgatgaaatcccagagtgttgctgatgtcaaggcgatgatcgaacagatggggggaattcctctggatgaacaaatcctgatgcatggatgccaaaagcttgaggacaacaagttgttgagtcagtgtggcttgagcaatggccacaccctgcatgttttggtccgccccaccgacaggctgcatatctccgtggatgttgatggtgaagaaactctgaatctggatgtcaaaagctggtatactgttgctgatgtcaagttgatgatcgacaccttggagggtttacctgcaagaacacagatactcatgcacactcaacctggtggcgctaacacagtactcaaagacattgaaacactgcagaatcaaggcatcaagaacaacgacattgtcgctctgtatcataaagtcaacttcttcgtcaagacatatgaggggaggaatctagtgttatcaatgaggacttgtgacactgcagaggaaatcatgaaggtgattgaagaaaagcttaaggtcaacacaggtgtttactacctgcactacagggggcgtgttctggctcttggggatactcttcggaagcacaagatcgagaacaattgcacggtcgatgtccgccttcggaattcacatgtaacgaagtgaaacaaaagggggtgccttgggtcttctgggtgctagaccatggggcaaaacttaaaaagttgcttagcctcagagagaactatagcttttgccattttgcggtcgtggttagttagtggatgtttgtggctcttgactgggtaaggtcttttgttacctgtctggtggttgcacctgcgtaacctctcaagcatgcattgcctgtctgatggctgtacttgtgtaacctctcaagaacggtgtctgtctggtgactggtggtaaaaatacagttctgttatatggttctagttctacccactccctttttctcatagtaaccattgatccgaa

SEQ ID NO: 95087 - DNA, 962 bp, Zea Mays
atctccagccgtcgttcacgccgctcaccacgagccttgcttcttcacgtcacctccttctcacacattttccctctcacctctcaatccatggacaccctccctgctctgatcccccccgatgctcgccgtgggtgccgtttgctgccccaacgccgttccgcgccccctccactccggccatgagctcctcccagtgaatccctctagtcccctgctcatctcccatggtggccgcagggagctctggatccatggccgtcggcctctgggcgtgagcagcccttggctctctcccctgcgacagacttcctccacggtgtctctttccccaaccatggtggccggctccctgcgcctccattcggtgcccctggttcagggccggtcgacctccggcgacctcctccccatggcacagcaggccgacgcccctgcctctactccatcttccccattggacagcacgagctcctcctcgccgatacgccagcaaccctgcagcagcgccactcgatctcctctatacgtgaacaacagcaacccggatcccatccacgtcgtatgcgtcgatccgatctgtgcagtcccaacccacgacgtcgcaacacccttgccctccgtcgatgtcacgcttcgctcatcgctcctcgacgaagagccataaccgtggtagacatgcatgcgcgatccgaactgatttcatcaggttgttcgctttatatgattctagtttgctctaattaggtgtgatcgatggcgtgaatatgtgtgtgaaaatgtatgtgtataaatggggataagtttagtatattaaatgggatagttgatagtatttgtttgtgctatcatgttaattttatggtatggtgaatcaatgcttcactttaacaaccctcacctgttgtacgtggcgagtggttaaatgtttttttaatcgattaaaggctccgtacgagtgt

SEQ ID NO: 95088 - DNA, 690 bp, Zea Mays
atctccagccgtcgttcacgccgctcaccacgagccttgcttcttcacgtcacctccttctcacacattttccctctcacctctcaatccatggacaccctccctgctctgatcccccccgatgctcgccgtgggtgccgtttgctgccccaacgccgttccgcgccccctccactccggccatgagctcctcccagtgaatccctctagtcccctgctcatctcccatggtggccgcagggagctctggatccatggccgtcggcctctgggcgtgagcagcccttggctctctcccctgcgacagacttcctccacggtgtctctttccccaaccatggtggccggctccctgcgcctccattcggtgcccctggttcagggccggtcgacctccggcgacctcctccccatggcacagcaggccgacgcccctgcctctactccatcttccccattggacagcacgagctcctcctcgccgatacgccagcaaccctgcagcagcgccactcgatctcctctatacgtgaacaacagcaacccggatcccatccacgtcgtatgcgtcgatccgatctgtgcagtcccaacccacgacgtcgcaacacccttggtgaggcctcgccacctctgctgtttttgtgctcaaaatgcttgataaaatgtctaaactgtgtgagcgtcgtt

SEQ ID NO: 95089 - DNA, 109 bp, Zea Mays
attgattactaattatgtcggcgtttcgatcccgggggggtccctggaccgacgagtaaaattgtcgctgcgtgtctcagcccagatgagttggcgcgagatggaacac

SEQ ID NO: 95090 - DNA, 1052 bp, Zea Mays
gaaatttcaaaacgagagcacactacggtcccctggctgcacgggtggtgaaaaaaatacgagccaaatcccaaaagcgcttgtggggaacggaaacgagggaggtaggatgaattggcagcagcaccggaagaattacccgagcgcgatgcggtcgtccaatgggcagaccacgctcaaatcctttctcttcaagcccagggttgtcgatggagtaccgtcaccaccgccggcggcggtgatggaggcgccgatctgttcgccggagccgccgaaacgggagattgtcagagtcaccaagacgaccattaaggagaaggcgagcgcgttctcctcggtgggctccacggggaaggacgggggcggcggcgctttgagcgccgcggtcttcaagcggttccacagttcagccccacgggcgagagcggaaggcgaccgcgtgcaggcaggggaagacggcgacctcgaactcggcggtgcaggcgacgcccggctggacgtcgaagagaccggggcggagagccgccgcgggcccaggagtaagcggaagagccccattggcggccacgagtacatgagcgaggccaaggccagacgcgtggtggttctcggcgacgatccgaggccgcggtcggcgactacgcgagggcgtgcgaggcgctcccgcggcggtgagggtgagggcggccgcgctctgtacaaccactacgcgagcggaggcgggtggtggcacggcgacaaggagggcgtggacggggaagagatcggctggacggacgacatgtgggagggtatgggatccgtcacgctcggcggcctggagtggcactagccgtgccgtagtcgcggccgtctgcagagcagaaccgccccgtcacggccacggcaaccggcagagtattactactagttactaggaataaatgaactatattagtcggcaagtgatgctctgtttgtgtttgatattaggaattcaaagaacagtttagtttccagtggaatcatgaaatattgtggctcaccaaactggaccaaaaatatttcagacc

SEQ ID NO: 95091 - DNA, 603 bp, Zea Mays
atgaagacgctacaggcagcttctgcagatcaaaacggtggtgactcagacgcttcatccatgaagaaaagcctctgcatggaaagcaaggtcacggagacagccagcagcagatgtgctggtgaatcagcgaaatgttcatctggtgaaacagacacgaacatcaaccgatccctgttgttgaaggcagcggagcctataactcacgccattgatatcacggaagcagccatgagaaaggcagaagccaccatggcaaaaaaactgtcgatgaacaagacgctgaacgatagccgtatcgacaaggacgcgccatgctccatcgacgccaaggccgacgattctcagcaggcgccaaaggtgtacaccgcggtgtgggtcgacaccgacacggacaccctgcgcgctcggctcgtcgactcaatgcggcacttgcgcaggatggcatctcggcggcgccatcggcacaggaagcgcggctcgaataacaagtggaggctgtggagaatcgggccaacgctcctggtcatcctcctgcttgtctccgcggtgcagctgctgttcatactctggctgtaccggaggctcctgaatcaaaattag

SEQ ID NO: 95092 - DNA, 2320 bp, Zea Mays
ccccaacctctgaaccccgctctaataaatcttcctcccatctctctcgctcccaaccctcaagtccccaccaacccaaccctggtggcaccggccgcacacacgaaagcaagctagctagtcactattagagctatttggttgggagcggtttagctgagcaagatcgaactggcattgtcacacacatctcagcactcagctccttgggttcccctccatgagcagcagctgagcagccacacattgccgtcttccttgctgcacttgtagttacagctagatccattgatttttttggcaacaacaagagcaggagctactgagcaagaagtgcgtacgtgcttggtgagtgttacttatactagcttgcgatggagctggtgactatggtgacgctgacgctgctggcgtactcggcggcgatgctggcgcggcttctggtggcgcgcgcgcagcggcgtcggtgctacctgctggactacgtgtgctacaaggcgacggacgaccggaagctgccgacggacctgtgcggcgagatcatccagcggaacaagctgctggggctggaggagtacaagttcctgctgaaggtgatcgtgaactcgggcatcggcgaggagacgtacggcccgcgcaacatgatcgagggcggggaggcccggccggaccgcctccgcgagggcatggaggagatggacgagaccttccacgccgtcctcgacgagctcttcgcccggtcggcggcgcccggcggcgtcggcatccgccccgccgacgtcgacgtgctcgtcgtcaacgtgtccatgttctcgccggcgccgtccctgtcggcgcgcgtcgtgcggcgctacggcctccgcgaggacgccaaggtgtacaacctcacgggcatgggctgcagcgccacgctcatcgcgctcgacctcgtcaacggctacttcaggacgcacgccgggcaggtggctctggtgatgacgtcggagtcgatcgcgcccaactggtacgcgggcaacaagcgcaccttcatgctgggcaactgcctgttccgctccggcggctgcgcctacttcctgaccaacgacccgcggctccggccgcacgccaagctccgtctccgccacgtggtgcgcacccacacgggcgcctccgacgaggcctacaactgcgcgctccagatggaggacgaggccggccgcccggggttccacctgggcaaggagctgccgcgcgccgcggtgcacgccttcgtgcacaacctccgcgtgctggcgccccgcgtgctgccgctcccggagctgctccgcctcgcctgcgccaccctctcggcgcgcctggcgcgcaagaagcggcagcgcggcgcgggccatggccacggccacctcaccatccgcatgaaggccggcgtcgaccacttctgcgtgcacacgggcggcgccgccgtcatcgacggcgtcggcaagggactcacgctcacggagcacgacctggagccctcccgcatgacgctgcaccgcttcggcaacacctccgccagcagcgtctggtacgtgctcgcctacatggaggccaagggccgcctgcgccagggcgaccgcgtcctcatgctcaccttcggcgccggattcaagtgcaacagctgcgtctggaccgtcgagaggcccgccaccgacgccggcgtctggaaggaccgcatccaccactacccgctcaaggacgtctccaacccattcatggacaagtacggattcgtcaaggacctcatagacttgtgatcgccccctagctgctcaactcaacgtctcaaccccaccaacgcacatactttttatttacaccattattattgtattcattgtcatgttagtactactctgttctagtattgagcaactactagttaattaaggtgagcacaacaatgctagctgaggattcatagtagcttatgattcttttggtgatggcgggaagatcgacttttacgtagcaacggatatggcttcgctctttgttctttcttcagttctgtcatttcgtgtgtgtcaatttagatgccccatgtcgtcagtcaatcagtcagtgtcgtcctgttcctatttactatatcaaatgattatggtgcaatcattttttaaactaagttatttattatttattgtgtaatggtaaatgttgctgtaataaagagcatactctcactccaaagatgcatgttttatgatctgaaagtccactgcggcatagtattcatcagccctcatggcgatgtacatacgtagaagtcggttcttcgatttctaaataaatacaatacaaa

SEQ ID NO: 95093 - DNA, 2273 bp, Zea Mays
gggcaaaaatttatgcctgatgggccctagctagctgctctggtaattaagggcatggatggatacacacccagctgtgaggcatcttgtttggttgcacgccattgaatccatcgtctgtgtagctactgagaccagataaatgttcagtactcccctcctactacttgtaaattaatgcctatcaatcggaacatgtaccgtacgtgctctacctactagctagcaacgtagtagtagctcatttttaagagtggtagtactcgtttggtacttgtgctcaccataataatgaacacaatcacaaggatttttttgttatgaacctatggtagttttgttctctcttttttcagcaagataaactaggaaacaaatatatggtggaaggtcttgtaaataaagcattaagcagcgtaaccattataagcttaggtcctacattaatattgaagagttaaccactataaagatccatatagtaagtgattgactctattattaaacttgctgcaagaagatccatcccgagatggcagtagccgcatcccccatgaacacgggagtaaatgtggccggggccagcaatggcatgaatgctgtgctgtgactgctgcatgtgagccagctacggctacggcctactctggagtctggactgtcctcctttaatgcctgctcaccaagtttggtttgcctttagatgggcatgaatggctcagccgctcaggcaggcacggcatggctggacctggacctgaccggctccgcttgtagttagtagacatgcttgtccattgggctgaactgtctggttcaggcagatctccatctatcccaggccgacgagaaagtcggcggtggcacagccgcacaggcaacgaccaacatagcatacttgaaaatggctggcgtgtgcatagcatacttgaaatcttaatgaacttgtttgtcagtcatggatgctggattacgtgtggttggttgcttgcaggacgcacgccgggcaggtggctctggtgatgacgtcggagtcgatcgcgcccaactggtacgcgggcaacaagcgcaccttcatgctgggcaactgcctgttccgctccggcggctgcgcctacttcctgaccaacgacccgcggctccggccgcacgccaagctccgtctccgccacgtggtgcgcacccacacgggcgcctccgacgaggcctacaactgcgcgctccagatggaggacgaggccggccgcccggggttccacctgggcaaggagctgccgcgcgccgcggtgcacgccttcgtgcacaacctccgcgtgctggcgccccgcgtgctgccgctcccggagctgctccgcctcgcctgcgccaccctctcggcgcgcctggcgcgcaagaagcggcagcgcggcgcgggccatggccacggccacctcaccatccgcatgaaggccggcgtcgaccacttctgcgtgcacacgggcggcgccgccgtcatcgacggcgtcggcaagggactcacgctcacggagcacgacctggagccctcccgcatgacgctgcaccgcttcggcaacacctccgccagcagcgtctggtacgtgctcgcctacatggaggccaagggccgcctgcgccagggcgaccgcgtcctcatgctcaccttcggcgccggattcaagtgcaacagctgcgtctggaccgtcgagaggcccgccaccgacgccggcgtctggaaggaccgcatccaccactacccgctcaaggacgtctccaacccattcatggacaagtacggattcgtcaaggacctcatagacttgtgatcgccccctagctgctcaactcaacgtctcaaccccaccaacgcacatactttttatttacaccattattattgtattcattgtcatgttagtactactctgttctagtattgagcaactactagttaattaaggtgagcacaacaatgctagctgaggattcatagtagcttatgattcttttggtgatggcgggaagatcgacttttacgtagcaacggatatggcttcgctctttgttctttcttcagttctgtcatttcgtgtgtgtcaatttagatgccccatgtcgtcagtcaatcagtcagtgtcgtcctgttcctatttactatatcaaatgattatggtgcaatcattttttaaactaagttatttattatttattgtgtaatggtaaatgttgctgtaataaagagcatactctcactccaaagatgcatgttttatgat

SEQ ID NO: 95094 - DNA, 1655 bp, Zea Mays
ctcgctcccaaccctcaagtccccaccaacccaaccctggtggcaccggccgcacacacgaaagcaagctagctagtcactattagagctatttggttgggagcggtttagctgagcaagatcgaactggcattgtcacacacatctcagcactcagctccttgggttcccctccatgagcagcagctgagcagccacacattgccgtcttccttgctgcacttgtagttacagctagatccattgatttttttggcaacaacaagagcaggagctactgagcaagaagtgcgtacgtgcttgcggcgtcggtgctacctgctggactacgtgtgctacaaggcgacggacgaccggaagctgccgacggacctgtgcggcgagatcatccagcggaacaagctgctggggctggaggagtacaagttcctgctgaaggtgatcgtgaactcgggcatcggcgaggagacgtacggcccgcgcaacatgatcgagggcggggaggcccggccggaccgcctccgcgagggcatggaggagatggacgagaccttccacgccgtcctcgacgagctcttcgcccggtcggcggcgcccggcggcgtcggcatccgccccgccgacgtcgacgtgctcgtcgtcaacgtgtccatgttctcgccggcgccgtccctgtcggcgcgcgtcgtgcggcgctacggcctccgcgaggacgccaaggtgtacaacctcacgggcatgggctgcagcgccacgctcatcgcgctcgacctcgtcaacggctacttcaggacgcacgccgggcaggtggctctggtgatgacgtcggagtcgatcgcgcccaactggtacgcgggcaacaagcgcaccttcatgctgggcaactgcctgttccgctccggcggctgcgcctacttcctgaccaacgacccgcggctccggccgcacgccaagctccgtctccgccacgtggtgcgcacccacacgggcgcctccgacgaggcctacaactgcgcgctccagatggaggacgaggccggccgcccggggttccacctgggcaaggagctgccgcgcgccgcggtgcacgccttcgtgcacaacctccgcgtgctggcgccccgcgtgctgccgctcccggagctgctccgcctcgcctgcgccaccctctcggcgcgcctggcgcgcaagaagcggcagcgcggcgcgggccatggccacggccacctcaccatccgcatgaaggccggcgtcgaccacttctgcgtgcacacgggcggcgccgccgtcatcgacggcgtcggcaagggactcacgctcacggagcacgacctggagccctcccgcatgacgctgcaccgcttcggcaacacctccgccagcagcgtctggtacgtgctcgcctacatggaggccaagggccgcctgcgccagggcgaccgcgtcctcatgctcaccttcggcgccggattcaagtgcaacagctgcgtctggaccgtcgagaggcccgccaccgacgccggcgtctggaaggaccgcatccaccactacccgctcaaggacgtctccaacccattcatggacaagtacggattcgtcaaggacctcatagacttgtgatcgccccctagctgctcaactcaacgtctcaaccc

SEQ ID NO: 95095 - DNA, 1225 bp, Zea Mays
aacctctgaaccccgctctaataaatcttcctcccatctctctcgctcccaaccctcaagtccccaccaacccaaccctggtggcaccggccgcacacacgaaagcaagctagctagtcactattagagctatttggttgggagcggtttagctgagcaagatcgaactggcattgtcacacacatctcagcactcagctccttgggttcccctccatgagcagcagctgagcagccacacattgccgtcttccttgctgcacttgtagttacagctagatccattgatttttttggcaacaacaagagcaggagctactgagcaagaagtgcgtacgtgcttggtgagtgttacttatactagcttgcgatggagctggtgactatggtgacgctgacgctgctggcgtactcggcggcgatgctggcgcggcttctggtggcgcgcgcgcagcggcgtcggtgctacctgctggactacgtgtgctacaaggcgacggacgaccggaagctgccgacggacctgtgcggcgagatcatccagcggaacaagctgctggggctggaggagtacaagttcctgctgaaggtgatcgtgaactcgggcatcggcgaggagacgtacggcccgcgcaacatgatcgagggcggggaggcccggccggaccgcctccgcgagggcatggaggagatggacgagaccttccacgccgtcctcgacgagctcttcgcccggtcggcggcgcccggcggcgtcggcatccgccccgccgacgtcgacgtgctcgtcgtcaacgtgtccatgttctcgccggcgccgtccctgtcggcgcgcgtcgtgcggcgctacggcctccgcgaggacgccaaggtgtacaacctcacgggcatgggctgcagcgccacgctcatcgcgctcgacctcgtcaacggctacttcaggtgcgtgctcgacctagctcgttaattcttgctagtaattaattactactcgttgtcatgaagagataaaggtctcgttcacgcatggtgtgctcctgtaaatagacgtctgagtttgacaaactgacaatagattattgaccgcagccaagtctatcgtctctctggccaaataaatatttaatcacaagtttaggaaaaaaattgtaataaagaattctataactcacaaagtctaaagctgttttgttacgaaaaggcaaaaacaaaaaaaaacaaaaaa

SEQ ID NO: 95096 - DNA, 135 bp, Zea Mays
cgcagtaccacacaattcactaaatacaaaaggaatcgcattaccaaacagttcactgaatacaaaagtaactgcattaccaaacacacagtacaacacttaatgcaaccaacgaaaagtaatacaaacagacag

SEQ ID NO: 95097 - DNA, 1616 bp, Zea Mays
caagccttttcttagtacttctaaagcaaaatatactactactcattgccataagagcacacaagattttcttgacaaaatccagccactattcttagttttaaggaagcatctggatggagcagtttcaatgatcaaagatggtaaccttctattccataatttttgcttcgtgttacttttacaatgtttgaattaataattagtgggctgagtcggtttcttaatggtcggggttgtatgtgctgggagggattacaccccctcctttgtggatcttttcttcttagtgaaatgacacaactttcctgcattgcttgagaaaaacaatgtccgcatttcgtataatccttcattgaatgtccttgctttcgattggtaacatgataagctactactcttcagaattagagagctgtttagatgactggagttcacattcatcttctgctggcaacccaaacataccatatgtggttgtctccaagtcatcaattgtgactgctgtatgcaaagagattcttggctgctacaggaagttacttggcattcctgatctgttgaatcaaccaaacatgtcaattctgaagcaacttttgcagactttacagccaactgaaaattttgatgatgttctttctgagttccaatcatctcttggtccttgcaatgttgattacctatattgtggagaatgtaaaatgttggaggatattatggattcagtgtcctcattttcataccttttgtcttctgatgtgttaattactatacaatcaattgtaaattctgttgttgtgttgttggacaaatccggggaaccaaatgggaaaaatatacacatgggatgctccaaagcaatcatttcctttctgcgaaagcgtcttggatactcagctcataagctgctcagtgctgatttccctagcgaagatgttggaaaaggatggcagagtaaaggtgatcttatacagaagatattgcaaatatacctcaggaatagtgactctacttcagatctacttgctgagataggtcgtgaattgcctaaggtgggtcatctcttcttctcgagtgatgctctcgagttatgcatatgccaccactctgccttaaaaagaacatctggcatcattctgaatccagccgaagagtgagcataaaaggtttagcaattcacaaataatctatgttcaatgggcatgagtgaagaataattagtaagtgcttttcactgctgacttgatagcaaagtagtgtaaaaataatggtaaaagtggttacgccttataaactgggacggagggagtactgttatattagcaagtacaaaagcattccccgctaacattgtttgtgtattagaagtcactaccggaatttggctctttgccgagtgccatattctttgccgagtgttttatttcgggcactcggcaaagagctctttgccgagtgccacgcaaaactaggcaaagacaattttaaaatcacattttaaagtagtaaattaattcaaatgaaaaagttttcaactacaaatttgtataactcattatgatgtacaatttatatattaaacatttcttcatatgacaaaataaaaataaatttgt

SEQ ID NO: 95098 - DNA, 1644 bp, Zea Mays
ccgagctccgacacagccgtcgccctgagcccgtcatccatgctcccttccatccttctccccaccagcacaaccacaccccctctcccccctcgccgcctccccagaccccgacacgtcctccccggccgcaatgaccgctccccgaccgtggtccccgctagcaaacccaagctcgtcggggagaagagcaaggggggcgcagaggcttgcctacctagctcgtcggggccctatggagatccagcaccaccggggctgggcaactccaaggttgtgaaggtgcagagcgaggaggcgtgggatctgttcaccgatcgagcgagcaatgaaggctgggccaggtatcggcgatgccctcggcgacatcgaaatctactccgcggccaccggcgagcccgtcctgttcagagacctgtgggactaggacgagaattagagagctgtttagatgactggagttcacattcatcttctgctggcaacccaaacataccatatgtggttgtctccaagtcatcaattgtgactgctgtatgcaaagagattcttggctgctacaggaagttacttggcattcctgatctgttgaatcaaccaaacatgtcaattctgaagcaacttttgcagactttacagccaactgaaaattttgatgatgttctttctgagttccaatcatctcttggtccttgcaatgttgattacctatattgtggagaatgtaaaatgttggaggatattatggattcagtgtcctcattttcataccttttgtcttctgatgtgttaattactatacaatcaattgtaaattctgttgttgtgttgttggacaaatccggggaaccaaatgggaaaaatatacacatgggatgctccaaagcaatcatttcctttctgcgaaagcgtcttggatactcagctcataagctgctcagtgctgatttccctagcgaagatgttggaaaaggatggcagagtaaaggtgatcttatacagaagatattgcaaatatacctcaggaatagtgactctacttcagatctacttgctgagataggtcgtgaattgcctaaggtgggtcatctcttcttctcgagtgatgctctcgagttatgcatatgccaccactctgccttaaaaagaacatctggcatcattctgaatccagccgaagagtgagcataaaaggtttagcaattcacaaataatctatgttcaatgggcatgagtgaagaataattagtaagtgcttttcactgctgacttgatagcaaagtagtgtaaaaataatggtaaaagtggttacgccttataaactgggacggagggagtactgttatattagcaagtacaaaagcattccccgctaacattgtttgtgtattagaagtcactaccggaatttggctctttgccgagtgccatattctttgccgagtgttttatttcgggcactcggcaaagagctctttgccgagtgccacgcaaaactaggcaaagacaattttaaaatcacattttaaagtagtaaattaattcaaatgaaaaagttttcaactacaaatttgtataactcattatgatgtacaatttatatattaaacatttcttcatatgacaaaataaaaataaatttgt

SEQ ID NO: 95099 - DNA, 107 bp, Zea Mays
ccgatgccttacgtcacggtggacgccttacgcgccgtcgccctgctctgcgcgcgccttaccgctagagcgacgctaagcatggtcctaaaagacaaaatgggtat

SEQ ID NO: 95100 - DNA, 1095 bp, Zea Mays
atgacggcgctcaagcatcagagtcctggtcctagaccccaaaattaccactcgtactacctccgtaaccctaatcccaaatctgccttcagtttccccgatgacgaccaccatcccggcaacctccggggcagcagccgccaccagcatgtggcgcccgtgtcgcaggactacttcacagcattccagcggcaggtgcaggaccagacgttgatcatcaaccgcctgtcgacgctaacctcccgattaagggcaatcgaggtccagctcgcgtcggcctcgtctgtgaacgatccttcatcgtcgtcccacgtctccacctccgctgcgcaagattactcctacggccttcccggttatgggaacgtccccaccgtacgcgttgtggcgccctccctgtccctggcactgcctctattcgccacccttgcccttgtgcccacgacctcccacgccacccccccatcgtccaccgcggcccttgtctccatagcgccaatccacccttctgtccccctacccatccaccgaattcccttcccccactccccatccccaatcccaggctttcccgacccccaccatagtgcataccccccgcagcagcaccctcacaacccgcaccaccataaccttcccttccccaacttcgatggcaaggaagatcctattggttggttgacccgttgtgagagcttctacaataaggggacatcagagatggacaaagtctggttggatgtgtaccatctcacgggcgttgcacagcagtggtccttcatgttgcggcacgacgagcccacgttgcaatggtcgtgcttcaaaactttgtgccaacggcgttttgggcctcccctgcgcagcaacacgttgggcgaggtggcacgcctaccgttccgcttcacggtggaggactaccaagatcgattaatggctctcctatgccacgctgagcccgtgccaccaccgcaccaacaagtgcaactcttcatcatcggacttcccggccgtctgcggatggacgtcgaactgcgtgcgcccggcgaccttcagcaggcaatggcgctcgctcgggcgtacgagcggcgtgcctag

SEQ ID NO: 95101 - DNA, 1065 bp, Zea Mays
atgtggcaattctgtccacttttgacttttttcattatctggaattcaaccacacacactaatgtgtgttgcagcattagtgtgtattgcaactattttttgttcctatttgtactgtgtgttttagtttgttgattagcaatttttggttataagatctgtaccatgtgcttgtgccctcacgtttttttcattcccattttttcagtggtttttataatggatcaagaacagaatgtcacaggccagcaaggcgctgacactgtccgtcgctctcctcgtgtacaaaacaagagaaaggaattagataaaaatgaattgaaggaaaggaggaagaggttaaggttgaaagtccccttgtctcctattcaagatgaagaaagtgatgatgaacaagacccagagtttgctcctgccggcgatggttctggcgacgacaatgttgttattgttggtggcgatgagaataagggtaaaactaagacgcgagctatacgatgctcacctgggaagttcataaagcttgtgaatgctctctccgatgaattgaaaggtgaagtagttgccaaggggtttggtggcctgctgagattcaagccgcacttattgtccagaaaattgctcagctggctgatgcggaagcttaacccggagacgatgaaattagagattggtggtggaaaagagattccaatcactgagcacagtgtttggtgtgttttgcagttaccaaacgttggccgtgacccgccccccatgtctgatgcagatgctcgtgccttgcgggacgagctaggagagcaaatttgtggcaactcttataaacacagatctggtatcaatctatttgttatcactgatcgactgcagaagaggattctcactggggagctgggcctgagagcctttttcatggctgcatttcagtgtctgctattctccaacactgacactcgcatcaggattgatgatgtaaagtatactcaggacatccacaacatgaccaacaagaactggtgcaaagcggtagttgacaggcagcacgcatcaggattgatgatgtaa

SEQ ID NO: 95102 - DNA, 900 bp, Zea Mays
atactgtcatcacccgtgcctgtgtctcaccagcccactttccccagtactctactcacccacccactcacggactcatctactgagcagcgcggtgggcatccgagcgagagggcgagcgcggaaggatcggaattccgaaggttgggcatggaggcgagcggcgagaaggctgcggtggtgcgacggctgatggaggcgaaggaggtgtccgggaagaccttctcgggaatcgccgccgagacgggtctcaccaacgtctacgtggcgcagctgctgcggcgccaggcgcagctcaaggccgacacggtgcccgcgctgagggcggccctgcccacgctcacggacgacctcatcgaactcatgatgcagccgcccttccggtcctaccaccccaacatcgtccacgagcccgccatttacagattgaatgaagctgttatgcattttggagagagcatcaaggaaatcatcaatgaggagtttggtgatggaatcatgtcagccatagacttctattgttcagttgacaaggttgaaggggccgacggaaaagatcgtgtggtggtcacatttgatgggaagtatctaccttacactgaacagaaatctgaacatatgatgtctaggccaacccgcaagacatcttgatgtggctggtgaggaggagaaacatgatcgtagtggttggtatcgggctcagcaaggatcgagcatgccattttctttgtgtagtccaaatcatcaacacaataaacagacctatattgatgataactgtcaaaaggaacattaaagtcaatgttctacctggcatgattgctggactgtattggatgatgctgagataaaaagagagaaaaagtgaaacaaactggattcaaattcatttttttctct

SEQ ID NO: 95103 - DNA, 1324 bp, Zea Mays
atactgtcatcacccgtgcctgtgtctcaccagcccactttccccagtactctactcacccacccactcacggactcatctactgagcagcgcggtgggcatccgagcgagagggcgagcgcggaaggatcggaattccgaaggttgggcatggaggcgagcggcgagaaggctgcggtggtgcgacggctgatggaggcgaaggaggtgtccgggaagaccttctcgggaatcgccgccgagacgggtctcaccaacgtctacgtggcgcagctgctgcggcgccaggcgcagctcaaggccgacacggtgcccgcgctgagggcggccctgcccacgctcacggacgacctcatcgaactcatgatgcagccgcccttccggtcctaccaccccaacatcgtccacgagcccgccatttacagattgaatgaagctgttatgcattttggagagagcatcaaggaaatcatcaatgaggagtttggtgatggaatgtaagagataccagtgcttcatttatgcataaattcctgttcctggtaatctggcatgaactattatgtgatatagttagtaaatccattagttatgattatgaacggataatcctttaaaaatatggacacctggattcacatttgagattgtttttgtgctatatgctgttgctgtgatgttcacttgtacttgtagacacttgttaggacctggaatgctttgaattttgtgcagctttatttaagcctgagcctgacgaagcctctgtaaccacacacttgaaaaggtccagcttgcaagtatattagtgtggaaaactggaaatcctgtccatgaagctccattgaatatttttctaaaaaaaattgaatcgtatttgctaaaatggtgttatcatattaccattgcttcttattgcagcatgtcagccatagacttctattgttcagttgacaaggttgaaggggccgacggaaaagatcgtgtggtggtcacatttgatgggaagtatctaccttacactgaacagaaatctgaacatatgatgtctaggccaacccgcaagacatcttgatgtggctggtgaggaggagaaacatgatcgtagtggttggtatcgggctcagcaaggatcgagcatgccattttctttgtgtagtccaaatcatcaacacaataaacagacctatattgatgataactgtcaaaaggaacattaaagtcaatgttctacctggcatgattgctggactgtattggatgatgctgagataaaaagagagaaaaagtgaaacaaactggattcaaattcatttttttctct

SEQ ID NO: 95104 - DNA, 743 bp, Zea Mays
atactgtcatcacccgtgcctgtgtctcaccagcccactttccccagtactctactcacccacccactcacggactcatctactgagcagcgcggtgggcatccgagcgagagggcgagcgcggaaggatcggaattccgaaggttgggcatggaggcgagcggcgagaaggctgcggtggtgcgacggctgatggaggcgaaggaggtgtccgggaagaccttctcgggaatcgccgccgagacgggtctcaccaacgtctacgtggcgcagctgctgcggcgccaggcgcagctcaaggccgacacggtgcccgcgctgagggcggccctgcccacgctcacggacgacctcatcgaactcatgatgcagccgcccttccggtcctaccaccccaacatcgtccacgagcccgccatttacaggtgcgcggcgccccccccatcccctttgcaaacgacgacggggggcaatttgctttcccccaatctgaatcggaacgtgactcgtcaggcgagcgtagcgaaatcttgtttgtttaattggctacaccaagcgcttggggtctagttagcaagggatatatttgttctccaggaatattgcggtttagtgcagtttgacgtttgaataactctgactcaatctcaagtatttgggcacagctttcctatgtttaaacagagacttttggcatttcagaagactggtttggattaaagacgagagaagcaaaaaaaaaa

SEQ ID NO: 95105 - DNA, 3534 bp, Zea Mays
ccaatggttaccctgcaacctcggcgaggaacctcggccatgcaccggtcgtcttcgtctctgcccttacaattcttgatcatttctcccctagtcctcgcgcgtctcctcccaaactaccgatcgcgcgggagccccgtctgtctctctcggtggttggggggccgtgccgggacgagatggggggccactaccgctcgcgctccgcctccgcgagctccacggcgacgcggtccgacatcaccgagctcgactttgctgcggccggcctcgactgcccattcggccgcgtcgatgcactcggtcccgttgagctccgcgagaccgcgtacgagatcttcttcatgtcctgccgctcgtccggcccggcggcacctagcaggggcggcgcggcggaaggggaggtgtcgtcgcccgttgccggcgctggcgcgaggtgtggcactgggggcggcgtcatgggcagccgagtcaagaaggccctcggactcaggccgaggcggctgtcgccgatgatgacccgcacactgagccagacgtcggggccggcgtcccctggccgcgtgcggcggccgatgacgtcggcggagatcatgcggcaacagatgcggctcaccgaccagactgacgcgcgtctgcgccgcaccctcatgcgcaccgtcgtcggtcaggtgggcaggagggcggagacgatcgttctccctctggaactcctccggcagctcaagcccgcagagttcggcgacaccgaggagtaccaccaatggcagttccggcagatcaagctcctggaggccggacttatcctgcacccctccctccccctcgaccgcctccactccgccgtgctccggttccgcgaggtcatgcgcgcaacagagatccgcgccatcgacaccagcaagaactccgacgtcatgcgcgccctaagcaacgccgtgcacgcgctctcgtggcgctctggcaccaccggtgccgctgtagaagcgtgccactgggccgacgggtacccgctcaacgtgctcctctactgctccctcctccaggccatctttgatctgagggagagcaccgtcgtgctcgacgaggttgacgagctcctggagctcatcaagaagacgtggccgacgctcggcatcaacaggatgctgcacagcgtgtgcttgtcgtgggtcttcttccagcagtacgtgatcacgggccaggtcgagccggacctcgccgctgcggcgctcgccatactcgttgacgtggcagccgacaccaagcacgggagccgtgacccgatgtacgtcaaggttctcctgagcgctctcggtgggatgcaggagtggtcggagaagcgccttctggactaccacgacagcttcgagaaggacatcggtggcgctgctacggaaggcatggagatcctgctgtctctggcgctcgccgcgggcaagatcgtcgctgaccgggaaggcgccagcgacgggaactttgctgtagaccgcgtcgattattacgtcaggtgttcgatgaagagcgccttcaccaacatacttgagaatggactcggcgaggttgacagcgtgatcatcgaccgcgacagcgaccctggctccgtcctgattcagctcgccagggacacggagcacctggccttgttcgagcgcaggaacttcagcccggtgctgaggcggtggcaccccgcgccggtcgcggtggccgcggtcaccctgcacggctgcttcggcgtcgtgctgaggcagtacctggccaaggtgaccatcctcaccgaggagctcgtccgcgtgctccactcggcaagcaggctggagaaggcactggcgcagatgacggccgaggacgcggcggactgcgccgacggccgggccaagggtatcgtgggcgacatggagcccttcgaggtggagtccgtcgtgatgggactgctcaaggcctggatggacgacaagcttgggcttggcagggactgcctcctccgagccagagacactgagagctggatacccaagtccaaggaggaaccgttcgccgggtcggccatggagctgatgaagctggctaggttgaccatcgatgagttctccgagatcccagcgagtgcgaaagacgaggtggttcaagatctcgtcgacggcctggagtcgatcttccaggagtacatcttctttgtggcgtcttgcggttcgaaacagaactacctccctccgctgccgccgctgacgaggtgcaaccaagactcgggcttcttccgactgtggaagaaggcggcgctgccgacgtgccaggcgccgccggatgccaccccgcgcggcggcggcggttcgcaccacgtcccgcggccgtccatcagccggggcacgcagcggctctacgtccgcctcaacacgctccactacgtgctgacccacctggaggccctcgacagctcgctgtcgtcctcgacctctcacctggaccgcgcacgcgccgcggcgcagtcgtcgatctcggccgtcgccgaggtcgccgcgcaccgcctcatcttcctggactcgcgccactccttgtaccagggcctgtacgcccgcagcgtggcggacgcccgcatccgccccgcgctccgcctgctgaagcagaacctgtcgttcctggtgtccgtgctcgcggaccgcgcgcagcccgtggcggtgcgggaggtgatgcgcgcctccttcgaggcgttcctgatggtgctcctggcgggcggcaacgagcggagcttcgtgcgcgccgaccacgccacggtggaggaggacttccggagcctgaggcgcgccttctccacgtgcggggaagggctggtccccgaggacgtggtggcgcgggaggcagagacggccgaggccgtcgtggagctcatggcacgctccacggactacctcatcgacgcgttcagcgtcgccacgtgcgactccatcagcgaggacggccgcgccggcgcaggcgggtgcacgccgctgccgcccacgacgcggaggtgggaccccgccgacccgaacaccatcctccgggtgctgtgccaccgcgacgacgaggccgccaaccagttcttgaagcgcacgttccagctggccaggaggcggtgaggccacggccatagcttgacttgaaggagcacgaaagatccttacgcgtcccgcgccccgcggcccgattgatgaaatgatgtgcgtggtgtttcgcatttttctcgctgaaaattgctcgcaagctgtgtcgctcgctcgcattacaggggagagaaagggaaaggggaagaaattctatatatctcgaatacaaatgacctcttttatagttcatcacatccaccacttggatgaccataaaaacaaaaacagatcaaaatttataacttaattatttagtaatttgttttttctatttatatagaccgggtggatgtgagaggtataaaagagtttctttgcatttcggatgtaaacaattttttttctgaaagggaaggcaggcacaatgagaggaggtttgcagttcaatcaccgg

SEQ ID NO: 95106 - DNA, 654 bp, Zea Mays
agggcctgtttggtttgtggctaaatgtgtcatactttgtctaatgttagttgttcgaattgaataactaatcttaggcagaaaagttaggcaaaatgtggtaactgaggtagtgaaccaaacatgtctttagatagatctgggccgcctctcttggacagctgcccctctagggctgctgccagcctaccacccatgtgccgcgtcgccgcaacaaagtgcacatatcttctccctcctcttttatgcatccatgacagggacctcacgcgctcgtgtcaaagaggaggccatggccttccgcaagaagatggcatgcttgttacggctcaaggtgcagacaaggaggctgtcaacgcacacactcgcgcccaagtaggatggcaacgcgcaatcccccgtcggggaatacctccccgtccccgcgacgattttttttccgtagggattcccacgaatacttgtggggaacatttcttctctatccctgtttttcgcgggataaatctccaaaagtgatccctatctctgtttaaattataattaaaatatgcgttatttattattaatattaaacattatcacttatacacattatcagatgtaagaaatcattatgcacacatcaaaataaatatatttgtacaattagtg

SEQ ID NO: 95107 - DNA, 548 bp, Zea Mays
agtgattttacatgacgagctggtaaaaagttgcaatattggggtgcagacagaatgcaagataccagcttgagcgtttcattgtctgaagggtcttgtgctgtgctacaagatagtggtgcgagcttactctcccttcccaaagagcatgttttaatggcaaaactcttgtcaacagacgaagtgcaacatgctgactcgagcagtcgagctgctgtagctgggtcttgggaagggtctcggctgtgtgtctgcatactgatgatcggtgatgcttacgatataggaatgccccaatgtataggtgaacttttagtgctatagaggcttccttttgttgtcatgatgtctatgctctttaagtagctgcataacaccatgtatactcagtatagttctacacctgggtatggaagccattcgtgtttttgtttagtatgaatgccatgtaattgtacattaggttgacaattcagttgttgctaaatcacgctccactagtgaattgtgtaaatggaaagaaatgaaatgcatatatataaaactct

SEQ ID NO: 95108 - DNA, 1332 bp, Zea Mays
atggagtcggaccagggcaagctcttcatcggcggcatctcctgggaaacaacggaggagaagctgagcgagcacttctccgcctacggagaggttacgcaggccgccgtcatgcgcgacaagacgacgggccgcccccgaggcttcgggtttgtcgtcttcgccgaccccgccgtcgtcgaccgagcgctgcaggacccccacaccctcgacggccgcacggtcgatgtgaagcgggcactctcgcgggaggagcagcaggcctccaaggccgcaaaccctagcggtgggaggaacactggcggaggaaatggcggcggcgatgcaaatggtgctcggacgaagaaaatattcgtgggcgggctgccctctactctgactgaggatgggtttcggcagtatttccagaccttcggcatcgtcactgatgttgttgtcatgtatgaccagaacacgcagcgcccccgtggcttcggattcatcacctttgactcggaggacgcggttgaccacgtgctgcagaagaccttccatgatcttggtgggaagctggttgaggtgaagcgtgcattgccccgtgaggcgaaccctggtggctctggtagtgggcgttctggggtgagtgggggttaccagagcaacaatggccataacaccagctctggtagctatgatggtagaagtgatggtggcaggtacgggcaggcacagcagggtagtggtgtctatcctggctatggtgctggggcagctggatatggatatggtgctaaccctgcaattggatatggaaattatggggctggaggatatggaggtgctcctgctgcttatggtggacattatggaaacccaggtgcagctggttctggttaccaaggtggacccccaggctcaaatagaggaccttggggcagtcaagctccatctgcatatggaactggagggtatggtggcagtgctggctatagtgcttggaacaactcttctggtggtggcaatgctcccactagtcaagcccctggcggacctgcgggctatggaagccagggttttgggtatggtggatatggaggtgatccatcgtatggtagtcatgggggatatggagcttatggagcgcgaagtgatggtgctggcaatcctgctactggtggagcatctggatatggtgcagggtatggaagtgggggtgccaactctggctattcaagtgcttggagtgatccttcacaaggtggtggatttggtggttcagtcaatggaggttctgaagggcaatcaaactatggcactggctatggcagtgtgcagcccagggttgctcagtaa

SEQ ID NO: 95109 - DNA, 804 bp, Zea Mays
agcaactgtgagaagaactgcgagaagaacttaggcggcatgaggattacttgaagcaacaagctgcgcaacatgaatattatgctacacagattcaacaacagcaaacactcatacaacaactagcacaggcccaagggatacacgtctcggtgcccccccacctcccgttcattatccttggtcttcacctccacctatacctacatcttcatctaccgaacatcagacccctccagctaccttgccgacgcatgaacaagaagacgggttagactttgtcgaaaccctcttcactagtgaaggtatcgaccatcactcgacactgtaacccgatggttatcggcgaccatgagcttccatgttattgttttctgatacttgagacttttattatggctatgtatgagatattgtctcttattagttctggatgatgagatgtgtcttattatgactatggatgagacttttgtgatgtaattgatgagactatggattcaaatattgttatgtgattgtgtgtgagatgttttatgtgaaaatatgttgtgctatatagttgttgatatatttgttatgttgtggaatgtgatgtaaaataaaaataaacaacatttgtaatgatggtcaaattaacttcctagaggcttattgggtcgtaggaagttagtcgtaggaagttagtcagctaactttctaggggctacggtcagccgtaggaagttagtcgtaggaagttagtcagctgacggtgctgacggcgtgaagctactaacttccgagaatctactaacttctgag

SEQ ID NO: 95110 - DNA, 2055 bp, Zea Mays
tacccatccataatctaaggtctcgctcgtcggcgtggttcggagaggccacggccacccacccacccatggcggagaggctggaggcggccgcttccgacgagtacacgcaggacggcacggtggacctccacggaaacccggtgctccggtccaggcggggcgggtggagagcctgcggcttcgtcgtagtgtacgaggtgttcgagcggatggcgtactacggcatctcctccaacctggtcctgtacctgaccaagaagatgcaccagggcgtggtgccgtcggcgaacaacgtcaccaactgggtcggcaccatctggatgacgcccatcatcggcgcctatgtcgccgacgcgcacctcggccgctaccggaccttcatggtcgcctccgtcatctacctcagcggcatgatcctgctgacgctggcggtgtcgctgccggcgctgcggccgcccaagtgcggcgcgggaacggcggacccggactgcgtgcacaaggcgacgagcgagcagctgggcgtcttcttcctggccctgtacatcctcgccgtgggcacgggcggcaccaagcccaacatctccaccatcggcgccgaccagttcgacgacgcgcacccgcgggagcgcgcccacaagctctccttcttcaactggtggatgttcagcatcttcttcggcacgctcttcgccaacaccgtgctcgtctacatccaggacaccgtcggctgggccgtgggctacgcgctgcccacgctgggcctcgccgtctccatcgccgtcttcaccgccggcacgccattctaccgccacaagcccacctccgccgaaagccccttcgccaagatggccagggtcatcgtggcggccgccaggaagctggacgtccccgtgcccgtggacccgcgcgacctgcacgagctcgacgccgagcactacgccaagaggaacgtggccccgctcccgcacacgcccaacctcagcgtactcagcaaggcggcggtcaagaccggcgcggccacgtcgcggtggtcgctcagcaccgtcacgcaggtggaggagaccaagcagatgctcaagatgctccccgtgctggccatcacgttcgtgcccagcgccatgatggcgcagatcaacacgctgttcgtcaagcagggcaccacgctggaccgccacgtcggccgccacttcgagatcccgccggcgagcctccagggcttcgtcaccatctccatgctgctcgccgtcgtgctctacgaccgcgccttcatgccgttcgcgcgccgcgtcacggccaacccgcgcggcatctcgctgctgcagcgcatgagcgtcggcctcgtcatccacatcctcatcatggccatcgcgtcgctcacggagcgccaccgcctggcggtggcgcgcgaccacggcctctacgacagcaagggcaccacggtcccgctcaccatattcgtcctgctcccgcagttcgtgctcatgggcgtggccgacgccttccttgaggtggccaagatcgagttcttctacgaccaggcgcccgagggcatgaagagcctcggcacctcgtacgccatgaccagcctcggcatcggcaacttcctcagcagcgcgctgctctcagctgtgtcgcacatcaccaggcgccacggccggaccggctggatcctcaataacctcaacgcatcgcgcctggacaagtactacgccttcttcgccattctcaactgcgccaacctcgtcgccttcttcttcgtgtgccgcttctacgtgtacaacgccgaggtatcccacgtcgtcgacgccgggagcagtaagcagaagcgggaagtgcccatggcgatgcagccgccggccgtgggcgcagtggacgccaccctataggactagtgttccggtccattacaaatgtagttgtcatactcatacgtaccggtcatacatacgtgacgtgaaggatgaagcgccgcgtgtacagtgctgtaatctctacgtacatgcacctgcaatggatatgtgaaagtagtacgagaagctctgcagtgacggt

SEQ ID NO: 95111 - DNA, 2235 bp, Zea Mays
gctacacaatttaatgcactcatcagaagggctctatcgctcgctatatgagccgcgcaacaccacagcagcggccagcgggtgcagtgtgcagcagtaggactgccgactcgccattgcatcgggggcccagctcgccctgggctctcgcaaccagtggcctctggccatgagtcagcagctgcgtgtggccatggaggacgccggcgagggaggcagaggggagtacaccaaggacggctccgtcgacctccacggcaaccccgtcctccgctccaagcgcggcggctggaccgcctgcaccttcatcgtcgtgtacgagctcttcgagcgaatggcgtactacggcgtggcggcgaacctggtggtgtacctgacggagcggctgcaccagggcaccgtccaggccgccaacaacgtcaccaactggtcgggcaccgtcttcctcacgccgctcctcggggccttcgtcgccgacgcctaccttggccgctactggaccttcgtcgccggctctgccgtctacctaatgggaatgctgctgctgacgctggcggtctccgtgccggcactgaagccgcctccctgcgaccccggcgccggcgccacctgcccgcgcgcgtcggcgctgcagctgggcgtctacttcggggggctgtacaccatcgcgctgggacacggtggcacgaagcccaacatctcgaccatcggcgccgaccagttcgacgaattccacccggcagagcggctgcggaagctctccttcttcaactggtggatgttcaccgtgttcacgggcatcctcttctccaccaccgtgctggtgtacctccaggacaacgtgagctggtcgtgggggtacggcgtgcccacgctggcgctcgcggcctcggtcgccgtcttcctcgccggcacgccgctgtaccggcacaagctaccgcagggcagcccggtcacgaaaatgggcagggtggtctgcgcggctcttcggaagtgccgcgtcgcggttcctggggacctgagcgagctgcacgagctggagcccgatcactacgccagcaggaagaggtttcgcgtgaacccgacgagctccatggggttcctgaacagggcagcggtgaaggtggcgggggaggaggaggtctccggcgggtggacgctgtgcacggtgactgaggtggaggagacgaagcagatcgcgaggctggtgccgctgctcgccaccatgttcgtgccgtgcgcggtgatggcgcaggtgggcacgctgttcgtgaagcagggcgtgacgctggaccgccgcgtcgggcgcggctcgttccgggtgcctcccgccagcctcggcgcggtggtgacgctgacgatgctcgtctgcgtggcggtctacgaccgggccctcgtccccgccgtccgaaggcgcaccgagaacccgcgcgggatcacgctgctgcagcgcatcggcgccgggctggtcctccaggtggcgacgatggcggcgacggcggcggtggagagccggaggctgagcttcgcgagcaggagccacggcgccacggcaggcggcgagctgccgctgaccatcttcgtcctgctcccgcagttcgtgctgatgggcgccgccgacgcgttcctggtggtggggcagatagagttcttctacgaccaggcacccgagagcatgaagagcctcggcacggccatgtccctgacggcgtacggcgtcggcagcatgttgagcagcgccatcctcgccgccgtggagcgggtgacggcccggcgcgggacgccgtgggtgaccgacgacctcaacgcgtcgcacctcgactggtactacgcgttcctcgccgtgctggctgcggccaacctgggcgccttcgtggcgctgagccgcgggtactcgtacagggcggaggccatcggcgtcacggcgagagtgcactcggagccggtggtggcgccgtaacaagtgcttccacatgcacggtttttagctcgtagtacgtagtacgtacgtgattgtgaccatcaactgaactcaccacgcatgcagctagcggagcaagtacgttcttcagacagattcgcatggtgcatctgtagcatgcagtgactggcattcaaaaatacagtagtttcatcgtgacgatcgctagcattcaaaaattgaagcagtgcacatgtagaagtgtcgttgccaaatgccaaagcccttatccaattattgagatccttattgtg

SEQ ID NO: 95112 - DNA, 3953 bp, Zea Mays
cttcccagacgtggcaccggcgcaccgcatgtggtcgcaagtcaacccaatgcattgaccgcaaacccgcgcgcgccgcgagctcaaagagtccacaatccacaccaccatgtgctcgccgcctcaccgcccctccggcccttcccgcctcaccgcaagaacgggcacggacgcggacacgccgcgttgtgctctgccacccggccaatgcggaagccaccactcgtcccggccagcctcatcctcgacctcgaggtcccactcctcgtcatccttgccctcgcgaccctcgccgccaatgctgcgacgccagcgtcgccggccgacgcgctgttggcgtggaagtcgagcttgggcaacccggcggcgctgtccacgtggacgaacgccacccaggtctccatctgcaccacctggcgaggggtcgcatgcgacgccgccggccgcgtcgtgtcgctccgtctgcgcgggcttggcctcacgggtggcctggacgcgttcgacccgggcgcgttcccgagcctcacctccctcgacctcaaggacaacaacctggtcggcgccatcccggcgtcgctctcgcagctgcgcgctctggccacgctcgacctgggcagcaacgggctcaacggcaccatcccgccgcagctcggcgacctctcgggcctcgtcgaactccgcctctacaacaacaacctcgccggcgtgatcccgcaccagctgagtgaactgccaaagatcgtccagctcgacctggggtccaactacctgactagcgtcccgttctcaccgatgcccacggtggagttcctctcgctctccctcaactacctcgacggcagcttcccggagttcgtgctcaggagcggcaacgtcacctacctcgacctgtcgcagaacgccttctccggtacgatcccggacgcgctgccggagcggctgccgaacctgcggtggcttaacctgtcagccaacgcgttctccggccggatcccagcatcgctcgcgaggctgacgagactcagggacatgcaccttggcggcaacaaccttactggcggcgtcccggaattcctcgggtccttgtcgcagctgagagtccttgagctcggcagcaacccgctcggcggaccgctcccgccggttcttggccggctcaagatgctgcagcgtctcgacgtgaagaacgccagtctggtctccaccctgccgccggagctcggcagcctcagcaacctcgatttcctggacctctcaattaaccagctctctgggaacttgccgtcgtcgttcgctgggatgcagaagatgcgggagttcggcatatcatccaacaatctcaccggcgagatcccagggcggctattcacgagctggccggagctcatatctttccaagtgcagaacaactcgcttcagggcagaatcccaccggagctcggcaaggcgacgaagctgctaatcttatacctcttcagcaacaatctcaccggcgagatcccgccagagctcggcgagttggcgaacctgacccaactggatttgtcggcgaacctacttaggggatcgataccaaactcactcggcaacctgaagcagctcacgcggctggagctcttcttcaacgagctcaccggccagttgccgccggagatcggcaacatgacggcgctgcaaatcttggacgtcaacaccaacaatctggaaggcgagctgcctcccaccgtctcgttgctgaggaacctccggtacctgtcagtgttcgacaacaacatgagtggcaccgtaccgccggacctcggcgcagggctggcgttgaccgatgtgagcttcgcgaacaacagcttctccggcgagctgccgcagggcctctgcgacggcttcgcgctgcacaacttcacggcgaaccacaataacttcagcggcaggctgccgccgtgcttgaagaactgctccgagctgtaccgggtgcggctggaggggaaccgcttcaccggcgacatctcggaggcgttcggggtccaccccagcatggactacctggacatctccgggaacaagctgaccggccggctctcggatgactggggacgatgcaccaggaccacgcgcctgaagatggatggcaacagcatatcaggcgccatcccggcggcgttcgggaacatgacgagcttgcaggacctcagcttggccgcgaacaacttggtaggagccgttccacccgagctgggtaatctcagcttcttgttcagcctcaacctgagccacaactccttctccgggccgattccgacaagcttgggccgaaattccaaactgcagaaagttgatctgtcagggaacatgcttagtggagccataccagtgggcatcgacaatcttggctcgctaacctatcttgacctgagcaagaacagactgtcagggcagataccaagtgagctcggcgacctattccagctgcagaccctgcttgatctgagcagcaactcgctgtccggtccgatcccttcgaatctcgtgaagctggcgaacctacagaaactgaatctgtcacacaacgagctcaacggttcaatcccagtcagcttctctcgcatgtcgagcctggagactgtcgatttctcttacaaccagctcaccggcgagataccgtcaggcgacgcatttcagagctcatcgcctgaggcttacatcgggaacctagggctctgcggcgacgtgcaaggcgttccttcctgcgacggcagctccaccaccacgtcagggcatcacaagagaacggccattgcaatagctctctcggtagctggggcagtagtgttgctggcaggcattgccgcctgcgtcgtcatcctcgcatgcagaaggagacccagggaacagagagtgctggaggcaagcgacccttacgagtccgtgatctgggagaaggaagcgaagttcacgttcctcgacatcgtgagcgccacggacagcttcagcgagttcttctgcataggcaaaggcgggttcgggagcgtgtacagggcggagctccccggcgggcaggtcgtggccgtgaagcgcttccacgtggccgagacgggagagatatcggaggccggcaggaagagcttcgagaacgagatcagggcgctgacggaggtccgccaccggaacatcgtcaggctccacggcttctgctgcaccagcggaggctacatgtacctggtgtacgagtacctggagaggggcagcctggggaagacgctgtacggggaggagggcagggggaagctgggctggggcaccagggtgaaggtggtccagggggtcgctcacgccctggcctacctgcaccacgactgcagccagcccatcgtccaccgtgacatcaccgtcaacaacgtcctgctcgagtccgagttcgagccgcggctgtctgatttcggcacggccaagctgctcggctccgcttccacaaactggacttctttagcaggatcctatggctatatggctccagagttggcgtacacgatgaacgtcacagagaaatgcgacgtgtacagcttcggagtggtcgccctggaggtgatgatggggaagcatcccggcgacctcttgacctcgctgccggcgatctcctcttccggagaagaagacctgttgctccaggacatactggaccagcggctggaacctccgacgggtgaccttgcggaggaaatcgtgttcgtggtgcgaatcgcgctcgcttgcgcacgggcaaaccctgagtcgcggccgtccatgcggtcagtcgctcaggagatatcggcccgtactcaggcttatctttcggaaccgttcagacagatcacggtaagcaagctaacggactaccagaagtgatgtttgcctgctgcgcaaaggttacaagatcaacaagtgctgctggctacagtgaccatactattatttatttg

SEQ ID NO: 95113 - DNA, 862 bp, Zea Mays
gaattcgctactgttgaagctgctcagaaggctcttgaatttgttggtcatgacctgatgggacggcctctaaggattgacatggctaccgagaggggtgcatacactcctagcagcgggaaggacaacggttctttcaagaagttcgctccaaggtcaggcaacaccgtgtttattaagggctttgacacctctggtggagaggaccagatccgcaccgctcttgaagagcattttggatcatgtggagatatcacccggatttcaattccaaaggattatgacactggtgtaagcaaaggaatggcgtacatggatttcaaggacccagattccttgaataaagcatacgagttgaatggaaccgaccttggtggctacagcttgtatgtcgatgaagccaagccgagacctgataacagcggtggcttcagtggtgacaggggtggtggcagagggaggagtggcggcttcagtggtggcagaggagggaggagtgacagggggcgtggtggtagccgtgggcgtggatttggaggccgtggtggaaggggtgacagaggccgtggtggaaggggtacgcctttcagacagaccgctggtacagctagtacaggaaagaagaccacctttggtgatgacgattgaagatccatggctggctattatagtgaaaaacgcaaactatattgtaccgttcagacctattgttatctgaggctgtactgcttttttgcttgataattcgacaattgtttttaccatttttaacatttggtgctatcaaagacatgactttttaagtttttataatatgagtagcggcaagttcaaatgttgttggtctttgaatttctgtgat

SEQ ID NO: 95114 - DNA, 577 bp, Zea Mays
cagcatactacccacccaagataactactataggaatctgatgaaccaagatgatgcagataatttaggctcggaggattgcgtgcaagttgatcctcttgtagctaatatgaattcttagacaaaaccaaagggccgctcaaaaatttcactgatgatgaggacatcttactattctcagcgtatctaaatgttagcaaagatcctattgctggaagggaccaaaaagatggcagattttgggaaagaattgaaaagtattatcatgtcaatttaacatttgaatcagatcgcaattgctcttcgttgcgtcatcgatggggtataatccaaaaggaagtaagtcttttccaaagttactatgaaaccatagaaaggaagaatgaaagtggaaagacagtgaatgacaagattgctgatgctaaagctatgttccaaaccttaagaaaaaggcttttactttgtttcatgcttggaatattcttagacacgagccaaagtggtcatcaataaaggactccacaatggctaccaagaagctagatcctcacagcggtaatgaagatgatggacatga

SEQ ID NO: 95115 - DNA, 2418 bp, Zea Mays
agaaataaaacagaagaaaatagatgcttttataagttcacttgattgattgcacaggacattctcctcttatgcagatgtcgttcatatacaggaagaaatggcacttacagtgttgccactagtacttaatgcagttatttgttttggtactagcatgaagatgattctcaatgttcttgtttgcaaccacaaaccacttgattgaggtgtggcttgtctacattcctgacttggtcagttctcttgatttcagaagatatgtgcaatttgcctcagcgccatgaggtccggccgcggccaagcactgttcactgctgaatgctcccacaagttccacttcaactgcatctcctcaaacgtgcagcacggcaacaaaatctgcccaatctgccgtgcagtatggaagcagctgccttttcaggggcctctggctgcatctgctgcccatgggtcagcgagagtaaacccagcgatttggccccagatgagcatgctgtcggtgaatccgctggacgagctcccagtctttggcaatccggagccagctgttttcaatgacgatgagcagatacttcttcagcctgaaacagcagttggcggcgaggagggtgacgaggttccccctttgcttgagatcacgacatacaatgaattcccagccacccaggagtccgtggcgcaggaggaattcgccatcttgatccatctcaaggctccgcatgtgccgtcgtgggtaagcacccgagcgccgctggatctggtgactgtgctcgacgtgagcgggagcatgtcgggccacaagcttgcgctcctgaagcgcgccatgaggttcgtgatcgaaaaccttgaccccagcgaccggctctccgtcgtcgccttctcctcgtcggcctggaggctgttcccgctccagaggatgaccgcctccggacagcagcagtcgctgcaggctgtcaactccctcgccgccgatggcggcaccaacatcgccgaggggctgcggaaggctgccagggtggtggaggacaggcaggccaggaacccggtgtgcagcatcatgctcctctccgacggcgtggactcccacaacctcccgccgcgggacggctcggcgccggactacgggccgctcgtcccgcgctccatccttcccgggagcgagcaccacgtgccgatccatgcctttggcttcggcatggaccacgactccagggcgatgcacgccgtcgcccagatgtccagcggcaccttctccttcatcgacatggcggggtcgatccaggacgccttcgcgcagtgcatcggcggcctcctcagcgtggtggcgcaggagacgcggctcggcgtcgactgcgccgacgatggcgtgctgctcacgtccatcaagtcgggcggctacgccagcggggtggacggcgacgggcgcggcgggttcgtcgacgtcggccgactctacgccgacgaggggagggacttcctcgtcaccgtgcgcgtcccgcagtcacgcggggacattgcgctcatccgcccgagctgtacctaccgcgacgcggtcaccatggagatggtgcgggtgggaggcgacccggtgacgctgctccgcgcggcgaaccctgcgaacgcggggatgtccctgcgtgtggagcgcgagtggcaccgcgtccacgccaccgaggacatagccgcggcgcagaccgccgcggaggagtacgactacgcgcgcgcggcttcgatcctggaggcccgccgcctgctgctggagtcgtgcgcgtcgctgtcctcggaccagcaaacgcaggcgctggtggccgagctgcgggagatgcaggagcgcgtgctgaacgcggagctgtacgaggggtctggccgcgcctacctcctgtccgggctgagctcccactcgtggcagcgtgccacggctcgtggcgactcgactgagctcacgggcctcgtccacagctaccagacgccgttcatgatcgacatgctcaacaggtcgcaggcgctccagccggaggtagcggaggcgctgagccggtccccgacgatcgcgtcgtcgcgcagctcggccccaactcccgcccctgcctcctccggctcgccgtggacgcgacgcgggcttcggtcgttcaggccggcaaagtctttcaccgggctgtcattgtgagtgcaggactgcaggttcgctgattccattcacaatgcatgcaaactggcatcttgcagtagcagtagctaggaggagcgcggaagaaaactatcaccattgatccgtttcttcgatactctattgtcgtagagaggatttggtattactggtttgtactgctgtttgtccgtggattaatcctgagacatgttgtttgaccatcgattcgggtgtttttgttctataaacgtttgtgctgtttgtcg

SEQ ID NO: 95116 - DNA, 298 bp, Zea Mays
ccatggcttcataacggagcttgcagcaaattcgttccttgtaactttctttggctcatattttttagtttggtcaggaccataccaataaaaaaaatcacttccgttaaaatatgcattttgttctttaactgtgcaaagttactctatttatatcttgtctcctaggcctaacttgctcttatatttggtgtttatgacagagagctgcatctgaagaaaccaatgaacattaggtattatgaacaagggctgtactgtaataatgtggttcttgtaaactaattttgcctttgaa

SEQ ID NO: 95117 - DNA, 273 bp, Zea Mays
atggcgccggcgtgggagcgtgccaggcgcgcgctcaccgccaggttctgcatgcgctttgcggcgaggcgcgtggtcgtcgaggacgcgccacgtgggatggtcgacatagaggcgccttttccggtggcggtggcggaggcggagcagcagcaagagcagccggaggacgagagggagatgttgctggccgcggtgtcctccgaaccggtgtccgagcagctggcgtcgtcgaggtctgggagccggagttcagcggcgtctgacatctag

SEQ ID NO: 95118 - DNA, 909 bp, Zea Mays
gatgaggatgaatcagaagatgatattcctgctaaagctcaagtagtagccaagaaaaaggaagagtccagtagcagttctgattctgatagtgattctgagtccgaggatgagaaacctgctgctaacctaaagaagcctccggttccctctgtgcaaaagaagacccaagaatctgacagctctgacagtgattctgatgaggatgaatcagatgatattcctgctaaagctcaagtagtagccaagaaaaaggaagaatctggtagcagttctgattctgatagtgaatttgagtctgacgatgaggatagcaatgcgaaaacagtacaacctgccaaggctgctgctattaaaaagaaggaagattctagtgagagctcagaaactgactcacagtcagattcagaagattcagaacctgaaaaacctactgtccctgcgaaaaggcctctagcaacaaataaaaagaatgaacaatccagcgagaaatctgatgacagctctgatgagagttctgatgaaagtgatgaggaacctccacaaaagaaaactaagaattctgcaccttctggtgctgcaaaggctgccactaatgtttcaaagaaaaaaagcagcagtgatgaagatgatgaaagttcagaagaaagctctgatgatgaggatacagaacaagttgaaactaaggaaacttctgtagtcactacccagaagccggcacataatgaacctaaaactcctgccaaaagccaaagtcaggctactggttcaaagactatttttgttgggaatttagcctacagtatagagcgtgaacaagttaaggaattttttgaggaggctggtgaagttgttgatgttcgtttggctacttttgatgatgggagtttcaagggttttggacatgtt

SEQ ID NO: 95119 - DNA, 1810 bp, Zea Mays
tgtctgtgcaatcggctctcccatgcaaggaaagtctccaccgcgtccatggaagccaccccagatctgcgcgcaccgtctctctcgccctcgccccgtctctcttgctgcccagtcgcgtccactctcccatggaaggagaatccaaggaagccaccccggatcaaagcgccccagcctccatggaagccgttccggatctgcgcgccccaccttccaactgcgccccgcgttcgtgccatccatgggagccgccctgatctgcgcgtcccaccttccaactgcgcgtagatccctccatggaagccgctgatttcctcgacccaactacacgcagatccctccatggaagccgctgagttccgctcgaatcggggagttgcatgccccgcccaaaccaccacgcacaaaactaccatccaacaaatcaggaggtgatttctaactgaatcttgaatctatcacgccacgtgcgtcctttgatgcgggctcagttaggccgatgccgccattcactgctgtcggttatcgtgtttctggagctgacaaataccgcagtgttgatcgaatacaagccttatctgtcagcagtgtgccgcagatcatcttccaagccaaatccatcattagttccagagaaacgtccatggtcccctcgctgcccccatcctccaggtgctagctatggtcctcagactcatatagatcgtcaatgcgatccatataccgatgaatccattatgcgtagaaaggtacagcaggcacggtatcgacatagacacaacaacaacctgaagtttctcattctggttcattttcattgttgggaagagttttagagctgaaacctgactttttctatcagaatgggagatgtgaaaagagtttaccatggagtaagcagagtatctgtagtctgacgctccaaagttgatgccatcaaacatgaaggccagggaattgatggtctgcgtgccagtgacaaactgaatcaagataaaagttgtctaattcagtgtctgaatcttgtgaaatgcttgcatatggagcggcgttgtttcgatagccaggccaggctaggccacatccttagtgggatgcctctgtgaatgacttggatcatgagcacgtcacttgtgaaaatgccagccccgaacctcatagcaagtcccagcacgaccgtgagacccatgcccaggacaatgctgagctgcaaggcgaacaagaccactagcacgcatgacacctggttgctgttgcaggaaaagggttgacaaggacctgatacacactgttgtcctattgttgtgagtttacctgcaacacacgagatgtcgcggcagtgaccttcttgttgtcgttcttagcgaacgcgcttgcaagcaccgcctgcagttagtcaacgacaccaggattcaattcatgttatttttaggacctaccacaatagcatcctagacattagacaaatcagcattggtaaaaaaatttcatggttagaaatgcagttagacaaaggtagcagcatattgttaagctatcatattgggtttttactcccgtcgcatcgcacgagcactcatctataaatcatctaagtttccaatggaggccgtgtatatggacattgttaagcaccaagttgaccatcggacgtctgtggtggtgacgcgggtgcgcgcgcgtacgtagaatcagctaaggttttagatttctaacgggatttgttattaaaacatgcaaaattaacttgagaaccaattgaacttctacagtcgattcaatcaaatctacttaccaattttacctt

SEQ ID NO: 95120 - DNA, 2201 bp, Zea Mays
ggaaaattttgcagttgaccagttattttaacccaacctgcagcaatccatgacttgctacgcggtgcgtacgtggacgcggcaccaacacggagaacacatcgcctcatcactgtcgagtgtcgacggcgtcgctgctcggtaactgtaacaacgctcacacagaagtcgcaaaattcattcatttttttaagaagaagaagaagcagcagcagcagcacggcaatggagagcaactcgaggtccaactgccatggcgacatgcgccgcacatgcagccgcagcagtggcggcgtcggcggcagcgggcacgcgatcttcccgccgcagtgctcccaccaggaccagtcccattcccgcagcgtttccgggtcaaggatcgtcgcgaacggcctccccatctgcgagctctgcagcgcccggtggcgctcgctgccgtccctccgctccacgaacccgtcgccgcgccagccgccgccatcgcccgtgccgtcgtcccagccgttcttccggcccatggagccgcgcgtgttcgacgacgacgaccccgtggaccggacgccacggccgcttcgtggtgaccagcaccgcggcgcaagcgcggaggcatctggaggagcggttgcgctcgccacacactgcgagtgctcggctctcgcgagggacgcgtcagccgacgacttcgccgtgctcgtgcacgccagagcaacggggatggccggtgctgtaggcgcggtggcgcgcgcgccgctggacctggtgaccgtgctcgacgtgagcggtagcatggcggggaccaagctagagctgctcaagcaggccatgggtttcgtcatcgacaacctcgggcctcgggaccgcctctgcgtcgtgtccttctcctccggcgcgaaccggctgatgcggctcgcgcgcatgtccgacgccgggaaatccctggcgaggcgcgccgtgcagtcactcgccgcgggcggcggcaccaacatcggcgaggcgctccgcagggccgccaaggtgatcgacgagagaatgcaccggaacgccgtcgctagcgtcgtgctcctctccgacggacaggacacgtacaccgtgccgaggcgcgggggctacggcggccgcggcgccaactacgacgcgctcgtgccgccctccttcgcctaccccggcgctggcagccggtgcgcgccggttcacaccttcggcttcgggacggaccacgacgccgcggcgatgcacacgatcgccgaggccacgggcgggactttctccttcatcgaggacgaagcggccatccaggacgccttcgcgcagtgcatcggcgggctcctctcggtcaccgtgcaggagctgcgccttgatatcgcgtgcgtgcacccgggcgtgcgcctccgcgcggtcaagtccggcagctacggaagccacatcgacgcggacggccgctccgcgtccgtcgacgtcggcgagctctacgcggacgaggagaggcgcttcttgctcttcctgcacgtgccgagggcacgatccgcggacgccgacacgcacacgcagctggtcagagtggcctgcgcttatcgtgacacggcgactggacggggcaagaacgctgcaggcgaggacgccaaggtgctgaggccctggggcccggtgaccttggagcgctccgtggaggtcgagcgcgagcgcgtccgggtggaggcgacgcacggcatcgcggcggcccgtgcggcggctgagcgtggcgcgcacgcggaggcggtggagatcctccggcaccggcagcggtccgtgacgcggtctgccgcggcgcgggcgggggactccacgtgcctggctctgtcgcgcgagctgcgggagatgcgcgcgcgcgtggcgagccggcaacagtacgagttgtccgggcgcgcgtatgtgctcgccgggctgagctcgcacgcccaccagcgcgccacgtcgcggcaggtgatgtccggtggcgtggcagaagcgactcggggcggcgaatcggcgcaggtgcgcagtggggcgttggagacgtcgggcatcacgatgtcgtacatgacgccggcgatgctggacatgctgggccggtcgcggaggtcgcgtgagctgctgcagcaacgccaacaacagacggagctgagaagaacgttttgaccgtgtgattatgtggcgtaggaggtactaggcagtcctcccgaaaa

SEQ ID NO: 95121 - DNA, 2459 bp, Zea Mays
atcatcggttccacactatctcttccaaaatttcgttgataacacctggcaagttttttatcgcacctaaaattctatctgtctgttgtctggcgctgctgtatcactctgaatttttggttctggcccaaatcttgttctttttccggttcttctgatcccgtctttatcctctcaaatccactaaaccactccaaagatagaatttttctgcatccgaagcccagatatttttttccttcggtttgttccggcggcaggggtgcgaaatccctcaagctggcaaccccggcgcggccatggacctccccgagagctctgtcccccgcgcagacaagggcccggcccctcgccgtctttgccccgtcgaccgcgaggagctggtgcgcgccatggcacagtcgctctactcgctcgggtacaggcgggcggcggccgcgctcgaggcggagtccggcgtgccactgtacccgccggagcatgaccgcctgctgctggaagtgatggccggtcagtgggacgcgtccgcggagatcgtccgctcggtcgccggcgtcggcgaagcggaccgcacggtcgcggagttcctggtgtggaggggctactacttggagctcctggggatgcgcggtgacgctggcctgcgccgggcgagggaggtgctacggcgtcggattgcgccgctcggcgtcgacaggaggtgcgtacacttgctggcgcgcgccatggtctccagcgagggggccgttgcgccggaggccgtggttgggtggaggattgcggtgttcttggatttggtcgaggtgttgccaccatggttccatgtggctagtgggcggttagagcatttggtggagagtgcggtaaccaagcaagtagaatcttgtatatatcacaatttgccggatgagatcactctgtttgaagatcataggtgccatgaagagcatatcccctcccaatgtgcacagatattatgtggtcataataatgaagtttggtttgtaaggttctcaaataatggaagctacctggtgtcatcttcaagtgattgcactgccataatttggaaggtggaaaatgatgatacattgaccaagaagcactgcctccagggtcacgaaaaaccaatttcctttgcttcctggagcccaaatgacagaatgctgctcacttgtggtactggtgaatcattaaaactgtggaatgttgatactggtgaatgtaaccttaaattcagaggctcagcagactgcatcatcagttcatgtgcatggtttcctaattcggagaaaatagtatgtgccagctcggagcctgcaagtgctccaaataggatcttcacttgtgatctagaaggccaaaatctggaagtatgggctggagatagaataccaaaagtcagtgatctcgctgtgacacctgatggccgacacctaatctttgtatcttgcaacgatatctggattagggaacttccaagggggcgggaatggagatttcgtgagaagcagacgatttcatctctttctctctcaggtgatgggcagtcactcattgtgaaccttaacagtcaggagattcatctgtggaaaattaatgaaagttgtactgtgcctgaaaagttcatggggcacaagcaagacaagtttgtgattaggtcttgctttggtggttcaaactcttcgttcattgctagtggcagtgaggattcacaggtctacatttggaagaggcacgtggagatgccgattaaggttctacatggccacacgatgattgtgaactgtgtaagctggaatcctgcaaggccccacatgctggcttctgctagcgacgaccgcacggttcgaatatgggtagggcgcaaaaatgcaacaaagtaaacgctgttgaagtgtgaagttttgtatgtctgtgtaaatagttgtacatctggactgcatccacaaacctgtttgggacaatgctctgttcttcacccctgatgaatatgtcgtcgtagctatttgttcagaaataaacctgcaacagccataggtagccggtgctgctgtgtccagatgtgtgcctggctaaccggtgagttttgacatgtgtacaggacaaagatgcatcagaactttgtacatcttgttagtatatgccttggacactcgaagtgctgaaatatgccttctgttgctgtggatctagtgttcgtgtccttttatctttttcgcttggttcatgtgctatcttgctttttgtttagaataccccataacttctttctgatgtccttttcaggtgactttgcaacctttggcatggtcaacaaatatgtataagatttgtaacagcattataattggctagaatcgtgcactagcaaactgtccagcacctcttagcacattttatgtacttgtagttttgctagacagttttggggtgatatcttttcacccttgagagag

SEQ ID NO: 95122 - DNA, 1767 bp, Zea Mays
cactcctccaaccaagcgttctgcttccgtcctccaatgcccacagtttctgagagaaaagaaaccgacagctcgacccggatcatctctgactccctgcagaatcaatcatcggttccacactatctcttccaaaatttcgttgataacacctgattgatccctatctatatttgattttggaagcataaaagtgcaatgcagttgggaaatgcttctcaaagtacctcagcaatattaaatttctcctgtaccatgtttgcaatatattatgtggtcataataatgaagtttggtttgtaaggttctcaaataatggaagctacctggtgtcatcttcaagtgattgcactgccataatttggaagtacatgttgctaggtggaaaatgatgatacattgaccaagaagcactgcctccagggtcacgaaaaaccaatttcctttgcttcctggagcccaaatgacagaatgctgctcacttgtggtactggtgaatcattaaaactgtggaatgttgatactggtgaatgtaaccttaaattcagaggctcagcagactgcatcatcagttcatgtgcatggtttcctaattcggagaaaatagtatgtgccagctcggagcctgcaagtgctccaaataggatcttcacttgtgatctagaaggccaaaatctggaagtatgggctggagatagaataccaaaagtcagtgatctcgctgtgacacctgatggccgacacctaatctttgtatcttgcaacgatatctggattagggaacttccaagggggcgggaatggagatttcgtgagaagcagacgatttcatctctttctctctcaggtgatgggcagtcactcattgtgaaccttaacagtcaggagattcatctgtggaaaattaatgaaagttgtactgtgcctgaaaagttcatggggcacaagcaagacaagtttgtgattaggtcttgctttggtggttcaaactcttcgttcattgctagtggcagtgaggattcacaggtctacatttggaagaggcacgtggagatgccgattaaggttctacatggccacacgatgattgtgaactgtgtaagctggaatcctgcaaggccccacatgctggcttctgctagcgacgaccgcacggttcgaatatgggtagggcgcaaaaatgcaacaaagtaaacgctgttgaagtgtgaagttttgtatgtctgtgtaaatagttgtacatctggactgcatccacaaacctgtttgggacaatgctctgttcttcacccctgatgaatatgtcgtcgtagctatttgttcagaaataaacctgcaacagccataggtagccggtgctgctgtgtccagatgtgtgcctggctaaccggtgagttttgacatgtgtacaggacaaagatgcatcagaactttgtacatcttgttagtatatgccttggacactcgaagtgctgaaatatgccttctgttgctgtggatctagtgttcgtgtccttttatctttttcgcttggttcatgtgctatcttgctttttgtttagaataccccataacttctttctgatgtccttttcaggtgactttgcaacctttggcatggtcaacaaatatgtataagatttgtaacagcattataattggctagaatcgtgcactagcaaactgtccagcacctcttagcacattttatgtacttgtagttttgctagacagttttggggtgatatcttttcacccttgagagag

SEQ ID NO: 95123 - DNA, 86 bp, Zea Mays
taatgcaaaagcatgttgctaaggaagatagtaacaattttcagagaacaggtcagctacagtactcattggccattgccaaatac

SEQ ID NO: 95124 - DNA, 795 bp, Zea Mays
cagaaaagaagttatctttctctctctctgctcgactttcctctgcagccggcccatatgaaggacaccacgtgaactcccccgacgactcagtgcgtcttcgccgccgttttcgtcgtcgcagattaaggttcccctcctctaacacgccggcgcttccccccctgccaccgcgacactcagtcgtcgccgccgtcggctctgctgccgtggccaagcgcgttggcagcgaggattgctttaggtcaatgggcgcatcatcaggaagcgtatccatgtccgtgtggagcatgtgcagccgtcccgctgcacagaagagttccgcctgaggaaggcgaagaatgaccagctgaaggcggatgccaaaaagcgcggcgaggttatcagcaccaagaggcagccattgggtcccaagcccggcttcatggtcgagggcaccaccattgagaccgtaactcccatcccatatgatgtggtcaatgatctcaagggtggatactaggttgtttggtccatctacctgcagtacccagttctacatctgtgttactctagtgcgtgcaactttgctcactctgagcagtagtatgaacctgttgtctgttcctgttgaaagatttcccattttaggtgcaaacctgagtttctccgaacgcgttataccctgaccttgcttctgagaacgaagatgtgctatttttgcattttgttgtttcgaccacacactggaaactgggaatgtgtctaaggccccctttggcagggcttatatctagcggcttctcctttggcttc

SEQ ID NO: 95125 - DNA, 905 bp, Zea Mays
ccaaggccccaatccattcccacgccacctataaaaagtcgtaagcacaccgaaaccacagcaaaccctagcgccacccacccacccacccactcgcttcagccgcctccgccgcgcgtacaagcaggtggagacaggatgccggctggccacggcctgcgctcgcggacgcgcgacctcttcgcgcgccccttccgcaagaagggctacatcccgctcaccacctacctccgcacctacaagatcggcgattacgtcgatgtcaaggtgaacggcgccgtccacaaggggatgccgcacaagttctaccacggccgcaccggtcgcgtctggaacgtcaccaagcgcgccatcggcgtcgaggtcaacaagcaggtcaatgggcgcatcatcaggaagcgtatccatgtccgtgtggagcatgtgcagccgtcccgctgcacagaagagttccgcctgaggaaggcgaagaatgaccagctgaaggcggatgccaaaaagcgcggcgaggttatcagcaccaagaggcagccattgggtcccaagcccggcttcatggtcgagggcaccaccattgagaccgtaactcccatcccatatgatgtggtcaatgatctcaagggtggatactaggttgtttggtccatctacctgcagtacccagttctacatctgtgttactctagtgcgtgcaactttgctcactctgagcagtagtatgaacctgttgtctgttcctgttgaaagatttcccattttaggtgcaaacctgagtttctccgaacgcgttataccctgaccttgcttctgagaacgaagatgtgctatttttgcattttgttgtttcgaccacacactggaaactgggaatgtgtctaaggccccctttggcagggcttatatct

SEQ ID NO: 95126 - DNA, 1557 bp, Zea Mays
agcaaaccctagcgccacccacccacccacccactcgcttcagccgcctccgccgcgcgtacaagcaggtggagacaggatgccggctggccacggcctgcgctcgcggacgcgcgacctcttcgcgcgccccttccgcaagaagggctacatcccgctcaccacctacctccgcacctacaagatcggcgattacgtcgatgtcaaggtgaacggcgccgtccacaaggggatgccgcacaagttctaccacggccgcaccggtcgcgtctggaacgtcaccaagcgcgccatcggcgtcgaggtcaacaagcaggtagacaacgcggatccctttttcgcagaggcaattacgattagtgcgctggcgcatcttctgatcgtttcattctaggaaatgtaacgctttaatatagaatggcggctatttgctgacgtgttgtttgatttggatttatagaatttgtacaaacccaggtggcgttttgtttttgtagttgcaggagtggggaatctgagccatttctttgtatcatctgatctggtagtgatgtagacgttgtaatttggttgattctaggtccataataattgggttcgtgttactacactggcctaatacgattctagtttaactaaatgtgcgaggtttccagaggcctgtttagctgtattcatgtaatattcggtttaggggtttacttgctctgcagcaagtacgtttggcacttgaatgtgatggtagacactgtcacactgagttccttgccttgtagtatgatgaggggttcttttccttttatactggggcaagggattaacgtgcctcttaaatcttgttatgaactcatacctgtttcaaaaacggtttgcaatgttattgtttattgcttgacgcagaagtgtaaatgtttctgataaaccaatatctacaatacttagacgtcttattcaattaaatctgcatctgtgcaggatgtgattgtgtctagctttgttgttcgggacatatatgttttgtgcagtagtgctatcaatggtaatggcttaacctatgttcaagttctgattcggataaattattatgttttcaggtcaatgggcgcatcatcaggaagcgtatccatgtccgtgtggagcatgtgcagccgtcccgctgcacagaagagttccgcctgaggaaggcgaagaatgaccagctgaaggcggatgccaaaaagcgcggcgaggttatcagcaccaagaggcagccattgggtcccaagcccggcttcatggtcgagggcaccaccattgagaccgtaactcccatcccatatgatgtggtcaatgatctcaagggtggatactaggttgtttggtccatctacctgcagtacccagttctacatctgtgttactctagtgcgtgcaactttgctcactctgagcagtagtatgaacctgttgtctgttcctgttgaaagatttcccattttaggtgcaaacctgagtttctccgaacgcgttataccctgaccttgcttctgagaacgaagatgtgctatttttgcattt

SEQ ID NO: 95127 - DNA, 2592 bp, Zea Mays
cagaaaagaagttatctttctctctctctgctcgactttcctctgcagccggcccatatgaaggacaccacgtgaactcccccgacgactcagtgcgtcttcgccgccgttttcgtcgtcgcagattaaggttcccctcctctaacacgccggcgcttccccccctgccaccgcgacactcagtcgtcgccgccgtcggctctgctgccgtggccaagcgcgttggcagcgaggattgctttagcttgcaggcactttccccacccccaccgccgctgatttcgccgttatgcggtgaagcccttcgcgttgacgggctaatcggctgcctgatttctattatgatggggtaggtgtgctcctggttcgcgtctcggaggaccctcgccgtttatcgatccagtgatgtggagctcacctttctccggctagcgttgtgtcaggggagagtgcttgttgatccctcgggagctggttgagttgtctttcgtttgtgggaaatctgtgcggcagcgtaaggttgctgattcggatggcaccggtgggggatcatattgtggacatcagctccgatgaggaggacttgttcatcggcacttccctaaatatactcctagaacccctcgaccccgttaaatgggtggatgaggtttgcggtgtggctgattatgtggccggggaggatatcgatgacctcatgattatgagtgagatatctgctccaccggtgttgcagaagatagccaagcctgatgagctcgtggttatgggtgagttgtcctcaccacctgccccgcagcagaaggccagtgctaatggtgggtgccatgaggatgatgatgattgtgtagttctagatggtgaccctgataaggcgattacagttgctgaagaggggagcttgggagatggcagttcggatgaattgcagatagtggcggagaaaggcccggtagcatgcagggacttccctcattcacggcattcatgctcaaacttgcctttcagcactacttctcacgtaaagcactgttccatgtgccactgttttgtatgtgacgcaccagctccttgcaaatattggggtaacagtacatcagctgatgatcattgccatgctacagacaaggattcaaaatggacatgcatgaggcaaatattcaagcaaaaattgttgccagcatcttttctagaaaaacaccagaacggcgtttactcaacaatgacaccacctagacagcaacatatgcagtgtcatgtttcagtcccacaatcgccttcggtgtcacatgggagtcacccttctcttaccatccaaagtcctcttcttaatgaagggagccaaaaccaacaaagacatccctcagtgagagtctcactgagtgtaggggcaacagtcagttctccaagagctggaagaggtactggcaatgctcacattgctcaaagtactcattcacatgcaatattcaagagagcaggggctgttgctccagtctttgcaacaagaaatgctagccaattctgtccttctgctccagatgatctccttttgcagcaggcattgtctcacgcttctcagcctgttcaagttgcgcctacaaccaatgctttcactggcgcttctcaaaataaccattttcagagatctttcagtgcgccgatagcacctcaggtgcaacaaggtcaacctgcggcacgttaccaggtcgccataaatggaatgcacgccgtagggccgcaacttgcacggtccacctcacttacaactcagagaacacaatgcctcccagaaccagcaataatagatgtcagcacaacaagctggcaagacatacttgctactgtggcatctaatctgggggtagcagattacaacacgagcacccctgagtctcagcatgtaacggttgactctctagccatgcatcccactgcaaaccatgggttggatcttcagcatgagcccattgcagaatcagagaacctgacatattcgcttctgcatgattcatccaatggcgcagcaggtggcagtgttcaggcagatggtcctatgcaaacaccagagaatttggaccatctgattggccagagcaatcctgttccaaatgaagctcacctggatgactttgcgggtgcccccgctaatcaattaccaatagaagaagaagaagctcatcagcctgagatgtcaaggctggagcctacaaacattctgttcgagttcgattgggtttaagcggtgacctgcctggctgcctcatcagcatatccctaacccatgaataataaatcagtgccattgacgtgcccctttctaggtctcctgcataggagacatgtctggtgtccccttgtacagtaattaggctatgtactagaagagtttcgccgtcatgttgtttgttatcatagtggtcagatgttgtggctcttcgggctttagatgttaacaggtctgaagtagaagggtgttgggtgggtgccaagatgcttgtctaaccactggtctacaatttgacaatgtaaggtattgagatacagatgcttgggttggataccaaatttctttactgctggatcattttt

SEQ ID NO: 95128 - DNA, 2279 bp, Zea Mays
ctgcaagtcgagagtcgagaccgccatcgaagcaccggcgccaatgaagacttgaagagggctaaaacgaaaaagatgccaggatgacaaaatttcccactccactcgaattaaaaccctagcggcaaaaccttcgctctgcgccgccgtcgcctgctcccgtcccgccaccacatccgcccaggagctcgccgtcggggaggctgctcgaggagccgcgctgtctctcccgcgccgcgaccttcgccctcgccgccgccatgatctgcgcgatctccggtgaggtgccggacgagccggtggtgtcgaagaagtcggggcttctcttcgagcggcggctcatcgagcgctacattgaggaccatggcaagtgccccatcaccaaggatgagcttactatggatgatatcgtgccggtcaataccaacaaggtcgtgaagcccaggcctttgcaggctgcaagcattccaggactccttgggatttttcagaacgagtgggatgctctcatgctttctaattttgctttggagcagcagctacacacagcaagacaagaacttagtcatgcactctaccagcatgacgctgcctgccgtgttatagccaggttgaagaaggaaagagatgaggctagagcacttttggctcaagctgagagacagattccagcatcagttgcaggagctgctcctgcagctgttgtttccaatggaaaaagagcaatggaagatgaaattggccctgacggaaagaagattcgtcctggtatcaaccctgtcatgattgatgaacttacagagtgtaataccatgctttcagcacagcgtaagaaaagacaggttcctccaactctggcaccattagatgcactcgagagatacactcaaatctccagccatccccttcataagacaaacaaaccaggcattttgtccatggatgttcatccttcaaaggatgttgttgcaactgggggtatcgatacaaatgcagtaatctttgatcggtcatctggtcaaatcttgtgcacgcttactggtcactcaaagaagataaccactttaaagtttgttccacgggatcaactctttgtaactggatcagcagataagactgttcgcatttggcaagagaacgagaatggaaactataactgcgtccatacattgaaagatcatactgctgaggttgaagctgttacagtacatgcgactcagaagtattttgtgagtgcttccaaggataattcgtggtgcttctatgatatttcaacaggatcttgcctgacacaggttggcgaggcttcaggacaagagggatatacatccgcgtctttccatccagatggtcttatccttggaacaggaactactgatgctgttgttaaaatttgggatgtgaagactcagtcgaatgtcgcgaagtttgaggggcatgtaggaccagtcactgctatgtccttctctgaaaatggttacttcctagcgactgctgctcatgatggtgtcaagctttgggatcttcggaaattaagaaattttaggaccttctctccctatgattcagatacgccaacaaatactgtggaatttgattttagtggaaactatcttgccattggtggttcagatataagggtctaccaagtagctaatgttaaggccgaatggaatctcatcaagacattaccagatttatctggaacagggaaagtaacttcggtaaagttcggagcagatgctaagtacatagccgtaggttctatggaccgcaatctacggatatttggcctccctggagacgaccaaatggaggaatcaaccacagcggcagagtgaggaaaatccatggtacctaatttcctcctcctggtatactccgcaatatgttctgatgatgggtagactgagtgcaaatggatacatcacgagagaagggtcctcgcggcgatgaactggcttgagcttcggtcggtgtaaacaagctgtgacattattgtattgtaggcctcactaattcgtctgatggggatacaatttgttttgatgagtacgagtgtacgacgctaaacagccaaagttctatgcatagattccagtgattcaaaacaagctactacagtactactacttgctagtcaacttttacataggccaatggacgcactggtgtcggagcgtttagtctttgcccctgcgagtgtgcagtgcgcactgtgatctgggaagcttggttgttctctagttggtgcaatttcttttgtttccgagtttctt

SEQ ID NO: 95129 - DNA, 438 bp, Zea Mays
atggccgtatacctaccggtgtccgtccgtctagaccaaattgatggtcgtatacctacaggagaacaagaacaggctccctatatgtacacggattatcttgggggggcgggggggactagattccttggtgaacatacagagcagtgcgtcgaactagtactgaaatctgaaactgcactgggggactcaccttgctacggcgcggcgacggacggcggagacgagattgcgggagtggaggggagggaagggggaaagatgcggcgatgcggggacgatgaggagaagaggctcctcttttataccataccaggcgatgcggggacgatgcgggagtggaggcgcggggcgcgcgagctggcggccggcggcgtttgcgagctggtgggaagcgggaaaagagaggaagagagacgtgcggggttagggatttag

SEQ ID NO: 95130 - DNA, 361 bp, Zea Mays
atccaaacttgtgtttggttgaatttgggtccctttgcaatctatcactttatctgctgtgtagatgcctgaagcaatccatcacggatctgactgccaatatatgcaacagcaccaggatgggaggaaaactgcagaagatttgcatgctgcaacaatttatttcatgctgtcaagatactgagtgagtataactaaatccatggcatccttagctgaagtcccaggcacgttgctactaaagccaagtacactatctcttagcccatcaactatggcatgttgatgccgtgtgccgtgcaatgcctagaccagagaggtacttggcttcaatgttatctgatcggctaaacaaatctaa

SEQ ID NO: 95131 - DNA, 854 bp, Zea Mays
agaccattcccaacgaaattgtaaccgtgttgcaacttgcaaccggcctatctccttgcccgcgaagccatggcggatgcccccgcgatggcctcatcaccaccggcgtccgctgacgacggcggtccatcctcgccttccgtagccgtccctcgtgtacttccctccagattgctcctagacaccccgcctccttccagcggtagggcgcggggcccgcggggcggcagtgcggctgcggcgtcggggcgcggcggcagtgcggctgcggcgtcgaggcgcggcgggcgaggcggaggcacgaggagggagtccactttgccggctgcggcttcaaacggtacaggagggaggaggccggagcgggactggctcgccgaggcggttatgatgatcgggcggccagtcgaggacgcgggactggcatccgccgacattcttcagctggcgatggcgaagggccctatgttcgagtggctgagctactggccggaggaggggtacctcaaggaagatcatccctactgacgcacggtgcttttcctctgctcgggtacggcaaaatcgttgatggcttcttggggtattgcaaaggcagcagcttttatcggcgtggcttgttcagtagtactagtagttaactagttatcatttttacctaattagttcagtcgaagcctccagggacgtttgtgtcactactcactagattgtatgggaagaaaaatgcgcagttccaactactctgcatgcccagaatttgcaatttgactagtttggcgaacggatccttagtactgtatgaagcttgtaatgaaaaaaaatgggcggaacatgagtcctaatctttgcaa

SEQ ID NO: 95132 - DNA, 405 bp, Zea Mays
ccgctgggtacactctgttcttcgtatttatgcatgtttcattgttgtttactgcttatgcgagtagttatacacacatgcacatacatgtcatcacatatatcgcactgattatctggattaaattaaaactaaaaatgcctaactctctaacagtcattgtgttgttcgttttcatagatcatcttatgcaattatttgtgtgttgtcggcggcgcgctatggctaccggcgaagaactacctgatccccatggacggagctggtacctaatgcctgacaaacgcgctgataaacacagtcatgttaatcattgggaacgtgcagcagcagggcaccggtgtcagctttgacaccgccaagggcgccatcgtcttcacccccaacaagtgttagcctgcctct

SEQ ID NO: 95133 - DNA, 648 bp, Zea Mays
ctagcagtttcctaaaatttgatggtggtattttaattcgtttaggctgatgcctgtagggagctttacaattagctgcatgtaactaggttcttagataattgttggatgtcgaccacataccctgtaatgttccttttagtgcataccaaggccataaggatttttgttctctttagtcacttagtgacacaaaaagtggtaccataaaatttatctcatagtattaaaatcctcgctggaaggttttcaattttttagccctcagtgttctttctatgctattttatttctcacaactaaaaaattattttggaaccttgctgttagtgccttttcttatcttgtcaatgtgtccttccatcttgtattagtttgctttcgtttttacattaactagaacacatgctctggttgtggtttcctctttttatgctacaggcttggttagctaccatatcactcgctatctacaaggcttttgatcatctcggcatgttaaaaaagaagaaatgcttctagttgtaaaggaaaggaaggcaaatgtaatgctaatgagagtgatttagtaatttacgagatactgagctgatattgatgtcattgttggattaatgtggggcttggcccaaattaatactcaataat

SEQ ID NO: 95134 - DNA, 752 bp, Zea Mays
ccgaccgcatcagcaacctgtgcttcgcccccacgaccagtaggtctgcccgcgttagcaacccgtgctccgcccccacgactagcaggccaggcatgaatctcgcccccacgcctggctatggcgcccatgctcctcccccacgcccagcggttccgtgaagtccacccccaccttccctgcactctggttccacgaagtccactgcgcgccgtctttggaaggtccacccccaggcaaaaaaacgccatttacatgaagaatcgtcaccaccctgctggagcgtcatcgcgtgggcctggcgttgtggccgttggcggtggaactagacgcgtcacgggtgccgccgccgacgcgcggtgaccgctggtgcgccacggcaccggtgcggccagacccggacccaccgcagcgcgtctggctcttcatcgcctccacccgctccggcgtctccaccacctccttcatcgagggccggctgtggagctcgccggtcaggcagccgagcgtcagttgcgtgaacacctgcctggagttgtactggcccttgaaccacgggtccatgagccgcgccagcctccgacggtctgccaggtacggcttcgcccagtcagccaggctcagctgcccgctcggccggttcgagtccagtgcccgctgccccaacagcatctccagcatcaccacgccgacatggtggtttctttcacgaaagtgacaatgcacactcctggaatggccgttcatgattc

SEQ ID NO: 95135 - DNA, 179 bp, Zea Mays
gtgggtctactttgatgctttttgtttggtgacattttagttgcattgaaaggtttatcacagaaaatgaaattgaatgctttgtatctattgatcgtaaactatattacaaccgttcaaggcaacatatcatcaactatacacatattcagcaagtgttgtacatatttcacttaacc

SEQ ID NO: 95136 - DNA, 1144 bp, Zea Mays
atgccggtaatggtagaggaagagcaacgattggatatgaggagtgccactcacaccacatttgcgatgaggagggggcgagatcgagatgggattaaagggagggggcggaccttggcggcgatcttgggcgggagggcccggtgtgggcgtccacaattggatggtgcacggttctgccaactccggacgcgctcatccccaccccgactgtcgcgccgcgaatcgcggccgccgcatcctccaatcaataccgcggccgccgtcttctctccccccgcgtggtggacaatcgtcccattccaaccctcctccctcacctgcccgcctgccagtgtccctttcttctccccgtgtggcggctcgcacccggcggcggacgtggactgcgtgacgtggagcaacgaccccggcctgctctgctacgcctgcgcctcatgcaaggccgacttgctgggcggcctgcgcgagcagtggcgcagggccaccgtcgcgctcatcttcgtctacgtcgtcggctgcagcgcattccgcaacgcgcagaccgaggacctcttccgccgctacaaatggggaaattattaacgatctctcccactgatctactgagtacgtacgtacacgccgacttggatcggttcacaagactgtaaggcccagctgaagctttcacctccagacagatagtccctacaggacagagggacttggacaccttccattagttgcagcatcaactccccaatctgttgttagtgttgtctaagacagcataaaagactgcttcgtctcctccccctctgtatacctctctggctcagggactggtcccattgatgattcgaattattgaaggcttgcattgtgatcccaaaacaaattcttgaagccacttcttggactgcgaatggatggagtagatgactccaggttttctgcttaatcaattgcttgcatgtcgcgatggtcattgtttcttccaggatgtctcattctggtgtgtaaagtaatgtgcagctccttctacatcagcgcaatgtaaacatagaatgctatatgttttttattaacccactttcgtctctgaactagatgataagttgaactgtacgatgttgttataagttttcaaactctgaaggat

SEQ ID NO: 95137 - DNA, 1011 bp, Zea Mays
cgggagctgtggccttgtgggctaagggtcctggttattgataacaattcttcatatttgtcggttttggaagagctacttatcaagtgcagctacaaagttacgacatataatgacgtcagacaagcaatgtccttcatctatggcaacatacagattgttgacctcataattagcgatgtgttctttccaactgaagacggtttgctcattctgcaagaagttacctcaaagtttgacatccctaccgtgataatgtcttcaaacgctgacacgagcatagtgatgaagtacatcaccagtggggcttccgatttcctgataaagcctgtaagaattgaggagctgaagaacatatggcagcatgtgctccggaagcaaatcggggagaacagaagctgcagcaacagtgctcatcatcaacacctcgatcaggtctcaatatcatatccaccaccagccggcatagctcctgctggtaccacggcaagagaaagagagatgacgacgacggcttaacggggacggtcaacggatatacaggatctcaggaagtctaggctcagctggaccatgcagctgcaccgccagttcattgcagctgtgaattccctgggggaaaaggcagttccaaagaagatattggagacaatgaaggttaaacatttgacaagggaacaagttgcaagccacctgcagaaatacaggcttcacatgagaaaagtgaatcaagcattgcacaatgacgacgacacacctccgtcatcaagccttcccaatgaatcaaacattctccggaccgaattcgacggttctttgaatccaacctattttgatcaagatggatgcacggagtactctttgcccaaggatgacctctcaagtggctcggactgtatgctgggagaacggaacaactactcaccgcaaggtttccaggatttcagatgggattcagacaagcaggcatctgaaacgacatatctatggaatttcgaggcagatgagtga

SEQ ID NO: 95138 - DNA, 707 bp, Zea Mays
acagcctcagcgccgcacacctgttcatggcgttggccgccgcgctactaccagccgagctcgcctggccgagctctctgctcaccatagacgcccagcagctccttttcttccatcgcgcagcaccagcttccctctcccatgccgacacgttctgctctctgttgttcccagtccgtcctggctacgggcgcgcttacctcggacagccatggtgctctgcgccccgagctctctgcgtgtcgcgccgttcctagctccctggcgcgcgcgagttcttccgctagcactgctccctgcgtcgcgcccagctctgttgtcgcgcgagctccaccttccttagccgctgtgcctctctgctggtcggagctctagcatgccgcgcccagccctgctccttgtttttctctgcgacgtggagtcttctccccgcgttcggatctcgcctggtcgccgttgtcgctctgcacgacgttctgtgcacccatttccctgctgttgtgttgaccggagtttcctgctggccagcgtgtcctctcggctcgcttggcctgaattcccatcgcgtcgacgatcttgactgatatcgtcattcgtcgtcgtatcatgcgtgcaacagtcctagatctgtgccgtcctggtcttgttgtcgacatcgttcgccgtggctcaacttgctagttcgtcgttatttcatcgtcgcgtcg

SEQ ID NO: 95139 - DNA, 841 bp, Zea Mays
ccctctatgccggatagttggtccacaaccttacttatatgtttatgtggcaacgccaaattctctactatactatactatactaagatgtttcagtttgctaggttgtctcttgcctgcccgtgctacaattccttactcaaaaggactagagtgctaagctgccttcccggcaccaccactataatgaatggctcaaacaaataggagatgagagagcccttttgatcctttctattctataatataaagataagcttgttcatctatctagagaatgaaaaggaactaatgccactgataagaaatacatagaccgtacgcccacttaccactctaccacttcaattccatgacggacttctccgatacctagcttgagagagatcacaggcatgtggtgaaccataccgagagaaagagcactgaaatgaaccatatcgagcacaggtctcactctacaagtaaagttcgatgagctcttagcggagttgtgcctactatctactaagtgtgtgctagggaaagaaagcaagcagagcagttctcactctgtccggtgaccaagaaagaaagcttcaagaataccgtaaacagatcagagaaacctcataccgaatcgccacgtgaaagcggggttaaggtaaggcaggaaagactgacgccgaaagatatgttttgaagagagctccatcgggttgaagccgaattgcagagaatcaagatcttctacctttgtttgttccatcaatgcccttcggactggcctaagagttgggtccctgtctgtaattatgtggctaggtaacccatttatggcttgtggtctttctgcttatga

SEQ ID NO: 95140 - DNA, 997 bp, Zea Mays
ataaatagaagcttcggcgcactctccattttgcgggacaagtgccgagtcaaagcgatggatatcgcagcaagactcgccataatacctcaggaacagcaggctctagaaaacgataagcttgcattactgcaaagaaagtttagatttccttcaggaccccctgtttctctattccgtcgatccacaactttggatgcccaatgcacaactttggatacacaatcatacacaggatgttcggaggcaaatccgcattcttgaaatgcggaagagggcgctgctggaagaacagcaatcgctcatcgtgaaggctgccctccgcggtgaccgtagatcctgaaaaatagaaaaaagtagttactcgtctatctcaacgtaaatgaacgaagtcacttaagtcttcctactactgctccttcttacttattttcgttttttcaggatctaaagaagaagaggttttcttagcgggcgtgaatccggtagcttctacttctgttctgttgtctcacttatgaggagctggtacttcctgatcaagagtgtagtgagcataagtattgtattgttcagtattttcttttcaggtgtggtgtgtagagatattgcctttatgaataatacttatgtattgcctcttcttcttgtttatgaataatacttatgtattgcctcttcttcttgttgtagaagaatactgatgtattgcaaagacctgttgttgttttatttctttatttcttccttttctcgaatagtagttgttagctttgtctctagcatgttggtttgcttctagcatttagtagaataagttgcattagcaagttcatcatttaatagaagatcaagaaaatgaaagatcaatgagatacctgtccggatagttgggagagtgagctctgcccttaagacaatcagagactgagtgatgccgcggagaatagagatatgtcagttgggtagagaaggattcagaggtatagtaaagtag

SEQ ID NO: 95141 - DNA, 688 bp, Zea Mays
gattttattttttttatagttgtataccacatcattagatgaacgatatgaggcagttgccaattgcactcttgttgcttgtaaaagtgcattcaaatcgagagttttcacgattgggacatagccgagatacgctaaggttgaggcaaggcggaacctcctatactaaaatacgaatacgaatatttcctttgcggaggatattcactgctacggaactacagcatagatctattataaaaagaaagaacttcaaactcttccacttactcctgtttggtttgcttctgttttcagttgaacattcttcttttctttgatttccaatcaacgagtacgggagacaatggctcttctttgctttggcaaaaagagaaggagctcttcttgcccatatgggagtggaagcttcagtgtaagcatttcctcacacttgtcttcgtaggccactttatgttgagcaggaggcgctcgctgttctcgttgaagctgtttatacaggttttggtggcaatccgagtgagattgaacctgcttcttcgactcaagaacactttcttcttttcaataggtaaaagcacaccaccttctcatgacaatcatagtgcttcggtttctgtctgtctaaaggtgttcccagggggtagctgcttttgcatagaatggattttgggccttgcccgcttgc

SEQ ID NO: 95142 - DNA, 882 bp, Zea Mays
gcaagtaccattcccattgattgagtactttagagttttcttcttgatggaagtgtcaaatacttagtaggaagtcccggtgggtaatcaccaaatgttctagtacgagtacatccagttccgggtggtcatctagtatgggacctaagagaagccctttttgaatccttttattaagccattgctaatcccgtaaggcaatccttcaacgttgtagaaaagagttcaatacaaaagcacacaaaggctttggactatgaaaggctacctttatcatgcatgaataaggccgggagattatgtcctcaacaaacctatctactactaaatgacaattaaagggacgccaaccattggaggtgatggtaatggtgaagattcttctctttttccagggtacataaagataagaagaaggcaacgaaaagcacttagaaaattaagaaactgatccactatttgaaacctgtcatccacgttagaaagagagccatgaaaagcatagatcctcaaggaaaggaaaaaacaccacttcgtctatttacgattccaggccgtgctttcttttatttagtaagctcaaccgaagaccggcagcacctgcaaatgaaacatgcatgcctttcgctgcgcgcctttacttgcttcggaaatcaaacaatgcatttcttctcaacataaacatataccggtctttctctctagcctatacttgaccttgcgtacaagcctattatcctatcggtatgcctatttgacccatatgtgctaaaccggtacttgttacttacttctatctattaaacgttaccggtacttagttaccgtgacttaatcatgcttagtactaaaccttactacgtagttcaagctatactgacc

SEQ ID NO: 95143 - DNA, 106 bp, Zea Mays
ggaaaaggcgcgcagcgttctcgatcagatctcttcctgggtttgtctccgcggcttcactagtaaattcttcgtttcattgcttgtctcgtctatgcctgacaag

SEQ ID NO: 95144 - DNA, 452 bp, Zea Mays
ggtctaagtttataacattaaaaaagcaggcattgttattgttaaagtgaaagtgaaatttcacatgggaattttctttctttccttcagaaacagttcagaatgaaagatcttggtgacttgaggtactttatcggtattgaggaatataatccctattgtgggtacatagatcatgagccaacagaagcccttgagttgatttgctcgatttaccgccacatactacttactaaacagactctactttaggggtcgggtctcgatccgagttatttagcgaatgactcaaccaatacatctctacttcgaggtgtaaataaattccactctttatcctcttaatgaaagaatcgaattttctactttgaccttgcgagcacccactcaaaacagggagggcgaactcttatctcttttcttgatgaccgatctctctcagaaccctagac

SEQ ID NO: 95145 - DNA, 155 bp, Zea Mays
cctccttctcttacctactttgactcatatcttcggtatacctcaatacaagacaagcactggaaaggatattcaagaaaaaccgggctatcgccctatctaagcgggtttcccctctcctctacgggagtcctcttttagtctatttcagttcc

SEQ ID NO: 95146 - DNA, 121 bp, Zea Mays
ggttaggttaagggaatatctaggtctgcttacttcttcagctaatgagtctccttcttccaggttccaaagcgtaggccaaggacccggacctcgatccgtcaatagaaatactccaacc

SEQ ID NO: 95147 - DNA, 113 bp, Zea Mays
actgcaggaaaccattcttttcttctgatacgcccactttttttatagctaggtgccgcccgcccgggaccaaggcaggctatagtataggcggattgcccaaccgatcataa

SEQ ID NO: 95148 - DNA, 137 bp, Zea Mays
caataatctaatcaatagttcggtacgcgcgctcaagacgaacatcaccacgctgggccccttcccacttcccctcggatttgcctatcatgtcggaatggaattctttccattaaagaaagtagaataaatatacg

SEQ ID NO: 95149 - DNA, 1123 bp, Zea Mays
tcgagcttttcgtactaccatcgcccgggcatcgctttcttcccactgctttcgtcctgttttattgctcctcctctcaacttattgttcttgtgaataccgtacgtagtagttcttgtgaatatcaatctaggcgtagggcttgcaagattcgcttcgtgccgttgggaaaacactggtatatgcttagcccttctcttccttgaggtttaagggggaaagatatcgtcttctaaactgaggagagttatgtatcgccttagcttatctgctgccttgttttacgaatctgacttcaccctaaagaacaataagaagtcaatgggtttggtttctgaccgcacttctctacaggcatcccacccgtcctcttcctccagcagctcaaggtacgcacaggaaaccacatcttgaaccacggaattagccgtgataggtttcttcttccgctcggtactcatctaccctaatcttcccctcgcagtggattccactaggttcttaacctcttcccaattcttaaactgaaacctgcgatgtctaatccaactcggcacctaaccagcttgtcagcatcgtaagtttgcctcaacattccccctagaaatagaataagaatgtaaatctactttcatttagggatgatactttctttttttttctagaactagaataagtaagtatgctctggagtaaaaggattcgaacctttgcatgccggtaccaaaaaccgatgccttaccacttggctatactccaaacggtcggttcctggggagagggggaagggagaagcagggctcgaagaaaacgagccgtgcaaggacgcggggatatagcaagtaagctgcaaggttttccctttaggaccgactacaacaagctcgcgactctaatagaaactaagggtcagctctctgctctatttgcttgcaatgcgttgcctatcaaagtcggcgaacgcttccaccccctcttgcccttgttacgcaacacgccaacaaagaaccttggttccgttgcgccctgtactgtattccgaggcgaccatttcgcgcggttcgatccatttcccgatccgaaaaatccgataacgtacctatatgagtgggatggatggtaa

SEQ ID NO: 95150 - DNA, 491 bp, Zea Mays
atcggtcaatcacgtctacttgcttgcagacgattctccagggatacgtcccatctgctgcgaccagggcgatgggggaggaggagacccgcgcaggcgacctcccggagccgtgcctggcgcacgccatcgcgctcacctcgccgcgcgacgcctgccgctgcgccgccgtctcccccgccttccgcgccgccgccgactccgactacgtctggggccgcttcgtcccggaggatcaccgccgcgccatcgccctgcatctgcatgacgccggccgggaccgtgggccgaggaaggacgcgtaccttgcgctctgcgacggcggcggcggcggcgtccccgtcgacgtcgacggcgacggctggtgcaggctgtggctggaccaggccagcggcgccaagtgctacgcgctgtcggcgaggaggctcagcctgccgtgggaggacggcgatttctgctggcgttgggcgccccacgcgcggtccaggtcc

SEQ ID NO: 95151 - DNA, 1554 bp, Zea Mays
cgccatcggactgacgtgcgcgcgaccacccacacccatctgctgccgcccaccaatgacgccacgggcaaacaacacgatcgatgccaacgctttataaacatacagaccctgcctggaggtgcagctgcatgacgtccgcacgcctcttcacctgctgctgctccagggaccggccgtctccgacgacgagaatgcgcgcgtcctcctcctcgtccttgctgctgctgttggcggcggcggccgtgggcgtgctgctgcaggccaggccgtcggagtgcgcgcgcgccttcttcgtgttcggcgactcgctggtggacaacggcaacaacaactacctcatgaccacggcgcgcgccgactcgccgccgtacgggatcgactacccgacgcaccgccccaccggccgcttctccaacggcaagaacatccccgacatcatcagtacgcgagcacctcggcgccgagcccacgctgccgtacctgagccccgagctccgcggccagaagctgctggtcggcgccaacttcgcgtcggccggcgtcgggatcctcaacgacaccggcttccagttcgtggacatcatccggatgagccgccagctgcactacttcggcgagtaccagggcaagctaagcgcgctggtgggcgcggcgcgggcgcgccagctcgtgcgccgctcgctcgtgctcatcacgctcggcggcaacgacttcgtcaacaactactacctcgtccccttctccctgcgctcccgccagttcgcgctgccggaatacgtcggctacatcgtctccgagtacaagaagatcctcatccgcctgtacgccatgggttgccgccgcgtgctggtgacgggcacggggcctctggggtgcgcgccggcgatccttgcgcagcgcagccgcaacggcgagtgcgcggcggagctgatgcgcgcggcggcgctcttcaacccgcagctggcgcgcgtcctggaccagctcaacgcgcgctttggcgccggcaccttcatcgcggccaacgccttccgcgtccacttcgacttcgtcagcgacccggccgccttcggcttcgccacggccaaggacgcgtgctgcggacagggcccccacaacggcctgggcctctgcaccccgctctccaacctgtgcgccgaccgcagcaagtacgtcttctgggacgcctaccaccccacggagcgcgccaaccgggtcatcgtcagccagttcatgtcaggctcgctcgactacgtcagccccatgaacctcagcaccgtcttgcaaatggacgccgcatttgactagatcgagtactgactcatcgtcccgagagacccaaccaacaagcctgctgtcgtctacctcgtttcgttttatatctctgtgactgccgtgcgtgtgtctgtgtacgatcacataaacaacatcaacatgtatttatatttatagtgagtttgagtactgttgtccaagtttctcacatatatattgcttagtttcttacctcccttataaattcaaaattgaataatctcacacctattattgcgg

SEQ ID NO: 95152 - DNA, 1637 bp, Zea Mays
gcaggaagaacgtgcaagctagctagagcatgcagcagctttggaggtttatttatgaatgaagcgcgcgtgcatctaagattgtggctcgattaattccattccatcccgccatcggactgacgtgcgcgcgaccacccacacccatctgctgccgcccaccaatgacgccacgggcaaacaacacgatcgatgccaacgctttataaacatacagaccctgcctggaggtgcagctgcatgacgtccgcacgcctcttcacctgctgctgctccagggaccggccgtctccgacgacgagaatgcgcgcgtcctcctcctcgtccttgctgctgctgttggcggcggcggccgtgggcgtgctgctgcaggccaggccgtcggagtgcgcgcgcgccttcttcgtgttcggcgactcgctggtggacaacggcaacaacaactacctcatgaccacggcgcgcgccgactcgccgccgtacgggatcgactacccgacgcaccgccccaccggccgcttctccaacggcaagaacatccccgacatcatcagcgagcacctcggcgccgagcccacgctgccgtacctgagccccgagctccgcggccagaagctgctggtcggcgccaacttcgcgtcggccggcgtcgggatcctcaacgacaccggcttccagttcgtggacatcatccggatgagccgccagctgcactacttcggcgagtaccagggcaagctaagcgcgctggtgggcgcggcgcgggcgcgccagctcgtgcgccgctcgctcgtgctcatcacgctcggcggcaacgacttcgtcaacaactactacctcgtccccttctccctgcgctcccgccagttcgcgctgccggaatacgtcggctacatcgtctccgagtacaagaagatcctcatccgcctgtacgccatgggttgccgccgcgtgctggtgacgggcacggggcctctggggtgcgcgccggcgatccttgcgcagcgcagccgcaacggcgagtgcgcggcggagctgatgcgcgcggcggcgctcttcaacccgcagctggcgcgcgtcctggaccagctcaacgcgcgctttggcgccggcaccttcatcgcggccaacgccttccgcgtccacttcgacttcgtcagcgacccggccgccttcggcttcgccacggccaaggacgcgtgctgcggacagggcccccacaacggcctgggcctctgcaccccgctctccaacctgtgcgccgaccgcagcaagtacgtcttctgggacgcctaccaccccacggagcgcgccaaccgggtcatcgtcagccagttcatgtcaggctcgctcgactacgtcagccccatgaacctcagcaccgtcttgcaaatggacgccgcatttgactagatcgagtactgactcatcgtcccgagagacccaaccaacaagcctgctgtcgtctacctcgtttcgttttatatctctgtgactgccgtgcgtgtgtctgtgtacgatcacataaacaacatcaacatgtatttatatttatagtgagtttgagtactgttgtccaagtttctcacatatatattgcttagtttcttacctcccttataaattcaaaattgaat

SEQ ID NO: 95153 - DNA, 2409 bp, Zea Mays
gccgcagcccagaaatatcaaagcccactttgaagacggcagcagccggagcgcggcagcgcctgtgctggctgccgcggccgcaccccgccgcaccctgcgaggcgatcaacaaccagcaaaaccctaaaccctagtggatgtttctagagccgccgtgcaccctcattcgtctcgcctgcactgtttctaaaatcaacccgtcccccacctcctcgccgcctcgcatcctttccccctccgcaagaaagaaagcgaagcaactctccgccgcctccattcctccacagcccacaccaaccaaacctctcgccgacaacagcctcggtccccgcgccaccatccgcaatcatgtaccgcgcggccgctagcctcgcctccaaggcgcggcaagccgggagcagctccgccgctcgccaggttggaagcaggcttgcctggagcaggaactatgctgccaaggacatcaagtttggtgttgaggcccgtgctctgatgttgaggggtgttgaggagttggcagacgctgtcaaagtgacaatgggtcctaaggggcgcaatgtggttattgagcaaagcttcggtgcaccgaaagtcacaaaggatggtgtgactgttgcgaagagcattgaatttaaggatagagtaaagaatgttggtgcgagccttgtgaaacaggttgctaatgcaactaatgacactgctggtgatggtaccacatgtgctactgttttgacaaaagcaatatttactgaggggtgcaaatctgttgcggctggaatgaatgcaatggatttaaggcgtggaatctcaatggctgttgatgctgttgtgaccaatctgaagggcatggccagaatgattagcacttcagaagaaattgcacaggtgggtacaatatcagcaaatggagaaagggaaattggtgagcttattgccaaggctatggagaaggttggcaaagagggtgtgatcactattgcggatggcaacaccctttataatgagcttgaagttgtggagggtatgaaacttgacagaggttacatctctccgtacttcattaccaactcaaaagcccagaaatgtgaactggaagacccattgatcttaattcatgacaagaaagtgacaaatatgcatgctgtggttaaggttttagaaatggctctaaagaaacaaaggcctctactgattgttgcagaagatgtggaaagtgaagcattaggtactctgattattaacaagcttcgtgcaggcatcaaggtctgtgctgtcaaagctcctggttttggggaaaacaggaaggcaaacttacaggacctcgctatccttaccggaggagaggtaataactgaagagctaggaatgaaccttgagaatgttgagcctcacatgctgggttcatgcaaaaaggtgactgtctctaaggatgacactgttattcttgatggcgctggagacaaaaagtctattgaagagagggcagaccagattagatcagcagttgagaacagcacttcagattatgacaaggaaaagctccaggaacggttggcaaagctctctggaggtgttgctgttctgaagattggaggagccagcgaagcagaagttggtgagaagaaggatagagtgacagatgcactgaatgctactaaagctgctgttgaagagggcattgtaccaggtggtggtgttgctcttctctatgcatcgaaggagctcgataagttgcagacagcaaattttgatcagaagattggtgtgcaaatcattcagaatgctttgaagacacctgtacacaccattgcctccaatgctggggtggagggagcagtagttgtgggcaagcttttggagcaaggaaacactgaccttggttatgatgctgctaaagacgaatacgttgacatggtgaaggctggtatcattgatccgctaaaggtcatcagaactgcattggtggatgctgctagtgtgtcgtccctgatgaccaccacggaatccataattgtagagatccccaaggaagaggcaccggctccagcaatgggtggcatgggtggaatggattactaagtgtcaagcacacccacgatacaacaacatcaaagcagagatgacgaggtggttgtcaggaggatacaattttgaggctgcggacgtaggacctcaatatctccaagcaatagtggggggataataaacatgagcagtagttgtttgagatctgaagctgtagatcaagattggattctgacaccttgtgctgaaccaagtgtagtctgattattacacattttttggctgagtaaaatcggattgccgttctgttttgccagtgtcgcgactgtgcttgtgggcttgctttgcttttgataatcatagctttctgcattctgatgt

SEQ ID NO: 95154 - DNA, 122 bp, Zea Mays
ctggtggaatggtgtgggtgcgttgtcttagggtgctttgggtttggcttctgggagttgcttttgcttcaaaaagtcaaaagctgattaaagtgatagaaacaagaactttcggattttaa

SEQ ID NO: 95155 - DNA, 319 bp, Zea Mays
ggtttcctgaagatccaattgaagcctttaaggttatgcgggaggagaggatgttcgatgtatcagacatgtatactactgcagatgcctggggatggacgtgggaaagagaaataaagaacaagatgccacgtaagtggtcacaagaatgggaggttgagttggctatcaagataatgcacaaggtaatagaactgggtggtactccgacaattggtgattgtgccattatattgcgagctgctatgagagcaccactcccatctgcttttataccaatattgcaaacaacacacagtctaggttataagtttggaag

SEQ ID NO: 95156 - DNA, 615 bp, Zea Mays
actgtatggttaatgaatcaatcaggcattttcgtgctttacaaagaatccctggaggaacagaagtcctttacaatgaaggaaattgtggtgacccactttctctctatctacgatcattgtgcctcgatggaaggcctgttgagttgcttgaggctttagaagcaatggctaatgataaccaaagtattgcacctcgagcaatgatcttaaacagaaaatatcgcacattggtgagctcctggatagaaccattacaagaagaagctgatgttggttttgaaattgattatgtggccagatatattgaagaaggaggtcttacaggagagcgcaaacgttgggtgcctcgcagaggaaaaactcctttggatccagatgaatttggatttgcctattcaaatccgatagaaacatcctttaaacagcgatgctttgaggaattgaagttatatcatcgaaaactcctaattacgttgagaaatgaaggccctggtattttgggtgatgtctctgaagaagatgtacgcagagttattgaaaggctaaaaaagttagttgtagggccaaagaaaaatgttgttaagcccaaggcggcaagcaaaatggtagtat

SEQ ID NO: 95157 - DNA, 984 bp, Zea Mays
atggccaccccctccacctccgctccgtcgccgtcgccgtcctccgccttcccactcaccaccaccacacgcttcccccgctcatgctcctgccccgtgcgagcctccgcgctcgccgagcggcggcgcacgcggcggcgccgggcgcccgatggtgggggcgccggtggggaccgctcggcggccgccggggcggtggagaagggcctgcgcctggtcttcctcgagcagctcgcggagcgcgcgagggctgccgacgccacgggcgtggccgacaccatctacgacatggtcgccgcggggctttcgcccgggccgcgctccttccacggcctcgtcgccgcgcatgtcctcgctggcaacgctgaaggcgccatgcaatctcttagaagggaactcagttctggtgtgcgccctctacatgaaacttttgtggctctggtccgtgtttttgccaagaagggtctttctaccaggggcatggagatccttgctgccatggagagatataagtatgatattcgcaaggcctggctaattcttgtagaggaactagtgaagaatcattatctcgaggatgccaatacggtatttctgaaaggggcaaaaggcggtctacgaggaactgatgatatttatgatcttctgattgaagaagattgcaaagctggagatcactccaatgctttgacagttgcttaccaaatggaggcttatggaagaatggcaaccacattccattttaattgccttctcagcgtgcaggctacttgtggaattcctgaagttgcctttgcaacatttgaaaacatggaatatggaggtgaagattacatgaaacctgatacagagtcttataactgggttatacaagcatttactagagctacgtcctatgacagggcagcggatgtcgcagaattactcgggatgatggtggaagatcacaaacgcattcaacctaatgcaagaacttatgcgtaa

SEQ ID NO: 95158 - DNA, 449 bp, Zea Mays
gtttctctaagtttggttcgcaggtggagaccaccgccactcttgttgatctcgtgtgcatcgttcaagcgcaaagcgaatttgcctaccacatcaagttctaccccgatctacaacagtcattgctcttcagcgatagaagaacggctcggggtgacaatcaccatcatcatcctgcaacttgtctttctcaagtttgaccgcaaaatattgcttctaattgattctccatctaggatctgggacatcaacactattagttaccttgtcacgattatatgtttccttgtcacgagcaattgcgagaagtaaaggtacttacagcaagagaaatgaatgcttctcaaatgtaacatacaaagaatattgtgtacaaagaagttcacttcttagtctttgtatttgtgatatacacattgtagtataatttgatttgttccagtttagat

SEQ ID NO: 95159 - DNA, 808 bp, Zea Mays
ttgtggttgctccatctatcacttggttcactgatgttatcacataaccttgaagatatctcggcttcgtgagggtcttggtgtcgctactaataatgttgctgagtatcgaggcctgatcttaggactgaaatatgcgattcggcatggattcaagagaattaaagtacatggggactctcaacttgtctgcaatcaggtgaatggtgtttggcaaacgaagcagccgaatatgatggagctgtgcactgaagcgagaaagctaaaagagaacttccattcctttgagatcatccatgttcgacgggagtggaatgctgaggcggatcgtcaggcgaacatcggtatcacgcttgcaagtggcgccgtgtttgaggagcgtggtgacatctgatacatagctagcaacgtatgtatttaactaactagcttgacctttgacttgcacctttgtcgagcttctatgctgctctgcagcagccatcaggagctgaggtgatggcctgccgtctagtaggcactatatccaattactttacactagttggacctatttcaccatcaagctgctacggaagcctgatttctgctatggggcctcagtttgatgtgaaactgtgctttggaagcttgatgttgctcgataagttgatctatgaatggagaattttaatttgtcagctagcctttagatcgctatttagattttggatttgaacactctttgaactagcatccttaggctatcttcaacaccttactcataatcatactcatattcaaactttattctgtatagtggaaaaca

SEQ ID NO: 95160 - DNA, 1746 bp, Zea Mays
atgaagcccaccaccaccttcgaattcgaagcaaacctccagaaccagaaaaatgccggcgagggcagtgacaatcccgacggcggtacctgggtggtgctccagccgtcccggatagtctacatcgtcatgatctccaccgccttctgggcctttgtcttatactactacatgcaaaatggcgacggcggcgtggcgtccgtcctgttcaagccgtctgcgttctcgctccccctgctgcccagcatcaccggggcccagagcccgcgacccgtgcaacccgagcagaagcacgccggaccgggacaggcgcccccgccgccggtgctggccgatcgctgccacgggcggtacgtctacatgtacgaccttccgccgcgcttcaacgacgacctcgtccgcaactgcaggaacctccagatctggatggatatgtgcccgtacgtggtcaactgcggcatgggcccggcgatgggcgacgaggggggcgccttctccggccgcggctggttcgccaccgaccagttctcgctcgacatcatcttccacggccggatgaagcgctacgactgcctcaccgacgacccgtcccgcgccgccgccgtgtacgtgccgttctacgccagcctggacggcgggcggtaccagtggaacagcacgtcgatccgggacgcgctcggcctggacctcgtcgactggctggcgcggcggccggagtggcgcgccatgggcggccgcgaccacttcttggtggctggccggaccgcggtggacttcggccggaactccgacctcgaccacgagtggggcaccaagctcctcaacttcccggccgtcgagaacatgacggcgctggtcctggagaccaaccagtggaagcccaagaagcggcgcaatttggctgtcccctacccgacgtacttccaccccgagtcggcggccgacgtggtcgcctggcaggagaaggtgcgcaacaccgagcgcaactggctcttctccttcgccggcgggccgcgcccagggaacaccgagaccgtccgcgccgacatcatccagcagtgcgccgcgtccacccgctgcagactcttccactgcggcgccggccctgacgccggcgccaactgcagctcgccaggcggcgtcatgcgcgtgttcgagagctcggtcttctgcctccagccgcgcggggacacgctgacgcggcggtccacgttcgacaccatgctggccggctgcatccccgtcttcttccacccgggctcagcgtacaggcagtacacggcccacctccccaaggacccaaatagctactctgtgctcatcatgcacaccgatgtcaccggccggaacgtcagcatcgaggacacgctgagcaacatctcgccggcggcggtgaaagccatgcgcgaggaggtcatccggctcatcccgaggttggtttacgctgacccgagatcgaggcgtgtcgatttcactgatgcgttcgatttggcgacggaggcggtcatcaaccgcgtggccaagcggcggcgtggtcggtagacaggactagtaacgccgccacgatgcgatcttgtgaccaacacagcccgtgagttttagtttgttgctgattgcaatttcacatagctatggcaaaattcattgatttctatagggtaaagttctactccctgcattttaaattataagacgttttagacattttagattcataacttacactacccaaataaataaataata

SEQ ID NO: 95161 - DNA, 92 bp, Zea Mays
cctggcgtatttcttcttttcctttacttttgaggctgagtactggtaatttcttgtcctttggagacttcttatttcttgtatattatttg

SEQ ID NO: 95162 - DNA, 906 bp, Zea Mays
cccaacagcagcctctagtccctcacatcgacctgcccgtcgccagcccctcacgttgtcctgcccaccgccagcccctcctctgccccccgccggccgcccacctccagccccacctctacccgccgccctcctctggccgcctcccctcctctggccgccgcccaggcacccaccgccagccgtcgaggcctgcaccgccctctaatcaccgcccaggcgtccacctctgactgccgcccacctccagccgtcgaggcttctggtggaaactcgtttgctaagatggaagagggcaatgactactatgttgttaggaaaggtgatgtggtggcagtttacaaaactctaagtgattgccagggtcagatttgctcttcggtatctggtcctgctgcaagtgcctacaagggtcactcttggagcagaggaaaggaggaatacctgtcttcacggggactaagtgatgctacatacgtaatcaatgcagccgaactcagggaagatatacttggcccccttgtgccctgtagtttccaggacatacttggttctagttcaaatcaactggctccaaatcatataggcttccataatgttatagcatctcagactggagcacaatatgttgatctgaaccatgaagccagatctagttcatccagacatatctcaccagcaaatttcaatcataccggaactgttgatgcacaacctatctcaaaacaatacgtaagttcaatcatgtttgggctaattactttccaccttttaccacaatacgtcaatacttgcacttatcaatctcttcagtttccatgcaactatcaagtaaactaaacagtattgcctcagtatgcttatatggtgaatactctttaactttattgtgcgataatatgaacc

SEQ ID NO: 95163 - DNA, 210 bp, Zea Mays
atggcgaggacgaggcagttaccagagaagaggaggaggtcggggcatggagacgcggacaaggggcgatggctaccgaagcagcgatgcggtgggcggccgtcgaatgcggcttgcggcctccggagccgtgttgatctcttccctggaggcgtctctgatggaactgccgtggggaggtcgctggatctcgcagccggctggtcttga

SEQ ID NO: 95164 - DNA, 996 bp, Zea Mays
ggttttgagttctcaattttagttatccaactcattctcttgtacctggtagataaagctccatccttgtttaaaatcaatttgtcgagtattaataggtgacaaaggaaggccttgcagcaagggtggtggatagacagcaagtttcaagaaccatctccaaagaagagatgctgcatctttttgaatttggtgaagaggaattaatggaacagaacgagaatggttctactatgattgagaagccatccacttctaacactattaaaacctctgtgcctgttcctgtcgacagtctcatgctgagcctgctcagtgagcaaactcggtggatttcaggttaccatgaacatgaagctctcctccaagaaaatgaagaagaaaagcttacaaaggaggagcaggacctggctttgtccgaatgggagtcattgaggaaagctgcatctgatcctgagagaaaatcaagcatgagcgcagttccaacatatcccaatcctgtgcggccacttaagcctgcttcaagaagccggcaactgcagcaacctaaggctaactcaaataaccaaaagaagtgcaccaacttaacccacttgctgactctgagaagccatggcacaaaagcagggtgcacgacaacctgtaacgagtgcggccaggaaattagttgggagactctaaacagagatggtagatcgagatgatgcctgtctctgtggcattgccagatttttttggggtctttatgtaatgttaacgtccaggtagcagtatatatattgcgtatacgagagtattagagtaggtagaatgtagaatggacaaaaaatggctcttgtggtacacatggtagaacgcatgggatgcaaaaaatgaacgatcacattgttatggaatgtagtcgtaacaagatgtttgttatgcacttattgtcattttcttttccttatcctcagcgctagctattttaagtcaagtgtttgtctgaaatttgcc

SEQ ID NO: 95165 - DNA, 603 bp, Zea Mays
atggttgattttgtcagggaaggttttcttgggagtactcatgaattccgaaacaggttccagaaccccattgaaaatgggcaacacacgaattcaacatcagatgatgtgaagatcatgaaccaacgatcacacatcttgtttgaacaactgaaaggttttgtccagcgaaagagcatgaacgttgtgaagaatgatctaccaccaaagaaggtttttgttattactgtaaagctctcacagctgcagaggaagctatacaaaaggttcttggatgttcatggtttctcaagtagtggttattcagaaaaatctcacaggtccttctttgccaagtaccagacattatcccaggtatggaatcatccggggctcctccagatggctaaagaacaaagaggaaatttgcgtcgtgaagacgcggttgagaattttatgatggatgagagttcaagcgatgataatgttgaaaattacttgcctaatggagagaagcaaaaggataaagctgatcagcagtccaagaaaagcaacatcattatgaatgaggttcttaaccttatccaccatgcatattattgcattaaaaagaagaaaatgtag

SEQ ID NO: 95166 - DNA, 1634 bp, Zea Mays
atggcgtggcggctcttggcttgggcctggctggccttggcctgtctcttgttgccccgtgtcgggtgccatccttgggccctctccactcttcgcacctccaccggctgttctcctcgcaccgatgttgcggtagcttgctccaccttggccgtgaccctcacaactgctacgacaactgtggttgatgcttgggagcgtgaacatgttgttgtcttcccttgggaacccgaacacactgcaacagatgcccttgccagctgcctagctagcttgccaaggctgagcgccatctgcttggctctccttgcctcgagcctccccctgccccctgtaagggaagaggatgacgcaaaaataatgaagtgcctgcagcgccgtttgaaaggaaaaaggatgagagactggtgtaaggagaactttggtttggtctcatcatgtgacgagaagcctcctctaccagaaaatggcgttttaggtgctaaaagtgactgtccttcatctaaaaaactcaaaactgatgaaaacaaagtttctattgagatatgaagcatacatgtgaagatgatgataatgagaagagattgaaaactgtgatagttgaaagcgatgatgatatgcagatagatagcaaacaagctttacaaaaggatggtgaaggtagttcaacagaatttgaaaaagtggttgatatcattgatcttgatctcttcccaagccctaagctccctaataaaagtttgcataaaactttcaaatgtactatttgctctgaaatgctgaatgcctctgatgtgcatcgccaccctgtcttggatgttgttgtttgtggatcatgcagatttcttgtgatagagaagaatcgccttgaggatcctgtatctggtagttattgcacttggtgtgcacaaagtgaactgattcaaagttgtagttcttgtaagcttcttttctgtacaaattgcttgtcaaggaatttaggtgaagaatgcttatcagaagctaaagccactggttggcagtgttgctgctgtgtacccagtcaactagagctcttaatttctgaatgtgacaaggccctcagtggtgtggaatcttccgattcagagactagcaatgcagagctttctggatcagagaataatggtcctgttagcaagcaaaaaatgaagaagagtattagaagaattatggatgatacagaacttggtgaagaaacaaagcgtaaaattgcaatggagaaggcaaggcaagaccatttgaagtcaatgcaagagcaatctgccaccaagttaaggagcaagaatgttggaaatccctttgaaactccactggaaatctgtttacaggatgctggggatggacatgtagtcaaccttgccagggaggaggatgaggaacctgttaggattccaagcagcatgtcttctaaactgaagcctcatcaggttgaaggaataaggtttatgtgggaaaatgttattcaatctgttaaaaaggtcaaatccagggataaaggtcttgggtgcattttggcgcataacatgggccttgggaaaacttttcaggtctgtgttgggctgttggcttatagcttggatatatatttacattttcttcaagagttattcgtt

SEQ ID NO: 95167 - DNA, 328 bp, Zea Mays
gtgtatatcgtatgagatgcagctttgctttatgcccttaccttcttcaatcagaaaacatgggaggttgctggaggaaggtgctagtggttttcttgctgggaaagttcctgttggggatgatgattctgttaagtgtcatgagaaaagttggagctctttcaatgaacttattaaatctaaggagagtgctgagaatacatttggtagcagtaactgggcatcagtttatcttgcaagtaccccccaggaagcagccgcattaggtctccagtttcctggagttgatgaggtgccacttcaacccattactttctcatatctgtga

SEQ ID NO: 95168 - DNA, 928 bp, Zea Mays
acggcgacggtgtggaaccgtgcaaaccgaggggtaatcgatcgtgggaaagttgaagcgtcgagagcacttttcccttcagtgagtttgccgcgcgcgctgttcctcactccccgcccctcatccacgagaccacgacgaacttgtgctatcgccgccgccctacgcaggttccgaggccttgactggtctcttgtttggccgcgagcatcaccagtaaaatagtcaatgtatgcaaagttggaaccatatatatttctgtagagtaaatgatatagtactagatgaatagtatggataaggatgggatattgtctgatgaaaacttggcaaagatggaatctgctcaaccaaacggacagcgggtagatataataatcattgactctcaaagtgatgaaaataaaattggtgtggaaactagcataagagagagttccttgaaggagcataaggagcctccacgcacaacagtggacaacaatgtgaatgaagaaacatccactactgatgatgattcagaggccaattcatacgagttctttgttcgagaatcagataatgaacaagcttcagcatctgaggaaggcactgaggtacctctgactgaggaagaagttgaagaattggttgttgaattccttgaagtcgagagcaaagcagctcaagcacaaagagtcacttgaaaaaagagtcactggacaaaattgaaactgaagtaagattggagttatctgaaaggctttcaaggggatgagttagaatcagctgtgtcaactgagatggagcaattccagatgcaatgggaaaatgaacttgatgatctagagatccgtagttctattcttctggtaatgttttcccccgtaatttatgtgtgtccatgttacatttactaactgccatttccccttgtttctcagatcga

SEQ ID NO: 95169 - DNA, 1198 bp, Zea Mays
ctcgattggcagggaaccacaagccgaaaggccacaactcagcgataccacccacttcagccaccaagtcagggtggcgcgcactagaaacgctagcgcgaaaaccctctcagctagactgctagtcgtgtaaggatgcagatgcgggggcgggaagagagaggaggtactcacggtcgagcttgagcgactggaatgggacggaagacccgaggatggcgcggacctcctccagcttcttggcgttgcccgtcacgaaggtcaccgccttcggcagcactcgcgccgctgccgacatcgtgcggtggtgggatgtagcccgttagaaacttcttccgcaggatacggtgcgggaagctgcagatacggcgcggcggcgacgacagcggcgagagatgaagggaccgggccgccggggagagatgtcgtttgctggtttccgttctgagtggaccggagcgaacgtgggccggtccagcctgaggtcgacggctaagtccggcccgtgtctgtttaggacttaggccgtgcttgacagagatgaccaatccaaaaaggatcgggccaaccaaattaaattgtcttaattgattttttatgtaaggaaactgtgccattttcctctcttgatctctactaatccttaaggcaatagtgtagactaagcacaaccatgctcccgcctccatcccgaccgtccgattgccggatcaacccccgcctccatcccaaccgtctgattgcctcgctcccgcccccgccgccatgcgcgcagccgcccccgaccaaaaccctcccaatccaaagtgattcctccgggccgccgcgatgacgtctccccgggcgcccctagcatagctcgtgttccatcgagatccagtcgtctggccgctccatcgaggggctgatggagaaggtgctgtccgtgaacatcctctcctcggactacttcaaggagctcttcaagtacaagacctaccacgaggtcgtcgacgagatctacaaccaggtggaccacgtcgagccctggatgaccggcaactgccgtgggccctcctccgccttctgcctcctctacaagttattcaccatgaagctcaccgtcaaacagatgcacaacctgctcaagcaccaggactccccctacatcagagctgtaagtgaacctctgccctcttggttttctattcaatgattt

SEQ ID NO: 95170 - DNA, 1513 bp, Zea Mays
gaatgcgccggcgccctgtctcaaacaaggcgccgctgccttccaactagccgttgcgccgcccctcttccctcttcaacgttcaaccccgcaaaactgttcgccaccaaagttcccctactctctctggatctcacttcctctatccgactttctcatcgcttggcgcgccctcccatcgccgtgattgacgaacagcccatggaggtggacgcgcccgtcctcgcgccccaacaggccgtcacgcccccagcggccgcgctggccaagaagacgcttgcatcagacgtgacggcgacccccaagtccagggtcacgaggaggaagacgctctgcgacatcaccaacctgagcaagcgcgagccggtcgacgtgccgggcgagccggcgtgcccggaggcgccggcaccggcggacgcgggcggccttgaggggtttgcgcagctagtcgaggagaaagcggaactcgtgaggctcctcgcggcgagagacgagatcatagagctgagccgggctgagattcagaagctgcgccttgccaactgggaacttgggcgggcccattcccagttgatggcggaggttaacctcggaagaaaaaggttgaaagcgttgcaacatgagcttgcgtgctcaagagccagccttaaagcaaaagcgtctgaactggaggatgtgaagaagacgatgcagcggcgcaacgcacctgtgcaaaggacgcagcatctgggtcctgacagagctgtgcagaccagggatggagatgtagtcgatgcggagcccgcttcggacgcatcgtctgcgaggagcatccagagggccgggaacgccagcaggaaacgagtgctgagatctcgatctctaggacctacggcatcttcgaaaccgatgctttcgaaggatagggatgcctctcagagacggaagtccatgagaacacccgagttgagcagccgcacggaggacttgttcgagatagaggacgtccagctcgcaatcggcagctgcaagatcgatccagagagtgcttccggcagcgagaagcctgggcacccgttcttgcgcagatcatctcttggaaggccgatgcggcaggccagggaacgagtcaccacctacaaggagatgcctctccatgttaaactcaggaggccctagaggttgtcaggtttttagccaacgattctttggtgtgtttctgcatctagtcaaatgcagatagtgtgtagtatctctccgtgtgaaaattttgtgtgcgtttggcttatcggcattgatacctggtgaagggtgctgtgtaatctatttatcctgtttgtgattctagtgttgatccagtgaagaaatgtcgcaactcgcaagtataataggcaccggactaaaagtagtagttcagtttacattccagaatgacagttcattcgtctaggaatccaagtcaaactttaagttgagtcgttgctctgaactgtatagctagcagatgcgaagtgttctttcaccagagcaagag

SEQ ID NO: 95171 - DNA, 294 bp, Zea Mays
atgagtcgtccatttctccttgtaagaagtacagtgactggcttggcaatatcctcccacccaatacccatgtgcaacttcacacagggtttctgttgcctgcctacccccgctcctcctactgctaccccagctacaatcttccccaccatcttgctaacttttccaactgagaatcacacgtctacatgttacaacaaatgcaagcatccgagcgcaacgacggtgatagctgaagaaaccagtgacagcgccgagtgcgatctccatctctggtcgccgccgccggcgtag

SEQ ID NO: 95172 - DNA, 1595 bp, Zea Mays
aatcgcttaccgcctttctctgcacagcctcgacgtggaactgggccagtaagcaagggactctggcggtctggcactctggcccgacccgagaacctcaaccaaaacctctcctcagcaccgccgcgtcgctccgcgtcccgtccacagctctccgctgccgtccagtgaccccgccgcgccttgcagcggcgacggaggggccagcaagtcagccatgacgatccgcatagcgccgggcgtgggcgcgaacctgctcgggcagcactcggcggagcgcaaccaggacgccaccacctacgtcggcaacctcgaccctcaggtttccgaggagcttctatgggaattatttgtccaagcaggccctgttgttaatgtgtatgtcccaaaagacagagttacaaatttacaccagggatatggatttgtagaattcaggagtgaggaagatgcagattatgccattaagattttgaacatgatcaaactatatgggaagcccataagagtaaacaaggcttcacaggataagaagagcttggacgttggagcaaatctgtttattggcaatcttgatccggatgttgatgaaaagctcctttatgataccttcagtgcatttggagtgattgtgactaatcctaagataatgcgagaccctgaaactggaaattctagaggctttggctttgtgagctatgaatccttcgagtcatctgatcaagcaatagaggccatgaacaaccaacatttgtgcaaccggccaatcactgtctcttatgcttacaagaaagacacaaaaggagagcgccatggcacaccagcagagcgactgctggcatcaaacaatccaggatctcagaagaataggccacacacaatgtttgcaagtggtccgccgacccaaggtcttccaaatggtggtccgcctgtgccacggccttttggcaatggcacaattccgggacagattcaacacattcgacaaccaccaccaccaccacctgttggacaattcccccctccaatgcagatgcacgggcaacctgcctggcccgctcaacattctatgcctccccacatgtcatctcaactccagtacaggctcccgatgaggccaccaccaccaaatatgatgccccctccggttggcatggtaaggccgccacctcctcccaccggtatgtcagcaccacatatgtggatgccacccccacccccaccctcatcacaacaaggtggaatgcccccgcctcccatgtctatgccgccaccgcctccaccaccatctggttaaacacacgcaaaggaaagtaccgtgtggtcaatgtgcaagctgtaactgtagaccaaggatgctggttcctttcatatatctccctgtaacttgtccacgctaggtgaagatgaaattttggagttcacctgacagatacaaacgcgagattaacatgtatttttcttctgttgaagatgaatgtatttttgtggttgcgtacccattttttgtgttccctaatgccccgatacgtttacaacgatcactatgcacatgttctgttgccactgaactattgaaggtggatatttcaaac

SEQ ID NO: 95173 - DNA, 391 bp, Zea Mays
gatgatcctgagcatggtgaggcattgatagcaaatgtggagtgcccacactgctgccggatgttctgtgcccagtgtaaggttccatgacacactggtgtcgcttgcgcagagttcaagttccaacgaccgaggaaggatgagcagggcagagaggacctactgccgaggaaggttgaacaagagagcaagtggcaaggtgccccgagtgcaagatatatgtggagaagatcaggggctatgtatttatcatttacgggtgcagccattgattctgctacctttgtgcatccccaatgtctagggacaaccgttgttgcaaaacctgcaatcgaacctggggaatgccttgaaatcgccaagctctctacttgaaggaaagaaactcata

SEQ ID NO: 95174 - DNA, 112 bp, Zea Mays
ccttaagattacctatttcatgttctttaaaaacagcttaccaatttcatggaattactctttgtacatagtacacaacagcttcaacacggatacgatatatagttgtttc

SEQ ID NO: 95175 - DNA, 1310 bp, Zea Mays
ataggccggtttgctgttgggtgtggtgaagatgatgcaagtatctcagagcttgaaaatcttgatatgataactggtcatgtggaaattagcaaccttaaaaatctaagggatccaagtgaggcagaaaaggccatgtgaagcagaagaataatatatggagtttggagttggattggtcttcaagtcaaaccaaggaagagttagtatcagatgcggaacaagaccagggtgtgcttggtgctcttgaaccaccatcacaaattaagaacatgagaatctgcggttatagaggcctctgtttgccacactggatgatgcaaaatgattcttgttgtgcagataaactgataaagcaaaccagcatatgtcagttgctttctctaacggatatgacactagaaggatttccaaacttgaagtatatacgaggacttttggtgtttggttcgctcaagtccctgaacctgctcagaatggctaatttagaggagctgtggactacaacaaatggttctaaaattcatgggtgctgttttcctgtcctgtctgagctatgtataacaggctgcccaaaactgaatgtgaagccctacttcccaccttcattgattacattgtcttttgaagacagcaatgagcagctgttatccccaagcagtttttcccatcggcttcctctatctgccgatgagccatcgtcgtcctgcaacgtgcattcagattcagcagcccttcgtctcaagaaactacggctgccaggctcatcatcgagttgggggtacctgcggcactgcgctgaactggagatcttgcacattgagtgctgcaatgacatggcagaattgcttgagatccttcaaaacctaacatcacatccatgtagcagttgtctataatgggttgtcaggcccttggcaagctgcctgactagcttggcgaactgcgctctttacgatggctgagcatcatggcgaccccattaattgacaacctcccagagtcgacaaaccaaacttacgtccctgtctctctacagattagtcgctgggacaatctgaagcagctgcctgacgtgatgcagcacctcacctcccttgagagactcaacctgatatgctgtggtgaactgactgtgctgccgaaaatgactgataatgtgttgagcactttgggggaaatgactgataactcattgttcagatatgcgttaagcaatggttgttactattttgtgtaagacctgacagaaacaatcatcggcttgtgggggaaatcccctttgaggaattacatgcctaaagatggta

SEQ ID NO: 95176 - DNA, 259 bp, Zea Mays
gagattgctctttgagcagagggagggaacgctgaccttctttatttcgtggcgggggatctcgtgccggtcgcgcgggtcgacctccagcgagttctgccggggcacgggacagggttgtttcagaacatctgctgaaccggagccgaagcgaaaacggaaggagggaaaccaccgaaccttggcgtcgttgtggcaatggcggcagccgaaggcctggccgcagcagggcgccacgacgctgcacccacggctgtaa

SEQ ID NO: 95177 - DNA, 465 bp, Zea Mays
atgaggcgatgcccatgccccacgcgccgcacgctgctcaacctcaccacccggaagaccatccaggtggatctgccggagctcgccgggcactccgtggtccccggacccgcaacggcgccggagggcatgctggtgggtatgattgctggacatgtgtactacttcctggaagatgtatacccacgtatgactgggcgtctccccctaaagacatcgtccttcatcaaggcgttatttgctgatgacaatgttgtggtggcacaaccacccaatgctgggattggtgctggtgcaaggttcggtgctattggtgtagatccccaggctcaatgatgaattactttcagtgacctgaggaccgaggctgtgactgatctggaatgcggcaggcccggaggaaaatggatcatgatgggcaaacaggccaacccctgttgcagaaacttgttcatgtgatggtct

SEQ ID NO: 95178 - DNA, 1484 bp, Zea Mays
tccaccgccatcagcgctcgcctgaggccggaggggaccttttcgtggctgccggtatcctgtcctccacgcaggacacgcacccgccgcagcccccgccgccaccggatctctcgccaaggacaggctggtgcaggaggccactcccagatcccgtcatccgccgccattaacgccctcctgctagatcccgtcattcgctgcgaatctccattcagctccccctcgcgctttcatcgtcgccgtggaccgctcgctggcgctgacctctcccaagcgcggcacagtggtgcgggtgccgtacaaggtctcgatcccgctgggcagggtgaagacgaccacgccgggtgggaacaaggaccggccggagcagaagtacgtgcaggcttcgagttctggttcatgggcttcgtcaggtaccaggtgtccctgcacgaactggagaaggccatcgagcaggcgaacgttcggggccagatccaccgactcccgtttgacggcctcgcgttgtgcttttgtgtggctattcgttcactggagaaggccattgaactattgagtaagaggaaagttcaggggagaattcttttgtgtggctattcgttcaattacatttctgggacagcatcaataaagaaagtatctcacacgaccaggaatcttggagcagttggctttgttgttgctgtggagaatatttacccaggaataaaatttgaccctgtaccagtcagcatccctagaattctcatcacagatgtcagcaaaacggaggatcttatagactactacaattcttccaccataatagattgggctggaagggctacaaccttcaaagcaacagcagacatacttgctcctggcaatctcatatgggctgcatgggcgcctaatggaacagatgaatcaaactatgctggtgaaggatttgcaatggtttctggaactagcatggccacaccgcatttcgctggcattgcagcactaataaagcagaagaacccaaagtggagcccctcagcaataaaatctgccatgatgacaacaaccaatacactggacaaagggagtcgtcctctcagagcgcagcagtacacaacatcggaaatgatgacactttctcaggccacaccgtttgattgtggtagtggcgctgttaacccaaaagctgccctttaacagttataattacccagagattagtgatgctaagaagagtcctgggtgacaatttttgttccagcattttgaaaaatactcaaagaattttttattaataatttgactaaaattcataaggtgaaatatacttccttcttggcactatgattatcttggcccaactttactacccctaatgcattttggatgctattacagacactgtgccggatgtatataattaatgctggtcaaggcttcaagatgttatggagcacaataaaatcattcctcgatccaaaaactgcttccaagatcca

SEQ ID NO: 95179 - DNA, 718 bp, Zea Mays
tatgtgctccctatttaatgatcagattcacttgattttttatttttatttttgtgtatagctacgaccggattcagccagatacttggagtggagcttatctatgctgggggaaagagaacagggaggctccattaagaaccgcatgcccacctggtgtgcctcttgatttagtcagcaacttcgagatcaaatccttcgatggttgcgcaaatccgcacttgggtcttgctgctatcgtagctgctggcatcgatgggctaagaagacaccttaagttacctgagccaattgaatcaaacccttctgatcactcttcaaaactgaaaaggctaccgcagaacctgcaggaatctgtagaatcgctttctgcagataaggttttgcatgagttaattggtgataaacttgtcacaactgctatagctatacggaaggctgagatcaatcactttgcgaagaatccgggtgcacttaaggatctcatcgaccgttactagggcaaaagaacggaatgagaagctacatcttcttggacgtggcaaggggtttcactgtatgaccaaccgagagactggaagaataaattttgttccaatggttaacttcggattctcatatcctgtgactgaacttttgtgactgaacttttgatacccagtgtttctcttatcaaataataaaggttatttaaatttttaaaatgagaaatgctagg

SEQ ID NO: 95180 - DNA, 2946 bp, Zea Mays
gccccgccatttatttatataaaaactcggcacggcacggcgacacggcgtgcaccgtgcagcagttcgtcgttcggctccgcctatcccgcagacggagccaccgcttcggtcaaacgtggccgactcactcgtagatccttaggcagcgagcgcgcgagcggcggcggagaccgcgaggggagggtcccggagggtgatggaggcgaggtacgaggtgctgcggcgcgcgacggaggaggtggccgcggtggacgcgcacgcgcacaacctggtggagcacggctccgcgttcccctttctccgctgcttctccgaggccgagggggacgcgctcgcgctcgcgccccactccctctccttcaagagaagcctgagggacattgctgcattgtacaactgcgaggcctcacttgagaaggtggagaagtttagaagtgctgaaggattgaaatcgattggctcaaaatgcttccaagctgccaacatatctgttatacttatagatgatggcatagcattcgacaaaatgctagacctggagtctcacaaggcatttgctcctgtagttggcagagttctgagaatagaaaggctagcagaaacaatcatcaatgctgagtcattcagtggatcaagctggacactggactcattcactgaaagctacatatctaagctgaattcagtttctaaccaaattgttgcattaaaaagcatagctgcatatagaagcggtttagagatcaatcccaatgttagcaagactgatgcagaggatggtcttcgtaaggagctaacaggtcctaggccatttcggattacaaacaagaacctgattgactacctatttacctgcagtcttggaattgctgtttcacttagcctgccagtgcaaattcacacaggttttggagataaggacctagacttgcgaaagtgcaacccactacatttgcgcgctgttcttgaggacgaaagatttgctaagtgccaaattgttcttttacatgcttcttatccattttctaaggaagcatcctatcttgcatctgtttactcccaggtttaccttgattttggcttggcgattccaaaacttagtgttcatggaatgacatcgtccctgaaagagcttctggagctagctcccataaagaaggtcatgttcagtacagatgggtatgcttttccagagacatattacctaggtgcaaaaagggcacgggatgttgtttaccgtgtcctatctgctgcatgtgaagatggtgaccttagcattcaggaagctatcgaagctattgaggacatctttagaagaaatgcattgaatttgtacaagttaaatgttgtcaatggatcaataaatcatgaaactgccatagttggtaaaagggtgtcattgtcttctgttgaggaagatgtgctctttgttcgaataatctggtgcgatgcttctggtcaacatagatgccgcgtcgtgccagctggacgattttatgagattacgaggaataagggtgttggtctgacttttgcagcaatgggaatgacctcattttgtgatggcccagcggatgggtcgaaccttactggtgtaggcgagatcagacttgtaccagatatgccaacactcgttaggctaccatggtcaaggcacgaggaaatggtgatggctgacatgcaaataaggcctggagaaggctgggaatactgtcctagaaataccttgaggaaagtcacaaaagttctgttagatgagttcaatgtgacaatgaaggcaggttttgaaaatgaatttttccttcgcagaaaattagtaagtaatggagttgagatgtggattccatatgataataccaattactgctcaacttcagcatttgatggtgcatcatccatattacaagaagtatattcttccctcaaagattcaggcattgttgttgaacagttgcatgctgaagctggaaaagggcagtttgagatagccttgaagtatatcttgtgcactgttgcggctgacaaactcatatatgctcgtgagactattaagtcgattgctcgaaagcatggactggtagcaacatttcttccaaagcctgatttggatgattttggatctggttctcacgtgcatctgagcttgtgggagaacgatcagaatgtttttatggggtcaagtaaagataactttcatggaatgtcaaaaactggagaacagttccttgctggagtgtatcatcaccttccgtcaatattggcatttaccgctcctcacccaaacagctacgaccggattcagccagatacttggagtggagcttatctatgctgggggaaagagaacagggaggctccattaagaaccgcatgcccacctggtgtgcctcttgatttagtcagcaacttcgagatcaaatccttcgatggttgcgcaaatccgcacttgggtcttgctgctatcgtagctgctggcatcgatgggctaagaagacaccttaagttacctgagccaattgaatcaaacccttctgatcactcttcaaaactgaaaaggctaccgcagaacctgcaggaatctgtagaatcgctttctgcagataaggttttgcatgagttaattggtgataaacttgtcacaactgctatagctatacggaaggctgagatcaatcactttgcgaagaatccgggtgcacttaaggatctcatcgaccgttactagggcaaaagaacggaatgagaagctacatcttcttggacgtggcaaggggtttcactgtatgaccaaccgagagactggaagaataaattttgttccaatggttaacttcggattctcatatcctgtgactgaacttttgtgactgaacttttgatacccagtgtttctcttatcaaataataaaggttatttaaatttttaaaatgagaaatgctagg

SEQ ID NO: 95181 - DNA, 108 bp, Zea Mays
tttatgcattctctattaaaagtgtttcaaccaactaactgtagtcttcttcctgctaacttgaaatcaagtgaacatatgggggccttctaatcttgagttatgaac

SEQ ID NO: 95182 - DNA, 1723 bp, Zea Mays
actaccggcggccgcgtgcccagtacggaggacgggaggagtgatctccacgcccgctcgctcgcgtcctgtcgccttgtcggcgtccgccactccgccccctccagccagatccctcctattcccccacttcactcccaatccgaatccagatccgcgaatgctggggcgggcggcggcactgtccgcgccacggtggcgcggcggggtgccagaccttcgcgccgcgctgcggtcggggggcaacctcctcttcgcgctcttcgtggcggccgtgctcgcattcacgctcctcgcggcgttccacagccccgacgatccgctcctccacccgtcctctcaccagctcaccgatttcctcacctccgccacttccacctccaccttcctcactgacgactccgtgctgcgcaccggggaggacttcaactcctcgtccaccggcgccgccggcgaggtcgccgctgggggtgtcgaagtcgtcgcggaggccgtcccgttcatcaagctctccgaagttggcgccgaggccgagaagacggagcccgagacggagcgggccgtcaccgtcgacactgatgcggccacgggcgagggtgcagcggtggcggaggaaaccgccgttgcggaggcggtttcctgcgacacggaggcgcccgtggactgcacaggagacagggaactcttcaacctgctcatgcgcgcggccatcgagcggttccccgacctccacttctaccgctttggccgtcccgtggcggtgccggggagtcccatggagtgtgacctcgcgtggcgcttccgccccgctgccgacgccatcggcaccggccggaccacatactacaaggactaccgccggttcacgcttacccgcgacgtcaacacctgcagcctcgtcgtcgacaccgtgggtgaataccactcgggtgtgggtgccaagcgcaatggacggcgcaaggggaagaaagggaagaagggaaagcaggatgcacctgtgactgacttcgtgccggttaagacacagattaggctggacgagaacaccgccaacaatgaggctgctggggctgcagcggagccggtgtttgttgttggtgaggctgtcaatgacagcttgccagtggttgcttctgagtctgatttcagccgtggtaagtaccttatttacattggtggtggcgagaggtgcaagagcatgaaccatttcatttgggggttcttgtgtgcccttggtgaggcacaattcttgaaccggactcttgtcatggacttgaatgtctgcctcaatgcacggtatacttcgagtggcaaggatgaagaaagagatttcaggctctactttgattttgagcatttgaagcaatctgcgtccgtgattgaccagagccagttctggcaagattggggacagtggcacaagaaagataggctcaagaacttctacactgaagacatcaggatgaccccaatgaaacttcgtgacatcaaggacacattgatcatgaggaagtttgggaatgttgagcctgataactattggtcacgtgtgtgcgagggtgagactgagggaataatcaagcgcccatggcatttcctgtggaaatctcgtcgcttgatggagattgtatctgccattgcctcacggatgactgggacttgactcggtccatgttgtcagagggggagaagccgcagaaccacacaacctttgggccaaacc

SEQ ID NO: 95183 - DNA, 1173 bp, Zea Mays
atggaggccgcgcctaccaccatcaccgtccaggtcaagttcgccgggcggacgatccccgtggaggtcccggcagcggcttccggcgcggagctgaagcgcctcctccagccgctgaccaatgtcctcccgcgcggccagaggctcatctgcaaaggcaccgatccccaaacccttccaaccctcgactcccttgtggtcgcaggcaaagtgctccaggatgccgcaagcctgagctcgatgcaagtagtgggcggatccaaggtgatgctcatcgcgtcgcaggggctccatcagggggatggtcctatcacaaataatagcagtagctcagcaacaactgtgagaaggccttcaaatgttaaggagaatcaaacacaaaagccagaggtagttgtcaccaaaagccgatctgagcgctggaagttaacaggtgttgttgcgctgcaagactgtgacttgaaggtaatacctgaagaagtctgggattgtggcacctcgatacgaatactagacattagctacaactgtatcaaggaaattccacacaaaatctctgctcttaaatctctaaataaattgctcctaactgaaaatgatatagttgatgatagcatctgctgggaaggtctatcatgtcttcaaaagctattgaatttatctttaagcgaaaaccgactggttagcttgccaccaactttgggttcactgacttctcttcgtgaactgtgtgttgcaaagaacaggcttgataacttgcctgtagaaataggactgctgaagcacctccaggtcctcatagcaaataacaacaggataacttcattgccttcatcaataggagattgtgaatctctcactgtggttcacctgtcatcaaatctcttaactgaactgccagagacctttgcgaaccttcgtaatcttaagaatttgcttataagcaacaatggccttacgtccttgccagcagcgtttttcaaaaagtgctcgcagcttactacactggatctccatggcacagaaatcacaaatgatgttcttcgacaggtggaggggtgggaagagttcgaccagcggcggaggcagaaacatcagaagcagctcgacttccgtgttggctcatctggtgtgttcgatgaaggcgcggatgatgataataggcgaaggtga

SEQ ID NO: 95184 - DNA, 100 bp, Zea Mays
tttttttctatggacatccttgatgatattaaatgccactagccttaaaggctatctccagcaacgtactctaaatttcatcatctaaagaattattctc

SEQ ID NO: 95185 - DNA, 962 bp, Zea Mays
ggagcatagcaaaactcgtgctgacacaacacacaagcacaaattgtgaactgcgtgacgccgcgaggggttaagtcagcaagcaagcaggcagacagccatggcagtcgcaagcgccgagaacacgtcgtcgctgctcccgctcgacggccgcgtagcgctgatcactggcggctcccgcggcatcggccgcgaggtgtcctcccaactcgccaccctgggcgcgcgcgtcgtggtcaactacgcgtccaattccgccagggcagacgagctcgtcgcggagctcgcctcccgcggccaccaggccgtggccgtccgcgccgacgtgtcggacccggacgccgtgcacgcgctcttcgaccgcgccgaggaggcgttcgggtccccgccgcacatcgttgtctgctgcgcgggcctcctcaatgccaagtacccggcgctcgcggacaccgccgtcgacgacttcgacgccatgttcgcggtgaacgtgcgcgggacgttcctcgtgtgccgcgaggcggcgaaccgcgtgccagccaacagcggcggccgcatcgtgacgttctcgtcgtccatcgttggcacgctccttccgggatacgcagcgtacacggcgaccaacgccgccgtggaggcgatgacgaagatcctggccaaggaggtggcggcgaagggggtgaccgcgaacgtggtcgcgccggggcccgtgcgcaccgagctgttcttggccgggaaggacgaagcgttcctgcggagggtggagcagcagtccatgggccgcatcgccgagacgacggacgtggcaccggtggtggcgttcctggccagcgacgccgcggcttgggttaacggccaggtcatcagggtcaacggcggttttgtctaataagggtccaagtgcgccagatgttcagatatagtggtatctgccacatacgcaagttttttaaaaaaaaatacgc

SEQ ID NO: 95186 - DNA, 958 bp, Zea Mays
tttgctgccgggtcacccagtcatatcgctcgtctgcaaatctgcaatggctagcatcagcagtcttgcagcacttagcctcttccttctcgtgagcgttggattaagcgacgccatccgggtggccagatactccagctctcaaggagcgggacagggaggggggaatggtggggcgtatcagaacggctcaggttcaggggttgggctcggttcgggatccggtgagagcggtgcggacggcgtctacgtgagtgccggaggcggtggtgagggcggtggctggtcacagtacggtggtactgcttttggtggcgggtctggtacggggtccagttccagccagtatagctcgggatcatctttcggtaatggcgggtctactcttgccgggggcatcggtggcggcggcggcggtggacagggctcggagaaccaaggctccggtggctacggtaccggcggtggcaccggatccggctctagtgaggctagctccggcgacccgccctcggccacaccaccgtacgcaagcgcagatgcttctggcaatggtggtggcatgggcggtggtcgcgacggtgggactggtggcggtaaaggccacggatctggattcggcgaaggacagccttaagagtttcctatcagattttcaaagctggaggccaaaagatgctatttcattttcatttgctttgcgtacgttgatttttttatagttttacttgtggcccttttttgtacttctagttctagacaggaactaataatggcttccagcaaccctagctagccatgacctagcaatgcgagttcaacagatcagatgtttgaagattattgtgtggtcattattatagtaactcattgtgttctatgtgttctcatgtgtcattattccagcaatgtgtatccctttgatattgtttgcaaattgcaacaccgttttgtgcaa

SEQ ID NO: 95187 - DNA, 918 bp, Zea Mays
actcatctcagcttcacttccactccacacctcttcagaatggcttctagcaagctctttgcggttggcctcaccgtcttactaagcattattggactgtgcaatgctattagggtggtaaaccacgccaccgcagatggacaaggcggtggaggtggtggaggcggcgggagcggaaccagctatggctccggatccggctccggctacggcgatgccgaggcctatgacggcagtgcccagtccccaacctctggccacgcatatggcagtggatccggggacggtggtggcgtttggcaaggtgacgacgagtgcgcgtccggttacggggcgggcggcgcatccggtgaaggccatggcgactcaggtaactccaacaccgatggcgctgcgaatgcgagcggagctggcggcgggggcggttctggtgggagcaatgggaatggcagcggatctggtggcggcagtggagttggagaaggcgaaggcgataactatggtccatatggctcgagctacgcaaatagcggtggcgccggaaggggaactggaggcggtcgtaatggtggattcggtggcggttccggtggtggagcggggagcagtggtggtgccgcgtcaggttatgatgatggcagctacaacggatcaacaccttaataatgttcatttgtttgtaccacacacagtcaagcaaccggcacgtactgatagggttttttctgtgcttgtgaaataatttggccttgctgggcgatgcagaagtttgttctactcatgtaagccacggccatttctctgcatacgccatgtttgggctatagttgtcggttagtagatgttcttttgctatcaatcggtgtcatttcatataaagaggctacagatcatctgaatcaaggttccggattaaaa

SEQ ID NO: 95188 - DNA, 1121 bp, Zea Mays
atgcaatgcagcgggtcatcatccacctcggctcactccactcactgcaccgagctcactggcaatggctaccagcaccaagctcgtggcccttggctttgccgtcctcctgagcatcggcttctccgatgcagcgagggtagttaggcttggtagccatgcgtctgcgggaggtggaggtggcggcgggggaggcggctccgggtcgactgggggtggctttggcggtgggtcgggcggtggcggtggttacggcataggtaagggtggcggggactggtggaacaatttcgtctctagtatagcaggtggtggaggaggaggacaaggcggaggcggtggcaccaatggtgggtccgggtccggcggtgggtccggttatggttctggcagcagctcgactgcagcctctggccccagcagtggcaactacgccgacgctgagggcaagggcgccggtggaggcatgggcggtggtgccaatggtgcatatggttctggtgctggtggaggcgttggcaagggcgagggtgtgagtggtgtggcactcgcaccatcgtccaacggctactacaatggcggtgccgccgatgctaccggtggcggttccggcgccggcggtggacatggtggtggcgcagccggagctccaagctatggaaccggaggcggcctcggcggaggcaagggtgaggccggcagcgatggatcgtgggggtcaggttatgctcagggaatcggtgctggcacaggcggcggtggcggcggcggatcccaaggcggctctggtggcggtggaggctctgggtccggatccggcagcggtggaatccactgagcttgcacttcagtagctagagcctagagccccgcattagtgtcagtccattctgtggttttttgctgtctttgttacgagaattaatcaggaataaagcgtaatgggcttcgtgattgtagttcgagtaggtagcaaagcatgcaactgatatgaatgcatgtaatggctatctacgagtgtgtgcccctagctgtaatctgtttctcatcgatcgttaaggtcgttgcatccggttttatttatcttctgaaaccaaaatacattggaactcttatagtct

SEQ ID NO: 95189 - DNA, 2688 bp, Zea Mays
cagcgccagcgcggcagagagtcgagaccttctagctaggccgctgccacgtcaaaactagctcctccagacaaccaatcagctagccgaagccggtcgattagcatgcagcagcgctagtagacgtcgtctccgggtctccactctccacacagaaacccatacaaaatccgcatccagaatcaccggagatacgagtccgcgcgtacgttgcagttgaattgtgaagagaggctgtgcgcagtgctgctgctgcttcttcttcttcgacgcatgcacgcacatggatggtgctgctgagtgctgacctccggccgtacgtgatcttcgatctccacacggcggcaagcgatcgagaggcgtggttcccgtggcgtcaaccgacacctagcagctgctagctcatctgcttgatctctagctgagactccgagcaaaatcagccaggaacaacaagctaggccccctcacgcagaccgcacgaccgagcgcgcggcattgaccgacccatcgccgccgccgccgcctcgatcgaccatgacgcttgcgagcacggacaaggtggtgctgggatgcatcgcgttcagcatcttctgggtgctggccgtcttcccctcggtgccgttcatgccggtgggccgcaccgcgggctcgctcctgggcgccatgctcatggtgctcttccgcgtgatgaccccggaggaggcctacaaggccatcgacctcccgatcctgggcctgctcttcggcaccatggtggtcagcatcttcctggagcgcgccgacatgttcaagtacctcggcagcgcgctggcgtggcggagccggggcagcaaggacctgctgttccgcgtctgcctcgtgtccgccgtggccagcgcgctcttcaccaacgacacctgctgcgtggtgctcaccgagttcatcctcaagctggcgcggcagaacaacctgcccccgcagccgttcctgctggccctcgcctccagctccaacatcggctcctccgccacgcccatcggcaacccgcagaacctcgtcatcgccgtgcagagcggcatcaccttcggccagttcctcgtcggcgtcttcccggccatgatcgtcggcgtcgccgccaacacctgcatcctgctctgctacttctggaggtgcctctccgcgccggagaaggaccaggagggcggcgccgccgccgcggggcccgacgtcgccgtcgtggccgacgaggaggtcacctcgcacaggttcacgccggcgcggatgtcgcgcgcctcgtccgtcaacgggggcggcgccgacgccgactgcgtcggcgagctcatccgccggagcgatagcctcagccgggccgacactacgctaggcatgagcatgaggagccggagctacaactcggagggcggcgacatccaggtcgccatcaggtccatgcgcgcgtccagcatgtcgcaggagatggtggaggtgtccaccgtctgcgacaggcgcgacgacggcggtgccgggcccagaaaggtcaccaggaccaccagccaccagcgcagcgtcatcatcgaggacgcgcccgaggctgacgccgccgacgacgacgacgatggccacaagggcaaggacggtgacagcgtcaccaacaaggagaagaggtggaaggtgctcgtgtggaagactgccgtgtatctcaccacccttgggatgctggccgcgctcctcatggggctcaacatgtcctggtccgccatcactgctgctcttgtccttctcgcgcttgatttcactgacgcacaggcgtgcctggagaaggtgtcatactctttgctgatcttcttctgcggcatgttcataacggtcgacggcttcaacaggaccggcatacccaatgcgctctgggagctggtcgaaccgcactcgagaatcgacagcgccaaaggcacggcgcttctcgcagtcgtgatcctagtcctttcaaatgtggcctcaaacgttccaactgttcttctgctgggcacaagggtggcagcgtcagcaggcacaatctccccagagtcagagaagaaagcctggctcatactagcatgggtgagcacggtggccggcaacctgaccctcttgggctcggcggcgaacctgatcgtctgcgagcaggcgcggcgggcacagttcttcgggtacaacctcaccttctggagccacctccgcttcggcttgccgtcgacgatcatcatcacggcgatcggcctgctcatcgtcgccagttactgaaccccacacaagctagggtctcggcctcgcacaaacggcggggtgtgtagccagatggcaggcagaacgctgcagaaaacagcatgcagcactgcctgacatcgaaggagatgttgtactgattggcctttgtttgtacgttgtaacagtttttatgtcgttcgtgtaagtctgtacgtttcgcgcaaccgatgccgcaaggcgccgggttgcccatctgctaaggcaaataatgcgcaagactagtagatggcatggagtatagaaggccggcaccactgttctaggaaggcaaaaacttgctctagctagttcaggtaggagagccggcgaaaatgtatggtgtgcttctcgatttggtaatgtcaagggacttgtccttatgtttggagcaaagaaacatggttgtacgattgtgccactagt

SEQ ID NO: 95190 - DNA, 2668 bp, Zea Mays
cagcgccagcgcggcagagagtcgagaccttctagctaggccgctgccacgtcaaaactagctcctccagacaaccaatcagctagccgaagccggtcgattagcatgcagcagcgctagtagacgtcgtctccgggtctccactctccacacagaaacccatacaaaatccgcatccagaatcaccggagatacgagtccgcgcgtacgttgcagttgaattgtgaagagaggctgtgcgcagtgctgctgctgcttcttcttcttcgacgcatgcacgcacatggatggtgctgctgagtgctgacctccggccgtacgtgatcttcgatctccacacggcggcaagcgatcgagaggcgtggttcccgtggcgtcaaccgacacctagcagctgctagctcatctgcttgatctctagctgagactccgagcaaaatgcagcagccaggaacaacaagctaggccccctcacgcagaccgcacgaccgagcgcgcggcattgaccgacccatcgccgccgccgccgcctcgatcgaccatgacgcttgcgagcacggacaaggtggtgctgggatgcatcgcgttcagcatcttctgggtgctggccgtcttcccctcggtgccgttcatgccggtgggccgcaccgcgggctcgctcctgggcgccatgctcatggtgctcttccgcgtgatgaccccggaggaggcctacaaggccatcgacctcccgatcctgggcctgctcttcggcaccatggtggtcagcatcttcctggagcgcgccgacatgttcaagtacctcggcagcgcgctggcgtggcggagccggggcagcaaggacctgctgttccgcgtctgcctcgtgtccgccgtggccagcgcgctcttcaccaacgacacctgctgcgtggtgctcaccgagttcatcctcaagctggcgcggcagaacaacctgcccccgcagccgttcctgctggccctcgcctccagctccaacatcggctcctccgccacgcccatcggcaacccgcagaacctcgtcatcgccgtgcagagcggcatcaccttcggccagttcctcgtcggcgtcttcccggccatgatcgtcggcgtcgccgccaacacctgcatcctgctctgctacttctggaggtgcctctccgcgccggagaaggaccaggagggcggcgccgccgccgcggggcccgacgtcgccgtcgtggccgacgaggaggtcacctcgcacaggttcacgccggcgcggatgtcgcgcgcctcgtccgtcaacgggggcggcgccgacgccgactgcgtcggcgagctcatccgccggagcgatagcctcagccgggccgacactacgctaggcatgagcatgaggagccggagctacaactcggagggcggcgacatccaggtcgccatcaggtccatgcgcgcgtccagcatgtcgcaggagatggtggaggtgtccaccgtctgcgacaggcgcgacgacggcggtgccgggcccagaaaggtcaccaggaccaccagccaccagcgcagcgtcatcatcgaggacgcgcccgaggctgacgccgccgacgacgacgacgatggccacaagggcaaggacggtgacagcgtcaccaacaaggagaagaggtggaaggtgctcgtgtggaagactgccgtgtatctcaccacccttgggatgctggccgcgctcctcatggggctcaacatgtcctggtccgccatcactgctgctcttgtccttctcgcgcttgatttcactgacgcacaggcgtgcctggagaaggtgtcatactctttgctgatcttcttctgcggcatgttcataacggtcgacggcttcaacaggaccggcatacccaatgcgctctgggagctggtcgaaccgcactcgagaatcgacagcgccaaaggcacggcgcttctcgcagtcgtgatcctagtcctttcaaatgtggcctcaaacgttccaactgttcttctgctgggcacaagggtggcagcgtcagcaggcacaatctccccagagtcagagaagaaagcctggctcatactagcatgggtgagcacggtggccggcaacctgaccctcttgggctcggcggcgaacctgatcgtctgcgagcaggcgcggcgggcacagttcttcgggtacaacctcaccttctggagccacctccgcttcggcttgccgtcgacgatcatcatcacggcgatcggcctgctcatcgtcgccagttactgaaccccacacaagctagggtctcggcctcgcacaaacggcggggtgtgtagccagatggcaggcagaacgctgcagaaaacagcatgcagcactgcctgacatcgaaggagatgttgtactgattggcctttgtttgtacgttgtaacagtttttatgtcgttcgtgtaagtctgtacgtttcgcgcaaccgatgccgcaaggcgccgggttgcccatctgctaaggcaaataatgcgcaagactagtagatggcatggagtatagaaggccggcaccactgttctaggaaggcaaaaacttgctctagctagttcaggtaggagagccggcgaaaatgtatggtgtgcttctcgatttggtaatgtcaagggacttgtccttatgtttggagcaaagaaaca

SEQ ID NO: 95191 - DNA, 2432 bp, Zea Mays
cccacggcgaagttgcagtgcatatctaacagacgtgacagttactaatactacagctagtggccattggttctcgcgcggctagattcccgtcccagccgccagtcgctgaggctgcctgctctgtggttctccgtcgtcgattgccattttaacacctagtagttgttgttgacgatatgcttctctgtgcttccggttctgcatgatccaggcagcagccaggaacaacaagctaggccccctcacgcagaccgcacgaccgagcgcgcggcattgaccgacccatcgccgccgccgccgcctcgatcgaccatgacgcttgcgagcacggacaaggtggtgctgggatgcatcgcgttcagcatcttctgggtgctggccgtcttcccctcggtgccgttcatgccggtgggccgcaccgcgggctcgctcctgggcgccatgctcatggtgctcttccgcgtgatgaccccggaggaggcctacaaggccatcgacctcccgatcctgggcctgctcttcggcaccatggtggtcagcatcttcctggagcgcgccgacatgttcaagtacctcggcagcgcgctggcgtggcggagccggggcagcaaggacctgctgttccgcgtctgcctcgtgtccgccgtggccagcgcgctcttcaccaacgacacctgctgcgtggtgctcaccgagttcatcctcaagctggcgcggcagaacaacctgcccccgcagccgttcctgctggccctcgcctccagctccaacatcggctcctccgccacgcccatcggcaacccgcagaacctcgtcatcgccgtgcagagcggcatcaccttcggccagttcctcgtcggcgtcttcccggccatgatcgtcggcgtcgccgccaacacctgcatcctgctctgctacttctggaggtgcctctccgcgccggagaaggaccaggagggcggcgccgccgccgcggggcccgacgtcgccgtcgtggccgacgaggaggtcacctcgcacaggttcacgccggcgcggatgtcgcgcgcctcgtccgtcaacgggggcggcgccgacgccgactgcgtcggcgagctcatccgccggagcgatagcctcagccgggccgacactacgctaggcatgagcatgaggagccggagctacaactcggagggcggcgacatccaggtcgccatcaggtccatgcgcgcgtccagcatgtcgcaggagatggtggaggtgtccaccgtctgcgacaggcgcgacgacggcggtgccgggcccagaaaggtcaccaggaccaccagccaccagcgcagcgtcatcatcgaggacgcgcccgaggctgacgccgccgacgacgacgacgatggccacaagggcaaggacggtgacagcgtcaccaacaaggagaagaggtggaaggtgctcgtgtggaagactgccgtgtatctcaccacccttgggatgctggccgcgctcctcatggggctcaacatgtcctggtccgccatcactgctgctcttgtccttctcgcgcttgatttcactgacgcacaggcgtgcctggagaaggtgtcatactctttgctgatcttcttctgcggcatgttcataacggtcgacggcttcaacaggaccggcatacccaatgcgctctgggagctggtcgaaccgcactcgagaatcgacagcgccaaaggcacggcgcttctcgcagtcgtgatcctagtcctttcaaatgtggcctcaaacgttccaactgttcttctgctgggcacaagggtggcagcgtcagcaggcacaatctccccagagtcagagaagaaagcctggctcatactagcatgggtgagcacggtggccggcaacctgaccctcttgggctcggcggcgaacctgatcgtctgcgagcaggcgcggcgggcacagttcttcgggtacaacctcaccttctggagccacctccgcttcggcttgccgtcgacgatcatcatcacggcgatcggcctgctcatcgtcgccagttactgaaccccacacaagctagggtctcggcctcgcacaaacggcggggtgtgtagccagatggcaggcagaacgctgcagaaaacagcatgcagcactgcctgacatcgaaggagatgttgtactgattggcctttgtttgtacgttgtaacagtttttatgtcgttcgtgtaagtctgtacgtttcgcgcaaccgatgccgcaaggcgccgggttgcccatctgctaaggcaaataatgcgcaagactagtagatggcatggagtatagaaggccggcaccactgttctaggaaggcaaaaacttgctctagctagttcaggtaggagagccggcgaaaatgtatggtgtgcttctcgatttggtaatgtcaagggacttgtccttatgtttggag

SEQ ID NO: 95192 - DNA, 2252 bp, Zea Mays
ggcaggcatcaaaaacagtcgaggccgctgcgaggcagcagccaggaacaacaagctaggccccctcacgcagaccgcacgaccgagcgcgcggcattgaccgacccatcgccgccgccgccgcctcgatcgaccatgacgcttgcgagcacggacaaggtggtgctgggatgcatcgcgttcagcatcttctgggtgctggccgtcttcccctcggtgccgttcatgccggtgggccgcaccgcgggctcgctcctgggcgccatgctcatggtgctcttccgcgtgatgaccccggaggaggcctacaaggccatcgacctcccgatcctgggcctgctcttcggcaccatggtggtcagcatcttcctggagcgcgccgacatgttcaagtacctcggcagcgcgctggcgtggcggagccggggcagcaaggacctgctgttccgcgtctgcctcgtgtccgccgtggccagcgcgctcttcaccaacgacacctgctgcgtggtgctcaccgagttcatcctcaagctggcgcggcagaacaacctgcccccgcagccgttcctgctggccctcgcctccagctccaacatcggctcctccgccacgcccatcggcaacccgcagaacctcgtcatcgccgtgcagagcggcatcaccttcggccagttcctcgtcggcgtcttcccggccatgatcgtcggcgtcgccgccaacacctgcatcctgctctgctacttctggaggtgcctctccgcgccggagaaggaccaggagggcggcgccgccgccgcggggcccgacgtcgccgtcgtggccgacgaggaggtcacctcgcacaggttcacgccggcgcggatgtcgcgcgcctcgtccgtcaacgggggcggcgccgacgccgactgcgtcggcgagctcatccgccggagcgatagcctcagccgggccgacactacgctaggcatgagcatgaggagccggagctacaactcggagggcggcgacatccaggtcgccatcaggtccatgcgcgcgtccagcatgtcgcaggagatggtggaggtgtccaccgtctgcgacaggcgcgacgacggcggtgccgggcccagaaaggtcaccaggaccaccagccaccagcgcagcgtcatcatcgaggacgcgcccgaggctgacgccgccgacgacgacgacgatggccacaagggcaaggacggtgacagcgtcaccaacaaggagaagaggtggaaggtgctcgtgtggaagactgccgtgtatctcaccacccttgggatgctggccgcgctcctcatggggctcaacatgtcctggtccgccatcactgctgctcttgtccttctcgcgcttgatttcactgacgcacaggcgtgcctggagaaggtgtcatactctttgctgatcttcttctgcggcatgttcataacggtcgacggcttcaacaggaccggcatacccaatgcgctctgggagctggtcgaaccgcactcgagaatcgacagcgccaaaggcacggcgcttctcgcagtcgtgatcctagtcctttcaaatgtggcctcaaacgttccaactgttcttctgctgggcacaagggtggcagcgtcagcaggcacaatctccccagagtcagagaagaaagcctggctcatactagcatgggtgagcacggtggccggcaacctgaccctcttgggctcggcggcgaacctgatcgtctgcgagcaggcgcggcgggcacagttcttcgggtacaacctcaccttctggagccacctccgcttcggcttgccgtcgacgatcatcatcacggcgatcggcctgctcatcgtcgccagttactgaaccccacacaagctagggtctcggcctcgcacaaacggcggggtgtgtagccagatggcaggcagaacgctgcagaaaacagcatgcagcactgcctgacatcgaaggagatgttgtactgattggcctttgtttgtacgttgtaacagtttttatgtcgttcgtgtaagtctgtacgtttcgcgcaaccgatgccgcaaggcgccgggttgcccatctgctaaggcaaataatgcgcaagactagtagatggcatggagtatagaaggccggcaccactgttctaggaaggcaaaaacttgctctagctagttcaggtaggagagccggcgaaaatgtatggtgtgcttctcgatttggtaatgtcaagggacttgtccttatgtttggag

SEQ ID NO: 95193 - DNA, 1030 bp, Zea Mays
atgatgttccgatatgttgatgatgcttatgatttctataaatgttatgcatatgaggtcggatttcctttgaaaagatatagggaaaagacaaactgcaaatggttgaattgctccagagaggggagatgtgcagaaagaaaaaatggtaaccctagagtccagaacaaatacataggtcgaacatagtgcaaagtaggaataaagcttaggaaaatttatgatgatgctaaaaaagtgtcatatctgtcaggattgatctagttaaccttgtgcataatcatgattttgtaacccaagaaactgaaaaaacaacacctctgcagtaacaagacacgtgatccgaaatttatggactttgttggagcaatgcatgacagtagggtaccacaaaacaatattgttgatatgatttcggacatgcatgatggccctgaaaacgttcctattacgacacaagatttgaaaaacatgaaagcagctaggaaacgagagagctgtgctaatgacgtatctaagcttttggcattttttactacttgcaaaaaacaatacccttagttttttgatcaagatcttgcgacgccagttgcactacgaaaggtgttccaaagcacaatccacatgctttgtttatggcatgtccagaatagatttatgacattccttaatgaattatatgcaagattttcgaagcaagacttcaaaaccaagttccaatctattgtgcatcatccattggcaccatatgagtttgaatctgcatgggctatgatgcttgatgaatttaaattacatgaagatgttgtgctaaggaaactttatgaaatccggaatgattggatccctgcatttttcaaaaaaagattattgtggtgtcatggtttcaacacaacgaagtgagaggatgaacaaactagtgaagagctgtcatgtagatgcaagcaccccactgcatgtatttgcaacacaaataatgaaaatgttacatagcaggaaaatgaaggagtcaaagaaagcattggtgtgc

SEQ ID NO: 95194 - DNA, 1189 bp, Zea Mays
cagttggtctcctcctcacgcagcacaatccctcctagaggctagagcaaaagtcctaaaggcctcaattagattagacaaaaaagacgcgattggatcactggcgagggaggcgtgtttaggggggtggcgaccgaagttagccgccgagctcggcagcgttttgcgtgattgattgcgtccctaatcctcacttcgttcgctttgtccctttcatcatcccctgtgcttgtctcgcccgctctctctcgccttccacaaccctctccctcttccatctcatttccgctgcggctgcaacaataaaataataagtctcgtgcaggcgaaggacgtacgacgacgcggacgcaccgtcaaagtctacaggctgcgcaatccctttctccctcttatccccaaggcgaggagctgagggggggggggggcccttctgctgctgttcttgtttccccgctctccaagatgtcgtccccgagcaagcgccgcgagatggaccttatgaagctgatgatgagcgactacaaggtcgagatggtgaacgatgggatgcaggaattcttcgtcgaattcaaggggccggccgaaagtatctaccaaggcggtgtctggaaggttagggtagaactgcctgatgcatatccttacaaatccccgtccatcggcttcatcaacaagatttatcacccaaatgtcgatgagatgtctggctctgtatgtttagatgtcataaaccaaacatggagcccaatgtttgatctagtaaatgtttttgaagtattccttccacagctgttactatatccaaatccttctgatccattaaatggggaggctgcagcactgatgatgcgtgatcgtcctgtttatgaacagaaagtgaaagaatattgtgagaagtatgccaaaccagaggacgctggtatcactccggaagacaagtccagtgatgaagagcttagcgaggaggaagacgactccggtgatgaagctatacttggcaatcctgatccctagtctgagttggaagaagccagtccagctcatcaatacaatgtttattgcagaaattgcaattaaacaaaaactgaaaaacaaaaaaactttggatggcatgtaaataagtgtaccttgtatgttctccaatgttgtttccttcatttggctgatcgaaattctgattgctctt

SEQ ID NO: 95195 - DNA, 1457 bp, Zea Mays
cagttggtctcctcctcacgcagcacaatccctcctagaggctagagcaaaagtcctaaaggcctcaattagattagacaaaaaagacgcgattggatcactggcgagggaggcgtgtttaggggggtggcgaccgaagttagccgccgagctcggcagcgttttgcgtgattgattgcgtccctaatcctcacttcgttcgctttgtccctttcatcatcccctgtgcttgtctcgcccgctctctctcgccttccacaaccctctccctcttccatctcatttccgctgcggctgcaacaataaaataataagtctcgtgcaggcgaaggacgtacgacgacgcggacgcaccgtcaaagtctacaggctgcgcaatccctttctccctcttatccccaaggcgaggagctgagggggggggggggcccttctgctgctgttcttgtttccccgctctccaagatgtcgtccccgagcaagcgccgcgagatggaccttatgaagctgatgatgagcgactacaaggtcgagatggtgaacgatgggatgcaggaattcttcgtcgaattcaaggggccggccgaaagtaatagccctcgcgctgaatcccggttgctcttctctctccctgcctcccgtgctgatggtgcacgctcctgattctgatctagatgttgtggggtggaagttcagtttcaggaaaactgccagtctccactgttgatcgtgttcagatattcttgtccgtttagcttcatccttgattggttgctcagttgacccgaaccgtccttccttttcagtcatagtttatcacaggattttgccaaataaattcgtactcaatttggtaggtatctaccaaggcggtgtctggaaggttagggtagaactgcctgatgcatatccttacaaatccccgtccatcggcttcatcaacaagatttatcacccaaatgtcgatgagatgtctggctctgtatgtttagatgtcataaaccaaacatggagcccaatgtttgatctagtaaatgtttttgaagtattccttccacagctgttactatatccaaatccttctgatccattaaatggggaggctgcagcactgatgatgcgtgatcgtcctgtttatgaacagaaagtgaaagaatattgtgagaagtatgccaaaccagaggacgctggtatcactccggaagacaagtccagtgatgaagagcttagcgaggaggaagacgactccggtgatgaagctatacttggcaatcctgatccctagtctgagttggaagaagccagtccagctcatcaatacaatgtttattgcagaaattgcaattaaacaaaaactgaaaaacaaaaaaactttggatggcatgtaaataagtgtaccttgtatgttctccaatgttgtttccttcatttggctgatcgaaattctgattgctctt

SEQ ID NO: 95196 - DNA, 1758 bp, Zea Mays
ttacaaaccaccacccgccgctttcctcagttggtctcctcctcacgcagcacaatccctcctagagcaaaagtcctaaaggcctcaattagattagacaaaaaagacgcgattggatcactggcgagggaggcgtgtttaggggggtggcgaccgaagctagccgccgagctcggcagcgttttgcgtgattgattgcgtccctaatcctcactcttttgcttcgttcgctttgtccctttcatcatcccctgtgcttgtctcgccttccacaaccctctccctcttccatctcatttccgctgcggctgcaacaataaaataataagtctcgtgcaggcgaaggacgtacgacgacgcggacgcaccgtcaaagtctacaggctgcgcaatccctttctccctcttatccccaaggcgaggagctgagggggggcccttctgctgctgttcttgtttccccgctctccaagatgtcgtccccgagcaagcgccgcgagatggaccttatgaagctgatgatgagcgactacaaggtggagatggtgaacgatgggatgcaggaattcttcgtcgaattcaaggggccggccgaaagtatctaccaaggcggtgtctggaaggttagggtagaactgcctgatgcatatccttacaaatccccgtccatcggcttcatcaacaagatttatcaccctaatgtcgatgagatgtctggctctgtatgtttagatgtcataaaccaaacatggagcccaatgtttgatctagtaaatgtttttgaagtattccttccacagctgttactatatccaaatccttctgatccattaaatggggaggctgcagcactgatgatgcgtgatcgtcctgtttatgaacagaaagggaaaggcgaaggacgtacgacgacgcggacgcaccgtcaaagtctacaggctgcgcaatccctttctccctcttatccccaaggcgaggagctgagggggggggggggcccttctgctgctgttcttgtttccccgctctccaagatgtcgtccccgagcaagcgccgcgagatggaccttatgaagctgatgatgagcgactacaaggtcgagatggtgaacgatgggatgcaggaattcttcgtcgaattcaaggggccggccgaaagtatctaccaaggcggtgtctggaaggttagggtagaactgcctgatgcatatccttacaaatccccgtccatcggcttcatcaacaagatttatcacccaaatgtcgatgagatgtctggctctgtatgtttagatgtcataaaccaaacatggagcccaatgtttgatctagtaaatgtttttgaagtattccttccacagctgttactatatccaaatccttctgatccattaaatggggaggctgcagcactgatgatgcgtgatcgtcctgtttatgaacagaaagtgaaagaatattgtgagaagtatgccaaaccagaggacgctggtatcactccggaagacaagtccagtgatgaagagcttagcgaggaggaagacgactccggtgatgaagctatacttggcaatcctgatccctagtctgagttggaagaagccagtccagctcatcaatacaatgtttattgcagaaattgcaattaaacaaaaactgaaaaacaaaaaaactttggatggcatgtaaataagtgtaccttgtatgttctccaatgttgtttccttcatttggctgatcgaaattctgattgctctt

SEQ ID NO: 95197 - DNA, 1197 bp, Zea Mays
ttacaaaccaccacccgccgctttcctcagttggtctcctcctcacgcagcacaatccctcctagagcaaaagtcctaaaggcctcaattagattagacaaaaaagacgcgattggatcactggcgagggaggcgtgtttaggggggtggcgaccgaagctagccgccgagctcggcagcgttttgcgtgattgattgcgtccctaatcctcactcttttgcttcgttcgctttgtccctttcatcatcccctgtgcttgtctcgccttccacaaccctctccctcttccatctcatttccgctgcggctgcaacaataaaataataagtctcgtgcaggcgaaggacgtacgacgacgcggacgcaccgtcaaagtctacaggctgcgcaatccctttctccctcttatccccaaggcgaggagctgagggggggcccttctgctgctgttcttgtttccccgctctccaagatgtcgtccccgagcaagcgccgcgagatggaccttatgaagctgatgatgagcgactacaaggtcgagatggtgaacgatgggatgcaggaattcttcgtcgaattcaaggggccggccgaaagtatctaccaaggcggtgtctggaaggttagggtagaactgcctgatgcatatccttacaaatccccgtccatcggcttcatcaacaagatttatcacccaaatgtcgatgagatgtctggctctgtatgtttagatgtcataaaccaaacatggagcccaatgtttgatctagtaaatgtttttgaagtattccttccacagctgttactatatccaaatccttctgatccattaaatggggaggctgcagcactgatgatgcgtgatcgtcctgtttatgaacagaaagtgaaagaatattgtgagaagtatgccaaaccagaggacgctggtatcactccggaagacaagtccagtgatgaagagcttagcgaggaggaagacgactccggtgatgaagctatacttggcaatcctgatccctagtctgagttggaagaagccagtccagctcatcaatacaatgtttattgcagaaattgcaattaaacaaaaactgaaaaacaaaaaaactttggatggcatgtaaataagtgtaccttgtatgttctccaatgttgtttccttcatttggctgatcgaaattctgattgctctt

SEQ ID NO: 95198 - DNA, 1220 bp, Zea Mays
ttacaaaccaccacccgccgctttcctcagttggtctcctcctcacgcagcacaatccctcctagagcaaaagtcctaaaggcctcaattagattagacaaaaaagacgcgattggatcactggcgagggaggcgtgtttaggggggtggcgaccgaagctagccgccgagctcggcagcgttttgcgtgattgattgcgtccctaatcctcactcttttgcttcgttcgctttgtccctttcatcatcccctgtgcttgtctcgccttccacaaccctctccctcttccatctcatttccgctgcggctgcaacaataaaataataagtctcgtgcaggcgaaggacgtacgacgacgcggacgcaccgtcaaagtctacaggctgcgcaatccctttctccctcttatccccaaggcgaggagctgagggggggcccttctgctgctgttcttgtttccccgctctccaagatgtcgtccccgagcaagcgccgcgagatggaccttatgaagctgtgaggatgctggacctctcttggatgatgagcgactacaaggtggagatggtgaacgatgggatgcaggaattcttcgtcgaattcaaggggccggccgaaagtatctaccaaggcggtgtctggaaggttagggtagaactgcctgatgcatatccttacaaatccccgtccatcggcttcatcaacaagatttatcacccaaatgtcgatgagatgtctggctctgtatgtttagatgtcataaaccaaacatggagcccaatgtttgatctagtaaatgtttttgaagtattccttccacagctgttactatatccaaatccttctgatccattaaatggggaggctgcagcactgatgatgcgtgatcgtcctgtttatgaacagaaagtgaaagaatattgtgagaagtatgccaaaccagaggacgctggtatcactccggaagacaagtccagtgatgaagagcttagcgaggaggaagacgactccggtgatgaagctatacttggcaatcctgatccctagtctgagttggaagaagccagtccagctcatcaatacaatgtttattgcagaaattgcaattaaacaaaaactgaaaaacaaaaaaactttggatggcatgtaaataagtgtaccttgtatgttctccaatgttgtttccttcatttggctgatcgaaattctgattgctctt

SEQ ID NO: 95199 - DNA, 1265 bp, Zea Mays
ttacaaaccaccacccgccgctttcctcagttggtctcctcctcacgcagcacaatccctcctagagcaaaagtcctaaaggcctcaattagattagacaaaaaagacgcgattggatcactggcgagggaggcgtgtttaggggggtggcgaccgaagctagccgccgagctcggcagcgttttgcgtgattgattgcgtccctaatcctcactcttttgcttcgttcgctttgtccctttcatcatcccctgtgcttgtctcgccttccacaaccctctccctcttccatctcatttccgctgcggctgcaacaataaaataataagtctcgtgcaggcgaaggacgtacgacgacgcggacgcaccgtcaaagtctacaggctgcgcaatccctttctccctcttatccccaaggcgaggagctgagggggggcccttctgctgctgttcttgtttccccgctctccaagatgtcgtccccgagcaagcgccgcgagatggaccttatgaagctgatgatgagcgactacaaggtggagatggtgaacgatgggatgcaggaattcttcgtcgaattcaaggggccggccgaaagtaatagccctcgcgctgaatcccggttgctcttttctctccctgcctcccgtgctgatggtgcacgctcctgattctgatctagatgttgtggggggaagtccagtttcaggaaaactgccagtctccactgttgaccgtgttcagatattcttgtccgtttagcttcatccttgattggttgctcagttgacccgaaccgtccttccttttcagtcatagtttatcacaggattttgccaaataaattcgcactccatttggtaggtatctaccaaggcggtgtctggaaggttagggtagaactgcctgatgcatatccttacaaatccccgtccatcggcttcatcaacaagatttatcaccctaatgtcgatgagatgtctggctctgtatgtttagatgtcataaaccaaacatggagcccaatgtttgatctagtaaatgtttttgaagtattccttccacagctgttactatatccaaatccttctgatccattaaatggggaggctgcagcactgatgatgcgtgatcgtcctgtttatgaacagaaagggaaaggtacagtggtccactaaaatcctctggttgttttcagtacgttgtctataattctaagatattgttttgtttggttgaaacatcacctccaggcctactttgcc

SEQ ID NO: 95200 - DNA, 2624 bp, Zea Mays
atggcaggtgcacccgatccaagcatggcgtcggccctggaagcgcagtccaaatccatggaggcgcaatcaaggacgctggcgactcaatcccaacttcttcaacaactctgtgatcgattggagtcacaagatcaccgatggtcccagatggaggatgcggtcaagatgaacaccaccaatatctccaagttacaggagaagctgggtgatggagagattgaagcattccgaacggatctcacccgttccttgggcgaccgcgtcgaagcacagatcgctcaattggaggcagcaaccttggggcgtgtcgatggattggtgaccgagacctccaatcgggtggcggtgctggagaacgccacctcggcgttcgagtcttggcggccacgagtcgaacattctgtggacggcatcaggaactccgtggacaccttgcgctcggaccttgctcggctgacccaattcctcgagcgcaacaacaacaccacaggagatcatcacggccaagacagcatccttggaccatatgtaccagcgggagagcacacatctgcttccccgacttgtactggaaggcccgacgggcacggcactgcaactactaaccgagagtatggttttgggaaaccacacccaatccaactcccgatcaatggccaaaagtttaagaacaaggagcaaatccattctcctattcccacgcagcacacaaaaatggccggaaatcctgccccaccacttcccttgaagtccagttcctccgcgcccgctttcaaatcaaacgcctcgggctcaagccgcggccacgagcccgccaaggcttcgtccacctcgccagcggcggcagagctgccggtcccgatcccgtccgactcgttggtcgccgtgcttggcgtcgtcggcgagcttagtgctcgtggtcttctccaggggtttacgatcccggaggccggcgggctcacggacgagggcgcgtccgctgtgttcgacggcatgctcacggccttcctcgccgagcatggggtcgaccccgcggctgcctcctgcctcccgatccccccgccgccgctcggggacgggaagaaggtagagcttgtcagtctgttcctcgccgtgcgcgctcgcggcggcttctccgccgtcgagtcctgggctgccgttgccgaggcggtcgggcttgaccccaccgccgacacggccgtcaagcttctgtacggtaagtatcttgcgctcctggagcagagctgcgataaacccttaaagcaggaccacatggtggtgagcagcggcaatgccgacgtgctcatgggctccaagaaggaaaggttcctgtcgccgatcaagtgcctcaccagtactgctggatcggcgtcggcgcacctgaagcggaagagagaaacgctcgtggggatgcttgactgggttcatcttgtggcgaagaacccaggtaaacaagggaagaatcgtgctgctggccacaaacaggcagtggttgttgaactacggcgacagatgttcgcagacaaagattgccttgcccgagaggagctcgtgaagacgctcaactgggtccgccttgtggcgaagagcgcaggacacccggggatcatcgggatgaataatcgtccagaccacttagcgactgctgttgagctcaggagcgcgatgtcgctcgtggggatgctcgaatgggttcgccttgtggcgaccagcccagctgaaccggtggtcatggaggggaattccctcagctaccgctccacagcgcttctgttccgggagcagaagtttgcaaataagaagtgcagcaggtggtctgctgcatcgccgcagagtggaatttcaattcgtccttgtggccaagcagacattccagaatggaccgggaaacgttcatcgccttacgatgatccacgcacactgaggtttcttggagaacctattctgcttccaggaagtaccgaacatcttgatggcgcttccattggaaaagggaggcaagatgactgcaactgtcagttcccaggttccattgcttgtatcaggtttcatgtcgcagaaaagaagatcgaactgaagcatgagctaggctcagcatactatgaaatggggtttcataggatcggcgaggatttagcactgacatggacgaaggatgaggagacgaaattcaacagcactgtccaggacaacatgcctgcgtctaagaacaagctctgggacaagctgcttgccgtcttgcatgccaaaggcaaagaaggccttgtgagttattaccacaatgttttccaggtctggcgacgggcctaccagaaccgcctggctggaaatgctgatagtgatgacgattccatagagcctggtttcctatactttcgtcaaggtggtgatcggagccgctccaggtcagctgcttcttccaggaaacggaggagatcttaggagactgtttgatcctgaatttccaggaaacggaggagatcagctacttcctgttgaactcgaatgaagaatattgttaaggctggacatagaaatggtgataagtgagggtagaattctgttgggacctaattaacttctctgcgaatagccgtgctggtggtttgttagtgctttgt

SEQ ID NO: 95201 - DNA, 1553 bp, Zea Mays
atggataccatcgcccacccgacctcatctgccttcataagtgagcgctactcccgcttgagcgcaagcgcaactgcccccgcctcccgccctccccacttcgcggtccctaccgctaacccccagcagccgcgtgacacggtcactcgtgcaacccttgacgagggccgtctcctggagcgctatcctgtcaaggcaaatggcgcacaccccgcaatctgtcgccacccgatcgccgctgcttgtagccaccgcgcccaccgctacctggcatgggaggaaaggaaaaccgaacggtatgagatcgagcgccgcaccgtgcgagcagatcagacatatccaggaccgtcaggcaggggaggagcaacccacctcaccgacggagacgcagacggaggcaacggacgaggcgacgcctccgccgtccatcgcgccgccgccttggagcgtgagagactgcccccgcctcccctctgcgcgtggcaacctccacccccacccacccgcaaaccccgaccaagccagcctacccccgcggaagctccgcgcgcagcgtctttcacgatgctcgcgcccacctgctcttccgctggcacaccacaaactttgagcaaccccaagggcctgtgcgccgtgtcacagcagcccgggtccattgtgcttgtttgccctgttgcccagaagggacaggatgggaggctcattgcgactgctagcaccaaggggactcttgttagaatctacaatgtagctgaaggcaatctcctgcaggaagaatatggaaagatcaaaatagatgtacgaattaaagagaatggaactcaaagaggagatgccagtgtgggtggttcatcatatggtggaggaaactcgccgatgacaaatgcaggtgcgctaccagttggtaccaccattgctgctgacaataatgatgctgatcatcgtgattacatcatagtggatgatttgtttgatgatgatgctggagataggggcggcgatcatgatgttgctgctacattgctagagcttgaggacacagagcttttcgagaacatagctaactgccttgatgaagatgatgttttgttttgtttggaaacccgaggtggatgaaaaatttcaaagagattaagcagtcgacaattgatccgctctgagaagggcgattatctgtagcatatgatggcactacgctttaatctcaagttgcttatactgaagtcccttcatggtttctcagacactggcttcaacgagctattagatgtacttgctaaagcttttcctgagggtaacaaagtgaaagtgaatacctatcgagcaaagaagctgatccgcccagtggcaatgaaacttaagaagtttgacgtctgccctaaccaatgcatactgtatctggcgagtacgagagattagagagttgtccacattgcagtgctagtcgatggaagacgaatgcgggctgccgcgtggatgatgatccctctagtatgacgaagaagaagactaagtaggattaccctcctcaggatgaagaggaagagggttac

SEQ ID NO: 95202 - DNA, 957 bp, Zea Mays
ggggacttggcaacgacagagagagagggaaagaagggagcagccaccggccagcgggacaacccaaccaacgcgatctctggggcaggcaaaggacgacgggtcggcgagaggcggggccatgaggatccggaagcgcacccctgccagggcagcgtcgccgggaccgccgcctctgcctcctcctcctcccctaccgctgcagcgtcccacggagaaaccacgggatgaggcggcggcggaggaggaggaggagaagcgggcggtcctcgccgccggagtccgagaaggcgacgaccgggttcgccccgccgccgccgccgctggctctgggaacagcgcaacggacgacgtgccgaggccggagccgcaggagcaggacgccgccaggtgcagccggaacgacgggaagcggtggcgctgcaagaaggcggccgtgccggggtacctgttctgcgaccgccacatcgcgtggtccacacgcaagcgcaagcccagagccagcaccaagcccaaggttcacggcagcggcgtcctggagcccaccgccatcgcccaggagttcgcggaggaccacggccccacgcagcgcgacgccgggttcctcggcggcttctagccccgctgccggaacttggcgggcgcagggcggcgctctacttaccgtggtctacctttttcctactctccaactgattgatgatagtagttctgcatcctgtgttgcgtcgatttttgctgccgtgctatgctcggatcgtgtcgcagttctcgtgtccatctggagggaaatgctgcgatgccttttttttcttttagggagaatccaggacctggtgcaaaagtagtagccagttcaactaaatatatggggcattgatcattggttcttgcgcctcgttcttctcgagctattttgctctcgtcctataataatctctctgttaagtgcggtgg

SEQ ID NO: 95203 - DNA, 852 bp, Zea Mays
aagaccagtgagacgcgtggggacttggcaacgacagagagagagggaaagaagggagcagccaccggccagcgggacaacccaaccaacgcgatctctggggcaggcaaaggacgacgggtcggcgagaggcggggccatgaggatccggaagcgcacccctgccagggcagcgtcgccgggaccgccgcctctgcctcctcctcctcccctaccgctgcagcgtcccacggagaaaccacgggatgaggcggcggcggaggaggaggaggagaagcgggcggtcctcgccgccggagtccgagaaggcgacgaccgggttcgccccgccgccgccgccgctggctctgggaacagcagcgcaacggacgacgtgccgaggccggagccgcaggagcaggacgccgccaggtgcagccggaacgacgggaagcggtggcgctgcaagaaggcggccgtgccggggtacctgttctgcgaccgccacatcgcgtggtccacacgcaagcgcaagcccagagccagcaccaagcccaaggttcacggcagcggcgtcctggagcccaccgccatcgcccaggagttcgcggaggaccacggccccacgcagcgcgacgccgggttcctcggcggcttctagccccgctgccggaacttggcgggcgcagggcggcgctctacttaccgtggtctacctttttcctactctccaactgattgatgatagtagttctgcatcctgtgttgcgtcgatttttgctgccgtgctatgctcggatcgtgtcgcagttctcgtgtccatctggagggaaatgctgcgatgccttttttttcttttagggagaatccagg

SEQ ID NO: 95204 - DNA, 222 bp, Zea Mays
atgggaaaaacagtgggggcgctgctggggaagaactggtggccggcgtcgagcgtaaaccaggggaaggaatgccgggctaggagctggatggctggaaatggtgactggacccaggcaacgcagcgaccgcgagctgtccatgatgccggcgagcagagtacagacgtgaggctgattcccaggcgcactggtgaacgcagtgaggaaaatatccaatag

SEQ ID NO: 95205 - DNA, 432 bp, Zea Mays
accagtcattgatgtggtgccaccacataacatggtattttcaagcagctgacgatggtactctgatgaaacatttgaggcgctagtaactagctggtgaacgataccataatcttccaagcccaatatatgtggttgaaataaagcttcaccaacaatgtacctctctttctcaattgttatgacctggagaaagaagcggaagtgcctttctggttggcaagagctttctatagccttcaaaagccaactgatcttctgtgcaacatgcatactgctctttcagcctctcaacatcagaaacatcaaggtttactgatggattagtttttcagttcgtgtgaaaagaggtttgtcaagtcaactaccccaatctctaatctcttagaagctgtgttgaacagctgcttcacaaactggagcaatatctgg

SEQ ID NO: 95206 - DNA, 459 bp, Zea Mays
atgacccaaacaactctttcactagcagtagctgaagagataatggatcataattggactcaagcatcggcacctgcaacattcaggtacgagcacagctgtgacatgaacagcagcaaatggtgcacaaccgtgctagttcaaggcagtttgtctctaaaagcacttctggtgcacaatagacgccccgtctcatcatactcgcccttggtgatatgctggttttcagggaaaacgaccttggccaatatcgcaccacccaaccaggccgagtaccttgctaggttctcggacatgtattcaggggggctggaagaaacattgctcaagttagtaatagccagggaagtgaggaggggattgactaggagcagcaatgagggtaccttcacaagtgatggaaagattgctgaagcagacagatttgcttctctctggaacctgtcctcaaagccttga

SEQ ID NO: 95207 - DNA, 902 bp, Zea Mays
atggtggcgatgggggcgaggaggaggccgacgagagtcacaagctattcgtgggcaagatcccggcctgaggagcccaagccgcaagcgcacttcgcggccgcgacgagccaacgagctaatcgaagctgcttgctttcgcctcactcctcgctgcggtgggtgctgcttgcatctatgcttctgcctccttcctcgccgcggagcaacaacaataaatgtagggccacgagtaggaggttggcgaagaggaggaagaggataagcaggaaggcgagatcgaggaggacgagcatgaagggtttcgttggtgatgcaagcttggtgttctcgcagacgcttcctaaccacccaaagctccccaaggggaagctggtggctgtcgtggtggtagacggatggggctaggccaacgctgaccagtacaactgcatccatgtcgctcagactcatgtcatggactcgctaaagaatatgtatatgttgtcctttacacctgctcacctgcttgggttgcgtatatgctcttttttgtttgtataattttaccgcaatagaaatctatatattttggtcctcattgttgttaagtatgcattggtcgcatggttgtcaggaacctaattcttagctctagctcagtgatgactggtctaatcttgaattaatacttgtttgtaatggcttttagattttatacataatcttggttaagtttaagttctacagataggttatatgctttttccacaccaatactcactattatgcatatggggctctaggccaagcattgaatgctgaatttttctttgagtacaaaagtttatgcaataggagcgtctgaaaatggttatgccctgaggttagtaatgctttcaaagtgtatccattcaactgct

SEQ ID NO: 95208 - DNA, 115 bp, Zea Mays
tcacacactccggacgttaggcccacattgcagactacgggcgcccacgtgacagccacccttagttttgcacacaccggacccacgtctgctcgcgcaaaaagttacctcaatt

SEQ ID NO: 95209 - DNA, 217 bp, Zea Mays
agaaactataggtacatagacaaaagctagcgtgacacgtcctagctctcggacccgtttgattcattacttgcatgccaagttattaatttaaagtcaaatggatgatatgagcagtttagatagtgttcggttccagtgtatagtaggacggagtcgcttcgcttctaatttattgtgtttgaattggttccataaaaaacggaacaactcttaa

SEQ ID NO: 95210 - DNA, 273 bp, Zea Mays
tttttttatttttatttacgtcgattcctattgtctgaatttgaaattgaattcaccccgtgtgtggcgtcatccagacatccagttgattactacgatgagtgtgaggtgtggacgcagctagtacttgtgaatacagtagcaggctaagagcatctccactcttcattttttctctctatttgactatctatttacattttcataaagactacactctatatatagcatctcagcccaacagactatctatctagtttggctagtcaggtg

SEQ ID NO: 95211 - DNA, 1775 bp, Zea Mays
tatataatcaatgtttcactacaataaagacttacaactgtcatttcctttctactctctgtgtctcgtttacacttattccaacacttattccaacacgttatcagcacctgctttccaccgagcgagaggagaaggccgtgacactgccatgaacgagcggttccagaacatatctgccctcgtatgcgtgcagcgcgcgagaacaggagaaaatgatagcgtcggccatcagaaccaaatgaaaaaaaaagaaaggatcaaaagcatgaacatcgtaagtatttcaggatgttattacctacgtctacatgcaatctacatgcaatgcgcgtggacaatgttcgtgtacgtgtgtgggcccggaaccccacggcggtgcctgcaaactccatgtgcaatgcgcgtggcaaccctgccccgcggctgcctgcaccgccgctgggctgtgcgtcctgcacagaaagcggggccgcagcgcccgaccagacgctgttgctagcgcgcccgagccggcgcgccgtcggggctccgttgccgcgcgccggtcgaggctgtgcgcagccggggtcgctcccgccgccgccggatgctgcccgcacccgctggagcatgcgccggactcgtccgcgcgcgagtcggggcagcgtgctcgcgcttgcaacctcgacggggcaccatggctgtgcagccggggcgccgcgtgcccgcgttgggcagccgagcagcccgtgctgctaggggccgccgcgctgcgctgcagggagtcgcggctgcgctccttttggtgccgcggggaggctcgcgcccgagccgacgaggccgggggccgccacgctgcgtggtgccgcgcccgggccaccggtgcctcaccgccgcgccatgtagtcggggcctggggccgcgcccgccactgcgggtcgcgctcgtgcctccatcgcgggtcgcgcccgcgccgccatctcgcccgagcagccggggaggccacgcctgcggatccgcgcccgaggggccgcgcccgcgctgcaagccgtgccccgtgctgctgtggctaggccaccgcgccccgcgccgcctatgctgaggctgccggggccgcgcgcccgcggagccgcgccgtcgtctgcttggccgggactgcgcgccgccgagccgcacccgcgccgagccgcccgcgcgtgccgccggggggggggggctacactggccacaccagcgcgcgccgccgccgtggacgggccgtcgcaagcgccagccacgcgcaccgccggggtcgcaagccctcgtgccacaggagttgtgcgcgcgcgctgccgggaccacgtgcccgcgtgctaggggtcgtgccctcgcgtcatccgggctgcgcacccgccaccgcgcccatgccctgtgtgttggcgccgccgccgcctggtggatgtggtgggcggttagggtaaccgcctagccttcctatatggcgcttgggccgcgcctggccgctaggcaagccggccgggctgcgctagccactagcctgggccgactggagggccggctggggaggctgcctggaggaccgcctgggccggattccacctgcatgggctgcctacgcttcggccgaagcatttacatttattattttatttactgcaatttcaatcaaaagaactatgtgttcgttcaattactgttttaacgtatgtctaaattcgaatatttagacggttgatgatatatgtagttgtacatacgtctctattttttatgaaaatgcagacttgttagtg

SEQ ID NO: 95212 - DNA, 2136 bp, Zea Mays
cctctctccgctgcccctcctatctcctcgcgagcaccgctggcctcgcttaacggcctgatctcccagccgccgcttccgcctcgcgtcccaccggtctccatctacatgcagccgcgctcgccaccgccgtcggaggcgcctgcgccctccgacgccatcatgatgcccggcgtgggcggcgtggagccggccgtcacgttgggccaggtgccgcgctggagcgaccccgaccagcgcatcttcctcgcctccacgtccgaagaggcgtccgcggaggacgacggatccggcacgacctctgcgtctggcttcatctctttctccgacccgctcacggtcgacgacggcgccgtcgggggtggccacgccgggggtgcctcgcgcttccccgtcgaccaggagatcaactctaggatctatctctggcgtggccagccctggaacctcgaggtcgacgcggtcgtcaattctaccaacgagagcttggacgaggcgcacagtagcccggggttgcatgctgctgccgggtcagggctcgccgaggagtgcgccaccttgggaggttgccgaactgggatggccaagatgaccaatgcctacgatctgcctgcaaggaaggtcatccataccgtgggccccaaatatgctgtcaagtatcacacagctgcagagaatgcacttagtcactgctatcggtcctgcttggaactgctcattgagaatggtcttgaaagcatcgcaatgggttgtatatacacagaagctaaaaactaccctcgtgaaccagctgctcatgtggcaataagaactgttagacgtttcctggagaagcaaaaagacaaaatagctggtgttgttttttgtactacatcatcatctgacacagagatatacaaacgattgctcccactatatttccctcgggacaagcaggaggaatatattgcgatagtaaagctcccagctgatgttggggatgagaatggtgagacggcaatagatgaaaggaaaataagaataagacctttgcctgctggtgtgctagacagaacagtgtctgcaaatcttgttgatcttcctctttccaattctggatcggcattgaagaggggttctttcaagttggattcatacttggatccttcatttatgtcaataattaaagatccagatctgcggcgcaaggagcagtgggaaaaatccgctcaagctcaaaagggatttaattatgctaggttatttggatatggggatctaggttgcccttcattatctgcagcagaggaatactcacttcattcacgatacctcactaaagcaaattctcttaatctttcagagattgctgaaatgaaaataatttatcgtggtggagttgatattgaaggacgcccggttatggtggttgttggtgcacactttcttcttcgatgccttgaccttgaacggtttgttcttcatgtagtgaaggagtttgaacctttgattcagaagccatatacaattgtatatttccactccgcagcatcattacaaccgcaaccagatttaggatttatgaagcggttacaacaaatactaggacggaaacatcagcgcaaccttcatgcaatttatgtactccacccaacgttgggtttgagaacagctgttttggcaatgcaaatgtttgtagatggagaggtctggaagaaagttgtatatgtggataggcttgtgcagctgttcagatatgtaccacgcgagcaacttacaattcctgactttgtttttcagcacgatctggaggtgaatggtgggaggggcctaattgtagacccaagaacaaagcacatataccagaggacgtccagttgatatatgccagttctgaggcctgaagtttgttagttcttgcactgtaccattctaatgttcacttgtaatttattccacgtgttcatttctgtacctagttaagttagtctattccattcgttcgttctcctgccttgtgcaagggggatttctcatctgtatctgttgatatgtagaactgaattaaaactggtgtctactctagatgttgttcaaacttcacttgtcctgtacaaattttggcagttgatatgttcaactttatttcaagtttca

SEQ ID NO: 95213 - DNA, 876 bp, Zea Mays
cgatgaagtttcgtgatcgaaatattttgtctgcaaaagcccaacgctgtcaagggtccggttcttcatctagcttctcctgcagggcaggatccagtgtcgtcacaacctgttcaagaacattgtctattctccaatttgtgaagtgtgtaatattgaagatgaaacttctgatcaaatcatcttccgctgtggttttgctgtggccttcttggaggcaattgttttttcatggcctactgatcaaccgatcagcgagttataccggacggagttccatccctgaggagcagtttggaactttcattgcattatgctgctggcagctttggaagcgttggaatggtatcgtctccaggaatgaaactcaatccctgcagcaggtcttagcagcttgtaaaattgaggctcaactttggcgtctcagaatgccagtagcctccagagccatagcagatctctggtgcaatttgtttaactatgtaatgcaactctgccaaagcaaagcctctctcctccacgccgacaaaacattttgtgccagctcaaatgtaatcaggcccttcaaattttgaaataaaataaatttgggggaacacatcctccggtgacatttcaaaaaaaagaagggtcttgtcatcttatggacaagagggatagcgtagagttttatcttactgtacacctttgattattttgtttgatatatatactacatgaaagaagactatctcatataggaagctgcactcgggagtagagcaaaacaaatatatactgaattttgtatctacaattgttgtccgtaatcccgtgagaatggaatgtaaaccaatattttcctaatgtatatggacacagttcttttatgggaac

SEQ ID NO: 95214 - DNA, 257 bp, Zea Mays
aacttctacgatttccttactcaaccaccattctcatgtctttaaacttgtacaagcagtgtcaaactttgccatcttttgcctaacacggttttgtcttcagatattcaggtgtgtggctcatcactagatgtggagcattgatccaaggggactatgatatcaacgattttaatctttgcatcaccattattatactctatggtgtgctcttccgtcttgttgcgtttcttagcatgttaaagttgaaatagatg

SEQ ID NO: 95215 - DNA, 2742 bp, Zea Mays
gagcatggcggagggttctcgcatgctgcgggcaaatgactgcaatgttgtgtgggcaagctgaaatagagttatacatcgaaagcttggctaatgctagcagtcgcagtaatcccaggataagtccgaactgcaaccaaaactcatgggcactcgggtgccagcctggctgggcttgcatggtatcaggcaccgaaccatctgatggaccatcagctgaattggttccgcaaagagcagagagctgcaggccatgttgtccgggtttcttctgccctcggggcctgacatgcatgatgctcatggttgtttctgcttacctgctttaaattcactatcaactgttttccagcttgtcctttgggtgcttattgtccacttgggacattgaacgacactactggactttgtgatccgtatttttaccaaattactccaggaaagagcactgcatgtggtgcagcagattcttgggctgatattgttacaactaatgatatcttctgccctccagggcactactgtccatccacaacccagaaatacaattgcagcagtgggcactattgccgcaaaggttccaccgatgaaaagaagtgcttttggaaaaacacttgcaaggataatgcgataaaagaaaatctgactttttatggcattatattaattgctatcttgggctttgttttgctactggtgtacaactgttctggcctattcatttcatttcaagtaaaaatgtcatccagatctcgtaaaaaggctgcaaaaagggcagataagtcagccgcagcacgtgaaagatggaaattggcaaaagaacttatactgcggcatgaggttcccactgaagggttcgggcatgcttataatcaggcagatacggatagagctatgaagacaaacaatgataaattaacattctctggagtggtgtctctagctactgaaattaggccacgaaggccaacacttgaagtggctttcagaggtctaacgctatctattggaaaaaagaaacttctgcaatgtgttacaggaaaactttcaccaggtagggtcacagctataatgggcccttctggagcaggaaagactacttttctcaatgctgtattaggtaaaacgtctgggtacaagaaggatggggtagtccttataaatgggttacctggattaatgcagtcatataagaagataattggttttgtgcctcaagatgatattgtccatgggaacctgaccgtcgaggaaaatctgtggtttagttcatgttgcaggttaagcaaaggcatgtcaagatctcataaggttagaattcttgaacgggttattgagtcattagggcttaaagaaattagaaattctctcgttgggactgtggagaagcggggcatttctggaggacaaaggaaacgtgttaatgttgggattgaaatggttatggaaccatctcttctgatattagacgagccaactacaggtttagacagtgcttcctctcagctacttctaagggcacttcgacatgaagcacttgaaggtgtaaatgtttgtgcagtggttcaccaaccgagctatactttgttcaacatgtttgatgactttgtccttttggcaagaggtggccttattgcttatcatggacctatatatgaagttgaaacgtacttcgcaggtctggggatcaaggtgccagaccgtgagaatcctccagactatttcattgacattttagagggaatagtaaagacaaaaatgaggggaaatgtcacacctaaacacttgccactcctttggatgctacataatggttatgaagttccagatgatttgcagaaggaccttgagaacatcgatacaattcgtgagttatatactgttcggtccatttctagcgaacagtcttcagaagaacagtcagaaaatacagattctgtgcaccgtaatctgagtcaatcaaatgaattactggaaaggaaaacacctggtgtgtttgcacaatatgggtactatttggggagggtagcaaagcaaaggttgcgtgaagctacacagcaggccgttgattacctaatattgtgtattgctggtatatgcattggtacaattgctagagttcgagatgattcattcggtgtagcttcttatggatataccataatggcagtttcactgctatgccagcttgcgtcattgcggtcattttcacctgaaaaattgcaatattggagggagagagaatctggcatgagctctctagcttactttcttgcaagagatactgttgaccatttcaatactgccgttaagccaatcatatttctctcaacattttatttcttcaataacccacggtcgactcttagagacaattatttggttttactggccctaatttattgtgtaaccggcataggttactcttttgctatttggtttgagctcggattagcacagttgagctctgcaatagtacctgttgttctggtcctggtgggcactaaacctgaccttccgagggttataagggaattgtgctatccaaagtgggctctagaagcattcatcattgcaggagcaaaaaaatattcaggtgtgtggctcatcactagatgtggagcattgatccaaggggactatgatatcaacgattttaatctttgcatcaccattattatactctatggtgtgctcttccgtcttgttgcgtttcttagcatgttaaagttgaaatagatg

SEQ ID NO: 95216 - DNA, 366 bp, Zea Mays
atgcgcgccgccgttgtcctcctcatctctgtcgtcgcgctgtcgctgctccgcccggcgcgatgccagctaccgccaggcggcgttgtcggccgcgcgccgccgccgatcgcgcaggtgatcgagggcgcgccgccgctgccggtcgtgcagccgcaggacggcctcgagaaggacctccggtccgtcagcgacaagctcaccgccgagctgcagaagaagtacggcttctgcatggccgacgcgcaaaccgatttcaacctgacgttcgactacaccgccgacccgagcttcgcctccgactgcatggagcagacaagaggaccagcatatcgtggaaaaaacccagatgcaggctgggcatag

SEQ ID NO: 95217 - DNA, 2793 bp, Zea Mays
cgagttccaaaccctcgccgcaagaaagaagctataaaggaaagctaatcccccttccttgagtcctccgcatctcgcattctcgccggtgctgctgcaattaacgccacccccggccaaccgcctgaaaactacctctgccgccggcgccgccatccccaacatggcgagccaaggggagccctcggcctctgcttccgatccgaaggagaagaaggactactcgacggcgatactagagaggaaaaagtcaccgaaccgccttgtcgtcgacgaggccaccaacgacgataactccgtcgtcgcactgcaccctgacaccatggagaggctgcagctcttccgcggcgatactgtgctcctcaagggtaagaagaggaaagacactgtttgcattgtccttgcggatgaaacctgtgaggagccaaaggttcggatgaacaaggttgtccgccagaacctgagggtgaggcttggtgatgtggtttctgtccaccagtgccaggatgtgaaatatgggaagcgtgtgcacattcttccaattgatgatacagttgaaggcattacagggaacctgtttgatgccttcttgaaaccatacttcctagaagcatacaggcccgtgaggaaaggagaccttttccttgtcaggggtggaatgagaagcgtggaattcaaagtgatagagactgacccttctgaatattgtatcgttgccccagatactgaaatattttgtgatggggagcctattaagagagaggatgaggagcgtcttgatgaagttggttatgatgatgttggtggagttagaaagcaaatggcccaaatcagagagcttgttgagcttccactacgccatcctcagcttttcaaatctattggtgtgaagccaccaaagggcatattgctgtatgggccacctggttctggaaagactcttattgctcgtgctgttgctaatgagactggagcctttttctttctgatcaatggcccagagattatgtcgaagttagcaggagagagtgagagcaatctcagaaaggcatttgaagaagcagagaagaatgctccatctatcattttcattgatgaaattgattccattgcacccaagagagaaaagaccaatggagaagtagaacgtcgtattgtttcacagctactgactcttatggatggactcaaatctcgttcccatgttattgttatgggtgctacaaaccggccaaacagcatcgatcctgctcttagaagatttggaaggtttgaccgggaaattgacattggagttcctgatgaagttggccggcttgaggttctccgtattcacactaagaacatgaagctagctgaagatgttaatttggaactcatttcaaaggatacccatggatacgttggtgctgatcttgctgctctttgtactgaggctgctcttcagtgcattcgtgagaagatggacatcatagatcttgaggatgagacaatagatgcagagatattgaactcgatggctgttacaaatgaccatttcaagactgcgcttggaacaagcaacccatctgctctccgtgaaactgttgttgaagtcccaaatgtctcttgggaggatattggtgggctggagaatgtcaagagggagctccaggagactgttcaatatcctgtggaacatccagagaagttcgagaagtttggcatgtctccatccaaaggagttctgttttatggtcctcctggttgtggtaaaaccttgttggcgaaggcaattgccaacgagtgccaggctaacttcatcagtgtcaagggtcctgaattgcttaccatgtggtttggtgagagtgaagccaacgtccgcgaaatttttgataaggctcgccaatctgctccttgtgtcctcttctttgatgagcttgactcaattgcgactcagagaggaagtagtgtgggtgatgctggaggcgcggctgatagagtgcttaatcagctactgaccgagatggatggcatgaacgccaagaaaactgtgtttattattggtgctacaaacaggcctgacatcattgatcctgctcttctgaggccagggcgtcttgaccagctgatctacattccactgcctgatgagcagtctaggctccagatcttcaaggcctgcctaaggaagtcccctgtggcaaaggatgtggacctgaatgctcttgctaagtacacacaagggttcagtggagcagatatcacagaaatttgccagcgtgcgtgcaaatatgcaatcagagagaacattgagaaggacattgagagggaaaggcggatgaaggacaaccctgaggcgatggaggaagatgaagtggacgagattgccgagatcaaagcagctcacttcgaggagtctatgaagtatgctcggcgcagtgtcagtgatgctgatatccgcaagtaccaggcgttcgcccagacgttgcagcagtcccgtgggttcggcagcgagttccgcttctcagagcagtcggcgacagctggtgctgctgcagccgatccgtttgcttcggctggtgctgcggctgacgatgacgatctatacagctaggtgtcctgttgggttggttctgggttgtgcaatatcagtctcatcagtcatctgtttaaaactctgattatacttagacacgggatgtcatgcaatgatatttgttttccgtacatttggacgttgagataatgcctgtttattttatgccatactctccatgccattttatgaatgattgtttgtcattgagtata

SEQ ID NO: 95218 - DNA, 740 bp, Zea Mays
cgagttccaaaccctcgccgcaagaaagaagctataaaggaaagctaatcccccttccttgagtcctccgcatctcgcattctcgccggtgctgctgcaattaacgccacccccggccaaccgcctgaaaactacctctgccgccggcgccgccatccccaacatggcgagccaaggggagccctcggcctctgcttccgatccgaaggagaagaaggactactcgacggcgatactagagaggaaaaagtcaccgaaccgccttgtcgtcgacgaggccaccaacgacgataactccgtcgtcgcactgcaccctgacaccatggagaggctgcagctcttccgcggcgatactgtgctcctcaaggtctgatatggctaatctgagcttgttgcagcagcttggggatgttgagctaatctagcagattgtattatcacgtgaccgatctgtgtgtgttcgacctgaattccgtgtattcagagtgcagacctgttagaaataaccttagcttttgtcacaagtacttgctgaagtgtttaatgttgtaatttgttgtattgtttgagaacttgagtatgctgaggcagtgagggtatttgggctccctctgctttgcttctgtagtgtgtagattttagaaatttaccaattcacattcgtacaccattgattcatttgaatgtaatagtaatctagatttcttttattgcttgcttcagtaacatattttaatata

SEQ ID NO: 95219 - DNA, 577 bp, Zea Mays
gcctgtccggtcctgcgtacttcaacacctttctccagctgtccgagctccacctcgtcgtcgtcctgctgtttcagcgtcgtatccctctacctcatcgcagcagcaccggtgctctcgtcgtcgctgagctcttggcgcgccgtgacatcatcgtcgttttctcgccggccgcgcttgacccacagctccttcgcgtcgtcgtcttggacaacccgtagcctctgctccgacctcgtcgcactcgcgctcctcacacccgacaagccgtcgtgctcggcgtgttttctccgtgcggccttacgggttcctctcgcttcatcggcttgtcgcgtgttagagcagaacaccaagaagaagaattgatctttgtaaaggaggaacctgctccagtgctgttgatccagtgatggactccatctaactgcttatcggagtagaagggttttagatcttctcctgcaataaggcaagccccggtgcatttgccaccttccttgtattacaaaattttatcacttatatgctgcattaggtaataggagttgaatgattaaacacttgatgcattaccatc

SEQ ID NO: 95220 - DNA, 2193 bp, Zea Mays
tatacttagcccactatcaatgaattagggttttttactctaacaaaatgtgatgctttcataagaaaacttacattcctacaggtgtacagttccccctcaaaatgtgccaaactaataagctacactagcaaaggaatgtttcaattcaaggtgaacataagtacaagaggctattctgttattttgtttcatcacttcttttatttttgtattaaaaaactgttgcaggaactgagatcactagcttatagaaagaaaaggcaaacgaaatacaaacacaagcaagtcttacaggttccttttctcatctgaagccataccttggaggcacctaatgacaagctaaagaaaggtgagttactgaaaaggatgaagccaagaatgggattccatagagattaaaagacagttactaccttttcattcatctcaaacccaaggaaatttgaactttcacaacttttagccatttgaaaaagaaacaaaccatttcctgtattaagaaagagtgtttgcatgacaagagtggaaaaaacaataaagcagagatagcctataattaacgttcgagagtttggtttgcactctgatcaaacatacagataccaatactatcacaatacacaaactacactttctggtcatttaccatggattatctaagatcaagaatacgagtataaatttatgaaatatttaatggaaacaacaatataggtgtgtggtctgtaaatattgagatcgaatactaaacatgtcactgctttctcggtgtttgagtgcgggtccggtggggtgtatgtgtggcctttgtcagctgaaattcgatttcctttttgtgatgttcaatctttcactgatgtcagtgagctaatacgtttttactaaaagaaaaaagcatgtacaccacaattcccaatggatttatataccattccccttcttttgaactccctgcgctccgttccaaatgtaggtcgttttagttgtagtcaccagaccgctggaccttggtggacttggtatcccaaatctgatatataagagttaggcgctgcaagctaaatggctttggctcatcaagactgacccgaataggccttggagtggattggatctccctgttcagtcacaagtaaggaaactagtggccagttcgatgtacactaatgtgggtaatggcaaaaacacccttttttggagggacagatggataaatgggtgctctatcgctgagctggcacctgaagtgatctcaaaggtggataaaaaggttgcctctaccaggacagtgcatcaagccttagagggcatgtcgtgggtcagggacatcaagccaaccctctcccttgtagggatacagcaatatcttacgctatgggacaccctgggtgagatcgtgctcactcttcaggaggatcaccatgtgtggagattcgagtcgtcgggccttttctcttctaggtcctgctacaaggttctgtttttgggctccatcaccttcgaaccttggaaaagactttggaaatcttgggctcctcctaagtgtaagacctttttatggttagccatgcagaataagtgttggacagctgacaggttgcaaaaaagaggtcttccccattcggaagcatgccctttctgtgaacaagagcaagaaacagttcaacatctgttgactggttgtgtcttcgccaggcagttttggtatagcatcctctccccctttggtatgggccacttaactccaggaccagaggatactaattttgctgattggtggggactagtgaccattcaggtgcacagaagcaagagaaaaggagtcaacagtgccattattttgggagcatggtgcctttggttgcatagaaacagagttattttcgatggagatttaccaaccattggcaaggtgcatagaagcttcgtcgacgagctatccttatgggtgctggctggtgccaaacacctcggaagccttgggcttgctgctgctctaggcgcagcaggcccgacttaattttttccttggtcgtctttttgtatcttagtcctatggatagttttatttatgcttgttgctggccaccatagggtggttttttgtactggtcctcttggaccttaattttcccttcttcttaatataatgatgcgtagctctcctgcatttttcgaaaaaaaaaa

SEQ ID NO: 95221 - DNA, 176 bp, Zea Mays
tttcttaaaaactgggtggttccaaacaggcccttaaacaaacatgatttaacgttatcgttacccatcacgttacaattatgtgaaccaaacaacaccataattcattaggattcatggactggtctttgccggctagagataatgaagggcctcattggtatggcactttcagc

SEQ ID NO: 95222 - DNA, 2367 bp, Zea Mays
taatcaattagcatttgattttgcagttctacttgaaatgtgttcatgtccacttgcttggtttgagacaaaaatccaccactaatcggccacctatggtattgctggtattctgctccaagtgactaggagagtaggagctcgatgcacgccattgccagactcccgtttcttctgcttcttttccatctccatggcctcagcgatgcggcggcggcggctggcggtcacggccagtttatctacaacggcttcaccggcgcggggctcgaccttgatggcatggccgtggtcgagccggacggcaagctcatgctcaccaacgtcacgtcccagttgaagggccacgcgttccacccggcaccgctccgcttcgacgacggggcgtcggcgtcggcgtcggcgcagaaccgcactttgcggtcgttctcgacgaccttcgtgttcgccatcgtctccgactacgtgacggtgagcggcaacgggctggccttcttcgtcgcgcccagcaagaacctgtccgcggcgtcgcccagccagttcctcggcctcttcaacagcgagaacaacggcaacgcgaccaaccacgtcttcgcggtcgagctcgacaccatcctcaatccggagttccgggacatcaacagcaaccatgtcggcgtcgacgtcaacgggctggtgtccctcgccgccgagcccgcggggtactacgccgacgacgacacgggggccttcaggaacctatccctcttcagcggcgacgcgatgcaggcgtgggtggactacgacggcggggccgcggtgctcaacgtgacgctggcgcccgtggagtcgcccaagcccaagaagcccctgatctccgtggccgccgacctctcggcggtggtgaacgacacggcgtacgtcggcctctcgtcgtcgacgggcccgttccacacgcgccattacgtcctcggctggagcttcgccctggacggcgctgcgccagtactcgactacgcggagctccccaggatgcctcgcgtcgtcaccaagcgacggtccaaggcgctcgacgtggtccttccggtagccatgccgctcctggcgctcgcggtgctggcctgtgtgtccttcctcgcgtggcggcggttccggtacgcggagctccgggaggagtgggaggtggagttcggcccgcaccggttcgcctacaaggatcttttccacgcggcggagggcttcgacagcaagcacctcctcggcgtcggagggttcgggcgcgtgtacaagggcgttctcccggcgtccaagaccgaggttgccgtcaaggtcgtgtcgcacgacgcgaggcaagggatgaagcagttcgtcgcggaggtggtcagcatcggccgcctgcgtcaccgcaacgtcgtgcagctgctcggctactgccggcggaaaggcgagcttctcctggtgtacgactacatgcccaacggcagcctagacaggtggctgtacgaccacggcacgccgccgctgaggtgggagcagagactccgcgccatcaggggcgtcgcggccggcctgctctacctgcacgaggactgggagcaggtggtcatccaccgcgacatcaaggccagcaacgtgctcctggacggcgagatgaacgctcggctcggcgacttcgggctcgcgcggctgtacgagcgcggggccggcccgcagagcacgcacgtggtgggcaccatggggtacctggcgccggagctcgcgcacacccgccgcgtgacgccggccacggacgtgttcgcgttcggctccttcgtgctcgaggtggcctgcggccggaggccaatcgagcgcggacgccgcggagacgacgacgacgggcggttcgtgctggtggactgggtgctggagctctggcacacgggcgcgctcgccgacgccgcggacgcgcggctctgcggcgagtaccccgcagaggaggccgagctggtgctgaagctgggcctgctgtgctcccacccggtgcccgccgcgcggccgtcgatgcggcaggtggtgcagtacctcgacggcgacgcgccgctgcccgagccgccggcgtcgtaccagagcttcaccgcgctggccatgatgcagaatcagggcttcgactcctacgccgcgtcgtacccgtcctcatcggcgactgtgacgagcggcggcgccatgtcctccgtacattccggagggaggtgatcgagattcgaggccgcgacgaatttctgagtctgcagtcaattctaggtctcattttcgaagcagcgggttggttgactgattgaggaatcaggatttgagctacctgtgcgcgtgctgccgatcagagaggcatcgtctcagagcggtgacggg

SEQ ID NO: 95223 - DNA, 134 bp, Zea Mays
agaaatcactagaactcatgtttttaaaaagtatttcgacccagaaccaacctaacccgcaagtctttttgaaccaaacacgggtgttgtgggttgaatctgttcaaacccgtatcaacccgctaaccaaacgc

SEQ ID NO: 95224 - DNA, 370 bp, Zea Mays
cctgcccgtctgggccgcaccttttcgctcgacactgtacaggagcaggggtttgtttggtcatgcctttcaattccggccatacgctgctgtcgtgatgactgatgatatgctcaggtcagggacgcgcgccgcccgcgccaggccgggaacgacgatggcagtggctcggtcatctggtcagagtcagacacgcagtgattctactctatgcatgcatgcgctgcctctggatcatcgtgcatgcatcttcgtcgacagaacctaacgttctgaacgaggacagattaggacaccaccaatgcaatgcaaggtaacaagagcattagcttcgattagaaacagcaggccatatatgtcaatatctttt

SEQ ID NO: 95225 - DNA, 1883 bp, Zea Mays
agttattactcaaaatccatgccattaaaaaggacttcaactccaagcggaacacttctactcccgttgttaaacggcactaccaacgaaacaacgaggaagaaggccgggagaggaaatcctttggcggcgcgcgcacgcgcggcagacacgtccacatccactgcagcgacgagccagccggtccgcggtcagcagcttggcagcagccccactctggctcccccctccgccatcactgcgcttgtgcgcgcgcacccacccccgcggcccgctcatcacccgcccggtcccgccgcctatttaacgccgcccccaccggggcactcggccctctccgtctcagaacgccccagccttccacctcgaactccgcggcgcccagcgccctcggtaaccgccccccgccccgccacagagacaggtcgacgagacagacaaaggccggccgccatgggagaggacaagaaggcgggcaacaaggacgccgccggcggcgacaagaagaaggacgccggcgccggggccgcgccgcagcccatcgtgctgaaggtcgacttgcactgcgccggctgcgccaacaaggtccgcaaggccatcaagcacgccccaggtgtggagtcggtgacgccggacatggcggcgggtaaggtggtcgtgaccggtccggcggacgcggtggagctcaaggagcgcatcgaggccagggcgaagaagcccgtgcagatcgtctccgccggcgccggcccacccaagaaggagaaggacaaggagaaggagaaggataagaaagcggacggcggcgagaagaaggcggacaaagagaagggcggcggcggcggcggagagaagaaggccgacaaggaaaagggcggcggagagaagaaggccgacaaggagaagggcggcggcgagaagaaggccgacaaggagaagggtgccgacaagcccaaggaggagaagaagaagcccaaggaggagactgtgacgctgaagatccggctgcactgtgacggctgcatcgagcgcatcaagcgccgcatctccaagatcaaaggcgtgaaggacgtggcgttcgacgccgccaaggacctggtgaaggtgaccggcaccatggacggcgccgctctgccggcgtacctcagggagaagctcagccgggacgtggaagtggtggcgcccggcaagaaggacggcggcggcggcggtgacaagaaggacaagggcgcaggagacgggggagataagaagaaggacggtggcggcggcggcggcggcggggccgaggagaagaaggacaaggccggggccgcggccgcctccgcgtcggtggcgccgccgcccctggccgacgccggcatgtaccaggtgccgccgcactacgggtacgcgccgtaccaccagccggctccaggcggctactacggtgccgccccaccgcccaaccaccacgccggcttctaccccaacggcggcggcgtccattacccgcccgcgccagcctacgcgtacggccccacccacctccacgcgccccagatgttcagcgacgagaaccccaacgcctgctccgtcatgtgaactcgctcgcttcgccggtttgccgccgccgccgcgccttggcacccccttcctccgtgtgagaccaagaaccatgggcttgtcctggattagcggtgtctttagttaaaattatcagtgagtagtagctagcttaagcagtgctccgatccgagatcagttcttccagcagacctgtgtaaatgagagtctcgccgccccgccccgccccgccccggtgtaacgcatcgtcatgtgtaaaatctatccggacccgataaagttttgcccttctgtcatcgctaatcgccatttgcgacgcc

SEQ ID NO: 95226 - DNA, 1701 bp, Zea Mays
agttattactcaaaatccatgccattaaaaaggacttcaactccaagcggaacacttctactcccgttgttaaacggcactaccaacgaaacaacgaggaagaaggccgggagaggaaatcctttggcggcgcgcgcacgcgcggcagacacgtccacatccactgcagcgacgagccagccggtccgcggtcagcagcttggcagcagccccactctggctcccccctccgccatcactgcgcttgtgcgcgcgcacccacccccgcggcccgctcatcacccgcccggtcccgccgcctatttaacgccgcccccaccggggcactcggccctctccgtctcagaacgccccagccttccacctcgaactccgcggcgcccagcgccctcggtaaccgccccccgccccgccacagagacaggtcgacgagacagacaaaggccggccgccatgggagaggacaagaaggcgggcaacaaggacgccgccggcggcgacaagaagaaggacgccggcgccggggccgcgccgcagcccatcgtgctgaaggtcgacttgcactgcgccggctgcgccaacaaggtccgcaaggccatcaagcacgccccaggtgtggagtcggtgacgccggacatggcggcgggtaaggtggtcgtgaccggtccggcggacgcggtggagctcaaggagcgcatcgaggccagggcgaagaagcccgtgcagatcgtctccgccggcgccggcccacccaagaaggagaaggacaaggagaaggagaaggataagaaagcggacggcggcgagaagaaggcggacaaagagaagggcggcggcggcggcggagagaagaaggccgacaaggaaaagggcggcggagagaagaaggccgacaaggagaagggcggcggcgagaagaaggccgacaaggagaagggtgccgacaagcccaaggaggagaagaagaagcccaaggaggagactgtgacgctgaagatccggctgcactgtgacggctgcatcgagcgcatcaagcgccgcatctccaagatcaaaggcgtgaaggacgtggcgttcgacgccgccaaggacctggtgaaggtgaccggcaccatggacggcgccgctctgccggcgtacctcagggagaagctcagccgggacgtggaagtggtggcgcccggcaagaaggacggcggcggcggcggtgacaagaaggacaagggcgccgccgcccctggccgacgccggctccaggcggctactacggtgccgccccaccgcccaaccaccacgccggcttctaccccaacggcggcggcgtccattacccgcccgcgccagcctacgcgtacggccccacccacctccacgcgccccagatgttcagcgacgagaaccccaacgcctgctccgtcatgtgaactcgctcgcttcgccggtttgccgccgccgccgcgccttggcacccccttcctccgtgtgagaccaagaaccatgggcttgtcctggattagcggtgtctttagttaaaattatcagtgagtagtagctagcttaagcagtgctccgatccgagatcagttcttccagcagacctgtgtaaatgagagtctcgccgccccgccccgccccgccccggtgtaacgcatcgtcatgtgtaaaatctatccggacccgataaagttttgcccttctgtc

SEQ ID NO: 95227 - DNA, 1593 bp, Zea Mays
agttattactcaaaatccatgccattaaaaaggacttcaactccaagcggaacacttctactcccgttgttaaacggcactaccaacgaaacaacgaggaagaaggccgggagaggaaatcctttggcggcgcgcgcacgcgcggcagacacgtccacatccactgcagcgacgagccagccggtccgcggtcagcagcttggcagcagccccactctggctcccccctccgccatcactgcgcttgtgcgcgcgcacccacccccgcggcccgctcatcacccgcccggtcccgccgcctatttaacgccgcccccaccggggcactcggccctctccgtctcagaacgccccagccttccacctcgaactccgcggcgcccagcgccctcggtaaccgccccccgccccgccacagagacaggtcgacgagacagacaaaggccggccgccatgggagaggacaagaaggcgggcaacaaggacgccgccggcggcgacaagaagaaggacgccggcgccggggccgcgccgcagcccatcgtgctgaaggtcgacttgcactgcgccggctgcgccaacaaggtccgcaaggccatcaagcacgccccaggtgtggagtcggtgacgccggacatggcggcgggtaaggtggtcgtgaccggtccggcggacgcggtggagctcaaggagcgcatcgaggccagggcgaagaagcccgtgcagatcgtctccgccggcgccggcccacccaagaaggagaaggacaaggagaaggagaaggataagaaagcggacggcggcgagaagaaggccgacaaggagaagggtgccgacaagcccaaggaggagaagaagaagcccaaggaggagactgtgacgctgaagatccggctgcactgtgacggctgcatcgagcgcatcaagcgccgcatctccaagatcaaaggcgtgaaggacgtggcgttcgacgccgccaaggacctggtgaaggtgaccggcaccatggacggcgccgctctgccggcgtacctcagggagaagctcagccgggacgtggaagtggtggcgcccggcaagaaggacggcggcggcggcggtgacaagaaggacaagggcgccgccgcccctggccgacgccggctccaggcggctactacggtgccgccccaccgcccaaccaccacgccggcttctaccccaacggcggcggcgtccattacccgcccgcgccagcctacgcgtacggccccacccacctccacgcgccccagatgttcagcgacgagaaccccaacgcctgctccgtcatgtgaactcgctcgcttcgccggtttgccgccgccgccgcgccttggcacccccttcctccgtgtgagaccaagaaccatgggcttgtcctggattagcggtgtctttagttaaaattatcagtgagtagtagctagcttaagcagtgctccgatccgagatcagttcttccagcagacctgtgtaaatgagagtctcgccgccccgccccgccccgccccggtgtaacgcatcgtcatgtgtaaaatctatccggacccgataaagttttgcccttctgtc

SEQ ID NO: 95228 - DNA, 1533 bp, Zea Mays
agttattactcaaaatccatgccattaaaaaggacttcaactccaagcggaacacttctactcccgttgttaaacggcactaccaacgaaacaacgaggaagaaggccgggagaggaaatcctttggcggcgcgcgcacgcgcggcagacacgtccacatccactgcagcgacgagccagccggtccgcggtcagcagcttggcagcagccccactctggctcccccctccgccatcactgcgcttgtgcgcgcgcacccacccccgcggcccgctcatcacccgcccggtcccgccgcctatttaacgccgcccccaccggggcactcggccctctccgtctcagaacgccccagccttccacctcgaactccgcggcgcccagcgccctcggtaaccgccccccgccccgccacagagacaggtcgacgagacagacaaaggccggccgccatgggagaggacaagaaggcgggcaacaaggacgccgccggcggcgacaagaagaaggacgccggcgccggggccgcgccgcagcccatcgtgctgaaggtcgacttgcactgcgccggctgcgccaacaaggtccgcaaggccatcaagcacgccccaggtgtggagtcggtgacgccggacatggcggcgggtaaggtggtcgtgaccggtccggcggacgcggtggagctcaaggagcgcatcgaggccagggcgaagaagcccgtgcagatcgtctccgccggcgccggcccacccaagaaggagaaggacaaggagaaggagaaggataagaaagcggacggcggcgagaagaaggcggacaaagagaagggcggcggcggcggcggagagaagaaggccgacaaggaaaagggcggcggagagaagaaggccgacaaggagaagggcggcggcgagaagaaggccgacaaggagaagggtgccgacaagcccaaggaggagaagaagaagcccaaggaggagactgtgacgctgaagatccggctgcactgtgacggctgcatcgagcgcatcaagcgccgcatctccaagatcaaaggcgtgaaggacgtggcgttcgacgccgccaaggacctggtgaaggtgaccggcaccatggacggcgccgctctgccggcgtacctcagggagaagctcagccgggacgtggaagtggtggcgcccggcaagaaggacggcggcggcggcggtgacaagaaggacaagggcgcagccgcccctggccgacgccggctccaggcggctactacggtgccgccccaccgcccaaccaccacgccggcttctaccccaacggcggcggcgtccattacccgcccgcgccagcctacgcgtacggccccacccacctccacgcgccccagatgttcagcgacgagaaccccaacgcctgctccgtcatgtgaactcgctcgcttcgccggtttgccgccgccgccgcgccttggcacccccttcctccgtgtgagaccaagaaccatgggcttgtcctggattagcggtgtctttagttaa

SEQ ID NO: 95229 - DNA, 1215 bp, Zea Mays
agttattactcaaaatccatgccattaaaaaggacttcaactccaagcggaacacttctactcccgttgttaaacggcactaccaacgaaacaacgaggaagaaggccgggagaggaaatcctttggcggcgcgcgcacgcgcggcagacacgtccacatccactgcagcgacgagccagccggtccgcggtcagcagcttggcagcagccccactctggctcccccctccgccatcactgcgcttgtgcgcgcgcacccacccccgcggcccgctcatcacccgcccggtcccgccgcctatttaacgccgcccccaccggggcactcggccctctccgtctcagaacgccccagccttccacctcgaactccgcggcgcccagcgccctcggtaaccgccccccgccccgccacagagacaggtcgacgagacagacaaaggccggccgccatgggagaggacaagaaggcgggcaacaaggacgccgccggcggcgacaagaagaaggacgccggcgccggggccgcgccgcagcccatcgtgctgaaggtcgacttgcactgcgccggctgcgccaacaaggtccgcaaggccatcaagcacgccccaggtgtggagtcggtgacgccggacatggcggcgggtaaggtggtcgtgaccggtccggcggacgcggtggagctcaaggagcgcatcgaggccagggcgaagaagcccgtgcagatcgtctccgccggcgccggcccacccaagaaggagaaggacaaggagaaggagaaggataagaaagcggacggcggcgagaagaaggcggacaaagagaagggcggcggcggcggcggagagaagaaggccgacaaggaaaagggcggcggagagaagaaggccgacaaggagaagggcggcggcgagaagaaggccgacaaggagaagggtgccgacaagcccaaggaggagaagaagaagcccaaggaggagactgtgacgctgaagatccggctgcactgtgacggctgcatcgagcgcatcaagcgccgcatctccaagatcaaaggcgtgaaggacgtggcgttcgacgccgccaaggacctggtgaaggtgaccggcaccatggacggcgccgctctgccggcgtacctcagggagaagcccttcctccgtgtgagaccaagaaccatgggcttgtcctggattagcggtgtctttagttaa

SEQ ID NO: 95230 - DNA, 1457 bp, Zea Mays
agttattactcaaaatccatgccattaaaaaggacttcaactccaagcggaacacttctactcccgttgttaaacggcactaccaacgaaacaacgaggaagaaggccgggagaggaaatcctttggcggcgcgcgcacgcgcggcagacacgtccacatccactgcagcgacgagccagccggtccgcggtcagcagcttggcagcagccccactctggctcccccctccgccatcactgcgcttgtgcgcgcgcacccacccccgcggcccgctcatcacccgcccggtcccgccgcctatttaacgccgcccccaccggggcactcggccctctccgtctcagaacgccccagccttccacctcgaactccgcggcgcccagcgccctcggtaaccgccccccgccccgccacagagacaggtcgacgagacagacaaaggccggccgccatgggagaggacaagaaggcgggcaacaaggacgccgccggcggcgacaagaagaaggacgccggcgccggggccgcgccgcagcccatcgtgctgaaggtcgacttgcactgcgccggctgcgccaacaaggtccgcaaggccatcaagcacgccccaggtgtggagtcggtgacgccggacatggcggcgggtaaggtggtcgtgaccggtccggcggacgcggtggagctcaaggagcgcatcgaggccagggcgaagaagcccgtgcagatcgtctccgccggcgccggcccacccaagaaggagaaggacaaggagaaggagaaggataagaaagcggacggcggcgagaagaaggcggacaaagagaagggcggcggcggcggcggagagaagaaggccgacaaggaaaagggcggcggagagaagaaggccgacaaggagaagggcggcggcgagaagaaggccgacaaggagaagggtgccgacaagcccaaggaggagaagaagaagcccaaggaggagactgtgacgctgaagatccggctgcactgtgacggctgcatcgagcgcatcaagcgccgcatctccaagatcaaaggcgtgaaggacgtggcgttcgacgccgccaaggacctggtgaaggtgaccggcaccatggacggcgccgctctgccggcgtacctcagggagaagctcagccgggacgtggaagtggtggcgcccggcaagaaggacggcggcggcggcggtgacaagaaggacaagggcgcaggagacgggggagataagaagaaggacggtggcggcggcggcggcggctccaggcggctactacggtgccgccccaccgcccaaccaccacgccggcttctaccccaacggcggcggcgtccattacccgcccgcgccagcctacgcgtacggccccacccacctccacgcgccccagatgttcagcgacgagaaccccaacgcctgctccgtcatgtgaactcgct

SEQ ID NO: 95231 - DNA, 1404 bp, Zea Mays
cagaagtcaaaattgctgattcaggccagcatctgtatgattaactcccatggcaaagtcagaagtctagtttcctggtagctttagcccatccacgtccgtgatgatgcaccgctctctagagctgccaagggaacacacggattgttttcttctcctaacagctgcttgtggcacaccctaaacctccactccacctatcgtgtgattgatcaagtctttctcctaccttcggttagcctgatgagcaccggcctcctgtatttaagcagtggtagtatcccaatgccatgcatcattcccgcagcaaacatcctgatcggtcacctagctcatctccttcccaaaacacacaccttttctctatctgaaatggctagttccttcatgttgtgcacggtggttgttgcggcgtgcctcgccgccgccgccgccgactggtctcaaggcactgccactttctacggcggagtcgacgcgtccgggacgatgggtggcgcatgcgggtacgacaacctgtacaacgcggggtacggcgtcaacaccgcggcgctgagcccgaccctgttcaacgacggcgcgtcctgcgggcagtgctacctcatcacctgcgacgggacgcgtccgggcggccagtactgcaagcccggcaactccatcacggtctccgccaccaacctgtgcccggccaactacgcgctccccaacggcgggtggtgcggcccggggcgcccccacttcgacatgtcgcagccggcgtgggagaacatcggcatcttcgggggcggcatcatcccggtgctgtaccagcaggtcaagtgctcgcgcaccggcggagtgcgcttcggcctcgccggctcgcagtacttcctgctcgtcaacatccagaacctcggaggcagtggctccgtgggggccgcctgggtgaagggcgacagaaccaactggattcagatgtccaggaactggggcgcaaactggcaggcgctcgccgggctcgtcggccaggggctcagcttcgccgtcagcactaccggcgggcagtacattcagttctggaacgtcgcgcctgggtggtggcagttcggacagaccttcggcacaaacctgaatttctactactaattaagaccccccgctgccgacgccgagggcattctcttgattctgacggagacctaaatacacttgttggcttcttgccgttgtatcattgcttgtgtcggccggcgactcccggattgacgcccatcctacttgatgctccggctgctggcggaggaaatggaagaataggatgtaaaaaagagaagggggtcggtgacatcacgtacaccagattgctttttacaacacatttttttcttaacatcgtatgggtatatacaccgaattatatacaaa

SEQ ID NO: 95232 - DNA, 758 bp, Zea Mays
gatctcactccatccccagtcccactggccactcgtctcgctgcgaccgaaacagcggcctcactaaactaacccagccatgctggccgtgacggtgagccaggttgtggcgctgctctccaaggcggcgggggccgaggccgagcgttggcggcgacgttgcggcggcggcggccacgaccgctcggcggcgtcgccggcggtggggtactgctgcgtgtgcatttcggcgtgccgcgacgacggggacgacgtccggaggctgccctgcggacacgccttccaccgcgactgcgtcgaccgctggctcgcgcgctgccgccgcacgtgcccgctctgccgcctgcacgtcgccgccggacctgccgtgggtttcgtcgaccagcagcagcttcagctcagcgacgacctcgtcatctggttctcttcgctcttcgtcgccggcttgtagttgtaggtagctacagggctcgccccgcccgcgcacgcacccgccgtagggataagctagcaatgtgcctctgccaactgcctgcgtacgcgcataaaagtattaaagcttttcctgtggttattaaaaaaaaatgttcggaggacaaaagtctcttcggtcctgctacatcatttctatatcgactcctccaaatctaccgcttggtttaaattatgtaaaccaacacgttgtatagtggaagagttgttttcaaaatctatcgtaactgcttccacaatgtatataaagatggttggtttatata

SEQ ID NO: 95233 - DNA, 1278 bp, Zea Mays
tcaccctctcgattaaagcaaaacagaggaataggggaggaaaaaatatttcgataggtctgcggtctgcctgcggctgcggcgccccttgattcatccccggctcgccttcgccggcggtgtcggaacagccagctcgcgctcgccggaggtgtcagggaacagctaggccgcgctcggtttccctttctcttcgcaggattggagccgctgggtcctgaactgcgcggcctgtttcagcgtgaatagcaatcaccatggggtctggatcactaacaatgaagcagaagaaacgagtgaaacatgcaaagaataagtacttgaaacctggtgccttggctcagattcgttatagtaggagtacgagcagggacatcgggaagaaaagaattctgttgaatgcgaaagatgagctggagttgcctccacaacctgaggttctcttagaaagcagtacaacaattttgtcccctgcaagactcaattttaagccatttggtagcaataaggggcagatattgccaaagactccaaagactcctgatgcatctgcgtttgatggtgattcaaatcttgaatcacttccacttgatttgctggtaaagatcatgtgttgcttacaccacgacgaacttaaggtggtttttcatgtttcaaaaaggattcgaaaagcagttgaacttgctagacagtaccatttcaactataccactccagatcggagcagacaggagttgctcctgaacagaacccctcttccaacagagcattggcccttcttaagaattgatggcaaggacgtccgcgtttccaccccaaggacaccaagggctccgaaacatgcctctcgcctttcacgcctcaagctggttgacgtgaagccaatcacagctgtccttttccaggagtctcctacccttttcccttcgaagcgtctccgatgctcgatgccaccaccaaggctggcaagacctgcgtgtaaagctgcaccttcgcctagagttttgcggtacgaggaggagctttgcgaggcggtggcgcagaataagcttctctgaagatgcaagaagtgcatggctttcgtctttagtgtatagcttatctgtgtcaagcccctagtttgaattttgcctaagctgccgtcttagattattgtcgtcaggttagtttttagactagtgccagactgtcttatacctgtaataagtatggagcctagctgctttattccatgagtttgtatatatcacataataaaatggacccctttttaatgca

SEQ ID NO: 95234 - DNA, 265 bp, Zea Mays
atgagagaccggcggaagttgcgggtggcactcttcaattcagcaaaggagaacaccctcaggttagacgggcggtcaatgaagctggggtactgtgtcctccttatcgactcggcgctcatgtcggaaacattcaaggaggtgaagtctgaaccggagcggacatcacgctccgttgatatgcagaaagtggagataaattggcgtgactatcaatacttcacatttgaacgagagctcaagtgagaacctaattggctctgta

SEQ ID NO: 95235 - DNA, 138 bp, Zea Mays
agtagtaattaattttggatcactttatgagatgtgctctcccaacaggaggaaaaggaggaaagacccattcattttttattcatcaattagaacaaagtagaagaagcaactaaacaccatacatgttcatatatc

SEQ ID NO: 95236 - DNA, 1033 bp, Zea Mays
atgtcctctgtcccgtgccgtgcatactactcctctcccagactttccttggattttttgtttctttttaatttctcgttcgtccatctccgttatctctgaatttggaggcagaactgaagagagagctagaagcgggtgacccatggcttccagcaagcgcgaatacgaggacttcgtgcctccgcacaaaacggagcgcgagccggccacccacaccctcaccgtcaacctctccggccaagggttcaagaaggagcacgtcagggtgcagatggtccacagccaacggcgcctgatcgtgcgcggggagcgccccgtcgacggcaaccgctggagacgcttcggcctcgagctcctcgtccccgacggctgcgacgccaaggccatccacgccaggttcgaaaacggcgtcttccgcgtcaccatgcctgccgtcccgccggagcaagtcccggtcgtcgccagcgctgcgaagcaagacggtggtgaccgtgccgcgcgagggcgagaagacaacaagcacgagacgccgcggaagcaagaagcgaggcagcgcgtggtgagctcggccagagaccccggcggtagtagcagcaagaacgacggcgccggtggcggtagcagcgctcctccgtcgtcatgccaaggcttcctcagcaatccgaagatggccaccactgtgcttgccgtggtgctcgtcctcatcagcctcggcatctatgtcaagaacagcgtctggccgtaaactccgtcctggcgcgtgcatatgtgtggtatacgggatgtggtaacgattcctggacgcagttggtgaaagttcctcgcgtacggtacgtatcgaagcgattggagggatatgtgtgtttaatttcatttgtttctagaaaatgagcgaaaaaaatgatttacctgcaaatgctgcaagagcatactccctcaaggtccaattaaatgggtgcatagaacaattccgagttggattgtttatctagtttatataagatttgatcagctataatatttcaagacc

SEQ ID NO: 95237 - DNA, 473 bp, Zea Mays
gtattcagagtagggaacttgtgaatgcaaaacgagtcactcaccggcgccactctcggcggagaatgccctcctcgaccatgagtgcaagcacagggtcctggaggacgaggcgacggagcgggaggcgagtcgcagttgcctggccttccccagacgggcggcgcgcgcggccagggcactcgtctcctccgccctcggcctcaacaacctgcagccgagcagggccgccgtgcggaggttcgagtagtacgcggacgacgcgggcgagttcctgcgatttgtggagctcggctgctgcgcgtcgcgctgccgcgtgccctccgtcgccgatgctttcatccggaacctcgctgcggggaggaagctgcaacacatggtggagctggcggaccggtgcacgttcttcttgctgtggctgtcgtttttcatcagtgattctccggtggaggaacgcggggtttttgactgct

SEQ ID NO: 95238 - DNA, 252 bp, Zea Mays
atgggcggcggcgacagccatgctcgaacaaaagagggaggcgtgtacgacgccgaaggggctagtcacgcatgcaccgcgatggaggacgtcggtgtcgttgggggcgacgccgagaaggggctcacgcccaaccacgcatgtgctgaaggggacgacaccggcgagggggaacgaggtcacacccacgtcgtggagggaggcagcggcatcctacgcagtaccgggaagatagggttgcgcctgtgttga

SEQ ID NO: 95239 - DNA, 1963 bp, Zea Mays
gtcgatcctcctcatttcggcactgggccccactcgtcactcaccctttcaggcctccacggcacctcccgacagggactcccctcctactcctgctctcccagcctgcctttacttctcccgaatgctcgaggcctgcaaagctccagcacatccaatcgcacgacactccctgctgctctctgctgagaggtgctagatctcggactcgccgttgatttgattccaagttaaagacagcgagcaatccatagattgaccggtggagagcgagagaaagcgagagagagaagggaattggttggtaggtggagaccggagggagagctcagctcaggagattgatgcttgcatggtgatgcgggcgcgggcgatggggctgagcagcatccggcgggaggtgctggtctccgccgtcttcacggcgctcctcgtggcctccatcctcctcctcccctcgctcctcctaacgggcgctgggcccatcaggtggccgtccctgtccccgtcgaaggatgccggcatcggcgaggaggaggagcagcaggcgcggtaccccgtgacgttcgcgtacctgatctcggcgtcgacgggggacgcgtcccgcgccgcgcggctgctggcggcgctgtaccacccgggcaacagctacctgctgcacctggaccgggaggcccccgcggaggagcaccggcgtctggcggagctggtgtccgggcgcggcgtgtacgcgcgcgcgggcaacgtgtggatcgtgggcaggcccaacctggtaacctaccgtggccccaccatgctgaccaccacgctgcacgccgtcgccgtgctgctccgcctccgccgccgctgggactggttcatcaacctcagcgcctccgactacccgctcgtcacccaggacgatttgatggaggcgttcgccgggctgcccagggacctcaacttcatccagcacacgagccacctgggctggaagataaagaagcgggcgcggccggtgatcctggacacggcgctgtacgaggacgggagggcggagctgatccgcccggtgaacatctccaccaacctcaggaggctgcccacggcattcaagctcttcacagggtcggcgtggacgatgctgtcgcgggcgttcgcggagtacgtgacgatggggtgggacgacaacctgccgcggacgctgctgctgtaccacgccaacatcgtctcctcgcccgagttctacttccagacggtggcctgcaactcgcgccggttccgcaacgccacggtcaaccacgacctgcacttcatccgctgggacaccccgcccaagcagcacccgctctacctcaccgccagggactaccgccggatgctgctcagcggggccgccttcgcgcgcaagttcagggacggcgaccccgtgctggaccgcatcgacagggacatcctccgccgccgggaccccgccgcccacttcgcctacggcggctggtgctccgaggccggcgaccaaaacggcggcgccgcgctctgctccaacccgcaggagcccgggaggcgcggggccgtcaagcccggcgccgggtccaggcggctcaaggccatgctcaggaagacgctgtcgccgaggaatttcaggaggcagcagtgtaggtaggggaactgttctgttatgttctgatcaaacaaacaggtcgttgactcaattttgtatgtatagaaaaggcagatctgaaacgcatcaaagcggcccaaagccaattttgttcagttgattcgcacaagtctgaattgaattgtagtagggagatactcctggtggttgatcatctcatacacggaataataatggaaggggcattatgcaaactgtttagttatatggtactaaactgtttagtaatacatagatgctcgtcaatttgttggtgacaaacagcaaagccaatgaggaaaacatttgatttatcacagg

SEQ ID NO: 95240 - DNA, 2062 bp, Zea Mays
gtcgatcctcctcatttcggcactgggccccactcgtcactcaccctttcaggcctccacggcacctcccgacagggactcccctcctactcctgctctcccagcctgcctttacttctcccgaatgctcgaggcctgcaaagctccagcacatccaatcgcacgacactccctgctgctctctgctgagaggtgctagatctcggactcgccgttgatttgattccaagttaaagacagcgagcaatccatagattgaccggtggagagcgagagaaagcgagagagagaagggaattggttggtaggtggagaccggagggagagctcagctcaggagattgatgcttgcatggtgatgcgggcgcgggcgatggggctgagcagcatccggcgggaggtgctggtctccgccgtcttcacggcgctcctcgtggcctccatcctcctcctcccctcgctcctcctaacgggcgctgggcccatcaggtggccgtccctgtccccgtcgaaggatgccggcatcggcgaggaggaggagcagcaggcgcggtaccccgtgacgttcgcgtacctgatctcggcgtcgacgggggacgcgtcccgcgccgcgcggctgctggcggcgctgtaccacccgggcaacagctacctgctgcacctggaccgggaggcccccgcggaggagcaccggcgtctggcggagctggtgtccgggcgcggcgtgtacgcgcgcgcgggcaacgtgtggatcgtgggcaggcccaacctggtaacctaccgtggccccaccatgctgaccaccacgctgcacgccgtcgccgtgctgctccgcctccgccgccgctgggactggttcatcaacctcagcgcctccgactacccgctcgtcacccaggacggtaccctgtgatgcttgcttgcttgcttgctgttggtcgtccactggatggacagactgtttctgaattttgggggttgcagatttgatggaggcgttcgccgggctgcccagggacctcaacttcatccagcacacgagccacctgggctggaagattagagctcgatctgtagaaagaagcgggcgcggccggtgatcctggacacggcgctgtacgaggacgggagggcggagctgatccgcccggtgaacatctccaccaacctcaggaggctgcccacggcattcaagctcttcacagggtcggcgtggacgatgctgtcgcgggcgttcgcggagtacgtgacgatggggtgggacgacaacctgccgcggacgctgctgctgtaccacgccaacatcgtctcctcgcccgagttctacttccagacggtggcctgcaactcgcgccggttccgcaacgccacggtcaaccacgacctgcacttcatccgctgggacaccccgcccaagcagcacccgctctacctcaccgccagggactaccgccggatgctgctcagcggggccgccttcgcgcgcaagttcagggacggcgaccccgtgctggaccgcatcgacagggacatcctccgccgccgggaccccgccgcccacttcgcctacggcggctggtgctccgaggccggcgaccaaaacggcggcgccgcgctctgctccaacccgcaggagcccgggaggcgcggggccgtcaagcccggcgccgggtccaggcggctcaaggccatgctcaggaagacgctgtcgccgaggaatttcaggaggcagcagtgtaggtaggggaactgttctgttatgttctgatcaaacaaacaggtcgttgactcaattttgtatgtatagaaaaggcagatctgaaacgcatcaaagcggcccaaagccaattttgttcagttgattcgcacaagtctgaattgaattgtagtagggagatactcctggtggttgatcatctcatacacggaataataatggaaggggcattatgcaaactgtttagttatatggtactaaactgtttagtaatacatagatgctcgtcaatttgttggtgacaaacagcaaagccaatgaggaaaacatttgatttatcacagg

SEQ ID NO: 95241 - DNA, 775 bp, Zea Mays
caaagctccagcacatccaatcgcacgacactccctgctgctctctgctgagaggtgctagatctcggactcgccgttgatttgattccaagttaaagacagcgagcaatccatagattgaccggtggagagcgagagaaagcgagagagagaagggaattggttggtaggtggagaccggagggagagctcagctcaggagattgatgcttgcatggtgatgcgggcgcgggcgatggggctgagcagcatccggcgggaggtgctggtctccgccgtcttcacggcgctcctcgtggcctccatcctcctcctcccctcgctcctcctaacgggcgctgggcccatcaggtggccgtccctgtccccgtcgaaggatgccggcatcggcgaggaggaggagcagcaggcgcggtaccccgtgacgttcgcgtacctgatctcggcgtcgacgggggacgcgtcccgcgccgcgcggctgctggcggcgctgtaccacccgggcaacgtgtggatcgtgggcaggcccaacctggtaacctaccgtggccccaccatgctgaccaccacgctgcacgccgtcgccgtgctgctccgcctccgccgccgctgggactggttcatcaacctcagcgcctccgactacccgctcgtcacccaggacggtaccctgtgatgcttgcttgcttgcttgctgttggtcgtccactggatggacagactgtttctgaattttgggggttgcagatttgatggaggcgttcgccgggctgcc

SEQ ID NO: 95242 - DNA, 2499 bp, Zea Mays
actaactatttttatttccgtttagtaatttaggtacgatttactacaacctaaaattactgttttcgtttttcaccgtgctcctagtcacctcagcttccctccgtcctcacccagtcctcacccactggacttgcccgattggaaagcaagcgcccggtaggaaagaaggcgcggtcgttttctggacgtgacgggcgcgcgcgtggccgcgtgggcgtggcatacatcctttctccttccatccatacgctgaacagagtatgatttggatcgcctggcctactgctgctgctgtcgtgtccatgccgtcggtgctgtcaacatccggatcattgcgcgcgctccaacgcaacgggggtgatcagataatttccccaatcccccccgcgcgccgatcgcgacaaacatgcatggcgaagccttccgcttctgcagcggcggcggcgctccgtgcctccctcggcgtcgccttcgcgctgctgctcctgctcgcttcctcccgcctcccgcaccgcgccctgtccgccgaactctcgtccccctcggtggtggcccacgagcgacgcggccacggcgcctgcgcgggcgtgcggacccccgacgagagataccgcgccatcgcggccgggtctgacggccggtaccgctacccgcgcggcggcgggcacgtcgactacctgtacctcttctactgcgtcctcggcggcgaccgccggcccgccctggggtacgccgcgatggcggcgtggctcgccgtgctcttctacctgctcgccgacacggccgcggtctacttctgctccagcctcgagggcctcgcgcgcctgctccgtctcccgccggccatcgccggggccacgctcctctcgctcgggaacggtgcgcccgacgcgctctccgccgtcgcgtccttcttcgccggagacggcggcgagggaggagggacggccgccgccgtggggctcagcggcgtgctcggtggcgccatgttcgtctcctcggccgtgctcggggtcatcgccatccgcctcggcggccaggaggtcgccgtccaccgcgccagcttcttccgggacgcagccttcctcttcctggcgctcgtcgccgtggccgtcgtcgtcgccgcgggccaggtcacaatctgggccgccgccgggttcgcctcgctctacctcgtctacgtcctcgccgtcgccttcaccccggaccgctggaccagacgccacgacgcgcacgcggtggatgaccccgcctccgccgctgccgtctcggagctccacaacgtcacggagaccaagttctacaccgaccaggaagcccgagatccactgctccccgacaccgcaccgctacttcaatactacgccggcgaagcaaacagcaacagcaacgacggctccactggcaacaagagcgtcttctggaccgtccttcgcctgctagagcttcccctgagtctcccgcggcggctgacgattccggacgcgagcaaagagcggtggagcaagacggccgcggtgaccgcggccacgctcgcccccatcttcctgtccttgctctggagccaccgcgccacggggggcccgttcgttaccgtcctcctcggcggccttgctggtctcgcgctgggcctcattgccttcctcaccacggatcccttcgccccaccaacccgattcctcggcgcgtggctcgccggcgggttcgccatgagcgtggcgtgggcgtacgtgatcgccaacgaggtcctgtcgctgctggtctcggcgggaatcatcctttccgtggactcggcggcgctgggggtgaccgtgctcgcctggggaaactccatcagcgacctaatagcgaacgtggcggtggcatctcgcggcggcggcgcgcaggtggccgtgtccggctgctacggcgggccggtgttcaacgttctcgtgggcctgggcctgtccatgctgttagcgtgctggagcgggtacccgcagccagtggagatacccagggagcgtgggctttaccgaactctggcttttgttgtcgctgggcttttgtgggccgttgtgatgctacctaggagaggaatgagggtggacaggacactgggcgttgggctcctagtcgtatacttttgcttcctctgtattaatgtttcagagcttaagaatgcacggtaatatattgggtttgttagggttttagggtttagggttttatagctctgctcaacaatcagaaaaatcaaactcaagcgatgctgattatttttcgaaatgaaatggttgttagacgatgaaattagttagtctttttaatcgatactggtagcttaaattaatttataaatgacttgtaataacataattgatattatggttgaatgcatcaatgattagtatgagtgaatgaatactatgatggaatggccgaacaaattgctgataatggttgaacaaccaaaaaccttcataaaaaaggttcatacccaaaatggggatggct

SEQ ID NO: 95243 - DNA, 2520 bp, Zea Mays
atggggcgccgccacttcgccttctcgtccgccgaggaggccgccgccgagcgccgccgccgcaagcgccgtctccgcatcgagcctccaatcaacgccctccgccgcgggccacctcccccacgggaccccaacgcgccccgcctcccagacaccacctccgcgctcactggcccgcgcctcagcctccacaaccgcgtccagtccctcatccgctctggtgatctagacggcgcctcagccgctgcccgcgccgccgtctcctcgcgcgtccggcccaccgtcttcacctccaacgccgtggccgcggccatggtccgcgccgcccgccacgatgacgctgtcgccctctttgatttcttcttccgccgctctaatatcgtccccaacatcgtctcctacaacaccctcatcctcgcacactgcgaggccgaccgcgtcgacaccgcgctgcaggtctaccaagacatgctcgcgtctgcgcccttctccccctctgccgtcaccttccgccacctcaccaagggtctcgtcgctgctggccgcatcggtgacgcccttgacctcctccgcgagatgctcagccgcagcgctggcgccgactcactcgtctacaacaacctcatcgctggctacatcgacctcaacgactgggacagggccttcgagctcttcaacgagctcgcagagaggtgccttgtctatgacggtgttgtacacaccacgttcatggagggctactggaggcagggcaaggacaaggaggccatggacaactaccagtcccttcttgatcggggcttcaagatgacgccggccacctgcaacgtgctgctcgagacactcttcaagcacggcaagcacaaggaggccaacgacctatgggagaccatgattgacaaccacaccccgccaagcttcatcggcatcaacgcagagtcctacaatgtcatggttaaccagtgcttcagggagggcaagtttcaggaggcgattgaggtcttccaccgccagcccaggaagaatgtccaaatggacgttggttgcttcaacaacatcattggcaaactctgtgagaatgggatgctagctgaggcaaaaaagctctttgaggagatggagaagaagtcagtacttccagatgtgtacacctacacttaccttgttgactcatgcttcaaggaaggctatgtggaagatacactggaatatttctataaaatggcagatgagaaaccacatgggccaaagttcaatattggtttctttaaccgcatgtttgaagggcttacagaagctggccgtattgatgacgccttgaaggtgtacgggaggatgcctgacaaggaaatcaaaccaaacatgaccacttttgaaatccttgtcaaagccttgtgcaaagaagaggacttggatcaagcaaggggcctagtgatggacatggcaagaggtggtattgtgcctcctcaagggttccgtgagtctgttgttaactttttcaaggaggctggtcgacaggaagaaattgagaaagcttttgaagaaaaacctatgccaacacctcagcctagaacagagtatcagcctaggactgagtatcactctcgcaatgcagacggtgctgctcaaataaaacaacctggctttagctctgctccagcggtgggacctgaatttcttcactctcagccacaacaatccacacttagtaacactccaaatcagcagcctgagtttggctcatctcgatcatggaattcaggtttcggtgctcctcaagcgcagcctggatatggtgcacctcagcctgtacagacaccacagccacagtttggtgcttctcggggtgaaccaggatatagcaacataggaaatcagcatgttcagtttcgctctccccagagagaaccaaaatttagcaaccatccaccacaagttgggtatggtgcccaattgcctcagtcaggatatcgctttgagccccaacaagaacaggttggatttggaaatcaagtagcacaacctgcacatgtggcttcaagacaaccctcatatgacacccgctggagctcaagagattatggatcaacccaagggcaactgggatatggtggtcctcaagcgcagtcatatgaatctcagttaccacatcaccagggaagttttggtatgccacatttccaaaataacaatggcttctatcgatacaaccctggatatggcccatctaatggttcgcagggatttgatgctccccatggtgattctaaaactgctgagagtaccactcctgaagaccggcaacaagcagcatttctgaaagcatgaggtccaaacatattttggctccaaatcaaaaggtattgatatgactaggattctaggttgcttctctctaatctacggtcttatggtggatatttttatgtgactactgtgtagaactataggcctcaagttcaattacaaacattctattgtagcaaaagacatcttcaagtattattatcaaggaaaaac

SEQ ID NO: 95244 - DNA, 2866 bp, Zea Mays
cgccgccgccggcgcccaccaaggcagcgcaacgctcgttcctccaaaggagagatgacgctctaccgtcgtgtcctgctcctccgtcgcctctcccacctccacccctcgcccgttccggccatctgctcctcaccaccacccaccctcgcggggctgctcacccccatggggcgccgccacttcgccttctcgtccgccgaggaggccgccgccgagcgccgccgccgcaagcgccgtctccgcatcgagcctccaatcaacgccctccgccgcgggccacctcccccacgggaccccaacgcgccccgcctcccagacaccacctccgcgctcactggcccgcgcctcagcctccacaaccgcgtccagtccctcatccgctctggtgatctagacggcgcctcagccgctgcccgcgccgccgtctcctcgcgcgtccggcccaccgtcttcacctccaacgccgtggccgcggccatggtccgcgccgcccgccacgatgacgctgtcgccctctttgatttcttcttccgccgctctaatatcgtccccaacatcgtctcctacaacaccctcatcctcgcacactgcgaggccgaccgcgtcgacaccgcgctgcaggtctaccaagacatgctcgcgtctgcgcccttctccccctctgccgtcaccttccgccacctcaccaagggtctcgtcgctgctggccgcatcggtgacgcccttgacctcctccgcgagatgctcagccgcagcgctggcgccgactcactcgtctacaacaacctcatcgctggctacatcgacctcaacgactgggacagggccttcgagctcttcaacgagctcgcagagaggtgccttgtctatgacggtgttgtacacaccacgttcatggagggctactggaggcagggcaaggacaaggaggccatggacaactaccagtcccttcttgatcggggcttcaagatgacgccggccacctgcaacgtgctgctcgagacactcttcaagcacggcaagcacaaggaggccaacgacctatgggagaccatgattgacaaccacaccccgccaagcttcatcggcatcaacgcagagtcctacaatgtcatggttaaccagtgcttcagggagggcaagtttcaggaggcgattgaggtcttccaccgccagcccaggaagaatgtccaaatggacgttggttgcttcaacaacatcattggcaaactctgtgagaatgggatgctagctgaggcaaaaaagctctttgaggagatggagaagaagtcagtacttccagatgtgtacacctacacttaccttgttgactcatgcttcaaggaaggctatgtggaagatacactggaatatttctataaaatggcagatgagaaaccacatgggccaaagttcaatattggtttctttaaccgcatgtttgaagggcttacagaagctggccgtattgatgacgccttgaaggtgtacgggaggatgcctgacaaggaaatcaaaccaaacatgaccacttttgaaatccttgtcaaagccttgtgcaaagaagaggacttggatcaagcaaggggcctagtgatggacatggcaagaggtggtattgtgcctcctcaagggttccgtgagtctgttgttaactttttcaaggaggctggtcgacaggaagaaattgagaaagcttttgaagaaaaacctatgccaacacctcagcctagaacagagtatcagcctaggactgagtatcactctcgcaatgcagacggtgctgctcaaataaaacaacctggctttagctctgctccagcggtgggacctgaatttcttcactctcagccacaacaatccacacttagtaacactccaaatcagcagcctgagtttggctcatctcgatcatggaattcaggtttcggtgctcctcaagcgcagcctggatatggtgcacctcagcctgtacagacaccacagccacagtttggtgcttctcggggtgaaccaggatatagcaacataggaaatcagcatgttcagtttcgctctccccagagagaaccaaaatttagcaaccatccaccacaagttgggtatggtgcccaattgcctcagtcaggatatcgctttgagccccaacaagaacaggttggatttggaaatcaagtagcacaacctgcacatgtggcttcaagacaaccctcatatgacacccgctggagctcaagagattatggatcaacccaagggcaactgggatatggtggtcctcaagcgcagtcatatgaatctcagttaccacatcaccagggaagttttggtatgccacatttccaaaataacaatggcttctatcgatacaaccctggatatggcccatctaatggttcgcagggatttgatgctccccatggtgattctaaaactgctgagagtaccactcctgaagaccggcaacaagcagcatttctgaaagcatgaggtccaaacatattttggctccaaatcaaaaggtttctcagccacaaaatgaattaggtcttcagatattaagatatcaatgaataattttgaatcggacttcactattgttccaatgggtctcactgctgtaccttttaactgaaatcttctgctgtttctcatacatgatatggcagcatgaggagttgttttatcagttagcatatagccatatatgcatgtggttcaaaaattgaaatatgtccttttgttctcaggatgaacacttttactgattgtttaagttggaactattagtcgccatgcatggtgttttggaagtatatttatctatttgatattgacaatgtaatttttatttacaggt

SEQ ID NO: 95245 - DNA, 1890 bp, Zea Mays
cgcctttcctcttcgaccgctgattccgttctgtcccactccccccacctcgccgtcgccctgtccgccctcgtgtacaggactagtggactacagtgttggtttgaagaggcgtcgttcataatactgaagctatggaggattctgtacaagttgcatgtgtaatatcaaatgctacagatgctgcatttcagatttactccttgaggcgatcggcgtatgctgctgtgctgagagcattctgtgctcagtcagacgttctctcaatgggcaaagaaagatgtctcactgaacttagaaatgagcttaaaatattgcagacggaacatgcagaatgtcttgtgaaagccagatcaaataagcaaatcaagtctttcagtgccagcttgcactccaaaagaaacacttgcagtactgaagttataaaggattttccagatcttcaatgcgtcctaccagatacccgagatactgtgtttcagattcactgcttggagcgatcagcatatgcagcagtgttaagagctttctgtgctgtgacaaaccacctctcattgttacaggtcaagattctatctgaactaaaaaatgaacttagaatatcgcatggtgaatataaagaaattcttatgaaagccagtgtaaatgagcatatcaagtctttgaggaaatttagtttggcaaagctatctgttgttacaaagaacgatcctgcttttgatgtgcatgctatgcttcatgacaagattggctcaactggtgaggaaaagcacagccgattgaatgctggtcaaagttctttaagtgttgaccatgctaggaaagaatcagagaaaatgaaatctgaagcgcctgagatgagtgtatctgagagtctgggtgttgtggacaggaagtatgagattgagtaccagaaggctaagaataaggactcagatttagaacatggttctgaaataattaagctttgcctaactgctagccttctaaataaggttgaaaggatatttaaagaaaatccagattcagctaatttagagaaagcaaaactgacacttaaagaccaagaaaaggaccttttggatgcacttgctaagctttctgaagtagcatatgatgttgtttatttcggtgctgaccacaaccatcggccggtcaacctcaaaaagcacgacgatggcaagagcaccgaggcggtgctgccgaagcttctaatggccgtggggccggcctccgcgccgctggcggcgccacgcaagaagcgggtctggaccaaactcacggcagaacagaaggagcggatgctggagttcgcgcagcgttttaggtggcgcgtccataaggccggcgcggaagctgtcgacgccttctgcgcccaaatcggcgtcacccagcgcgtctttaagaactggattaacaacaacaggcacctcgccaagatcccaccctcggccctgccgtcgcaccaccaagaccacccggccgccacagcgcaggggtcgatgactgaagaaggcaagtctcttgaagctgaagttgatgtatctgctgatggcggtaaggatggcgagaatgaagtttctgatccgatctgaaatagtagtaattcaacgaggaatggcccatcgggccagaaagcctaacaagcgctgcggtgggccagaatggattagcatttagcaagcagcccagacccagtacgtgtgcccggagagatagctggagctgcaaaggagtgaagagtaccactaaaataaagtaaagaggaagaggaagctcgaacgagcagaggagagctgagccgtctccacgactccacatcaatatagttaccctatatatacaattcaggattctgtgtctgagcaatataaggaggcactgttatat

SEQ ID NO: 95246 - DNA, 1703 bp, Zea Mays
cgcctttcctcttcgaccgctgattccgttctgtcccactccccccacctcgccgtcgccctgtccgccctcgtgtacaggactagtggactacagtgttggtttgaagaggcgtcgttcataatactgaagctatggaggattctgtacaagttgcatgtgtaatatcaaatgctacagatgctgcatttcagatttactccttgaggcgatcggcgtatgctgctgtgctgagagcattctgtgctcagtcagacgttctctcaatggtcaagattctatctgaactaaaaaatgaacttagaatatcgcatggtgaatataaagaaattcttatgaaagccagtgtaaatgagcatatcaagtctttgaggaaatttagtttggcaaagctatctgttgttacaaagaacgatcctgcttttgatgtgcatgctatgcttcatgacaagattggctcaactggtgaggtttgcacttcatccacaagctgcctcagtttgatacagcaatcaccaatatcagagaattcaatgtcctccacaagagacattgggttatcagatagctctaatggagccaaagaaggacctaattttgaatcccgcacagtggtgtctgctaaaaggttgaaaactgtgaatgggcatgcaccagcgtacttaaaatgtggcccttccaatcagttacctgtggaagtttgtgcgatgatggtgaacggttgcactgctgatacacttgattgtgagacgttatgctgtcaagtgaagtctggatgcgtttcatctcccatttttcaagaaaagcacagccgattgaatgctggtcaaagttctttaagtgttgaccatgctaggaaagaatcagagaaaatgaaatctgaagcgcctgagatgagtgtatctgagagtctgggtgttgtggacaggaagtatgagattgagtaccagaaggctaagaataaggactcagatttagaacatggttctgaaataattaagctttgcctaactgctagccttctaaataaggttgaaaggatatttaaagaaaatccagattcagctaatttagagaaagcaaaactgacacttaaagaccaagaaaaggaccttttggatgcacttgctaagctttctgaagtagcatatgatgttgtttatttcggtgctgaccacaaccatcggccggtcaacctcaaaaagcacgacgatggcaagagcaccgaggcggtgctgccgaagcttgtgagttcaagcgacgagacgtcgcctgagactagactgggagactgtggaacagaaaacaaggtaaagatcctaatggccgtggggccggcctccgcgccgctggcggcgccacgcaagaagcgggtctggaccaaactcacggcagaacagaaggagcggatgctggagttcgcgcagcgttttaggtggcgcgtccataaggccggcgcggaagctgtcgacgccttctgcgcccaaatcggcgtcacccagcgcgtctttaagaactggattaacaacaacaggcacctcgccaagatcccaccctcggccctgccgtcgcaccaccaagaccacccggccgccacagcgcaggggtcgatgactgaagaaggcaagtctcttgaagctgaagttgatgtatctgctgatggcggtaaggatggcgagaatgaagtttctgatccgatctga

SEQ ID NO: 95247 - DNA, 564 bp, Zea Mays
ccctcccccacgcagcaaggatcgagaagaggaggaacaagatggattgaagaggaagagaggatcaaggagatgttctaccccccatctattgcagattttcttggggaaaccctaggtaaggatgggatccttgttcctccatataattatgtgcttttggaggttgtggatcatgtggattgaagaattagaggttggattagatgtggggttaggttttgatctcgaatttaatttctgcagaatggcagattcgatagtttctgttcataccagttttccgtggtcttagtggcctcaaaaaaataaaaagtttatatatgagtcgtagataatttgtagatctttccgtggccgcgaagaacacctcaatcggacatcagatcagaaagttattgcagtttgattatagctgtttttcagtctcataattctgtgcagaatctgttctcttaagagttaggcaattttatcaacagaattaaactatgggttggtaaaagaagttgtagataatttcataaactttccagattgttaaagagtgcattcatatgattt

SEQ ID NO: 95248 - DNA, 1075 bp, Zea Mays
ctatttccatccccacctcctcgatcttcttctctctctctccagctagaaggaacgatgccgagaggcacggagcgcgcaatgctggtgctgggttgcttcccggtcgcgcgtcggccgtccttgtcatacgaggagggctccacgtcggcggcgtcgatgtcggccgcgagcacggcctcgccgccgacgtccacggcgtccacgtcgtccccggccttcctcgacgacgacgacgcgctgtaccccgacgacgccgagcccgagccggacgcgggcaggctgtcaaccgccatcgcctcccgccgcttcttcctcgcgacacccggcctctccaactccatcgtcgactccgtcgagcacccggcagcctgccacgcctgcgacagcgcctcgaacacgcgctccctgcggcgcgcgtccacttcagcgtcccccgcgtctgccgctgcgtcctcctcatcctcctccccctcttcctcttcctcctcctcttcctcctcggcgtccgccaccaaagcgcacttgcatgacaacgacggcatgcagccgccggtgcggaaggtcttggtgtccacggatgcgccccgcgccgacttccgcaagtccatgctggagatggtggaggcgctggagctggacccgcgccgccgcgacgccgacctggcccgcctgcacgacctgctactctgctacatcgcgctcaacgagcgcgacgcgctcagggacatcctcggcgcgttcgccgacctcatgtgccttctcaacgtcgacggcggcaacaataacgacgccacgttcgctgccgtcgtcgtcgatggcggggagaagcgcaacgccgacgagcaggcggatgcggatagatagatagatggcacagcgcgtggcgcgtccgcacacgacggcgcacgtgagcatcgtgagtagctgttgagcgagctgaggtcgttgtaggaacgaacaaagagtagaaagctgatttaggtcgtaacgtaaggtaagaccggctgttgttgtgtgcagttgtgcttgccggcttctagtttttctaaaaggaaacaataataatgacaca

SEQ ID NO: 95249 - DNA, 3248 bp, Zea Mays
aatgtatttgcatctagttggcgtgaggccaatgacctcatccgatccctttccctttcccatccgcgcgtccctactcctccccctccctcctcaacgacgcgagaagacgcaatcctgggagctccgaaccctagctcctaatttgagccccggtgtcatcgattcctcaggagcccgccgcgattcggctcccgtagcagcatagggctccaccgctccccagctgcatcagcatcgacggcggcggcgcgccgccgcgactacgctcgaggaagcacctagtctcggcgggttctcgttcttggaggccttccataaggcggtttcgtggtgtccgagcccggatctacggcgatctgcaagcggaaggcgatagatgaggcgattcagtggtaacccccaatccggtgggtttccggctggcagaggcggaaaggttcgggccttcggcgggtgatcagatttctccgtgcggcgcgcggcttgtgtctaccgcaacggtgtaggactggagcgcaggagccgacgaggcggtggagatacaaaaaaattgcttgcttgtacacttgttcatgttcatttgttcctgctatctgttgtggtttaaagcatcaattttccgctcaatttaagggcgaagacactttttttgttccttccttgttggtttctatggaataatctctatattacagaagaggagtgtggaaaagcaacaaaaaagaggaatataaaatacaaaaaagatataaccagcagaaaaaagagattttttttgagtgggcaagcaaatggctgtgtattacaagttcaagagtgctagagactttgactcgattccgattgaggggcaattcatctctgttgccaacttgaaggagcggatttttgagtccaagcatctcggcaggggcacagattttgaccttatgatctcaaatgctcagactgatgaagagtatgctgatgaggccactatgataccgaaaaatacgtcagtattgattcggcggataccaggacgaccaaggaagcctattgtcacagaacctgaagagacaaaagctgcagaagatggtgtacaagatgtcatgcccacatcgggtgcttttcttggtgattcatctatgaaatatcctgaagaatctgagtgggatgatgagtttggcaacgaattatatatttctgattcagttccttatcagcctgtttgccaggcggttgatgctattgaaaataaagttgacgaggatagtaaaataaaagcacttattgatacatctgcccttgactatagccaaatccctgatggttatggttctggaagaggctatggtagagggatgggtggaagaatgatggctggacgtggctttggacgtgggctagaacgcaggacacctcctccaggctatgtttgtcacagatgcaaagtacctggtcattttattcaacattgccccacaaatggggatgctagatatgatgtgaaaaggatgaaacccccaactggcattccaaaatcaatgctaatgcaaactccggatggttcatacgcactaccaagtggagctggtgctgttttgaagccaaatgaagctgcttttgagaaggagatagagggcctacctaccacacgtcctgttggtgatcttccaccagagctacgctgcccattgtgcaaagaagtaatgaaggatgctgttctaactagtaaatgctgctttaggagtttctgtgataaatgcatcagggactacataattaacaagtcaatgtgtgtctgtggtgccacaagcatattagctgatgatcttctccctaataaaactctaagagaaaccatcagtcgcatattagaggcaccaccaactagcagtacagaaaatgtgggaagcatggtgcaagtacaggacatggagtcagctctacctgtacaacctaagcataggtctcctgctgtttctgctgcttcaaaggaagaggctaaagcatccacacttgtagaagagtctccagatgctgagagcctcaatggaacaaaagctacaaatattgatgcgagttcttcggataagaaagctttgacagttccagatattgctgaagggaccttggattctaagaaagcgaaagaagataaaccagtagaagcaaccccagtggcaaaagattctcaagaaaagtttcctgcaggggaacaagcggtaaagaagaagaaaaagaagaagccacgtgttcctggaaatgctgaagagcaatggaaaaattttcaagattttggaactgaaaatttttcggggatgcccttgggtccaactggagcattcaacccttactggggcggaggagtgccattgccaatggattacatgaatgcaccgtttcctggtcccatgccttacatgggttatccaccaggtccatttgacccttttggtgggggtgttctcccacaagatccatttatgcccccaggatacatgatgccaggagttcctagggatctttctgaattggcagttaacgctatgggaataaacatgggcccgccagttatgagcagagaagaattcgatcccaggaaacctgaacataggaggagacgtgaaatggatcggttcaatgatagggaaagagagcgtgaccgttctcgagagcgagagcgagaacgggagcgggagcgttccttggagagggagagggagcgggagcgggagcgtggccgttctctggagagggagcgggagcgggttcgagagctggagcgttcccgcgagggtgaccgtgaacggcagcgaggcagggacagggacagggactcacgcagagaggccagagcatcaccaggggccattaatgatagttcctcgatgaggcggaatgatgtatgtcttttcctgtcaatctgttatcatgccaagttttgtactattatcggttccatgtggatcatcttcgccgccgtctccgccacagtagacagcttgatccagcggtttgctttgggttacaagcagcagtcaccagcggtagcatttgcccttgtgattgtgctttcctgggttttacaggatgccatcgctacggcggaaagatctttaggttgtttattatttgtatttttttgtgtgttctctttgggactgggtttgtccttttttttacttgtctttttatttatttcttttccatccatgtcttctgcgctttctgaaagatgacgcttttgctttattcttcca

SEQ ID NO: 95250 - DNA, 1324 bp, Zea Mays
acggagggagaggtacgcacatcgaaaaccaccgattcactccatcgtccgccgaggcgctcgcgcacgtcgagaagcacgcacgcaggcagccttaaggccgaggcatccacgtttctggaggaccatgtcattctctggagtatccttcgttggaaacagctatctgccgccatcatctgcccctcccacacacgtctattccggcggctaccatctgctcgtggtcaatggctactcgcgcacaaagcaggacacccccaacggcagctgcctacggtcaaacccgttcaagatcggaggccatcgttggaccatcgagtgctaccctaacggctacgaacaggagaacagcgactacatatccttttatctcgttcttgacgatttcaacgtcgtcgagcctgtcgtggcgcagtatgcgtttagcttctttggccaggttcagccgtcagagtcatcgttgttgctcgccgccggtgcaaggggaccgtaccgtttctctagcacggacgcattcagcttcccctatttgatgaatagacagcagttcgagaaatcgaagcatctcagggacgacagtttcactatcaggtgtgacgtggccatcgtcaagaatgtcaacatcggggaagcggccgccgccaggcggttcgttaccgtgcctcctccttccattctgcaccacctcggcaatctcctcctgtcgcaggtgggcgccgacgtgacatttcaggtcggcggcgagaagttcatggcgcaccggtgcgtgtttgccgcccgctccgctgtcttcagggccgagctctttggctccatgaaggagggggcggcagacaccgtggtgcacatccatgacatggacgccaaggtattcaggctgttgctcggtttcatgtacaccgatcatgtgccggacattgaagaggaggaggaagaagaagaagagtatatgtggcaggacctgcttgtggctgcagatagatatgacatcccgaggcttcgactgatctgtgagtacatgatgtgctcatacatcgacacggatacggtggcagatatgcttgagcttgctgacaagcaccggtgcaatggactgaaggatgcatgcttggatttcctcaactctccgccaaatctgcagcaagtaatggcggctggcgacctagatgatctcgctatcagctgtcctgctgtccttatagaacttatcgccaagcttacgtcgtctcttaagcttgataaatgataatatggttgtaggttttagtttatgaaaaaaaatcattttttattttacattgagagatcattggattacgaa

SEQ ID NO: 95251 - DNA, 702 bp, Zea Mays
atgactatcaaagaggtcaaggatcaagagcagtttcatggtctttttcatttacctgtctctaatcaagcgtttgatcaatttctggtgctcaaggggtcttgggagcaaattgttcttaatgatgttcacgaccgatggaagtacatttggggatcggacaaattctcgtcccaaaaagcgtacagagctttcatgggccagatgcagactcatcctatctacaaactagtttggaaaagtaaatgtcagcctaagcatagagtcttctactggctgtggcttaagaacaggctaaacaccagaaatatgttgagaaggagaaacatggagctagattcctattcttgcgaaaactgcctttggcaaagagaggagaccctttatcatcttttcctcagatgcaacttcgcgaaagcctgctggaactcaattggcattaccccgcccagaatttctaaccctgaagaggcatcagtgaacctcaaacaccagctcaacgttcccttctctatggagatcattattcttatgacttggagcatctggaaaagccgaaacgagtggctgttttcaaacaaagatccctccgtgctccgctgtactcaggaatttagtagagaattgcgactaatcattcacagagcacggggagaattcgacacatcaatcccgaattggctaagtttgtggcaagcatag

SEQ ID NO: 95252 - DNA, 2644 bp, Zea Mays
cgactgtgggcggatgaccaatccatatatatacgggtgattccactcagcaatcctcttcttgtcaagaacaatatatagggcttgaccaccaccagcagcagtagtagtggcgactatgtcgacgacatatacaaccaagagcaatggcaccacctctgatgacaacaagtggccgaaagatcatgtgaagaagtcggccagtgttgacaggccgccgcttgtccggaccacaaaactttctacaattaccatcaagctatacaggctcatgataattctccggatgggcatcttcgtgctgttcttcaagtggcgaatcggcactgcgcttgtcatgattagctccacaggcaccgacgacaaaagcacagttcttgggatgtggatggtgtccatggctggggagctctggtttgccctgatgtgggtgctcgaccaggtgcccaagatgcagcctgtccgccgcgtcgtctacctcgctgcgctcgacgagccgatgcttccggccatggatgtattcgtgaccacagttgacaccgagaaggagccaccactggtgaccgtgaacaccatcctctccatcctcgcggcggactaccccgcagagaagctcacgtgctacgtctcggacgacggtggcgctctgctcacgcgcgacgcggtcgccgaggctgcccggttctctgcactgtgggtgccgttctgccggaagcacgcggtggagccgaggaacccagaggcctacttcagccccggcgccagtaatggcttcaaggcgtggagggctgactataagggaacggcgtggccggagctggcaagggaccggaggcgcgtgcgccgggagtacgaagaactgcggctgcggatcgacgctctgcaagccggaggacgtgcggcggtagacgccgtcgctgccgatagaagctgctggcggcgaggcgccgcggaagatcatgccggagctgttgaattgctagtcgataatcccggtcccggcagcacgccacggcttggcgtcagcggcaccgtagacggtgtcagcaatcttctggacctaagctccgtcgacgtgcgggttccagcgctggtgtacatgtgccgggagaagcgtcgcggtcgcgtgaaccacggcaaggctggtgccctgaacgcgctgctccgtgcctcggccgtcctctccaacgcacccttcatcctcaaccttgactgcgaccactacgtgaacaactcgcaggctctccgcgccggcgtctgccacatgctcgacggcgagggcggcaacggcaacgacgtggcgttcgtccagttcccgcagcgcttcgacggcgtcgaccccgcggaccgctacgcgaaccacaaccgcgtcttcttcgactgcactgaactcggcctcgacggccttcagggacccatctatgtgggcaccggctgcgtgtttcgccggtcggcactatacggcgtcgacccgccgctctggagaccccagggcgacgacgctggcaagggcgctgccaatggcattgagaccgggaagttgggcgtgtcgacgccgttccttcgctcggtatatgcggtcctgacgaaccaatcggaccaatgggacacggtcagtatttcatcaccgccgtgctcgttcgacgcggccgccattggcgaggcaaccgcgctcgtctcgtgcggctacgaggaccggacggcgtggggccgggacatcggctggatctacggcaccgtgacagaggacgtggccacgggcttctgcatgcaccggcgagggtggcgctcctcttactgtgccaccgcgccggacgcgttccgcggcaccgcgcctatcaacctcacagaccggctgtaccaggtgctacgctgggcggcgggctccctcgagatattcttctcccgcaacaacgccctcctcgccggccgccgcctccacccgctgcagcgcctggcgtacctcaacaccacggtgtacccgttcacctccatctttctcatagcctactgcggcctcttcccggcgatcccgctcgtgaccgggaacggcgccaccaccggggccttcttctcaataatcatcaggccgccgtctgccacgtacatcgcctttgtggcggctctgatgctgacgctcgccgtggtggccgtcctggaggtcaggtggtccggcatatcgttgggcgactggtggcggaaccagcagttctggatggtgtccgcaacgagcgcatacctggcggcggcggtgcaggtggcgctcaagatcgcggccgggaaggagatatcgttcaagctgacgtccaagcagcgtgcgacgagcactgttgccagtgtaaaagacaggttcgctgagctctacgccgtgaagtggacggtgctgatggtcccgacggccgtggtgctagcggtgaacctgacgtccattgttgcagcgatggaaggtggctcgtggagggatggcccaatggcggtgttcgctttggcgttcaacgcgtatgtggtggtgcatctctaccccttcgctctggggctcatgggtcgctggagcaacacgttgagccccctactcttgcttatcgcattcttcaccgttcgattactttgcatagttctctatgtacagatgctttaatatgcc

SEQ ID NO: 95253 - DNA, 1517 bp, Zea Mays
tatatattagcccagtcggctgttctcccttgtcatgcatccccaattaacataaactagctagctaggaacgtggccaaaatgcattgctacatataaacatgcgcacgcggctgggccggagacaaatcatacgtgtagtagtcatgaggtctcttctccacaccaccaatagcagtagcccgccccctggcagcagcaggaagcagcagcactgcggcagcagatgcttcgtcgtgtcccttctcctggtcctgctagctcttgtagcctcggacgtgtatctcagcttcccaaaccgacgacgggttcttccattgttcccccagcagcttttgtctcgcagacagcagcgaggcggcgagggcggctgtgacattttcaggggcgagtgggtgccggacccggacgcgccctactacaccaacgacacctgcaaggtgatccacgaacactacgactgcatggggtacggcaagccggacctgggctttgtcaactggaggtggcagcctgacggctgcgaccttccccgcttcaacccatggcgcttcctccacatgatgaggggcaagacccttgccttcgttggcgactccctcggcaggaaccacaaggactcgctcatctgcctcttgaccacggtcgcggagcctacgacgagctggccgagcagcaagcacaccgtgtactactacgccgactacaacttcaccgtggcccacttctgggcgccgtaccttgtccggcacgagcagatcgacgaggacggcccagcgcacacgggcgtctggaacctctacctggacgagccagacggcgtgtgggcggcgcacgtcgcggagttcgactacgccgtcgtgtccgcgtccagctggttctaccgcccctccatgctgtacgaggccggccggctcgtcggctgccactactgccggctgcccaacgtcaccgacctcacgctgcgctacgcgctgcgcatggccacgcgggccgcgctgcgggcgctgtccggcgccgacggccgcttccgcggcacggccctgctgcgcaccgtggacccgtcgcagtacgagggcggtgagtggaacaaggacggcaactgcgtccggacggcgccgttccgtcgcggccagaacgcggtccagggcctcgagcgtgagttccgcacgctgcagctggaggagttcgcgtcggcggagaaggcggcgacggacggtggcggtaaggtgaggatgctgctgatggacaccacggaagccatgatactgcgtgcggacgcgcacccgagcaagtaccgggggtggacgccggagaagcacttcaccctgcacaacgactgcgtgcactggtgcctgcccggggccattgatacgtggaacgacatgctgcttcatatgttgaaatgatcatcagtaatttgaattaataatgccaaaccagtgtggctgtgtagtgtgtacaatatggtgctccctctgttgacaagtatatgatgactttgacgttttttcttc

SEQ ID NO: 95254 - DNA, 936 bp, Zea Mays
atggaggcgaccgatcttagcgctatcagaggccccgtctccaatagccaccatctgggctacccaccatcactggccacgctgtcgtcaagggtcctccctcttcagaccatgttgctaatgttgtcggatgctgttgcaaggagcaagtcagagaggagctttgccatcaagaggtgggcttggggcaggtcatcgggagcgacattgtcgcttttggtttcctcttctgcccgtcgagttaactcctctaagcaatgtgaccatcctcaacaatcgaggacttgggctgaggtagtggccaagccttcgccaagtacgttgttagctgacgtcatcgccaagtctcaattgcaagaacatcgcaatcctttgttggcttctcaacccatcgatttgcatgtccttgatcacccctttggccgagtcgttgaagtgttgcaacctctcaaggaggaggcatctatcatcaagttgtggctagcacgtgtggccaaccatttggagcatgcggatgcacatggggagcatgcttttgtctctgacttgcccaagctctttgacccctgttctccagtgaagcatgattcgccatcatcgattcttgcttctctcgcggtagcctacacgaatgccgactccttggtgtgtgaggacaccattgcaaacaccacaatccccatccttggcgagatgcccacaaggatctctggtacggagattcatagagagacggaccttacctcaaatgaggtggtcataggggcatttgaagcagattctcgccaaatgatgtccaccaagcagaccattaaggtgccttcagagacctccacgttgcttcaggttgtcacctctgttgaggatgttgttgtggtggaggatgcatcagatgatgaggaagctaccttggttgtccaaacaaactacttttga

SEQ ID NO: 95255 - DNA, 670 bp, Zea Mays
atgcagcaggcagtggcgctgagaggctccgggatctaccaccgccccgggatctaccaccgccctgagcagtcatcacattcttgtcaagatctggcttggcctttctctttgcttctgcaattacgccatccttgggaacaacagacaaaagcgttgggtttattaccttcgagcaatcatggaggacttgaaaggtaacataagctaagaatggttggacttgagacattcaagaaatgcaaggaggaacaacatactgcgtagaaaaattagtccagaattcctttctcaagtcgtctggatgcaacactaagaaacaagtgcaagctgccactaagtgcaaaagccattctggagctcacagccataaaaatgaataaccagtatgtatggcagcagccttgatgagcaactcaaaaggcgagatgattggtggaggcaacaagtatcgtcagtataattcaacgagattgaagcacacagcattatccacagcaccgccattgtttgtttgaatgaaatagctagcaaaatcgtatagaccaacatcacaaatgtgaacgacggggatcaatttttccttctctactattcattacaatagatgagctctttcttatctccaagaacatttttttgtaacacaatggcaggagctctggagccc

SEQ ID NO: 95256 - DNA, 99 bp, Zea Mays
caaccaaacgccacatgagttcgacgtgtttcgtggctcacatctacatgacgaaattttcacttacatctgcatgacgaaatttcgtggcccacacgc

SEQ ID NO: 95257 - DNA, 531 bp, Zea Mays
atgcagcaatcagcacgttccacacagagaaccaactgttacatctctttgtttcagagagcagttatacaactcgtgtgcacaaccagatataacttggatggtatttcagaaaaggatatagcttgtatggctctcaacaattactcttcaattcctgggaaccaaaaagggcctaaaaggaaagcacgcttcacagaatctgattctggtgtcaagtcacaacacgtattgaagtggagaatagctgctaagtttgaaacagccaaggtgatgctctttcagtctcaatggcgattggtgaatgatgccttgatcgactggtcctgggtgtttgatattcatggggcagtgtcatgggagttgttacaggaattattccagcctggggatctactttcagttgtctccttgcaacagcggcagcctgataagcatatctggaggttttcagctaatggcaaatactcagtcaaatctgcctatgagctcttctgcgtattcaagaaaaatgctgacaggcaggactaa

SEQ ID NO: 95258 - DNA, 1675 bp, Zea Mays
gcttagcccggcggccggccagaactgcaagagagaagaccaagaaacagagagagacaagcgcaggggacagcagcgggtagctagctagctagcgatcgacgacagacgatgcagatgatgatgctctctgatctctcgtctgacgaccacgaggccactggatccagctcctatggcggggacatggccagctacgccctcagccctctcttcctcgcaccggcggcctcggccaccgcgccgctgccgccacctccgcagccgccggccgaggagctcaccaacaagcaggccgcgggcggcggcaagaggaagagaagccagccggggaacccagaccccggcgcggaggtgatcgcgctgtcgccgcgcacgctggtggcgacgaaccggttcgtgtgcgagatctgcaacaaggggttccagcgggaccagaacctgcagctgcaccgccggggccacaacctcccctggaagctccgccagcgcagcagcctcgtcgtcccgtcgtcgtcggcggcggcaggctccggcggcaggcagcagcagcagcagggcgaggccgcgccgacgccgccgcgtaagcgcgtctacgtctgccccgagcccacgtgcgtgcaccacgacccggcgagagctctgggggacttgactgggatcaagaagcacttctcgcggaagcacggggagaagcggtggtgctgcgagcgctgcgggaagcgctacgccgtgcagtcggactggaaggcgcacgtcaaggggtgtggcacgcgcgagtaccgctgcgactgcggcatcctcttctccaggaaggacagcctgctcacgcacagggccttctgcgatgccctagcagaggagagcgcgaggcttcttgcagcagcagcaaacaacggcagcactatcaccacgaccagcagcagcaacaacaatgatcttctcaacgccagcaataatatcacgccattattcctcccgttcgccagctctcctcctcctgtcgtcgtagcggcggcacaaaaccctaataacaccctcttcttcctgcaccaagagctgtcccccttcctgcaaccgagggtgacgatgcaacaacaaccctcgccctatcttgacctccatatgcacgtcgacgccagcatcgtcaccaccaccggtggtctcgcggacggcacgccggtcagctttggcctcgctctggacggctcggtggccaccgtcggccaccggcgcctcactagggacttcctcggtgtcgatggtggcggtcgtcaggtcgaggagctgcagcttccactgtgcgccacagcagccgcagcaggtgccagccgcaccgccagctgcgccaccgacctgacaaggcagtgcctcggcggccggctgccgccggtcaacgagacctggagccacaacttctaggcccgctatatacttcaagctgcattgagactttgagagacgaatgaacggaacacccaaactgcatgcactctagcttgaagagcaaccaaaactggagtagcaagtatggtgcactactgttgttaatttaccttaatttattgatctctgttagttctattttcatttagggcaatgcgggctagctaattaattcgatgtgcacaacttttgatgaatggaccagaaagtttatcttgttgcttttttt

SEQ ID NO: 95259 - DNA, 2198 bp, Zea Mays
gatcgtgctcttctcgcccgcccggtcttgtctctcctctccagaaccttccaacggcagagtgctcgccgcgtggtctagaaccttccacaagcctcgcgacgtgtctcgacgcgccggtacggcggtgggggtatttaggggtccggccaccggccaccgcccgcccttctcccgatttcaccgaccatttttccccatttcacagcgggcgaatatctctcatctcccccatcctctttcctgcaacaactcctacccacccgacagaaatatcctaagcgctgacccgaatacccgattcgctcctcgtccggtcgattcctgctcctaatcgctcgaatcgagtccttgccccgtgttccgtgccacaatctgggcgcttggctcccgcgagccggggttcttgggcctgggcggaggccatggacaagccggtggcgccgggcattatcaaggaggagctcctggagcagcagccgccgacgcaggacggtgtgggtggcggcggggatgcgccgcgcccgatggaggggctgcacgaggtgggtcccccgcctttcctcaccaagacgttcgaccttgtggaggacccggccaccgacgccgtcctctcctggagccgcgccggcaacagcttcatcgtctgggacccgcacgtcttcgccgacgggctgctcccgcgcctcttcaagcacagtaacttctccagcttcgtgcgccagctcaacacctatggcttcagaaaggttgatcctgacaggtgggagtttgcaaatgaaggtttcctcagaggtcaaaggcacctgctgaagatgataaagagaaggaagccaccatcagctgtggcaccattgcgacagcaacgtgcccctgcttcttgcctggaggttggtgagtttggatttgaggaggagattgataggctgaagcgtgacaagaacattttaatcacagaagtagtaaaactaaggcaggagcagcaaagtactaaagatcatgtgagagccatggaggaaaggctacgagtggctgaacagaagcaggtacagatgatggggttcttggcaagagcaatgcggaacccagagttcttccagcagttggcccagcagcaagacaagaggaaggagctcgaggataccatctcaaagaaaagaaggcggcccattgacaacacaccattctacagtgatggggaaagcgaacagcttgattcacagttgaaaatgttcgagtcaggtgttctcaatgggctcaatgaacctgagctggagaatttagcagtgaacattcaggagcttgggaagggaagcatagatgatgggaacttgactcaagttagtgaccagtcagagctgaacgacgacttctgggcagagcttttggtcgaagattttggagacaaggcaggacagccagagttggagggaagaactgaagacgtgaatgaccttgctcaacaactggggtatctgagttcttctagcccaaaatagagccagttcctaatggttgcccccacaatcactggtgctttccctaccctactgttgcagaccatcctgatcaaaccggtacttttcaaattcaattcaatgacacaaacctgttaaaatctggtaacattttcattccatttcttttatattgctggattagccaggaatgatgatggatctggcagacaagttgactggtggtggagaggtgttcatactgaaggcgtgctgtggagaggtcactgccttgacgttgaaggcttagcgctgtactctgctgtgggagttacgtgtggggtgttggctaaatgtctcttccggcgtcttctggcaaaatgatctcgtggacggtgactggcaaagatgcctaggggccaacgtatacgtacacagctgttatcagatcttgttcaaagtcattgcgcggttttgacggtgctatgtatcgatcagggttctggccttctggggttgggttgtagaattgactggctgatctagtgttctccatgtatgactggtgtaaccttaaaacaccctcagcttgttgttgaactgtgacaagcatctcgtttttttgttgtactccattttcatcatcattgtacatcaaattgctgaattatgaacagatccctaataatttggtggactgcgtcttggcatttggctacggcccagcttgcagtgtagttg

SEQ ID NO: 95260 - DNA, 2297 bp, Zea Mays
gatcgtgctcttctcgcccgcccggtcttgtctctcctctccagaaccttccaacggcagagtgctcgccgcgtggtctagaaccttccacaagcctcgcgacgtgtctcgacgcgccggtacggcggtgggggtatttaggggtccggccaccggccaccgcccgcccttctcccgatttcaccgaccatttttccccatttcacagcgggcgaatatctctcatctcccccatcctctttcctgcaacaactcctacccacccgacagaaatatcctaagcgctgacccgaatacccgattcgctcctcgtccggtcgattcctgctcctaatcgctcgaatcgagtccttgccccgtgttccgtgccacaatctgggcgcttggctcccgcgagccggggttcttgggcctgggcggaggccatggacaagccggtggcgccgggcattatcaaggaggagctcctggagcagcagccgccgacgcaggacggtgtgggtggcggcggggatgcgccgcgcccgatggaggggctgcacgaggtgggtcccccgcctttcctcaccaagacgttcgaccttgtggaggacccggccaccgacgccgtcctctcctggagccgcgccggcaacagcttcatcgtctgggacccgcacgtcttcgccgacgggctgctcccgcgcctcttcaagcacagtaacttctccagcttcgtgcgccagctcaacacctatggcttcagaaaggttgatcctgacaggtgggagtttgcaaatgaaggtttcctcagaggtcaaaggcacctgctgaagatgataaagagaaggaagccaccatcagctgtggcaccattgcgacagcaacgtgcccctgcttcttgcctggaggttggtgagtttggatttgaggaggagattgataggctgaagcgtgacaagaacattttaatcacagaagtagtaaaactaaggcaggagcagcaaagtactaaagatcatgtgagagccatggaggaaaggctacgagtggctgaacagaagcaggtacagatgatggggttcttggcaagagcaatgcggaacccagagttcttccagcagttggcccagcagcaagacaagaggaaggagctcgaggataccatctcaaagaaaagaaggcggcccattgacaacacaccattctacagtgatggggaaagcgaacagcttgattcacagttgaaaatgttcgagtcaggtgttctcaatgggctcaatgaacctgagctggagaatttagcagtgaacattcaggagcttgggaagggaagcatagatgatgggaacttgactcaagttagtgaccagtcagagctgaacgacgacttctgggcagagcttttggtcgaagattttggagacaaggcaggacagccagagttggagggaagaactgaagacgtgaatgaccttgctcaacaactggggtatctgagttcttctagcccaaaatagagccagttcctaatggttgcccccacaatcactggtgctttccctaccctactgttgcagaccatcctgatcaaaccggtacttttcaaattcaattcaatgacacaaacctgttaaaatctggtaacattttcattccatttcttttatattgctggattagccaggaatgatgatggatctggcagacaaggtttgacgacccatccttctaaccatatccattatgtttgcgcagttgcatcttcagatttgccctcatcttttcttcttcttcttctgaaacattctaaattgctccttatccagttgactggtggtggagaggtgttcatactgaaggcgtgctgtggagaggtcactgccttgacgttgaaggcttagcgctgtactctgctgtgggagttacgtgtggggtgttggctaaatgtctcttccggcgtcttctggcaaaatgatctcgtggacggtgactggcaaagatgcctaggggccaacgtatacgtacacagctgttatcagatcttgttcaaagtcattgcgcggttttgacggtgctatgtatcgatcagggttctggccttctggggttgggttgtagaattgactggctgatctagtgttctccatgtatgactggtgtaaccttaaaacaccctcagcttgttgttgaactgtgacaagcatctcgtttttttgttgtactccattttcatcatcattgtacatcaaattgctgaattatgaacagatccctaataatttggtggactgcgtcttggcatttggctacggccc

SEQ ID NO: 95261 - DNA, 2052 bp, Zea Mays
gatcgtgctcttctcgcccgcccggtcttgtctctcctctccagaaccttccaacggcagagtgctcgccgcgtggtctagaaccttccacaagcctcgcgacgtgtctcgacgcgccggtacggcggtgggggtatttaggggtccggccaccggccaccgcccgcccttctcccgatttcaccgaccatttttccccatttcacagcgggcgaatatctctcatctcccccatcctctttcctgcaacaactcctacccacccgacagaaatatcctaagcgctgacccgaatacccgattcgctcctcgtccggtcgattcctgctcctaatcgctcgaatcgagtccttgccccgtgttccgtgccacaatctgggcgcttggctcccgcgagccggggttcttgggcctgggcggaggccatggacaagccggtggcgccgggcattatcaaggaggagctcctggagcagcagccgccgacgcaggacggtgtgggtggcggcggggatgcgccgcgcccgatggaggggctgcacgaggtgggtcccccgcctttcctcaccaagacgttcgaccttgtggaggacccggccaccgacgccgtcctctcctggagccgcgccggcaacagcttcatcgtctgggacccgcacgtcttcgccgacgggctgctcccgcgcctcttcaagcacagtaacttctccagcttcgtgcgccagctcaacacctatggcttcagaaaggttgatcctgacaggtgggagtttgcaaatgaaggtttcctcagaggtcaaaggcacctgctgaagatgataaagagaaggaagccaccatcagctgtggcaccattgcgacagcaacgtgcccctgcttcttgcctggaggttggtgagtttggatttgaggaggagattgataggctgaagcgtgacaagaacattttaatcacagaagtagtaaaactaaggcaggagcagcaaagtactaaagatcatgtgagagccatggaggaaaggctacgagtggctgaacagaagcaggtacagatgatggggttcttggcaagagcaatgcggaacccagagttcttccagcagttggcccagcagcaagacaagaggaaggagctcgaggataccatctcaaagaaaagaaggcggcccattgacaacacaccattctacagtgatggggaaagcgaacagcttgattcacagttgaaaatgttcgagtcaggtgttctcaatgggctcaatgaacctgagctggagaatttagcagtgaacattcaggagcttgggaagggaagcatagatgatgggaacttgactcaagttagtgaccagtcagagctgaacgacgacttctgggcagagcttttggtcgaagattttggagacaaggcaggacagccagagttggagggaagaactgaagacgtgaatgaccttgctcaacaactggggtatctgagttcttctagcccaaaatagagccagttcctaatggttgcccccacaatcactggtgctttccctaccctactgttgcagaccatcctgatcaaaccgttgactggtggtggagaggtgttcatactgaaggcgtgctgtggagaggtcactgccttgacgttgaaggcttagcgctgtactctgctgtgggagttacgtgtggggtgttggctaaatgtctcttccggcgtcttctggcaaaatgatctcgtggacggtgactggcaaagatgcctaggggccaacgtatacgtacacagctgttatcagatcttgttcaaagtcattgcgcggttttgacggtgctatgtatcgatcagggttctggccttctggggttgggttgtagaattgactggctgatctagtgttctccatgtatgactggtgtaaccttaaaacaccctcagcttgttgttgaactgtgacaagcatctcgtttttttgttgtactccattttcatcatcattgtacatcaaattgctgaattatgaacagatccctaataatttggtggactgcgtcttggca

SEQ ID NO: 95262 - DNA, 2369 bp, Zea Mays
gatcgtgctcttctcgcccgcccggtcttgtctctcctctccagaaccttccaacggcagagtgctcgccgcgtggtctagaaccttccacaagcctcgcgacgtgtctcgacgcgccggtacggcggtgggggtatttaggggtccggccaccggccaccgcccgcccttctcccgatttcaccgaccatttttccccatttcacagcgggcgaatatctctcatctcccccatcctctttcctgcaacaactcctacccacccgacagaaatatcctaagcgctgacccgaatacccgattcgctcctcgtccggtcgattcctgctcctaatcgctcgaatcgagtccttgccccgtgttccgtgccacaatctgggcgcttggctcccgcgagccggggttcttgggcctgggcggaggccatggacaagccggtggcgccgggcattatcaaggaggagctcctggagcagcagccgccgacgcaggacggtgtgggtggcggcggggatgcgccgcgcccgatggaggggctgcacgaggtgggtcccccgcctttcctcaccaagacgttcgaccttgtggaggacccggccaccgacgccgtcctctcctggagccgcgccggcaacagcttcatcgtctgggacccgcacgtcttcgccgacgggctgctcccgcgcctcttcaagcacagtaacttctccagcttcgtgcgccagctcaacacctatctagatggaacaagatactggatgaagtaccaagaatcagattgttttgttctagaagactctactgaccaccttcacatgctataggcttcagaaaggttgatcctgacaggtgggagtttgcaaatgaaggtttcctcagaggtcaaaggcacctgctgaagatgataaagagaaggaagccaccatcagctgtggcaccattgcgacagcaacgtgcccctgcttcttgcctggaggttggtgagtttggatttgaggaggagattgataggctgaagcgtgacaagaacattttaatcacagaagtagtaaaactaaggcaggagcagcaaagtactaaagatcatgtgagagccatggaggaaaggctacgagtggctgaacagaagcaggtacagatgatggggttcttggcaagagcaatgcggaacccagagttcttccagcagttggcccagcagcaagacaagaggaaggagctcgaggataccatctcaaagaaaagaaggcggcccattgacaacacaccattctacagtgatggggaaagcgaacagcttgattcacagttgaaaatgttcgagtcaggtgttctcaatgggctcaatgaacctgagctggagaatttagcagtgaacattcaggagcttgggaagggaagcatagatgatgggaacttgactcaagttagtgaccagtcagagctgaacgacgacttctgggcagagcttttggtcgaagattttggagacaaggcaggacagccagagttggagggaagaactgaagacgtgaatgaccttgctcaacaactggggtatctgagttcttctagcccaaaatagagccagttcctaatggttgcccccacaatcactggtgctttccctaccctactgttgcagaccatcctgatcaaaccggtacttttcaaattcaattcaatgacacaaacctgttaaaatctggtaacattttcattccatttcttttatattgctggattagccaggaatgatgatggatctggcagacaaggtttgacgacccatccttctaaccatatccattatgtttgcgcagttgcatcttcagatttgccctcatcttttcttcttcttcttctgaaacattctaaattgctccttatccagttgactggtggtggagaggtgttcatactgaaggcgtgctgtggagaggtcactgccttgacgttgaaggcttagcgctgtactctgctgtgggagttacgtgtggggtgttggctaaatgtctcttccggcgtcttctggcaaaatgatctcgtggacggtgactggcaaagatgcctaggggccaacgtatacgtacacagctgttatcagatcttgttcaaagtcattgcgcggttttgacggtgctatgtatcgatcagggttctggccttctggggttgggttgtagaattgactggctgatctagtgttctccatgtatgactggtgtaaccttaaaacaccctcagcttgttgttgaactgtgacaagcatctcgtttttttgttgtactccattttcatcatcattgtacatcaaattgctgaattatgaacagatccctaataatttggtggactgcgtcttggca

SEQ ID NO: 95263 - DNA, 2143 bp, Zea Mays
tcgccgcgtggtctagaaccttccacaagcctcgcgacgtgtctcgacgcgccggtacggcggtgggggtatttaggggtccggccaccggccaccgcccgcccttctcccgatttcaccgaccatttttccccatttcacagcgggcgaatatctctcatctcccccatcctctttcctgcaacaactcctacccacccgacagaaatatcctaagcgctgacccgaatacccgattcgctcctcgtccggtcgattcctgctcctaatcgctcgaatcgagtccttgccccgtgttccgtgccacaatctgggcgcttggctcccgcgagccggggttcttgggcctgggcggaggccatggacaagccggtggcgccgggcattatcaaggaggagctcctggagcagcagccgccgacgcaggacggtgtgggtggcggcggggatgcgccgcgcccgatggaggggctgcacgaggtgggtcccccgcctttcctcaccaagacgttcgaccttgtggaggacccggccaccgacgccgtcctctcctggagccgcgccggcaacagcttcatcgtctgggacccgcacgtcttcgccgacgggctgctcccgcgcctcttcaagcacagtaacttctccagcttcgtgcgccagctcaacacctatctagatggaacaagatactggatgaagtaccaagaatcagattgttttgttctagaagactctactgaccaccttcacatgctataggcttcagaaaggttgatcctgacaggtgggagtttgcaaatgaaggtttcctcagaggtcaaaggcacctgctgaagatgataaagagaaggaagccaccatcagctgtggcaccattgcgacagcaacgtgcccctgcttcttgcctggaggttggtgagtttggatttgaggaggagattgataggctgaagcgtgacaagaacattttaatcacagaagtagtaaaactaaggcaggagcagcaaagtactaaagatcatgtgagagccatggaggaaaggctacgagtggctgaacagaagcaggtacagatgatggggttcttggcaagagcaatgcggaacccagagttcttccagcagttggcccagcagcaagacaagaggaaggagctcgaggataccatctcaaagaaaagaaggcggcccattgacaacacaccattctacagtgatggggaaagcgaacagcttgattcacagttgaaaatgttcgagtcaggtgttctcaatgggctcaatgaacctgagctggagaatttagcagtgaacattcaggagcttgggaagggaagcatagatgatgggaacttgactcaagttagtgaccagtcagagctgaacgacgacttctgggcagagcttttggtcgaagattttggagacaaggcaggacagccagagttggagggaagaactgaagacgtgaatgaccttgctcaacaactggggtatctgagttcttctagcccaaaatagagccagttcctaatggttgcccccacaatcactggtgctttccctaccctactgttgcagaccatcctgatcaaaccggtacttttcaaattcaattcaatgacacaaacctgttaaaatctggtaacattttcattccatttcttttatattgctggattagccaggaatgatgatggatctggcagacaagttgactggtggtggagaggtgttcatactgaaggcgtgctgtggagaggtcactgccttgacgttgaaggcttagcgctgtactctgctgtgggagttacgtgtggggtgttggctaaatgtctcttccggcgtcttctggcaaaatgatctcgtggacggtgactggcaaagatgcctaggggccaacgtatacgtacacagctgttatcagatcttgttcaaagtcattgcgcggttttgacggtgctatgtatcgatcagggttctggccttctggggttgggttgtagaattgactggctgatctagtgttctccatgtatgactggtgtaaccttaaaacaccctcagcttgttgttgaactgtgacaagcatctcgtttttttgttgtactccattttcatcatcattgtacatcaaattgctg

SEQ ID NO: 95264 - DNA, 612 bp, Zea Mays
agcaacggtccggccgcttccgttccatccgaggctagcgatggacggcgaacatttgacatgtcccagccgtgtcctcgcctccttgggacgagcccacagcccagcgacgtgcgcgcgtgcgtcacggtaggccggagaagggggagaaccataaggtagaagatgagtgagctagcgagatgctcggccgcgcggctgctgctgctgcttcccgtagtcttcctagtcctagctctgctcggcggcgcccgccacgcagggggcgcctcggtctgcgacacggccaactgcggcaagggaaactgcagcgagacgccggctccggcccttcttcctcccggctacgagtgcaactgcgaccctggctggtcccatgttttggagctcattcccttctcaccctgcatcgtccccaactgtaactgttgattccttccctctcttctctctgccactacatgtgtatacacagtatgctggttgctttattacgtagctaggtcacgtcatgcatgtgtgttcgttcttattatgatcgatgcaggttccttcgacagcgcctgcttgaagttaaacctcagccagacgccagcgccacccacggatggt

SEQ ID NO: 95265 - DNA, 2631 bp, Zea Mays
ccctcaagtaacctcgaactgcatccgccagcaccagcaacagcaatggagcacacgacgacccaacacacggcagccgccggggagcaggagagcccccccacggcgttggccttgagaagcctcgccgactacaccgtcggggccatccccaccctattctatgtccccgacttcatctcccactccgagcaatcacagctcctccaccatatttaccaggcaccggcgcccaagtggaaaaccctcaagaaccggaggctacaaaactggggaggagtggtgcatgagaaggggctcctgccgcaggcctgtgagtgtgctcataaaagcttgcaaattttagcttggttttgtgaatcaaactgaagatcaggcatagcgttgcataactgaagtttggcccgtaatctaattttggttccaatgtgcttggtttcaaatgtcttatcttgtgaaaattcaagttcaaattcaaagagtagtaggtatgcttgaagaataaaattttcctacaatgtgattgccagtagaactgtgggaagctcaccaagtagttggcacttttactggataggataactaacactattgagttgctgcttcaacagcagatgccacttggttattaggaagatgtgttgtaatttttgtacaaatcacaagtcccacatgatgatcatcataaaccagttattaatatcatgatggcagcttcatggattggtggttatgagccatcagccaagttagtggtgtagctaagcaggggctgaattccctaattatccttggagcctggactctatggaagcactaaaataactgtatttttgataggcaggctccaaacctgaatgtgactcaaaaaagctaatcaagagaaggatgtttgggggctagtaggggctatggagctatccttcgaactacccctattctcggtctttagttgagtttagatggttgatctgttttttatctagattcatggatccttttgtgtattggtgtttttggccaccagaaggtggctgtgttagttagtaatctttggtttgtctagcttagactcttccttttctcttaatataatgatgtatagttctcctacgtgttcgagaaaaaatagcttgtctagcttacttgttagcttaagctttcatagcaagtaacactctcaagggcttcatcttgtgaaccatcatagctgtcttccgcttgttttagaaaaattgaggcacttcgaggttgagattattagttatcaccttgcttgtcttgtatccagctttaagtgcctcagaacatgaagcttacccaaaggtcttcataatgattaggaagtcagtcaaggctggatgtttgttcgaatattggatagggattcagagaggtttactcccttcaagttagaaaaacaaagaatggtatgtttttgtggtatttttgggtcagtctaggataaagtatttatgatccttctttaattgtttcagttagcagattgtaacattgagaacactattacttgtttttctaccttctgaaaatactgaatctagcacaacagagagattgattttttgagtgcctgctatgccatgatcttattgtaattgatgtctgtaccgaacgcaacagtgatacatttcttgtttggtggctaacatgcctactagttgcatttcagtatgcgtgcttttatacactatactcaagtacatatcaaatttagcatcaaattgagcttcacagcatgtactgctgcagtgccttcatggctaacaaggataaccgacagaatctgccagtggactggtttatttccttctgcaatcaatcacgtgctgataaatgagtatcatcctaaccaagggatcatgccacaccaagatggtcctgcctactaccctgtcgttgctatcatatctcttgcttcacctgtcgtgattaatttcacaccccatcaaaagcttaaagagcagcaggacactgatccacaggacttactggcccatgagttgccttcgccagctgagacagagaacaacggctctggatcacaagaacgtggagccacaaatgaatctgatccttcatcttcatcacttatgctgatgccgtgcagcctgttgatatttaaggatcaggcttatacagactacttgcatggcatacaagatagtgagctacataatctggacaaggtggagaatgtgtctcagtgccaagaactgaagcatctacattcggactctatcctagggggcatgagcatggaagagcatgacacgttccgcaggtccgccacaagagtctcgcttacgtgtcggttggtgctgaaagtccacaaaaagctattcaaaatctagaaattctgattatagcttgtgatttagaatagggctgccattattctttgtaagatatatataggtgttgtgggagttgtttggccagcatggtgtccacaaaacaaaaaaacattttctggtcaaggatcccaaagagctgttgagcccagtttcttagaaatcgaccaggaagcatgggaaaggaacaataaaccattggttatgatgttcgagtaggagatgatgctgttttccgtgcaattcgggttttttc

SEQ ID NO: 95266 - DNA, 1171 bp, Zea Mays
ccctcaagtaacctcgaactgcatccgccagcaccagcaacagcaatggagcacacgacgacccaacacacggcagccgccggggagcaggagagcccccccacggcgttggccttgagaagcctcgccgactacaccgtcggggccatccccaccctattctatgtccccgacttcatctcccactccgagcaatcacagctcctccaccatatttaccaggcaccggcgcccaagtggaaaaccctcaagaaccggaggctacaaaactggggaggagtggtgcatgagaaggggctcctgccgcaggccttgccttcatggctaacaaggataaccgacagaatctgccagtggactggtttatttccttctgcaatcaatcacgtgctgataaatgagtatcatcctaaccaagggatcatgccacaccaagatggtcctgcctactaccctgtcgttgctatcatatctcttgcttcacctgtcgtgattaatttcacaccccatcaaaagcttaaagagcagcaggacactgatccacaggacttactggcccatgagttgccttcgccagctgagacagagaacaacggctctggatcacaagaacgtggagccacaaatgaatctgatccttcatcttcatcacttatgctgatgccgtgcagcctgttgatatttaaggatcaggcttatacagactacttgcatggcatacaagatagtgagctacataatctggacaaggtggagaatgtgtctcagtgccaagaactgaagcatctacattcggactctatcctagggggcatgagcatggaagagcatgacacgttccgcaggtccgccacaagagtctcgcttacgtgtcggttggtgctgaaagtccacaaaaagctattcaaaatctagaaattctgattatagcttgtgatttagaatagggctgccattattctttgtaagatatatataggtgttgtgggagttgtttggccagcatggtgtccacaaaacaaaaaaacattttctggtcaaggatcccaaagagctgttgagcccagtttcttagaaatcgaccaggaagcatgggaaaggaacaataaaccattggttatgatgttcgagtaggagatgatgctgttttccgtgcaattcgggttttttc

SEQ ID NO: 95267 - DNA, 1129 bp, Zea Mays
ccctcaagtaacctcgaactgcatccgccagcaccagcaacagcaatggagcacacgacgacccaacacacggcagccgccggggagcaggagagcccccccacggcgttggccttgagaagcctcgccgactacaccgtcggggccatccccaccctattctatgtccccgacttcatctcccactccgagcaatcacagctcctccaccatatttaccaggcaccggcgcccaagtggaaaaccctcaagaaccggaggctacaaaactgggtgccttcatggctaacaaggataaccgacagaatctgccagtggactggtttatttccttctgcaatcaatcacgtgctgataaatgagtatcatcctaaccaagggatcatgccacaccaagatggtcctgcctactaccctgtcgttgctatcatatctcttgcttcacctgtcgtgattaatttcacaccccatcaaaagcttaaagagcagcaggacactgatccacaggacttactggcccatgagttgccttcgccagctgagacagagaacaacggctctggatcacaagaacgtggagccacaaatgaatctgatccttcatcttcatcacttatgctgatgccgtgcagcctgttgatatttaaggatcaggcttatacagactacttgcatggcatacaagatagtgagctacataatctggacaaggtggagaatgtgtctcagtgccaagaactgaagcatctacattcggactctatcctagggggcatgagcatggaagagcatgacacgttccgcaggtccgccacaagagtctcgcttacgtgtcggttggtgctgaaagtccacaaaaagctattcaaaatctagaaattctgattatagcttgtgatttagaatagggctgccattattctttgtaagatatatataggtgttgtgggagttgtttggccagcatggtgtccacaaaacaaaaaaacattttctggtcaaggatcccaaagagctgttgagcccagtttcttagaaatcgaccaggaagcatgggaaaggaacaataaaccattggttatgatgttcgagtaggagatgatgctgttttccgtgcaattcgggtttt

SEQ ID NO: 95268 - DNA, 1257 bp, Zea Mays
ccctcaagtaacctcgaactgcatccgccagcaccagcaacagcaatggagcacacgacgacccaacacacggcagccgccggggagcaggagagcccccccacggcgttggccttgagaagcctcgccgactacaccgtcggggccatccccaccctattctatgtccccgacttcatctcccactccgagcaatcacagctcctccaccatatttaccaggcaccggcgcccaagtggaaaaccctcaagaaccggaggctacaaaactggggtactctttgtcttcttcgcacttggtggttttggcttggagattgctttagcttcctcctttccttgacacggtgtcggattgagcaggaggagtggtgcatgagaaggggctcctgccgcaggccttgccttcatggctaacaaggataaccgacagaatctgccagtggactggtttatttccttctgcaatcaatcacgtgctgataaatgagtatcatcctaaccaagggatcatgccacaccaagatggtcctgcctactaccctgtcgttgctatcatatctcttgcttcacctgtcgtgattaatttcacaccccatcaaaagcttaaagagcagcaggacactgatccacaggacttactggcccatgagttgccttcgccagctgagacagagaacaacggctctggatcacaagaacgtggagccacaaatgaatctgatccttcatcttcatcacttatgctgatgccgtgcagcctgttgatatttaaggatcaggcttatacagactacttgcatggcatacaagatagtgagctacataatctggacaaggtggagaatgtgtctcagtgccaagaactgaagcatctacattcggactctatcctagggggcatgagcatggaagagcatgacacgttccgcaggtccgccacaagagtctcgcttacgtgtcggttggtgctgaaagtccacaaaaagctattcaaaatctagaaattctgattatagcttgtgatttagaatagggctgccattattctttgtaagatatatataggtgttgtgggagttgtttggccagcatggtgtccacaaaacaaaaaaacattttctggtcaaggatcccaaagagctgttgagcccagtttcttagaaatcgaccaggaagcatgggaaaggaacaataaaccattggttatgatgttcgagtaggagatgatgctgttttccgtgcaattcgggtttt

SEQ ID NO: 95269 - DNA, 1255 bp, Zea Mays
ccctcaagtaacctcgaactgcatccgccagcaccagcaacagcaatggagcacacgacgacccaacacacggcagccgccggggagcaggagagcccccccacggcgttggccttgagaagcctcgccgactacaccgtcggggccatccccaccctattctatgtccccgacttcatctcccactccgagcaatcacagctcctccaccatatttaccaggcaccggcgcccaagtggaaaaccctcaagaaccggaggctacaaaactggggaggagtggtgcatgagaaggggctcctgccgcaggcctgaagtcagtcaaggctggatgtttgttcgaatattggatagggattcagagaggtttactcccttcaagttagaaaaacaaagaatgtgccttcatggctaacaaggataaccgacagaatctgccagtggactggtttatttccttctgcaatcaatcacgtgctgataaatgagtatcatcctaaccaagggatcatgccacaccaagatggtcctgcctactaccctgtcgttgctatcatatctcttgcttcacctgtcgtgattaatttcacaccccatcaaaagcttaaagagcagcaggacactgatccacaggacttactggcccatgagttgccttcgccagctgagacagagaacaacggctctggatcacaagaacgtggagccacaaatgaatctgatccttcatcttcatcacttatgctgatgccgtgcagcctgttgatatttaaggatcaggcttatacagactacttgcatggcatacaagatagtgagctacataatctggacaaggtggagaatgtgtctcagtgccaagaactgaagcatctacattcggactctatcctagggggcatgagcatggaagagcatgacacgttccgcaggtccgccacaagagtctcgcttacgtgtcggttggtgctgaaagtccacaaaaagctattcaaaatctagaaattctgattatagcttgtgatttagaatagggctgccattattctttgtaagatatatataggtgttgtgggagttgtttggccagcatggtgtccacaaaacaaaaaaacattttctggtcaaggatcccaaagagctgttgagcccagtttcttagaaatcgaccaggaagcatgggaaaggaacaataaaccattggttatgatgttcgagtaggagatgatgctgttttccgtgcaattcgggtttt

SEQ ID NO: 95270 - DNA, 1605 bp, Zea Mays
ccctcaagtaacctcgaactgcatccgccagcaccagcaacagcaatggagcacacgacgacccaacacacggcagccgccggggagcaggagagcccccccacggcgttggccttgagaagcctcgccgactacaccgtcggggccatccccaccctattctatgtccccgacttcatctcccactccgagcaatcacagctcctccaccatatttaccaggcaccggcgcccaagtggaaaaccctcaagaaccggaggctacaaaactggggtactctttgtcttcttcgcacttggtggttttggcttggagattgctttagcttcctcctttccttgacacggtgtcggattgagcaggaggagtggtgcatgagaaggggctcctgccgcaggcctgtgagtgtgctcataaaagcttgcaaattttagcttggttttgtgaatcaaactgaagatcaggcatagcgttgcataactgaagtttggcccgtaatctaattttggttccaatgtgcttggtttcaaatgtcttatcttgtgaaaattcaagttcaaattcaaagagtagtaggaagtcagtcaaggctggatgtttgttcgaatattggatagggattcagagaggtttactcccttcaagttagaaaaacaaagaatgtgccttcatggctaacaaggataaccgacagaatctgccagtggactggtttatttccttctgcaatcaatcacgtgctgataaatgagtatcatcctaaccaagggatcatggtttgcaatcgacagacctctattgtttgttcctctgtttacatattaagcatcacccttacaaacaatgactttgtgccttccagccacaccaagatggtcctgcctactaccctgtcgttgctatcatatctcttgcttcacctgtcgtgattaatttcacaccccatcaaaagcttaaagagcagcaggacactgatccacaggacttactggcccatgagttgccttcgccagctgagacagagaacaacggctctggatcacaagaacgtggagccacaaatgaatctgatccttcatcttcatcacttatgctgatgccgtgcagcctgttgatatttaaggatcaggcttatacagactacttgcatggcatacaagatagtgagctacataatctggacaaggtggagaatgtgtctcagtgccaagaactgaagcatctacattcggactctatcctagggggcatgagcatggaagagcatgacacgttccgcaggtccgccacaagagtctcgcttacgtgtcggttggtgctgaaagtccacaaaaagctattcaaaatctagaaattctgattatagcttgtgatttagaatagggctgccattattctttgtaagatatatataggtgttgtgggagttgtttggccagcatggtgtccacaaaacaaaaaaacattttctggtcaaggatcccaaagagctgttgagcccagtttcttagaaatcgaccaggaagcatgggaaaggaacaataaaccattggttatgatgttcgagtaggagatgatgctgttttccgtgcaattcgggtttt

SEQ ID NO: 95271 - DNA, 1409 bp, Zea Mays
aacctcgaactgcatccgccagcaccagcaacagcaatggagcacacgacgacccaacacacggcagccgccggggagcaggagagcccccccacggcgttggccttgagaagcctcgccgactacaccgtcggggccatccccaccctattctatgtccccgacttcatctcccactccgagcaatcacagctcctccaccatatttaccaggcaccggcgcccaagtggaaaaccctcaagaaccggaggctacaaaactggggaggagtggtgcatgagaaggggctcctgccgcaggcctgtgagtgtgctcataaaagcttgcaaattttagcttggttttgtgaatcaaactgaagatcaggcatagcgttgcataactgaagtttggcccgtaatctaattttggttccaatgtgcttggtttcaaatgtcttatcttgtgaaaattcaagttcaaattcaaagagtagtagtgccttcatggctaacaaggataaccgacagaatctgccagtggactggtttatttccttctgcaatcaatcacgtgctgataaatgagtatcatcctaaccaagggatcatgccacaccaagatggtcctgcctactaccctgtcgttgctatcatatctcttgcttcacctgtcgtgattaatttcacaccccatcaaaagcttaaagagcagcaggacactgatccacaggacttactggcccatgagttgccttcgccagctgagacagagaacaacggctctggatcacaagaacgtggagccacaaatgaatctgatccttcatcttcatcacttatgctgatgccgtgcagcctgttgatatttaaggatcaggcttatacagactacttgcatggcatacaagatagtgagctacataatctggacaaggtgaaataatgattgatgaatcattttatatgtacccgatgagcatctgaacttattcagagtgcaaaaaaatttggcattgtacaggtggagaatgtgtctcagtgccaagaactgaagcatctacattcggactctatcctagggggcatgagcatggaagagcatgacacgttccgcaggtccgccacaagagtctcgcttacgtgtcggttggtgctgaaagtccacaaaaagctattcaaaatctagaaattctgattatagcttgtgatttagaatagggctgccattattctttgtaagatatatataggtgttgtgggagttgtttggccagcatggtgtccacaaaacaaaaaaacattttctggtcaaggatcccaaagagctgttgagcccagtttcttagaaatcgaccaggaagcatgggaaaggaacaataaaccattggttatgatgttcgagtaggagatgatgctgttttccgtgc

SEQ ID NO: 95272 - DNA, 733 bp, Zea Mays
aacctcgaactgcatccgccagcaccagcaacagcaatggagcacacgacgacccaacacacggcagccgccggggagcaggagagcccccccacggcgttggccttgagaagcctcgccgactacaccgtcggggccatccccaccctattctatgtccccgacttcatctcccactccgagcaatcacagctcctccaccatatttaccaggcaccggcgcccaagtggaaaaccctcaagaaccggaggctacaaaactggggtactctttgtcttcttcgcacttggtggttttggcttggagattgctttagcttcctcctttccttgacacggtgtcggattgagcaggaggagtggtgcatgagaaggggctcctgccgcaggcctgtgagtgtgctcataaaagcttgcaaattttagcttggttttgtgaatcaaactgaagatcaggcatagcgttgcataactgaagtttggcccgtaatctaattttggttccaatgtgcttggtttcaaatgtcttatcttgtgaaaattcaagttcaaattcaaagagtagtaggtatgcttgaagaataaaattttcctacaatgtgattgccagtagaactgtgggaagctcaccaagtagttggcacttttactggataggataactaacactattgagttgctgcttcaacagcagatgccacttggttattaggaagatgtgttgtaatttttg

SEQ ID NO: 95273 - DNA, 5311 bp, Zea Mays
ctaaacactgagaagaatgcagctgtgcttcaacaccagcagtctgtggagctggtttcggtactcgaatctcagctgtcaaagctacagtcagagctagatgagactgagcagagagtacagttgctaacacaagatcttgaaaagaagaaagaagaagcagataatgtccatctcaagctgcaagatgaatgccataggcgtatgcaaattgaagcagctcttctcatgacagagggtctgcattcccagttgcaagaaaaaatgcaaatgttgacacaagattttgatggatcaacaaagaagctcagtgagttggaaaataataagttagacctggagagcacactgaaagaactgaataacaccattttaggtttgaactcggagaaggatgcagcactccttcaacaacagcagtctttacagaaagtatctaatttggagttagaactctcaatgatgcagttggaaatggacaagtctgaacaaaaaattctcttactggaacaagaaattgcacggaagaatggaagtgtcgacagcctggagataagtttgaaagatgaatgtgagaagaggctacaagcccaaaaaatgtattcccagtcacaggaagacgttagtaggttgtacatagagatagagaagcagaatggcaagttgaatgagttggagaacttgatatccgaacttaacaacaccatcctacttataaacactgagaaagatgccaccctccatgagaaccagcagtcctcagtgagaatatcagatcttgaatctgaactcatggccttgaaaaccgaactggaaaatgttgaagggaaagttcatgcggtagagcaagaactcatatataagaaagaagaagcagataacctccaaattagcctacaagatgaaattcaaaaacgagttgaaggtgaagaatctcttcttatgatgacaaatcttcactctgggtcacaaaatgaagtgagagggttggcattggaacttgagaagctgaatggtaatttaagacaggtggagaacagtaaggttgatcttgagaacattgtaaccaagcataccgaggaaattcatatccttcgtgaacggaatctttctactgaccttatgataaaggaccttcatcttgaattggacgcactgaaggatttgaacgtgaaacttcagacagaaatggggttacacataggtgaaaaagaagcacttcagagagaatttacttctcaaagggaagagaagaaaaatctagaggggatacaccacactctggttgatgagatgagtaccctaaaaaccactgcaacaatgaaccagaagctgattgaggaactgcaaattacaaactcaaaactgaaggaggtgtgtgcaaagagtgaggttgagaaggcacttctctcagaaaaactccaagaggtggagaagctatctgaagaatgttcactcttggagaactcactttcagatgcaaatgctgaaatggatgcattgagggataaaataaaggcacttgaggctttagaaagctctctcaaggatataatttcctgtcatgtttctgagaaggctgttcttgtatcagagctagagatccttggtaaaagattatctgatgcttcagagaagaattctatcatggatagctcattgtttgatatgaaaatggacctagaagacttgagaacaaagttgaaagattctgaagaatcctgtcaggctctccttgcaaataattcagctctttctggtgaagtggatgcattaagagagaagataaaagcactacaggactcagaaagctctctgaaggatgcaatttcctgttatgtttctgaaaaggctgttcttgcatcagagctagagatccttggtaaaagtttatctgaggtttcagagaagaactctattttggatatctcattatgtgatatgaaaactgagctagatgaattgagaacaaagctgaaagattctgaagaatcctgccaggctcacctaacaaataattcagctctttctgctgaaaagaacaatctgttctctcagttggagagcattacattggctatgaaagccctagaaggtatgcatgccaatctggaacagaagcactcctctgtatcaagagagaaggattttgcatatgatcaagtaagggaactgcaggatcaattgagaattaagaacgaggaatttgaagtgtcagcaaagtcacatcaacttcaagcaaacagctatgagaaacaaattttttctctacaagagaaaaaccattatatggaggaggtgcttcaacaggaacaacagaaaaacataaatgcttctattagtacagttattttggagaactgtttggtcgatgagcaagacaagaaggttgctcttttcactgaatgccaaaagtatgctgtggaaaatcattcagccaatatgttagtttcagagttaatggaggaagctagatatcatggggaggagagaaaaaaattgctagcgcacaatgaaaaactgagggaagggatttcaaatcaaatgaagtttctgaatatctgcaaagatctaggacctgctgatttagctgaggacgaagttctgttgcagactgtttcagatgaaactattaacattatgagacttaaggatgaaactgaagatgtgaataggctcatggacaccgagctctcagttctctcagtagttttgttgcaagtagggatggagcttagagacttgcatttacagaagtgtgcccttgagaaagaagtggagagtggagaaaaagagacgctttctttgcaaaatcaaaaccagcagatgttggaacagaatgaacaactaaggagtggattacaggaaagcagtgaaggggtggaggtgctgaaaactgaagtatttgtgatacaagagaaactatcttgcttgagagagtcctaccagacctcacaagatgaaatttccaacctgactaaaaaaaatgagtccttgtctaaggaataccagtccttgagtgagaagtacaatgccttggaagatgagaatgatactatttttgaagaatgcatgatgctcaagaacttgtgcctgttctttaggggacataataatgagattgcatctgcattggcttctcttaccgatgagatggctttgttgagtttggctaagggcgacctcgatctccaagttaatgagctgaacagaaggtcagtaatgcttgaatcagaaaattatcacttaaaggactatatcatctacttggtagagattctcaggactagattagtcctttcagagtttgatttggacaccaatcgaagtgtcttccaggagttagttgtggaacttgagaattgcatgacacagttggtgcagaaggatgatgagctaatggaagcagaagagaaggttcaactcttgcaagaaaagaaccgggaactctgtggagttgttgggtctcttcaggttgcaatggaaggtgctaaagtggtgaaaggagaactggagaagaaaatcacaatactgattgaacagtgttctagcaaggacgacaaaattttacttcttcaccaagacaatgaggcattgcaatcagagattgagcaatgtgagagggaatttgttgagctgatggatgatgccattactttttcagtgaattctgcggtctatgaagaaaaagcattcgagcttatgatgaatggtaaagctacagagaatagagcaatatcccaaaaggagttgctaatgaaggagatctcttctcgagatgctaatattgaggagttgcagaaaaggctggctggtattcaggatgaacatgcagaactaaaagctgagttgaacacacatctagctctcatagcatcattggttgatcatgtcagtgtgctggaagaagatgttcgttctctgtcaaaaccatgtagtacagaaggcaaagaggaaactgcaagggtacatcatgtgcaagagggcgacgatgggctggaatctcattgcttagtcaatggaactccaaagttacaagggttgattgcaagaatagaagcacttcaagtggttgtattaaatgctaaagatcgtcaagatcgtaaatcagccgagtctgcagctaaactggcggcagcaagtgcagaaattcaagagcttaaaacaagaggcggctcacgcatggaggcaaaagaaatatgttctgacaatgagaaacaagatgttgaggtctccaaagggaagcaagtccagatcatgaaggatattgagctggaccaaatatctacttgccctccatatggcgctggagctgccctctacccccatggaactggtgcaaatgctgaactagatgacgatatgcttcagctgtgggaggctgcggagaggagctgcaagaaccaaacggccaagtcctcgtcatctgagcacgacatacaggcggtcgaggatctggagagcgagtgcccttcgtctgagctagcgaggggaagagaccttggaaccaataagctagaagtgccaaagggagctgtagagcctcacgaggcgtggagcaagaacgtgcttgagaggctcacttctgatgcccagaggctgttgagcatccaagcgagcatcgaggaactgaagaagaaaatggaggggtcctcgaagggtacgaattctgagtacggcagtgtgagcgctcaggtgcatgagacggagggtcttgtcttggaacagatcaattccaacaacaagttgagcaggaaggctgagaactaccccgcattgtcagataatacgagcaccgagcgaggagggtattccagcaggaggaagatctcggagcaggtgcagagagggtcggaaaacgtggcaaggttggaactggagctccagaagatccagtacgtcttgctgaagcttgaggaggagcacgagtacacaaggctcaaagtctctgataagcgcactcgtgtgcttttgagggactacctgtatggaaggaaggaccgtggaggcgggcagaagggaaagaagaagcgggtcccgttctgtggttgtgttcgttcgaaatcaagaacagagccgtagcctttttgttctcgcacccctgcgcgttggaagaggtggtggtgtcctttaggatgaatcccctttgtaactgagtttagtatcctgatgaagaagcctatgtactagatttttggtttcctgtctagatgaggccgttcttctagccagtttaatctcaggtattactgtgatgtatcaaggactgctctttctatatatataataatagcttcatgtttgtatagcc

SEQ ID NO: 95274 - DNA, 1767 bp, Zea Mays
atggcgactttggtccgtcatgattcaaggcagtactcgtggtggattagccatatcagccccaagaactcgaaatggctccaggaaaatgtcagcgacatggactcaaaggttaaagcaatgatcaaacttatcaatgaagatgctgattcttttgcaaagagagcagagatgtactacaagaaacgtccagagctaatgaatttggtggaggaattctatcgagcgtaccgtgcactggcagaaagatacgatcagtccactggggcacttcgccaggctcacagaacaatttctgaagcatttccaaatcagatgccatcaatgtcagacgagtcaccctctgctttcagccaagagatggagcctcatactccagatacgtctactctcacacgtgtggcatttgattacgatgatcttcagaaggatggagttggtgtgtcaccacaaagtttcacctccaagaggaatggtacacaccctgaggaaaccagtgcgctgtcatcgagtgttgaaaatgctcctcgtgctggttttgatggaaaggtatggaaaggactaacttttgaaggcccaaatgtcaaagggaaagatgatattagcaacgagatggcaaatttgcaacaagaagttgcaagactattagctgagagccaggatctgaaacagcagatgttttcagaatccgagcgggcaaacaaagctgaaaatgagatgcaaatgctcaaggcaacagtattgcaattaaatgctgaaaaagacacatcacttatgcaatataataattcctctgagcgaatatctacattggagtctgagctatcgaaggctcagtctgaccttgagaagttaactgatgaaatggctgcagatgtccagaagctaattaatgctgaaacactcaatattgctatacagtctgaggctgagggtttggatcagaagatgaagatgcagcaacaagcactagaacaaaagcttaaggaattggagagtttccgctcaagcttccaggaggagcatgaaaagcgcatgcaggctgaaagtgctctactttcccagaggaaggaacttgctcaatctcatgaagaagtgcagaggttggctatagaaataaagacagcgaatgaaaagttgaatgagttcaagcagaccaaggaggtccttgagtacactgtttgtgagctgaagaaggatgttgagcgccttacagaacaaaaccagtcctctgaggtgcttgtacagaaacttggtgaccagattaatacactcaaggattcaaataatgaacttcaaagtgaaatacaaagccttaagagcatcatttcacagctaaacactgagaagaatgcagctgtgcttcaacaccagcagtttgtggaactggtttcggtacttgaatctcagttgtcgaagctacagtcagagctagatgagactgagcagaaagtacagatgctgacacatgatcttgaaaagaagaaagaagaagcggacaatgtccatctcaagctgcaagatgaatgccataggcgtatgcaaattgaggcaactcttctcatgacagagggtctgcattcccagttgcaagaagaaatgcaaatgttgacacaagattttgacgggtcaacaaagaagctcagtgagttggaaaaaaataagttagacctggagagcatactgaaagaactgaataacaccattttaggtttgaactcggagaaggatgcttcactccttcagcaacagcagtctttacagaaa

SEQ ID NO: 95275 - DNA, 201 bp, Zea Mays
atcgattgcaaagagtggataaaaaaaaggtcatccttcacacgtcagcacagctacgttgtcagacctcgccggagaagcaacctccagttgccggcgagctcaccctgctggtcacagaaaagactcacgcacacacacacgaacacaagtaggcacactctgatttggtgctgtgaacaaccaacagcttttctgact

SEQ ID NO: 95276 - DNA, 1311 bp, Zea Mays
aaaaggtgaagctgcatccatgtatttaacaggcagagatgtgatcagccttgcccattccatggctgcccgctctgttgcgtgatcctgctgcatgcacttcttgaattaattatataagtactaactagtacggtagtacctacctgacgatcctgacgcgcgcaaggggttctgtggcatttcggcagctagcacgcagtgaccacggtagctatcgccgaaagcgggaactgaagaagatgttggggaggatggctgggccagggggcggcggagtctcggagcagcggcagcgcgaggccgcgtttgatttcggccgacacacgggcactgccgccgctgtgccgtcgtcgtcgccgcatactcccatggtgcctcccaagctgttcttggctgcagggagcggcggcgtcgtctccggagaggaggcgttctcgccaccggaggagctagcggggggcgtcgtcgtgatggtcagccccacctcgacgctgcagacaccgaccggcagcgctagccctacgtctgcagcgacgtccacggccgttccgttctcccgtcgcggggcgacctcgccatcatcaccaggcggggacgatcgtcgtcggtgcaagagcaggagccggatccggagccagcgcccctgggaggcgtggcctgtcggggtcggactcgccggcgccctgagcggtgacgctgacgcactcccacccgtggcgacggtactgacaggacagaggatccggccgtggccgtgcaggagctccgcgtcgtccgtgctgggcctgggctcccccgaaagcaggagccggtgccggggcgtcttgtcgccgaggaagatgatggaagcgtcggaggaggactacacccgcgtcatcgcgcgcgggcccaacccgaggacgacgcacatattcgacgaccgcgtcgtcgtcgtggaggacgagttcctgaggtggtgccatggctgcagcaaggacctgggccagggcaacgacatcttcatgtacaggggggagatggccttctgcagccatgagtgccgctaccgcgtgatgctgctcttggacgaagaaggagaatcctgctgacgcaccagccaaggtgccattttaacttgagaaggagaactggagaagacctgtatgccaaccggccgccggcggagcagaccccgatcgatactgcatgctgcactattctctgcttcattcgttctatgctcttttgctactactagtactataggttttaattatccgcattagctgttgatcatattccaagtgattggtttgcatgctccattgg

SEQ ID NO: 95277 - DNA, 2310 bp, Zea Mays
gctcgccgaacccagagccccgcccacctcttttcggttttttctcgccggcgtttgtgccaggatcgggctttgggctccgtgcatcgacgcgccgccgcctcctgatcgcaaagggtgtttcccccaggctttcgtgctccggaagtggcgagattcgccgagaaagtgtgttggcgtatcgatctgcattggatcgtcgggcgattcgtgtgacggagacgacgtcctctgtggtggctccggtttgctcctcagctctagatctggaaggactgggtgatctgctgcctcaagcagcttgaggtgcattggaaagtgaccatctttcccagacatcggcacaacgtaactggacatggaggctcttgtggttttcccggagcagcacagccaccaccatcaccgccaccctggtacccgcagcaagtcatcgggtccatacttttcatcaccgcctaactctcgtggcttccgtggaatgaactgccggtctttccactctggtcgttgcgtcggtgctattccattcccagcacctcctgctcgcacctactcatccccagagcccaagacacccaagcagcaaccacgccatggtggcaagcgaagccggccaatttccataagcctctccacatcccctccctcccattctgagctctgggcaggtccagcattctccaactctccaccacctagttcgcttcccatccccaaattctcgctccgccagaagcgcagcatctctctcgagctgccaccggttgaacgccctgatgatgtggtggtcaggctgcattctaaatcagcaccttcatccccagttgagggatatgggtatgacttcttcaatgacgatgcaatcgctagtgcgatagcaacggagaatctgaggaggattctccagctggatatcgcagatcattgaataatgggaggatggaagggtggttcttgtgtacataggttatctttcactgacagctttctacttgcattggttgtgtatagggtaatggtgatagatacttggtggttgtaagatatggtcaggatcatgggagaggtgtaggttgtaggtgaagcatcttcagaagcttagacggttgaaggtgatagtgccctgttaggtgttattaaggtggggtctgggtcgaggatggggttgcacggcagttggtagtattcacctatatgcttccttcatctcttaggtgtaggatttaaacctttttaaaaacagcatcatttgcatccacagtacctgttctgagctggcggtgggcactctgacatagcagtaacatacgtcctaaccccaaaccagatgtcaaatatttgtagggtaccatgcatcttacatacccttgcatacttatttccttctgtcctctagccaactgtctctaactatcctcgcttcctggtgctctgcaaagaacaccattatctcctcagcagctcttctgttttttttggtaaggaagaagctgcgtggaagatggaagaaattctgctctctccgtcttgttcgaaactaactttcctatcccgcccctttgttgcatatctggcatataccatagtccatatccgtcgcatatctccaggcttttatgttcatctagcgctcctgcattgcatctagtgcccttagtcagttagcatgctcattcgttcccacttcaagttcacgaaccagtttgagggttctgattttcttaaaagcgtcgaaagagagtctggattctggatcccttcgtgcaggcaaaccctgatgaggttgctctgtaatgacataacgcttaagctagctcgtgccggtgttacacgcttctgtagccctgcgcagttttagcactagcagtgaagcagcagtactgctggatctagattagtagtcatcggaaatgccgaggtttggtcagttatcttgtgctctggtgttaaatcagcagttgcattgtgtcgttgttacttcagtaacgtgatataacggtcctatgtcgtgaaactagctcatggtgttagaactagaaaccatgttgcccagagctactatgttgatgttgcacctgctgagcctgtcatggctgtcactccttgaggattattttggttattagttcgtcggcggagttgcggagtttcgtctctgcgtttgatgaaagtgttaatccgaactgtcaggataaatttaatattttaaaatagatatgtataaaatttgatgttgatcttttcttatgttatcaagctaattagtataaatatgaataaaatattatataaattgttttatgtatt

SEQ ID NO: 95278 - DNA, 2357 bp, Zea Mays
tccacccaccccactccccctctccgtggtttgtccgctcgcatccttccctcccttccgccctttcctcccacttgctcgccgaacccagagccccgcccacctcttttcggttttttctcgccggcgtttgtgccaggatcgggctttgggctccgtgcatcgacgcgccgccgcctcctgatcgcaaagggtgtttcccccaggctttcgtgctccggaagtggcgagattcgccgagaaaggtcagatccggtggcctggttcgagcaacagtgtgttggcgtatcgatctgcattggatcgtcgggcgattcgtgtgacggagacgacgtcctctgtggtggctccggtttgctcctcagctctagatctggaaggactgggtgatctgctgcctcaagcagcttgaggtgcattggaaagtgaccatctttcccagacatcggcacaacgtaactggacatggaggctcttgtggttttcccggagcagcacagccaccaccatcaccgccaccctggtacccgcagcaagtcatcgggtccatacttttcatcaccgcctaactctcgtggcttccgtggaatgaactgccggtctttccactctggtcgttgcgtcggtgctattccattcccagcacctcctgctcgcacctactcatccccagagcccaagacacccaagcagcaaccacgccatggtggcaagcgaagccggccaatttccataagcctctccacatcccctccctcccattctgagctctgggcaggtccagcattctccaactctccaccacctagttcgcttcccatccccaaattctcgctccgccagaagcgcagcatctctctcgagctgccaccggttgaacgccctgatgatgtggtggtcaggctgcattctaaatcagcaccttcatccccagttgagggatatgggtatgacttcttcaatgacgatgcaatcgctagtgcgatagcaacggagaatctgaggaggattctccagctggatatcgcagatcattgaataatgggaggatggaagggtggttcttgtgtacataggttatctttcactgacagctttctacttgcattggttgtgtatagggtaatggtgatagatacttggtggttgtaagatatggtcaggatcatgggagaggtgtaggttgtaggtgaagcatcttcagaagcttagacggttgaaggtgatagtgccctgttaggtgttattaaggtggggtctgggtcgaggatggggttgcacggcagttggtagtattcacctatatgcttccttcatctcttaggtgtaggatttaaacctttttaaaaacagcatcatttgcatccacagtacctgttctgagctggcggtgggcactctgacatagcagtaacatacgtcctaaccccaaaccagatgtcaaatatttgtagggtaccatgcatcttacatacccttgcatacttatttccttctgtcctctagccaactgtctctaactatcctcgcttcctggtgctctgcaaagaacaccattatctcctcagcagctcttctgttttttttggtaaggaagaagctgcgtggaagatggaagaaattctgctctctccgtcttgttcgaaactaactttcctatcccgcccctttgttgcatatctggcatataccatagtccatatccgtcgcatatctccaggcttttatgttcatctagcgctcctgcattgcatctagtgcccttagtcagttagcatgctcattcgttcccacttcaagttcacgaaccagtttgagggttctgattttcttaaaagcgtcgaaagagagtctggattctggatcccttcgtgcaggcaaaccctgatgaggttgctctgtaatgacataacgcttaagctagctcgtgccggtgttacacgcttctgtagccctgcgcagttttagcactagcagtgaagcagcagtactgctggatctagattagtagtcatcggaaatgccgaggtttggtcagttatcttgtgctctggtgttaaatcagcagttgcattgtgtcgttgttacttcagtaacgtgatataacggtcctatgtcgtgaaactagctcatggtgttagaactagaaaccatgttgcccagagctactatgttgatgttgcacctgctgagcctgtcatggctgtcactccttgaggattattttggttattagttcgtcggcggagttgcggagtttcgtctctgcgtttgatgaaagtgttaatccgaactgtcaggataaatttaatattttaaaatagatatgtataaaatttgatgttgatcttttctta

SEQ ID NO: 95279 - DNA, 551 bp, Zea Mays
tccacccaccccactccccctctccgtggtttgtccgctcgcatccttccctcccttccgccctttcctcccacttgctcgccgaacccagagccccgcccacctcttttcggttttttctcgccggcgtttgtgccaggatcgggctttgggctccgtgcatcgacgcgccgccgcctcctgatcgcaaagggtgtttcccccaggctttcgtgctccggaagtggcgagattcgccgagaaaggtcagatccggtggcctggttcgagcaacaggttcgtcgggtttgaggcgtgtggtcgatggttgtttcggttatgcttgtgggattctttatcagaggtttccttgcgtgcagtgtgttggcgtatcgatctgcattggatcgtcgggcgattcgtgtgacggagacgacgtcctctgtggtggctccggtttgctcctcagctctagatctggaaggtatacaccctaacttcccgttttcttagttggagatgcaaatatttatttggcaggtggtttgtctcaagggtgtaatttcagaaaa

SEQ ID NO: 95280 - DNA, 240 bp, Zea Mays
ttgcttgatataaacaatagatgttggacagttgaccgcctagctaagatagatctgagacacccggcagcctgtcccccctttgtgatcaaaaggatgagacaattaagcacatcctcgtctcatgtagtttttcaaggcaggtttgggcagtcatcttccagaggctgggtctatttgatcaggcacatcaaccttctgtatctcttttctctagttgatggtgcaatgctatcaagg

SEQ ID NO: 95281 - DNA, 1958 bp, Zea Mays
gcaatgcatgcatgctctactgttcatggctacgagcagttattgcgctggcaacttggcactgcccccgatctccctcaccgtcaccggcccatcacctaccagctgctgcttgccattaacattaacccctcctccctcctataaatccggtctccgcgctattcctccatcgaccatcgagctagatcatatcgatcgccatatatatagtagggagcggctcgcagggcaagaacgaagcagatggcggtgatgagccgccgccgcgtcatccagctcgtcctcgttggcgtcgtcgtcttcctggtggccccgcggctgtcgtggaaccttccgggcggcctcgagaagctggggctgcagcagagcccggcggcggtggcggtggcctgctgggcggctgcggtggcggcgtgggcgtacgcggtgtcccggccccggcccgtgtacctggtggacctgtccgggtacgtggcgggcgcgtcgcacgaggcgtcccgcgccaagacgatcgcccacttcgggcggtgcgggcggttcagcgacgagagcatggcgttccagaagcggatgctggagcggtcggggctcggggagcagacccacttcccggcgtcgctgatcagcgtgcccgtggacatgtgcctccgcacggcgcgggaggagtcccacgccgtcatcttcggcgtcgtggacgacctcctccgcagggcgcgcgtggcgggcggcgacgtcggcgtgctcatcttcaactccagcctgctcagccccacgccgtccttcacgtcgctcatcgccaaccgctacgggatgcggcgcgacgtcgtcagccacaacctcagcggaatgggatgcagcgccggcatcatcgccatcgacctcgccaagcgcctgctacaggtgcactcggacacgtacgcgctggtggtgagcacggagaacatcactctcaacgcctacatgggcaacaaccgccccatgctggtcaccaacacgctcttccgcgtcggcggcgcggccatcctgctgtccaaccgccgcgccgaccgccgccgcgccaagtaccagctcatccacacggtgcgcacgcaccgcggcgcgcacgaccagagcttcggctgcgtcacgcaggaggaggacgacgcggggtgcgtcggcgtctccctggccaaggagctcatggtggtcgccggcgaggccctgcgcaccaacatcaccacgctgggcccgctcgtcctgcccatgtccgagcagctccgcttcctggccaccgtcgtcctcaaccgcgtcttccgcgccagagtgcgcgcctacctgccggacttcaagctcgccttcgaccacttctgcatccacgccggcggccgcggcgtgctggacgagctggagcgcagcctcaacctcagcgcctggcacatggagccctccaggatgacgctctgccgcttcggcaacacctccagcagctcgctctggtacgagctcgcctactgcgaggccaagggacggatccgcaagggggaccgggtatggcagatcgctttcggctccggcttcaagtgcaacagcgccgtctggaaggcgctccgcacggtggacggcggcgaggagggaaacccgtggacgccggagatagacgtgctccccatccacgtgcccaaggtttcgcccatcgatgagaccacctacaagttcgctgacggcgccacgtacaagatctctcttggttaaaatatattactactattgttattattattattattattacatgattgatttctcatcatcagcatgtaacctaatcaagataatttaagaagcagcagcgcgccgttattaattattattgccaggcttgacgatggtgacggggccttactattgccatgatttgcatcatgcatctgtacgtgaagctctatgaactcacgcgccaagaattatacacttcg

SEQ ID NO: 95282 - DNA, 216 bp, Zea Mays
atgctcaactacgaccaagtcttcatcagggacttcgtgccctccgtgctcgccttcctcatgcacggcgagaccgagatcgtccgcaacttcctccttcacaccctccagcttcaggtgaaacgtgaagagctgcttgagtatgcccaaagtatcatttcaggattgaagagaaatgatgaaattgtggtattaatggagaaagatcagaaatag

SEQ ID NO: 95283 - DNA, 414 bp, Zea Mays
atgcaggtgagcgggcagcggcctagatctgtgtcccccggtactccacgagctttttttggaaatctcgtgcggatctgtggtgtttggttggttgggaagccaggaaggttagccgtaggcttgagatctcgatttcgtctccgtgatctggatgttgcaaatctagccacatcctgcgtgactatgcgtgtagatttacttcctgtgtgcatcggtggtattaatggagaaagatcagaaatagctgaaattgaagcagcatcaacaagtgaagctgctcggcttagagctgctctccggcttgctccacccggcgctgttcgggaaccttaccagtcttttgaacggcttacacagacctgttttgataagagccgagcagcgattcttcaatttcggaccacgacctag

SEQ ID NO: 95284 - DNA, 1095 bp, Zea Mays
ctagccacaacagatgttgagactggaccaaaactccatgaacactgaggaaggcaagcctttggggctaagcttccttttgaggctatttttgtgtcgcataaggattctgcaagtaatccaacaatcgttgttcttcatggtggaccacactcagtttatccatcaagttattccaaatccttggcttttcttttttcgcagggatataatcttcttgttgtgaactacaggggttcattaggctttggggaagaagcactgcaatcccttcctggcaatattggttctcaggatgtcaatgatgtattgacggcattggaccttgttataaagagaggactaatagatccatccagagttgccgtagttggaggttcacatggaggtttcctgacaacacatttgattggccaggctccagacacatttgttgcagcagctgctcgaaacccagtatgtaacttatcattgatggtgggtacctctgacatccctgattggtgctttgtcgagatttatggaaaagaagggaaaaagtacttctcagagtctccttcagtagacgatctttgtcaattccaccagaagtcaccaatttcacatattgcaaaggtcaagacaccaacactctttcttcttggagcgcaagatctcagagttcctgtttctaatggcctgcagtacgcaagggctttgaaggagaggggaatcgaaacgaaaactattgtcttcccagaagatatccatggaattgacaagcctcagtctgatttcgaaagcttcctcaacataggggtttggttcaagaagcacatgggcaaataaacattagtgcttcccattacattcatgatttactttttcattgttactaaatgcctgtaaccgggtcaaagtatacatgatttgcctgtccaatctggtgtttgccaagatggaataattcttgaagacatatagaagcccgtgtttattctagtgtggattctggaataccaactgtagctagtttatataataatcttctaataaatgatgcttatgtgttaatgtgaaacggtgcgtgcttttgaattgtattcagaaaaaaaa

SEQ ID NO: 95285 - DNA, 176 bp, Zea Mays
ttttttttttgatttttggagatagtaccagactactagtacattacagggaacctccagaatgggcgtggataaatatttgccacttgcggctgtctcccatccattcccttgaaacaaccggcacctgggcagggtgcagtacttttcttttattcgtttacttatttattttt

SEQ ID NO: 95286 - DNA, 209 bp, Zea Mays
aacagatttttggacatagttatatagaagttgcaatcacaccagaccagcagttgcaattacaccagacagcagttgcaatcattgtttgtttaacaaattttttgacatagttatatagaagttgcaatcacaccagaccagcagttgcaattacaccagacacagttgcaatcatggtttgtttaacagattttggacatagtaat

SEQ ID NO: 95287 - DNA, 1778 bp, Zea Mays
ccatctaaccagtggtaatggtggttttggtcagagtgttggtcgcctgtgccaaattccgctgcccggcggcgaatttactcctctcagcctctacttctcgggttcgagctcaacccggcgggccactgctgcgacaaaggactagcaaggtttcattgcgctcaattgctatgtctaccacacaagcctcagaagcagctgctgacaaaggattgcctctggcagtggacgctaccatgattgatgagtatgcctcccagtcaaagttgctgcaagaatttgttaaaatcccaactattggcaaggcttggatcttcaattccaaggatgacgacatgtccaaagcagtggtttcgattggcaaatcagatcttttggccaataagaggagacaattccttttgaatactcacatttcaaagagtccctcaaagtctgtcgattttcagtggtcccccttccctactgaaataagtggagtgtcagcaatagttccatctccatctggagaaaaacttcttctagtacgcaattctgaagatgattcccctacaaaactagagatttggggcccatgtcagttagagaatgagatacatattgcaaaatctgttcatggatcactctatactgatgaatggtttgaagggatatcatggaaccaggaagagactttcatagcttatgttgccgaggagcctcctcaaccaaagccagtgtttaatgattatggattcaagaaggaaggtttatcagaaaaggactgcaagagctggaagggacaaggggattgggaggagacctggggagaaacctattccaagaaaaggattcctgcactgttcgtcatcaacatctccagtggtgaagttcgacctgtcaagcaaatacctagatcattaagtgttggccaagtgatttgggctccatcatcttcatatagcttggtttttgttgcatggtcatctgacaatgggttccaagggacaccaaggaagcttggtattaaatactgctacaacagaccatgtgctctgtatgctgctcctgatcctttcggacaagaagctgagaaatcattaactgagggcaataagggtgaaactacaactatgatcaaattaacagcaaacctgagcagtgcctttttcccacggttcagtccggatgggaagtatcttgtcttcatctcagcgaagagtgctgtagatagtggggcacacaatgctacaaattcattgcatagaatcgaatggtgtacagatggaaaactggatgggagccttggagttgctgacgtggtgcccattgtgctgtgccccaaagataactgttttcctgggctatactgctttggcttgcttagggatccatggcttaccgatggacaaactatgattatatcttctgtctggggaagtagggaagtaatactttctgtaaatgttgtgagctgtgaactttcaagagtgagtccccaggactcagattattcatggaatgttcttgcagttgataagaacaacattcttgcagtttccagcagccttattacactccctcagatgtactatgggattaaggtttctcagactgaaagcaattgggagtggcagggagtttcaactcctttcccaaagccatctgataagatcagctccgtactagcagagcataagttcagcatactcaaaatcccaattagcaacccttctgacgaacttgccaatggctatgtaacttttcttgaagctagtacattgccaacattgtaa

SEQ ID NO: 95288 - DNA, 1169 bp, Zea Mays
atggaaaacataaagtgcattggaacgtgtaggattagagtagttgatagatacagaagaaagacagagctaaaaagcactcgcgccaccatacctagattctcgggtgccgttgaagactgctcaatgcacgccgtgactgggatagtaaaatgtgcaactcagacagacaacaaacagatgattaacatgaaaggtcttgatgggatccaaggaccaatatatgttgggactggttgtgttttcagaagacatgctttgtatggttatgatgccccaactacaacaaaacctcctagcaagacatgtaactgctggccaaagtcatgttgcttgtgttgtggatcaaaaagaaaatgttccaaagctaagaaaaaacaagaacaccaaaagaaagtgaaatgcaggaatgcgtccaagcaagtgcatgctctcgaagtagctggtgagtttgaaactgcacctcctgtgcctcgagaaaagtttgagaagagatttgggcagtcagatgcatttttggcttcaacattgcaagataatggtgaaggttgtcgcttcgacatgctcaaaagccttgatgattgcatccatgtgctaagttgtgggtacgagaataagacacaatgggggaaagaggttggttggatttatggatctgtcactgaggatatcctcacgggcttcaagatgcactgccatggttggcgatctgtgtactgcatgcccaagagaccagcattcaagggatctgcacctatcaatctcactgatcgtctccatcaagttctaagatgggcacttggctctgtggagatcttccttagcaagcactgccaaaatggtacgggtatcgatgtggtctgaaaccattggagaggttgtcatatatcaaatgtgtcatccatccatggacatcaatcccgctgctaatctactgcgccctgttagcgttttgcctgttatcagggaagtttatggtgcctgaggtacttttacgaaaccctagtacctctctaagctgctctctctgcttgcaggttttctatgttctttggtgaccgctgattagtgtaggttttagtgaagcggtgttttatgtttatgagcaggagggaaatagagaatggagaagatggtagtgctgctgctgactgttgtagatattgaga

SEQ ID NO: 95289 - DNA, 1334 bp, Zea Mays
gcctccacatgttctcgtgcaggaacgagagccccgcctcgcacctcgcgggctccagcgaccacttggtcagcgcgacgacgcaggcgagggtgttgatcatgcggtcgtaggcggagaacagggccgagtcgccccaggagccgtcgggcagctggtggtccacgatccagcgcacggtggccgggaactggggctgggcgccgccgtcgccgcccaccttcggcaccatcgccacccacgccgtgtcgtacgccgaggcgctggtatccccgtcgttcatcgaccgtagcatcgccctcacctggtcgataagtggctgcagctctgcctcctcagcctacagacgaagatttattaatttcagcaacaagcatctgtgaactgaaaacaacctaagacggaccacctggtgctcatcctcaaggtcttgtggtttccctggccatttcgcaatttcggactcggtttccacacggctggtctggaacactgcaggaaaacccagctccaacaaaacatttctcaaaggaggaaaactgaagaaaattatgtgactggtcagattgagctactgttggtttatttttcggcacccaattgcatctctagcaagtgttcagcatgcaacaaaggaccatgaacctgctggcctgagcagagcagcgtaacgtcaactagagcgtcagattcagcactgcattacccattttgacttcatttctcccaacagaagatagatggccagttctttaaaatctcccttacacacacaatcagattccctgctgtgcgcgcgagttacatggcaaaaaaaaactgaagatacctctgcggtccagtctaatcatctatctaccttggagtgccatatctactatattcctgatcggatatttgatctctgtatccatcaaaatcaccaagttgatccaatggcaatttgcattagctaaaaagaacagtggggtacaaggaggacaggatccctctgaccacacacatacagagatacctttgtgattgatgagtaaagttcgccaaggatttggggtcaagaaacaaagaggacaatgtggacagttacctcataatcaatcacacatcaagaatcttaatttcgcagtcaactactgtttgcagcagtacggttgatagcgatccaccttccgtcaccgataaggcatcgatcgatgatcgtgaaggagctaaaacctttttttcatatattttgtcaaaataaataaatagatctcctactactttaaaggctagtttggcaatcccattctttgaagaaatttccattttccaatgaaaccagtttattttcc

SEQ ID NO: 95290 - DNA, 2661 bp, Zea Mays
cctctcttcgttcccgcgcggagagggagagggagaaacaggggagcggcggccccctcctcttccctgccacggtttcttgcggattatttctaccctattttattcaggatttccggttggatcctcctatgcctttttgcaggggaaattttaacttctgctgcaaccggtggtgcaattaatcagccattcacgcattgtgctgttcattgaggcattatcggtgtggttcattgagaaagcgcctgtatgcgaattttcatgtaaaaagagctgatcagacatggctgcgaaggacggctcagggtcacaggaccaggggcacaggttgtggcccatgctgtcctacgcttgcggcgagctatgtgtgatcatgctgctctacgtggctgcctttgcatcccatgcagccacaaggctggcgcgcatctgcgggctcaggccaccatgcatcctgtgcacgaggctggaccgcgccctccatggaaacttgccatggttctccgcggacctggtctgttccgtgcatcggtccgaggtctcgtctctggctcactgcaagagccatggccggcttgcacggtccggcgatctctgcaaatcatgcctcctttcatgcacggcggtaggtgcccgtgaggaggtggtgaactctcggcctacgacatccagcagcaggttgtgttcttgctgttctgatccgttcaagaataatactggcgacacgcagaggcattctggagcagccaatgctgtggtgtcttgggatagtgtacctgcagaccatccaaatgagaagacttctgtggtgggcattgaggaagtccaagaatctgacggtcctacaaaggacagcgccgccccttctgcgaatggtggggcagcgaagagcaaccacagatcggccgcgccgacacgcattgctgtggacagcaacggcagtgtaaaaaatgcctccgtcgttgcaagggccaacttgacgtcgcctcggccgtcagaaattatctctgccagggacagcagttcaacgacgcagcaagaggtgaaggcgctcctttctcagatgtcctatgcgcggggcggcctcgacagttcttcgattgaaggatctcctgacgctccgaacgaagaaagcaacgctacgagcaacaagagcccgtatctcgagaggaactattgtgtgctggaaccttcagacgggagcctcgctgacgatgtcgaagggggaagctctctcgagaacgtaaagagacagcttgagctcaacaggaaggccatggctgctctacacaaagagcttgaggaagaacggagcgcgtcggcagttgcggctagccagacgatggccatgatcaataggttgcaggaggagaaggccgcgatgcagatggaagcactgcagcacctgaggatgatggaacagcaggctgaccacgaccacctagcgatacaggatctgcatgatttgctcacagagagggagaaagaattgctcgacttggacgctgaacttgcacactgcaggaggctcctgcagaacgacgatccgttcaatggcgacagatttgatggcactgattatacaacgaacaacaacacggattttgtggggagcgccatgtcccattttgaagacgacaaggcatacattttggaatccttgagcagactggaggaaaatcttggcatttccacaatcagacttgcttctggtgacgccagaaattgtcaagaagacatactgtttgaagatcaggcaagagctgatgcatcgccttccagctgtgacgagtcgagtggtgtagcaagccttaaaattcagatttctctgttgaatataagactgagggcacttgaagaggatcaggagttcctcaatcaggtattgagttcgctccaatgtggtagtgatgggctgcagtgtatacaggagataagcaggcacttagcagagttgcgaagagttgtggctcactaaaatgaaaatggttttgccccgagttcacactttttggccgtcatgaggttctcctttgtaacggcaaacctatttgcagtcatctagatagcaggctgctttcagacgaagaagaacaggagctgcagatccttcctgtgccttctgacatacacgtctgcatacatggatatgatcaccgtcatcttcgtagcaatgctcttctctggggacttcgtatcagtctgctgtgcagttgggttcttcaccctatggactttgtgctgcctgcaatggcacttatcaagacaaacgatgactgataacctagggttgcagtgtgctgtgaagatgctccgctctgctgtcgcaatcttcttcttggtcatagcaccaagttaccttgtgcgacatagcaacaaagtgtaccgatgcaacctcttgcaactgcaggttctcatcagacaatgcgcccttaagctcatcagcgtcaactaggacacaccacgaagctcatcaacaccaaggatgaaatcctcatgtctagtttgaaaacataaggggttgctcggccaccccattaaccaccgcctaagtccaggatgactccaattcaagtgggggatgatgaggacatcactcgcatacaaacaatgcatgaaccgataacacgagcacgtgcttaaaagctgaatctccag

SEQ ID NO: 95291 - DNA, 2786 bp, Zea Mays
cctctcttcgttcccgcgcggagagggagagggagaaacaggggagcggcggccccctcctcttccctgccacggtttcttgcggattatttctaccctattttattcaggatttccggttggatcctcctatgcctttttgcaggggaaattttaacttctgctgcaaccggtggtgcaattaatcagccattcacgcattgtgctgttcattgaggcattatcggtgtggttcattgagaaagcgcctgtatgcgaattttcatgtaaaaagagctgatcagacatggctgcgaaggacggctcagggtcacaggaccaggggcacaggttgtggcccatgctgtcctacgcttgcggcgagctatgtgtgatcatgctgctctacgtggctgcctttgcatcccatgcagccacaaggctggcgcgcatctgcgggctcaggccaccatgcatcctgtgcacgaggctggaccgcgccctccatggaaacttgccatggttctccgcggacctggtctgttccgtgcatcggtccgaggtctcgtctctggctcactgcaagagccatggccggcttgcacggtccggcgatctctgcaaatcatgcctcctttcatgcacggcggtaggtgcccgtgaggaggtggtgaactctcggcctacgacatccagcagcaggttgtgttcttgctgttctgatccgttcaagaataatactggcgacacgcagaggcattctggagcagccaatgctgtggtgtcttgggatagtgtacctgcagaccatccaaatgagaagacttctgtggtgggcattgaggaagtccaagaatctgacggtcctacaaaggacagcgccgccccttctgcgaatggtggggcagcgaagagcaaccacagatcggccgcgccgacacgcattgctgtggacagcaacggcagtgtaaaaaatgcctccgtcgttgcaagggccaacttgacgtcgcctcggccgtcagaaattatctctgccagggacagcagttcaacgacgcagcaagaggtgaaggcgctcctttctcagatgtcctatgcgcggggcggcctcgacagttcttcgattgaaggatctcctgacgctccgaacgaagaaagcaacgctacgagcaacaagagcccgtatctcgagaggaactattgtgtgctggaaccttcagacgggagcctcgctgacgatgtcgaagggggaagctctctcgagaacgtaaagagacagcttgagctcaacaggaaggccatggctgctctacacaaagagcttgaggaagaacggagcgcgtcggcagttgcggctagccagacgatggccatgatcaataggttgcaggaggagaaggccgcgatgcagatggaagcactgcagcacctgaggatgatggaacagcaggctgaccacgaccacctagcgatacaggatctgcatgatttgctcacagagagggagaaagaattgctcgacttggacgctgaacttgcacactgcaggaggctcctgcagaacgacgatccgttcaatggcgacagatttgatggcactgattatacaacgaacaacaacacggattttgtggggagcgccatgtcccattttgaagacgacaaggcatacattttggaatccttgagcagactggaggaaaatcttggcatttccacaatcagacttgcttctggtgacgccagaaattgtcaagaagacatactgtttgaagatcaggcaagagctgatgcatcgccttccagctgtgacgagtcgagtggtgtagcaagccttaaaattcagatttctctgttgaatataagactgagggcacttgaagaggatcaggagttcctcaatcaggtattgagttcgctccaatgtggtagtgatgggctgcagtgtatacaggagataagcaggcacttagcagagttgcgaagagttgtggctcactaaaatgaaaatggttttgccccgagttcacactttttggccgtcatgaggttctcctttgtaacggcaaacctatttgcagtcatctagatagcaggctgctttcagacgaagaagaacaggagctgcagatccttcctgtgccttctgacatacacgtctgcatacatggatatgatcaccgtcatcttcgtagcaatgctcttctctggggacttcgtatcagtctgctgtgcagttgggttcttcaccctatggactttgtgctgcctgcaatggcacttatcaagacaaacgatgactgataacctagggttgcagtgtgctgtgaagatgctccgctctgctgtcgcaatcttcttcttggtcataggtgcccttgcatgcatcggcgtcaaaacctgcaagttcttccatgatatgtgatgtgatgaactgatgatggttttgcagcaccaagttaccttgtgcgacatagcaacaaagtgtaccgatgcaacctcttgcaactgcaggttctcatcagacaatgcgcccttaagctcatcagcgtcaactaggacacaccacgaagctcatcaacaccaaggatgaaatcctcatgtctagtttgaaaacataagggtacgtttgtgaggaaggggattgaggaggataaaatcctcttgctattcaaatttgaataggaatgtgcccttctaatcttttctcccaaacaaccccaaactccccttgggattcccctcatttcctagagtttgtaaacccttcaagtgacatttgaataaaatatttagtaatttgtggc

SEQ ID NO: 95292 - DNA, 104 bp, Zea Mays
gaccatatttcggttcatcttttttcatgggtcatgttaactgttatgtcatattacacaacttcagatatttctgtctttgtgagagaagtaccaagatagtt

SEQ ID NO: 95293 - DNA, 105 bp, Zea Mays
gaagacccaaaaatgtctcattcaacgtaggcgcactccttttagtattgttcactgccaacagaatggatgtcgaggcaagaatgcgcctcaaacaaaaaaaaa

SEQ ID NO: 95294 - DNA, 921 bp, Zea Mays
atgcctagcattgcaagcaaccaagcaggggagggtgtgtttggttcactgccccagatgccacagcctaaggttaggcatgccccatttttgtcggttgctatgttcttaaagtttgttggccatagatggacaaataggtcagttgggtttgaattcctacggtccagagaaacagttagcaggtacttcaaccttgttttagatgctctatgtgtcatgtcacgtgacctcattactatgagaaccacagagacacatccaaagatatctagtagcccgggaagatttcacccttactttgaggatagggcaagaaggctcctttctaagcctatcaagtttttcaatgaaatgcaagagttgtttattaacagcagtgctgatggctctctagccatggaagctacaacttgtatgaatgaaactcatcctggagatgacagtgacttcaatgatgatgtgtgcagtgacttctccaactatcctcagcctgtgcatgatctaggtgatgattctgacactttacaatctcccaatcatcatccatctcaaagtgttgatcatagctcgtcaagttctggactgaagcgcccacaaggagagggagtaccagcgaagaggaacgtggaaccaaagagtcgcacaacaaaggtagtagatgaactcagtgctactttggtagaacttcaaaatgatcttaagaagccaccacctccagtgcctatgccttttgttaaccctgatgcaatattgtggcaaaggcttgagaatatgacaattactactgatcaaaagttaatggtaggaatgtatctagcacacaaagatcaaaagggtatgcgtggtttcttatctgctgcatcagacataacatttgagtcatgggtactaaagcatctgagtgatttggacctatga

SEQ ID NO: 95295 - DNA, 390 bp, Zea Mays
atgagctacacaaacttctcgcaggactacaagatgcctcaattgagaactgccagcaggccggcgctcgccagcaactctgctggtggtttttttatcaggagaagggtggcatcaccaggaacttcccaggcaaagggcgccgccaagccgctggctcgatggagagtcctcaatgacgaggcaaactatggcagacaaattgtgaccatatccagcattgatggaaaaataatacgttatgctaggccaaatcacccaactagaaaagggagtgatgcatctgccgagtctggatctgaagtggaagatgtaacatctcctactgcatcaaggaacctgattacacatcctattttgacccctgttcacgaggaggcaagtggctaa

SEQ ID NO: 95296 - DNA, 1616 bp, Zea Mays
atgggcctcttgtgtttcgcctcgcacctcgctctgttcgctctggttcattttcctctcgtcaagctcactacacacagcttcacctttgccatgggagggggggatttattcagctctccatcacgtggttcagtaagatccgaatttggaaccgttgtatctcctggtgactctaacttaggctcgctgttaacctgtgcagattatttatcagattcagattcaaattcatctaaagaagggatcgcctggactaggaatcgaacgtgggtgacaatcctggccactgccagcggtaaatcagtttttgccattcttgcctgctgcagttgctcatggttgatggaaatggattgctccatccgcgaggtaaaacacaaatcgctcgcttgcaggagtacaggacgccagttgccaggtcgccgcgccggtgctagcagagactgcggagtagcagtagcagccacgcgggacagcgggacaacgaccgaccgccgacgggccgagccgccgaggcatagagcacagcgtgaacgcgagagaaagaagaaggggcaggggagggggcttacctgtggcctatggggcagtctggcggtggcgcggtgggatgtggggactcggacggcggtcgacgaagtcatggaagacctcctgagtcttgagagctgcctcctgggtgaacagcaaatgggtcgtgggccgtggcagctggacgggtggctcagtggctggacggaagacctcccattgaaggttggacagaaacatggaagattgcttgcagatctagaagaagatgaacaacctaaaaagaatgttagattagggagcccagcgactcaatggatttcagtttataatgctagacggcccatgaagcagagcaagcatggatggacggaccctgtgaagttcagtatatccactcttgaagcatggcaacagagtctgaaatgcaagaaaaccgcattaaagacagtcatgctgctagctgaaaggttacctatagttcggtggcctctactgtctctgccgggaaagcatatatcttcctcctgggttttgctccgtccaggaggaacgggtacgcatgttaaatgcatcttcagggtcaaaggaaaatacaaattacggcctgcaatattagaaaccaacatcatattttgtgttgtgagtttaaattcctgctttgatggttttcattttctgaacactaaatccaagtcggtgttttctgttcttatcaagggtccgccatcagcgctcgcctggctgctcgacgcattcgccagcgccaccttcgaccagatcgactccgcctaccgtgaggccggaggggaccctttcgtggctaccgcggctatgttcttgcatcttttcgggcggttcgtgattcagttcttctttgttggttctgttaccacagatctgcagacaggtggcctagactcgtagggatcgcgttgatattgggagaaatcacggagaggcggaaaccgagcaatagccaataggggaagggaagagcaacagtgcccggggcaccgataattcgttgcatagatccaggagaagaacaatagaaatctgggcagaacgagagcagaact

SEQ ID NO: 95297 - DNA, 627 bp, Zea Mays
atgggatccgctgccccagccccaccggatccgcgcgctccctccatgcggcatgccgccaaccggcctcccttgcgtggcccacccccgaggcgggtcctcccgtggatgccgccgccacggcgcgcggacgcacgcccaaccaccgccggctgcgctcccccacggccgtacctccctggttccggcgccctctcccttccccaccacgtcgtcgcggctctagaggcggatgtctctgccgagcaggccgcgaacgccgctgctgccctggctgcgcgtcccgccgcgcccatgggcgccagcacgccctcccctgccgtcgtcgtggccttccccttcctctctggcgccgacgtcaccggcccctacacgtccagcgacgccgccgcgtgcacggctagtccccccgcgcccacagcggccgccgccgctgcggccaacgcgcgcggctgggcaccaaccaccgtgcctccagcgtccaacctcttgtcctcgcgcttgcagcagctcagcgtccgcgccaaccggtcgctgttcggcgcgctgccgccgccgctggccagcatgcagtcgctccaggtggccttgctcccttccccaacactggccgccctgatccgctga

SEQ ID NO: 95298 - DNA, 1934 bp, Zea Mays
gcgtgataattatgcttggccaggcaaagtctgctggagtcaccaagcaagcacttacattgtgcaactgcatgatgcagatattcccaagaatgtcttttcaagatttgatagaaaatgcctatagtatctaaaagaacgggcgcatcatcgtagccgtacataaacaatgttattacgaacacgtgctgttctgctctcgtgtaaggtccagctacaagcacgcgcgccgcgcgcgagccgattttggacgcaccagaaccggttagctcgcaccaagccgcacgagcaccgaccggtcaatgacacgactcgccagtcgccactaccggctcccgtttaaattgccggccgcatcaagctgagggctgaggcagagatgccaacagaagtcacgtcgacaccagccagccggccggactgcagctcgtcgtcgtcgatgacggccgggaccatgcgtgtgctaggcggggaggtcagcccgttcacggcgcgggcgcgtctggcgctggatctgcgcggcgtggcgtacgagctcctcgacgagccgctggggcccaagaaaagcgacagactcctcgctgccaaccccgtctacgggaagatccccgtgctgctcctccccgacggccgcgccatatgcgagtccgcagtcatcatccagtgcatcgaggacgtggcgcgtggaagcggcggcgccgaggctagcagcctgctgctgccggacgacccctacgagcgcgccatgcaccgcttctggaccgccttcatcgacgacaagttttggccggcgctggatgccgtctccctggcgccgaccccgggagcacgcgcgcaggccgtggaagacacccgcgccgcgctgagcctcctggaggtggcgttcaaggaccgcagcaacggcagggctttcttctccggtggcgacgccgcgccaggcctcctggacctggccctcggatgcttcctgccggcgctcagggcctgcgaacggctccacggcctctcactcatcgacgcgtccgcgacgccgctgctggacgggtggagccagcgcttcgccgcgcaccctgcagccaagcgcgtcctgccggacacggagaaggtggtgcagttcacgaggttcctccagggacagttcagggtccacgtgtcctaaatgatttagcgtctccaaaagattgtcaaaatctccgtctaaagtctgttttagaaacttaaatcactttcaggattctcggaaattgagagaaaaataaaataacttttcactcaatcttcagaaatctaagaggaatttcagttttcaaactagctctaaatgcggtggtgagaaggaaaaaaagatctcactagctactatcaagatcccctttctaaaaagtcatcgcagcatgatcatccgagaacctccctatatcagcagcttctcacacccgcttgcccctttcggaaaagcattaactcatactaactttcctaattaattggccaaggatgttccattccaccctttggtagcactattgtcttgtgttagcgctccatgttccaattaaacattgtaaacttatcatgcgccatatagataatccagcaatatatcatcatgaaacatgaccataatttataagcatcattaaccaaaaaccaggtagagcaacaacaaaactaactaataatttatttgtatgcaaggtgtaagataaacaaaactaggtaactgattatgtcccatcaagctaacctaacgatgccacggtgattaacagaatcatgaacattattaggtcaaagaatgtgatcaaggacacaacttgccttttacttgtgatcttccccaaagttgtgcttcagattcctcgtgtcctcgtttctactcgtagcaatacatacaaataagtaaataatggatataataacattactccaaa

SEQ ID NO: 95299 - DNA, 1354 bp, Zea Mays
gcgtgataattatgcttggccaggcaaagtctgctggagtcaccaagcaagcacttacattgtgcaactgcatgatgcagatattcccaagaatgtcttttcaagatttgatagaaaatgcctatagtatctaaaagaacgggcgcatcatcgtagccgtacataaacaatgttattacgaacacgtgctgttctgctctcgtgtaaggtccagctacaagcacgcgcgccgcgcgcgagccgattttggacgcaccagaaccggttagctcgcaccaagccgcacgagcaccgaccggtcaatgacacgactcgccagtcgccactaccggctcccgtttaaattgccggccgcatcaagctgagggctgaggcagagatgccaacagaagtcacgtcgacaccagccagccggccggactgcagctcgtcgtcgtcgatgacggccgggaccatgcgtgtgctaggcggggaggtcagcccgttcacggcgcgggcgcgtctggcgctggatctgcgcggcgtggcgtacgagctcctcgacgagccgctggggcccaagaaaagcgacagactcctcgctgccaaccccgtctacgggaagatccccgtgctgctcctccccgacggccgcgccatatgcgagtccgcagtcatcatccagtgcatcgaggacgtggcgcgtggaagcggcggcgccgaggctagcagcctgctgctgccggacgacccctacgagcgcgccatgcaccgcttctggaccgccttcatcgacgacaaggtgagcaccgagcagagcacggcagcaagtgtcttttcttcaaggtaacgtgcaacaaactgccgtgcctttctgcagttttggccggcgctggatgccgtctccctggcgccgaccccgggagcacgcgcgcaggccgtggaagacacccgcgccgcgctgagcctcctggaggtggcgttcaaggaccgcagcaacggcagggctttcttctccggtggcgacgccgcgccaggcctcctggacctggccctcggatgcttcctgccggcgctcagggcctgcgaacggctccacggcctctcactcatcgacgcgtccgcgacgccgctgctggacgggtggagccagcgcttcgccgcgcaccctgcagccaagcgcgtcctgccggacacggagaaggtggtgcagttcacgaggttcctccagggacagttcagggtccacgtgtcctaaatgatttagcgtctccaaaagattgtcaaaatctccgtctaaagtctgttttagaaacttaaatcactttcaggattctcggaaattgagagaaaaataaaataacttttcactcaa

SEQ ID NO: 95300 - DNA, 925 bp, Zea Mays
cgaccggtcaatgacacgactcgccagtcgccactaccggctcccgtttaaattgccggccgcatcaagctgagggctgaggcagagatgccaacagaagtcacgtcgacaccagccagccggccggactgcagctcgtcgtcgtcgatgacggccgggaccatgcgtgtgctaggcggggaggtcagcccgttcacggcgcgggcgcgtctggcgctggatctgcgcggcgtggcgtacgagctcctcgacgagccgctggggcccaagaaaagcgacagactcctcgctgccaaccccgtctacgggaagatccccgtgctgctcctccccgacggccgcgccatatgcgagtccgcagtcatcatccagtgcatcgaggacgtggcgcgtggaagcggcggcgccgaggctagcagcctgctgctgccggacgacccctacgagcgcgccatgcaccgcttctggaccgccttcatcgacgacaagttttggccggcgctggatgccgtctccctggcgccgaccccgggagcacgcgcgcaggccgtggaagacacccgcgccgcgctgagcctcctggaggtggcgttcaaggaccgcagcaacggcagggctttcttctccggtggcgacgccgcgccaggcctcctggacctggccctcggatgcttcctgccggcgctcagggcctgcgaacggctccacggcctctcactcatcgacgcgtccgcgacgccgctgctggacgggtggagccagcgcttcgccgcgcaccctgcagccaagcgcgtcctgccggacacggagaaggtggtgcagttcacgaggttcctccagggacagttcagggtccacgtgtcctaaatgatttagcgtctccaaaagattgtcaaaatctccgtctaaagtctgttttagaaac

SEQ ID NO: 95301 - DNA, 1032 bp, Zea Mays
gaaggagcgctccggtgaatcctcttgcggctatatatggcgacggtgctccctccttttcccctcctctcgctgctcattcttcttccaccccctccccccctcgtgagagaccggcggctgtgcgtagcggctgcgtccagctccgcctggtgccgggactccgtggcgttgggcatctgcttcgtcgcttcgtctctggtcgatctgcttcctatacttctagatctgctccgtctccgttgctacgaccttgaccccaagatggatccctctttgagccgtgagatgttgtgtaagcaagcagctgccttgacagtagcgatggtttcatttgttacaactaggcttaaaagaaaaaggtttagagttgtgcaccaggcctttaggaggtccactcagacagtacacaagcactttcatcaggttttgtatgctgttggagagcttaggaaggaacttatcaaggcacctagccctaccactcacccaaagatcactggaagctatagatggaatccatatttaaaggtcttcaaggacaaggaggccatttttggccatgctatggccactagcaaatttgcacttggttctggtgaagccttaggacagaaccaggttgatagtgttgctgccaaggttgagggacctgccttcacctatatctctgaagagagagcacaaactgatgttggagagggtagcaaggccaccgagatcccctccatagctgtgggtaggaagaggaagagagggaacctcagtgaggatgagatgcttatgttgaccaatatgtttgatgcagtgaacaatgtggctaatgcccttagagagactagacctgcccatgtggatggtaacctctacctagctgtgatggagatgcctggctattctgaggaggcactgattgttgcctacaccttcctcctggacaacaaggctcaaggcaggggctttgttcacatgactaaggcacatagaaacatttggcttaggaccttcctagtcaagaactactacatgtag

SEQ ID NO: 95302 - DNA, 1234 bp, Zea Mays
cccatcctaagcctaaagcttgggccttcgttaagacaaagaaaagaaaccactttggcactctctcgtataaatagctccgtcccatcgtcgtcatatctcgcgggctttcccgcagcaagatcaacgtcgtcgttcaagccagcggtagtagagactacgaccgaggctagctaagctaagagatggcggatcaccagtactcggcgtggacgacttccgctgctcgtcatcgggtcttctcctgtgcgctcatggctcttgttagttttgtggctgcaggacgacccatggtgctcgccgacgccatcgtctttcacgtggcgaacaggtgcccgttcccggtgtggccggcgtccgcccctaacaccggccacccagtgctcgccggcggcggcttctacgtcccgcagggcaagtcgaggcgcgtcgtcgcgccggccaactggaacgggcgcttctgggcccgcaccggttgcaacttcaccgcgaacggcatgggcgtagcgggctgcctcaccggcgactgcgagggccggctcgcctgtaacgggtccgtgggcgccccgcccgccacgctagtcgaggtgagcctgcacgaggacgccccgaaagggagctcctacgacgtgagcctggtggacgggtacaacctccccgtcgccgtctccgccaagcccgccacgggcggcgcggacccgaacaagtgcgccattgccggctgcgccaagaacgtgaacgcggtgtgcccgccggagctgcaggtgaccgctaccggcagcggcggcggcaagacggtggtggcgtgcaagagcgcgtgcctagcgttcgggctcgacgccttctgctgccgcggcgcgtacgcgacgccggccacgtgccgagggaccgtgtactcgcgcctcttcaaggacgcctgcccggcatactacagctatgcctacgacaccgccgccacgacggccagcgggtgctacgcgcaggagtacatcatcacgttctgcccgtccagatggggcgacgagcccggggatcgtgctgctcagatttgaatttggtgtcgtcatcgtcagtcaggcaattaccaatcaccattgcgtcgagcttttcgcacgtctttatgtatgtgtgtacgcttgtgtctgcttctagtgggctttcacataaatttctacatacatatacacatacaacaataaaaaataaggtagtgctatttatcggccgcgtaaaa

SEQ ID NO: 95303 - DNA, 8474 bp, Zea Mays
gtgcgtggcggatgtggtggtgctcgcggagggcggcgtgctgatgcgggacagggcccgcgcggccggccggggccggggccggatgcggtgcggagccacccggctggaggggataccgaaggaggacgtcaccacaggcctctatggctggtgccgctgtgagtgcgacgacgacggggtgggaggtggtcggggatacagaggaggaggagcaggaggtcgagatggagacggtgcggtgggcgatggaggtgggcgtgtgggccaggtgcctcggcgttggcctcctcgcaacggccaggcgcttccggcggaagcgcaccttctggtgaccgctggcactttctctgggtcggtgtggggccgttggggcatcgcgcacgggaggcggaggcgggggcatggccgcgccaggcgcccacactccattcttaattagtagtagggatctaaggttagttatttaattttgacgactcacctggtcaacccctccgttcttcgctagggactcgggtcctcgcattggcgggtccgctgtcaccggcagttctgacataacacaccgcttcttccccagttcaagtgccacaccgctcgtcgccttcccatctcgccgcgacatgaatttctgccgccacctgctcctcgccgcggtgttcgcgctcctcctcgctgtctgcgcttctgcggcgagcaggggcgctggttccttcgacccatcccgagtggtccaactctcgtggcgccccagggcgttcctgcacaagggtttcctgtcggatgcggagtgcgaccacctcatcgcgctggccaaggacaagctggagaagtctatggtggccgataacgagtccggtaagagtgtccagagtgaggtgcgcaccagctccggcatgttcctcgagaggaagcaggatgaagtagtaacgagaatagaggagaggatatctgcttggacatttcttccaccagaaaatggcgaatccattcagatattacactaccagaatggtgagaaatatgaaccccactacgactacttccatgacaaaaaaaatcaagccttgggtggccatcgcatcgccactgtgctgatgtacctctctaatgttgagaagggtggagagaccatcttccccaatgcagaggggaagctattacaaccgaaggacaacacttggtctgattgtgcaagaaatggatatgcagttaaaccggtaaagggtgatgccctgctgttcttcagcctccatcctgatgcaacgacagactctgacagcttgcacggtagctgccccgtaatcgaaggccagaagtggtccgcaactaaatggatccatgtgaggtcatttgacctccctgtgaagcagccgggttcctctgacggatgcgaggacgacaatatcctctgcccccagtgggcagctgtgggtgagtgtgccaagaaccctaactacatggtggggaccaaggaagctcctggcttctgccggaagagctgcaaagtatgcgcagagtaaggtagtagcctgctgtctgatatgtgtcatggcgtgttgcgtagtagtctgctgtttggataccgactggagtatagcatgtatgaagtagaacccggaagaaggaatcgtacgagagccgagttatctgataacttgtctcttgtgggaaatgaaagcgttccttaattaagcgaggaggtgctttgtggtgtccttatacgtgttgagctgttctccagttgcgtagggcgtgattgccaaaacgtagcccagtgggtggccgagggttgtgtgaaataacttttgcctttatgttcttagctgttgggtgcagaaagatgcacgttgctgacacgaaggagaacagtccccgcccgcccccccttttcacttcaccttgtgtgaccttgcattcaattccggttggtacaataaagccattgctataatatatagtagatgtgaccaatacaaggagaaaaattacagcccattgccaagcatcatcacaatgaatatactactagtagtattaattctgcagcaaagacacatcacaataacccaattttcttttccttttttcgatcatcgaccttgttgttatattagcagccattgggtttcttggccggcgccggcggcttgggggtggccaccaccccgtcgttgcctgcgagcgccaggtacttgtccttcctggtgaggcttgtgcactcgtaggagagcgtggcggcgattagcctctggatgtagttggccacctcgtggcttgtcctgccgccggcgcaggtgagctcgggcgggagcttgttgaggaaggtgacgacgtatgccgggctggggttcatgaagaagtagaatgggtccatccccttccaccccctggccgttgtgccgtggaacatgctcatccggttctccatggccacgggcaccacctcgtgggtgagctccgcgaagagcgccgagaagcgcagcaggaagggctcccggcacgtggtcccctcggggcagatgacgaggtcgccctccgccagcaggtcccggatcatggcggcgtcggaggcgcggtcccgcgtgaggcgcaccgtccggatgggcgagaggaactcggagaggcgcgagagcgagtaggtgaccgccgccacggggcgccccagcgcggtggacaggaagatggggtccagcagcgtccggtgcgagcaggcgaagaggacgcccctccggcccgtggcgcgctcggcgcgcggcggcggcggggcgccccggacgtgcacgcgcacgcccagcgcccagaaggcgtagtacaccagcggcatgggcagcagcgcccccgccgcgatgcgcaggcaggcgagcgcgaagcccacggggaaccacagcacgaccagcagcgccgccagcggcgtcggccggcgcaccaggcggccgtcgtggaagatgaccgggcgaggcagctggtccatgggcaatggctccaccggcgcgcgcgggacgatgtacgcctcctgcagttttgcatgccatgcaggcgcccacagcatgcgtgcgtcaataatggcgaattaacatttaaaaaaagaacccgtactgctgttactactaccagcacaatgaatacaattgaagaggagcgcagctaccaccgtgtgccatcagttgttcatatagaacccaaattacttctgtacggttattgactgtacgtacaccattgcgttggacgtctagctacatggcagtggaacgaacctttgtcaaaattcttcttcttctcattgtctattggacagcaggggcactaggcatgactacgacgacctacttgatgctgcatcctgccgaggatacctaattgtttcgtctttgcacaattgaaggaggtcgatcgatcggcagggcagtcttttgattgcgatccatgccatgcacatgcatatcgaaatctcagacaagcaactgtagcagcggtacatacatcactgttcactccagtccagctagctagccagtggcagtaactgtggttagttggattcacctaaaaggttgtacgggcatcgccgcgggtttttgcgtgtcccccctctcagaataatcctgagatcttttagcttctatccgagcagtagtcggtacatatatataagtatcctttcatcttaattagcatctactttagtactagttattagaaagtattgaagattttttggtttttgagtttgctacttctatatgtacctaatcctatcatgatttatgatgtggcttaacaaaataaaaaaaatctgcccaaacatatgtctatctctaggaaattttatgatcctagttctttaatttcttggggttttatctctccacacgcggcgccatggctagctactctcgctgtctagtccaccaccaccaagcaaatggtgtcggcacgcggttgcatgtgatcgatgcacaacaaccacgacaacaacaaacgtaggaggagtgcacgatacgcaatgtgactatggctcgtgaggaatgcattgtagcgacaggggtcacaatggcatacgtggctgagacgacccgctaggccgcacatggctgacgatgctgcctgcgtgtggacacaagtgagcaggagcagcacaacatggtggagcgggacatagtcatgcagagtcctcataggcaccgatgcctctctctccttctccatagcgacgttgtggccacaccatggcagacgtgactcccccatcatttagactatcgttaaggagtctagcgatgacacatggcccatagtcactaagatcaaacaagtggagcttggtgatgaaggtgaagctataaacacgatagatgtgatagttatggtatagtgacatcaacttccatgaggatcggtgggccccagaggccctccttgccggtgtcccatcgaagatggtgcctatcctcatggacaaggagtccaccacggacacataggacaccatcgtcgtggaaagcacgatagcgctcgtgccctcagagccacccaacacaagctgtgttaggagtgggatcgcctagcgttccggccaggcgaggacgtcgatgatttttctctctgtctctccagcctaatgcaacatatgacaaagtacagtgacatgacatcagtaagaagaaactcatcgataagttcctccacgccatccataaaaagtgcatgtaggttgccttagtgatgaagacattgctagacctctttgaggtgatgatcgaggaggtaattgacatgcacatgtcacataaacacatgagagtgacatgctggttctattcctagtactcaggggcatcaaggtaaactccctcccacactggttgctctgctattctccaccttggtgagtcatgtgcccacatcttcctaggtaatggttcgagcatcaacaagatcgatggctagtatctcaatatgccacccaccacatgatcgacacgtaggagtacttctctaacatgaactttggtgtgggaggcttcatcaagtttgggatgccttcatcatagagatcaagggtgtcgactctgtcatcttcaccaccaagattggtgagcaacgactgctcacccatgtctactacatacccacactgaggaattccatcaccagtttatggtagttggataagaatggctcacacatgaagatcgaccatggggtgttgtgtatctaggatcaccatcgccgccttcccactaaggtgaacagaggaagcaatcacatctacatcctccatgtgtaggtgcacaatctctctgtcttgtagcccaccatgacaatgatgcatggcggtggcacaagcactttgggcacctcagttttgaggcacagagacaacttagcagtaaggagatggtgtagggcatgcagcgcgttgagtacgtggagcagttctatgacatttgcatgttgatgaagcagcaatggctccccttccagtaccattaagctacaatgccaaaaataagttacaactcatgcacgatgacctatgtagcctagtgacactgggaactcctgaagaaagcactacatcctcgttgtcgatgatgtgcctcactacatgtgggttgtcctactcaacaccaaggcggccattgtggatgccgtcaagcgatcgtggaggagtgcgtctataagcttcaggtgctgcttatgaacaatagtggtgagttcatagtgtttgagtccatggtgtactacaccaataaagggatccaacaccactactttatgcaatacaccatgtagtagaacaatgtcatcaatcatcacaactagatggtggtagccaccactcacgccttcttcaagtataaagggacatcaattatctaccgaggcggggtagtgatgactgtcatccacctgctgaatcgcttgcccaccaaggcccttgatgtcaaaacccatatgagcccttgcacgatcgcaagctagcagtcaaccacctccatgtgttttgttgtttggtgtttgccaagaagctcaaccatgccaactagcttgatggatagagtatgctaggggtcttcatcgactatgttgatggcgtcaaggcatacctcatccacgacctacgataaagcacatgcacatcatgcacgacatcatgttcgatgaagagcgaggctagacatggggcaagatggtggacgatggcttgacatcaatggtcaactagtccatcatcgactatatcaacttcaagggagatgggaggggggctagcaaagcatcacttcatcaagcttgcctatccaacatctagttttccactagctctagtgagtcctcaaccacaaactctatcaacaatgctccactctcctgcactaactcctcactcccatgttccagttcccacacctataggaccagcatcaacaactttggtaagcaacaagcagggcacactagagttccctagtcaatcatctatgaacgaggaccacgagcatggaacatagagcactatcgtcatccgtggcaaggagaacaaggtgctccgcctatgcaaggcaccctatggtctatggtcggcaccacaaccttggaagaccaagatggatttcaccctcaagctgatggggttctattatagcactcacgaggtgattgtctaccgatggggcaagggaagttgtgccctgctggtagaggatgagatgaaggatgttttccatatgtgcaacctaaggccactctcctacataggattaaggtccatcaagatagctctagcatctcactcagccatactttgtatgccaggcacatcatcgagctaggtaggatcaccgactgcaactcatcttacattcctatagaggagaggctaaagccaagccatgatatcatggaagagtaggtggacacgactgacacccattttgggaagccttcgctatcttgtttacatgcggacaatcttggcgttcaccatcacctatgtcagttggtttatgtagagatcgcctatagagagcatcaataggctgtgaagaggatcatacgctatatcgtcagaggtatctccgactatggcttgcgctacccaagttatcttagcgctgcacactttatcttgtacagggaaaataaaccacaccggtgacatcgatacaagtaagagcaagagtggaactctgctcttcctcatcaagggcttgatggttatgatttattataagcgtgacttagtgaataggaaatctctgcctccaaaacctttaaccatgtctaacaccctcaaaggtgtaccggccggcaagacttgttaacaaggaaccccaaggggcagttggcatatgcaggatgtcccaagcccacacgacgagtttgcgccgtgtcgtgtgtgctgacagtctaggcagatccttttttagcttgcaacgcatacgaaacatgcatgaaggctcatcggtcccaactaccgcccaaacccgtgggcgtgtgtgtagacgtgccgaataaatgataaaatatacttattatatatagatcgttgatgccgtgctgaccaacgaacactcttttagtgcacgaagatgtgacccaaccagactattaattaaacgctatcattattgtatatcctgagcgctagctccaactgtatgtgcggtgtgtagtttttgttttagtaccggtagttgtggatgtgtgctacgtagtagcacgtacgagtatggagacttcattcgttccaccgattactctgcatgtccgtatttctctctctacgttggttgtctcgatctattccttgttgatgatgatgcaattaactgtgaatcatttttctaatgtacttttactttgtctcttaatgtaacaattgaacggtatacgtacttgtacttctattctttgttggaacgtggggttttttttttgaatcttcgattgaatgtaaaattatagagaattttggacaccgctttgttttttctttgtttcgccatgtgcgtggcagcagccagtgtgtgcaactctgatccacaacagtacgtgccgtatatctccaatttatggagggatcatgcatgcaatgcagcaaagacatgcgcgatgaacagcacaggacttcattatttaatttttattttcacagagcggtacgtacggttcaactaccgtataggggtggcgatcctattggctgtacatactgtttggtgtttactacaagattttcgtgaaattcgtgcagtcaagaaactttcaactccgtgaacaaaaggagtaaaagttggtgtttgcacgaatacggaaccatatttattatatagacggacaaagtcaaatgcgtgtacgacgaatatataccttgcacatgctcatgaaggggtagtcggagcggctgttcccgaggccgacgtcgggcgcggcgtcgtcgtcgtcgtcgccggccaata

SEQ ID NO: 95304 - DNA, 1225 bp, Zea Mays
cttcaccttgtgtgaccttgcattcaattccggttggtacaataaagccattgctataatatatagtagatgtgaccaatacaaggagaaaaattacagcccattgccaagcatcatcacaatgaatatactactagtagtattaattctgcagcaaagacacatcacaataacccaattttcttttccttttttcgatcatcgaccttgttgttatattagcagccattgggtttcttggccggcgccggcggcttgggggtggccaccaccccgtcgttgcctgcgagcgccaggtacttgtccttcctggtgaggcttgtgcactcgtaggagagcgtggcggcgattagcctctggatgtagttggccacctcgtggcttgtcctgccgccggcgcaggtgagctcgggcgggagcttgttgaggaaggtgacgacgtatgccgggctggggttcatgaagaagtagaatgggtccatccccttccaccccctggccgttgtgccgtggaacatgctcatccggttctccatggccacgggcaccacctcgtgggtgagctccgcgaagagcgccgagaagcgcagcaggaagggctcccggcacgtggtcccctcggggcagatgacgaggtcgccctccgccagcaggtcccggatcatggcggcgtcggaggcgcggtcccgcgtgaggcgcaccgtccggatgggcgagaggaactcggagaggcgcgagagcgagtaggtgaccgccgccacggggcgccccagcgcggtggacaggaagatggggtccagcagcgtccggtgcgagcaggcgaagaggacgcccctccggcccgtggcgcgctcggcgcgcggcggcggcggggcgccccggacgtgcacgcgcacgcccagcgcccagaaggcgtagtacaccagcggcatgggcagcagcgcccccgccgcgatgcgcaggcaggcgagcgcgaagcccacggggaaccacagcacgaccagcagcgccgccagcggcgtcggccggcgcaccaggcggccgtcgtggaagatgaccgggcgaggcagctggtccatgggcaatggctccaccggcgcgcgcgggacgatgtacgcctcctgcagttttgcatgccatgcaggcgcccacagcatgcgtgcgtcaataatggcgaattaacatttaaaaaaagaacccgtactgctgttactactaccagcac

SEQ ID NO: 95305 - DNA, 1864 bp, Zea Mays
gtgcgtggcggatgtggtggtgctcgcggagggcggcgtgctgatgcgggacagggcccgcgcggccggccggggccggggccggatgcggtgcggagccacccggctggaggggataccgaaggaggacgtcaccacaggcctctatggctggtgccgctgtgagtgcgacgacgacggggtgggaggtggtcggggatacagaggaggaggagcaggaggtcgagatggagacggtgcggtgggcgatggaggtgggcgtgtgggccaggtgcctcggcgttggcctcctcgcaacggccaggcgcttccggcggaagcgcaccttctggtgaccgctggcactttctctgggtcggtgtggggccgttggggcatcgcgcacgggaggcggaggcgggggcatggccgcgccaggcgcccacactccattcttaattagtagtagggatctaaggttagttatttaattttgacgactcacctggtcaacccctccgttcttcgctagggactcgggtcctcgcattggcgggtccgctgtcaccggcagttctgacataacacaccgcttcttccccagttcaagtgccacaccgctcgtcgccttcccatctcgccgcgacatgaatttctgccgccacctgctcctcgccgcggtgttcgcgctcctcctcgctgtctgcgcttctgcggcgagcaggggcgctggttccttcgacccatcccgagtggtccaactctcgtggcgccccagggcgttcctgcacaagggtttcctgtcggatgcggagtgcgaccacctcatcgcgctggccaaggacaagctggagaagtctatggtggccgataacgagtccggtaagagtgtccagagtgaggtgcgcaccagctccggcatgttcctcgagaggaagcaggatgaagtagtaacgagaatagaggagaggatatctgcttggacatttcttccaccagaaaatggcgaatccattcagatattacactaccagaatggtgagaaatatgaaccccactacgactacttccatgacaaaaaaaatcaagccttgggtggccatcgcatcgccactgtgctgatgtacctctctaatgttgagaagggtggagagaccatcttccccaatgcagaggggaagctattacaaccgaaggacaacacttggtctgattgtgcaagaaatggatatgcagttaaaccggtaaagggtgatgccctgctgttcttcagcctccatcctgatgcaacgacagactctgacagcttgcacggtagctgccccgtaatcgaaggccagaagtggtccgcaactaaatggatccatgtgaggtcatttgacctccctgtgaagcagccgggttcctctgacggatgcgaggacgacaatatcctctgcccccagtgggcagctgtgggtgagtgtgccaagaaccctaactacatggtggggaccaaggaagctcctggcttctgccggaagagctgcaaagtatgcgcagagtaaggtagtagcctgctgtctgatatgtgtcatggcgtgttgcgtagtagtctgctgtttggataccgactggagtatagcatgtatgaagtagaacccggaagaaggaatcgtacgagagccgagttatctgataacttgtctcttgtgggaaatgaaagcgttccttaattaagcgaggaggtgctttgtggtgtccttatacgtgttgagctgttctccagttgcgtagggcgtgattgccaaaacgtagcccagtgggtggccgagggttgtgtgaaataacttttgcctttatgttcttagctgttgggtgcagaaagatgcacgttgctgacacg

SEQ ID NO: 95306 - DNA, 1393 bp, Zea Mays
ctctgcccccacttcctgaccctgccggccctcgcggcctcgcctgacgaccccccaatggactctcccggccggccccgccgctctccgcccgccgaccgtttcctcggcctattctcctctccgtcccactccctccccgcttcctcgccctccgccggggacgagctcgtcgaaggcgacttcctcttccccgcgccaccctcctcctcggacccgccgcccgatgcctccaagaatccgggccgcgtccagggcggccacctcggcctgctcgccgcgctccacgaaagcgacaggaaggtacgtgggcgtggcggagctgctgctgtggccgcgtccacggccacggccacggctggaacctccgggacgctgctccgccgcaaggcgaccatcgccgcagccgcagccgcggcctcggcttcctcagtgacgccttcagtgtcccctacgtccgcgtcgcgtgccataccggtggcaccgaggccaagggaccctgagctgccggccgcggcgccgtaccaccagtcggctcccgtcctagttcccgtccctccaccctggagccgcgggcgcaaatgggataaagtcgccgccggtcctggcgaaggggacgacgacgacgaggagctctttcatggggacgccgccatgctacccccgcacgagatggtggcgcgcgcttccgcaggcggcggatacggtgagccagggaaaccgtcctcgatgttggagggcgtcggccgcacgctcaagggtcgcgacctccaccgcgtgcgtgacgccgtgctgcggcagactggctttcttgactgaatccggcaaaggtggtataatatgttttgtcctgcatgatctagtaggaaaggtgaaacaagaaattatggttagcttgtgatccaaactgctcgcagttttggtgttcttggagatatgcgagatcatatcttgccgtatcttaataatcgatgagtagtgaggattagtgtttggggccatggatctctctctttctctctgcagctaaggagagaacaaaacttgagaggatgtttggtgatttttgtcagtccaaatgtccaaaccaatgcgttgtttgctgtatcagaattttgctttgtgaaatcttgagttaaaataatcttgaagatttggatactctgctacgtactctttttctttttttgttctagcaaggtgcatgggctgtaattggcaaatattatgctcaccggttggaagagatagtgcaaattatacctattatagatttttgtttcatgggtggtagttttttttcgcataggggaattgggattgaaattgaggaatgcagtatgctggagatggtcttccttactgctcctattcatatgtaagcttcaatgtc

SEQ ID NO: 95307 - DNA, 369 bp, Zea Mays
atggtgccgccggggcgctggtacgtgacatgccataagatgtcagcgacagtggctgttgttgcggaggaagaagggcggcaccaatgtcacctgcatggttgccacggatcgcgtgagctcttggacagctggtgccaaggactcaagcgtgagggaggaggaggtgccgtggatgaggatgtggcgggtctaggcagcgatggtgtggagattggcagtgtggcggaggagggcgacgaccggatggtggtggatggagggcttgccatatccgataccagattattatggtcagcgtttggggatgatgttatgtggtttctaggatcacaagtattgttcgctggatggggctgcgatggttag

SEQ ID NO: 95308 - DNA, 2572 bp, Zea Mays
cttccccgtatggccaccgccccatttagattctgttcctcctaaatctcctccccgttggcccctgcgctcttcacaaaatagctctctgcctcacagcaagcctgtgcgtctcatattcaaggagcctgcctctgaggtggttgcaacttgcttgggacgaggatttggattttggagattggaccgcagactgtgagatccatccaatccaacaaccgaatccaatccaatccaatcagagaaaaagaaaaaaggcgaaaggctcgtgtctgtgtggcaccacatcttgccatcagggaaaatggggctgtcaatctcgtacccaccagacgactacctgccagcagtggaggacgacatggggcggctgttcatccggtctctcagcttcgacgacatggaggccgccgccgattcgccttcgtattcgccttcggcattgccccccgcctttggctccgggaagctgatcatggagggctccctgggcttcttcgaaagaagagaagctgacagcgtccagatgcagaacgtgctgtccatcaggaatcctaaacctcctgatagagaagcctgcagcagcgtcagtcccggtgctgcgacagctacttgtggctcatcaagattcgaccgtccaccagattatgattaccccatggtcgggatgaacagccccaggcaccagagcgcggccgtcaggctgcagaaggtgtacaagagcttcaggacgaggcggcagcttgcggattgcgctgttcttgtggaacaacgatggtggaagttgcttgattttgcactgctcaagcggaactcggtgtcattttttgacatagggaagcctgagactgctgtctcaaaatggtcccgggcaaggatgagggccgccaaggttggaaagggtctctccaaggacgagaaggcccagaaacttgcgctgcagcactggctcgaggcgattgaccctcggcatcggtatggccacaacctgcacttctactaccaccgctggctccactgccagagcaagcagccattcttctattggtacagagagagagatagagagcaaaagtgcactagtcatgtgtctgaaccaatgaacaacatagttactgatcgagtactgacggctctgtcgttctttggacaggttggatgtaggagaagggaaagatgtcaacttagaggagcattgccctagattcaagttacacaagcaatgtatcaagtaccttggccctaaagaaagggaaacctatgaggtggtagtcgaggacaagaggctgatgtacaagctgagccgtcagatagtcgacacgaccagaagcgtcaaggggaccaagtggatattcgtgctcagtacatgcaagacactttacataggccagaagcagaagggcgtgttccagcactcaagcttccttgcagggggagccacatctgctgcaggaagactggttgtggaggatggaattctcaaggctgtgtggcctcatagcgggcattaccggccgacggagcagaacttccaggagttcatgaacttcctcaaggagaggaatgtagatcttaacaacgtggtgttgagcccatcagaaggtgaagaagatggcgacttcagcctggcgagcagctactctcagctggacctgacccaactctgccagcaagaagacagccaagaacaagaggcacaatctgcgcgacgccatggccaagtcgaagccgaagccgaagctaggacctgcagcctggagcccagcctgccatctacagagacctgcagcacgccggcgacgatcaggaagagctcctcagacaaccggctgcaagggaagcggccgcccaggctgctgatcagctcaaacaacatagcgccgctgccgcccaccacgcacagcaacgccgggccatcgcccggcgggaaggacgacctggacccggactcggccatgatgggcgagtgcctcgacttctgcaagcgaaacctgttcgcggaggacgggtacgaggaccgctacctggatgacctcgcggagctgccggaggcgctgatcctgaaccgcatcaactccaagcgggccatgcactcgtaccagctcgggaagcagctgtccttccactggagcaccggcgccgggccccggatcgggtgcgtccgtgactacccgtccgagctccagttccgggcgctggaggatgtcagcctgtcgccccgtggcggcggcaggtcggtgaggttcccgtcgcccaggccgggcgcgctcacgcccaacagcatccctgcggccaagtgtggctctcttacggcggacggcgacggcgtgcacgcgtcgctcaagcccaggcagaggagtgccacttggactgcgttctgagggacataccatgcatgcatgcatgctgcttccttcagcttttttttttcacagcattgtgacgataaaccgagggaaaagtgagatagcatgctccttcacgtagacgaggatagaaggatcagcattgacagacatttggcaaacactgggtaatgccatattgtaatggtacctataggttgatgaca

SEQ ID NO: 95309 - DNA, 2472 bp, Zea Mays
ccttccccgtatggccaccgccccatttagattctgttcctcctaaatctcctccccgttggcccctgcgctcttcacaaaatagctctctgcctcacagcaagcctgtgcgtctcatattcaaggagcctgcctctgaggtggttgcaacttgcttgggacgaggatttggattttggaggcaagattggaccgcagactgtgagatccatccaatccaacaaccgaatccaatccaatccaatcagagaaaaagaaaaaaggcgaaaggctcgtgtctgtgtggcaccacatcttgccatcagggaaaatggggctgtcaatctcgtacccaccagacgactacctgccagcagtggaggacgacatggggcggctgttcatccggtctctcagcttcgacgacatggaggccgccgccgattcgccttcgtattcgccttcggcattgccccccgcctttggctccgggaagctgatcatggagggctccctgggcttcttcgaaagaagagaagctgacagcgtccagatgcagaacgtgctgtccatcaggaatcctaaacctcctgatagagaagcctgcagcagcgtcagtcccggtgctgcgacagctacttgtggctcatcaagattcgaccgtccaccagattatgattaccccatggtcgggatgaacagccccaggcaccagagcgcggccgtcaggctgcagaaggtgtacaagagcttcaggacgaggcggcagcttgcggattgcgctgttcttgtggaacaacgatggtggaagttgcttgattttgcactgctcaagcggaactcggtgtcattttttgacatagggaagcctgagactgctgtctcaaaatggtcccgggcaaggatgagggccgccaaggttggaaagggtctctccaaggacgagaaggcccagaaacttgcgctgcagcactggctcgaggcgattgaccctcggcatcggtatggccacaacctgcacttctactaccaccgctggctccactgccagagcaagcagccattcttctattggttggatgtaggagaagggaaagatgtcaacttagaggagcattgccctagattcaagttacacaagcaatgtatcaagtaccttggccctaaagaaagggaaacctatgaggtggtagtcgaggacaagaggctgatgtacaagctgagccgtcagatagtcgacacgaccagaagcgtcaaggggaccaagtggatattcgtgctcagtacatgcaagacactttacataggccagaagcagaagggcgtgttccagcactcaagcttccttgcagggggagccacatctgctgcaggaagactggttgtggaggatggaattctcaaggctgtgtggcctcatagcgggcattaccggccgacggagcagaacttccaggagttcatgaacttcctcaaggagaggaatgtagatcttaacaacgtggtgttgagcccatcagaaggtgaagaagatggcgacttcagcctggcgagcagctactctcagctggacctgacccaactctgccagcaagaagacagccaagaacaagaggcacaatctgcgcgacgccatggccaagtcgaagccgaagccgaagctaggacctgcagcctggagcccagcctgccatctacagagacctgcagcacgccggcgacgatcaggaagagctcctcagacaaccggctgcaagggaagcggccgcccaggctgctgatcagctcaaacaacatagcgccgctgccgcccaccacgcacagcaacgccgggccatcgcccggcgggaaggacgacctggacccggactcggccatgatgggcgagtgcctcgacttctgcaagcgaaacctgttcgcggaggacgggtacgaggaccgctacctggatgacctcgcggagctgccggaggcgctgatcctgaaccgcatcaactccaagcgggccatgcactcgtaccagctcgggaagcagctgtccttccactggagcaccggcgccgggccccggatcgggtgcgtccgtgactacccgtccgagctccagttccgggcgctggaggatgtcagcctgtcgccccgtggcggcggcaggtcggtgaggttcccgtcgcccaggccgggcgcgctcacgcccaacagcatccctgcggccaagtgtggctctcttacggcggacggcgacggcgtgcacgcgtcgctcaagcccaggcagaggagtgccacttggactgcgttctgagggacataccatgcatgcatgcatgctgcttccttcagcttttttttttcacagcattgtgacgataaaccgagggaaaagtgagatagcatgctccttcacgtagacgaggatagaaggatcagcattgacagacatttggcaaacactgggtaatgccatattgtaatggtacctataggttgatgaca

SEQ ID NO: 95310 - DNA, 2400 bp, Zea Mays
ccttccccgtatggccaccgccccatttagattctgttcctcctaaatctcctccccgttggcccctgcgctcttcacaaaatagctctctgcctcacagcaagcctgtgcgtctcatattcaaggagcctgcctctgaggtggttgcaacttgcttgggacgaggatttggattttggaggcaagattggaccgcagactgtgagatccatccaatccaacaaccgaatccaatccaatccaatcagagaaaaagaaaaaaggcgaaaggctcgtgtctgtgtggcaccacatcttgccatcagggaaaatggggctgtcaatctcgtacccaccagacgactacctgccagcagtggaggacgacatggggcggctgttcatccggtctctcagcttcgacgacatggaggccgccgccgattcgccttcgtattcgccttcggcattgccccccgcctttggctccgggaagctgatcatggagggctccctgggcttcttcgaaagaagagaagctgacagcgtccagatgcagaacgtgctgtccatcaggaatcctaaacctcctgatagagaagcctgcagcagcgtcagtcccggtgctgcgacagctacttgtggctcatcaagattcgaccgtccaccagattatgattaccccatggtcgggatgaacagccccaggcaccagagcgcggccgtcaggctgcagaaggtgtacaagagcttcaggacgaggcggcagcttgcggattgcgctgttcttgtggaacaacgatggtggaagttgcttgattttgcactgctcaagcggaactcggtgtcattttttgacatagggaagcctgagactgctgtctcaaaatggtcccgggcaaggatgagggccgccaaggttggaaagggtctctccaaggacgagaaggcccagaaacttgcgctgcagcactggctcgaggcgattgaccctcggcatcggttggatgtaggagaagggaaagatgtcaacttagaggagcattgccctagattcaagttacacaagcaatgtatcaagtaccttggccctaaagaaagggaaacctatgaggtggtagtcgaggacaagaggctgatgtacaagctgagccgtcagatagtcgacacgaccagaagcgtcaaggggaccaagtggatattcgtgctcagtacatgcaagacactttacataggccagaagcagaagggcgtgttccagcactcaagcttccttgcagggggagccacatctgctgcaggaagactggttgtggaggatggaattctcaaggctgtgtggcctcatagcgggcattaccggccgacggagcagaacttccaggagttcatgaacttcctcaaggagaggaatgtagatcttaacaacgtggtgttgagcccatcagaaggtgaagaagatggcgacttcagcctggcgagcagctactctcagctggacctgacccaactctgccagcaagaagacagccaagaacaagaggcacaatctgcgcgacgccatggccaagtcgaagccgaagccgaagctaggacctgcagcctggagcccagcctgccatctacagagacctgcagcacgccggcgacgatcaggaagagctcctcagacaaccggctgcaagggaagcggccgcccaggctgctgatcagctcaaacaacatagcgccgctgccgcccaccacgcacagcaacgccgggccatcgcccggcgggaaggacgacctggacccggactcggccatgatgggcgagtgcctcgacttctgcaagcgaaacctgttcgcggaggacgggtacgaggaccgctacctggatgacctcgcggagctgccggaggcgctgatcctgaaccgcatcaactccaagcgggccatgcactcgtaccagctcgggaagcagctgtccttccactggagcaccggcgccgggccccggatcgggtgcgtccgtgactacccgtccgagctccagttccgggcgctggaggatgtcagcctgtcgccccgtggcggcggcaggtcggtgaggttcccgtcgcccaggccgggcgcgctcacgcccaacagcatccctgcggccaagtgtggctctcttacggcggacggcgacggcgtgcacgcgtcgctcaagcccaggcagaggagtgccacttggactgcgttctgagggacataccatgcatgcatgcatgctgcttccttcagcttttttttttcacagcattgtgacgataaaccgagggaaaagtgagatagcatgctccttcacgtagacgaggatagaaggatcagcattgacagacatttggcaaacactgggtaatgccatattgtaatggtacctataggttgatgaca

SEQ ID NO: 95311 - DNA, 1690 bp, Zea Mays
cgtgagccactgacttgcaggccccacattctcccgccctcttcctcttcactacaccctttcctccgtgccgccccacttttctcctcccgcgcccctccgcgagctccctacccctcgcgctcacgccggcgacaagtttccgccagagttaggtagatcaggtgctgcgccggcagccgtggaagggatggaggacctcgcgagttcgcgtggcggcgggggatgcggtggtcttgatgcgcagatcgaacagctcatggagtgccgcccgctcccagagacggaggttaaaacactgtgtgagaaggccaaggagatattaatggaggaaagcaatgttcagccagttaaaagccctgtgacgatttgtggtgatattcatggccaattccatgatcttttagaacttttccggattggtgggaagtgtccagatacaaattatttgtttatgggtgattatgtggatcgtggctattactctgttgagacagtaacgcttttagttgcacttaaggtgcggtacccgcaacgcattacaattcttcgtggaaaccatgaaagtaggcagatcacacaggtgtatggcttctatgatgaatgcctacgaaaatatggcagtgcaaatgtctggaagatcttcactgatctttttgattattttccgttgacagcattggtggaatcagaaattttctgcctccatggtggtttatctccatccattgagaatcttgataacgttcgcagtttagaccgtgtccaagaggtccctcatgagggacctatgtgcgaccttctgtggtctgatccagacgatagatgtggctggggcatatctccacgtggtgctggatacacttttggccaagacatatcggagcagtttaatcacaccaacaatcttaaactcgtagctcgggctcaccagttggttatggagggatacaactgggcacatgaacaaaaggtggtgaccatattcagcgcacctaactactgttaccggtgcggcaacatggcgtccatcctcgaggtcgatgactgcaggaatcacacatttattcagtttgagccagctcctaggagaggtgaaccagacgtgacgcggaggacacctgattatttcctttgagttatctgccaggccatttttggattttgcccaatgttggaatagtgatgctggccagtaacaatttttgttggatctatatggtaacttaaccgaccagcaacagtaagaaaatgtggaacttaaccgaccagcaacagtaagaaaatgtggaagctgcatttgtcattgcaagaggtgctcgctaacttaaccccaagctgtcaaaagatccgcttgtctacccaacccacccagtggtgcctcccttgggctttgggacgtcgagtttacgctttcagcgtagagttgcctcagttctgtcttgtgtgtcagctagttttgtgtttgtgtcttgtgtggttgctcgttgtagcttctgtggtctcgagtgttgcaagaattggaattctgctagctcctcctctgtttggttgtccatgcccttggtacacgagtgttggccacccttctcatgtagcaccaaccacgttacagtcaagctgttcgcatcttatttttgtcatgttaatactcctgtcaattaaatgaacaatgtttgctccccatgta

SEQ ID NO: 95312 - DNA, 455 bp, Zea Mays
cgtgagccactgacttgcaggccccacattctcccgccctcttcctcttcactacaccctttcctccgtgccgccccacttttctcctcccgcgcccctccgcgagctccctacccctcgcgctcacgccggcgacaagtttccgccagagttaggtagatcaggtgctgcgccggcagccgtggaagggatggaggacctcgcgagttcgcgtggcggcgggggatgcggtggtcttgatgcgcagatcgaacagctcatggagtgccgcccgctcccagagacggaggtgaggcgtgccacccaatccccttccatctgtcttattcgattcgcctgcattataggttcgtggcgagatctgggaggctcatgacggctggtttcggcgggggagtttctttagggttagttcgttttcgggaaaggtgacacctttctttggtcctggtttc

SEQ ID NO: 95313 - DNA, 1092 bp, Zea Mays
ttcttagatgaagcacatcaatgtatcgtggagttgcagtgtcctgattactacccagaagttgttaaagaagctgtcaatcttgccctatataaaggcaccaattttgttgatcctattgttaggctactggagcatttgtacacaaagaaaatttcaagactcaaaacctggaatctggttgcttgttatacggtactctactggatggcattggcattgaccttcctaaagctctagcacaatttggtgagatcattggtcgcctgactttgttgggtgccttgagatttgaagctctggaggttattgtaaagaaaatgtaatatacctacaactggaaagcagtttctaatgctttcatgaaaaccttggaagcaaaccatcaggtcaggttatcttaggctcgcctgctgctgctgctgtaatagacgcttgcaacaaccttttggaataagcttcctagcagttttggcatatcaacattttcagattctgtatcttgcgaaagacggtatcgtgtattctctatagtttaggtgtcaaggaattaaggaacagacaatttggagctgtaaaattttgcgagatcagatgagtgttgattgttattgtttcggccaagaaggaaagaaagaagccatgaattttggtcttgggcgaccagcttaatttgcaggagtcctagatgaacaaggctaaatatgctgatactacgtccacctaaaatgttgttagttttttttgtgactacacatttttgtaacgttgtactatggttttggaatgttttattgggtacaatatattgtgttatttaggaatcaagactcgatctctctatgtcctggtttactctgttgctgccgtgatgttggctccctagttcctttgggcgatcagcgtatgttggctctctaattcgtttgggctttgtatttccatgctgtttgactggatatttgatgccctgtttgtttggggttttttcagcttcttgccttcaaatgttgttacggactgcaaaacgtcccagtttatataagaatcgctttattgatgcagaaattttggtagttagatggtgttatc

SEQ ID NO: 95314 - DNA, 798 bp, Zea Mays
atggccgagtggcaagctcaacactgggcaagtaatgcaagtgatagctgtgtcagtttacccccattttcttgggcatcacttgtctcaaatgaagtccattggaggttcgcaatttatgttccgtggcatcgcacgggcacctacctagtttaccaggaaaatatatatgttgaagataagccattccactcattcaaaaaaattgcacggtcactgggatacactgatgatgatcttcctttggtatcattccagttagtttctaaaggctactacggagaatgtggaaaacgaggcggttatatggagataactggattcagtcctgaagtacgggaacaaatttacaaggcggcatcagtaaacctgtgctccaatgtttcggggcaaattcttgctagccttgtaatgaacccaccaaaggctggggatgaatcctttgaatccttcatgtcagagagggatggtatcctttcatcgttggctcggcgtgcaaaggttttggaagaagcattcaacagtttagaaggaattacatgcaacaaagccgaaggtgcaatgtatctgttcccacgccttcatttaccccagaaggctattggagctgcccaagcagtcggcactgtgccagatgcatactacgcaaaacgcctaccggaagccactggaatcgtcgtcgtccctggttctgagtttggacaggtgggtaatctcaaaagccctttttgtggaagtccctacatgtttaaagagaaggttaaaaggcagaagcttagtagtataattaatgcatag

SEQ ID NO: 95315 - DNA, 272 bp, Zea Mays
atgttttgttctgcagctgcatgtatgacatggaaactggcagagtcaggagtgcattttatcactacagtcatcaacggagctgatctggttccaacattttctgctgcgttagtagacgatcttggttcagaggttacagcgtcagcttggctaaatgatttccgccacaaatgaacaaaccagatcctaagcactttttatcgttctgcgtcagccttgggattcccggctttcatttatggcaaatgcctaaagccagagtagctggt

SEQ ID NO: 95316 - DNA, 105 bp, Zea Mays
atgaaaacgatgtgtgcatggcattttctctctcttttcattaccatatatacttgcttgtcttatgtttttatactcacaggggcaggttggtatagtagatag

SEQ ID NO: 95317 - DNA, 93 bp, Zea Mays
atggcggtgctcccccaagatcgagcgacggcggcgcaccctaggcccggtggcgacagcggttgtgcgaggcgcgtgtaccgcaatgcataa

SEQ ID NO: 95318 - DNA, 406 bp, Zea Mays
ttctatgaagaggagaattcgaagcaactttaccctgttggctccggttagagccaacgtggaggcgagcggcgagcccggcggagcaggtaaaggtggcgagcccggcggagcaggtaaaggtggacgtggcggtggcggtgccgcgcaccacctccacgatgacgacgacgacgacgacgctgggagcgagtcgagctccgacctgttcgagatcaagagcctggcgatcggcgactgcccctacgagccgagcgaggcgagcatccagtggagcgtggtgaccgcgagcgccgcggacgcgtcggagcgcggcgaccgcgtccccgccagatgggtcagcggcggtggcacgaggcagctacgggggcaccgtccgcccgggctgctggccggttgtgccagc

SEQ ID NO: 95319 - DNA, 1562 bp, Zea Mays
gaacaggaaacgcccatcgttgcccttttctttttccctgacggacagcaacgcttttcttgtcgccttcgcaggtcactgtcctgtcggaatcatgctgcagaacagcttcagatttagttgctagcatgagtgttagagcggcaccaagccccaatgtctctgtggatggatgatgccaaggcagcagctaccgtctcaaatttctgatcataaaacatacggccatctgtgctccagccgtactgtgcaagcaaacttgacatcctcctcatctcctccttgttgtcgttgcagtttcttcacgcagacaaatcggcaattagtgcgcctattcacaacatctcctgtggctcgctgcaccatggagatggggcgatcgggaaatggtggccggaaggtggtcaccttcgacgacgccatcaccgggatgcgccggaacggttccctgtcctcgtaccttgacatgggccgggcggcgccgcggccgttgccggcgattagcatgggcagccgccggcgcacgtacgccgacggcgagctcgacgtgttctctgccgagcggtacttcaaaggcgcaatggacggcgacggggaccgcaaggaaggcgccagtgtcggtgtcatcacccccgcggtagcggtgcaggtggagcctttagtggagacggccgccgcgaggccgccgccggcgacggaggccgtggtaatgactaagccgtcttcgacgacggtgagcttcaccgcgagctcggcgttcagcgccaacagccagacggcgctcttcgggttcgggggcaggcttcgtccacggcgcagctcccgcgacagcaagtgctgcgtccaggtcggcgtgctcatgcgcacgtgctccgggaagcggtcggtgcgcgtggacggctgcgcggccaaagaagcccccaacgccgccgccgagccagcggcgaccgggatcgactggtacaaggagctgaggatgcgcaaggccgcgcttgggctctctggggctgccaataggcatgacctggtggcggccggtctcccgccaagcttgaatcttgggaccgcgaaagtggcagccatcgggagggaggttgttgggggccttcgtcctccgaaggtcctcaaaaacatgatttgacaatgctttccaagtgaattatatgaacaggtattttcggattcagaattatggatatggagcacgaccaggacgaaggctgagccaggcgaaggtcgaaggcagccgaagctgtacgcagggaagcttcggcgcgatagcacaagggggaaccgacttaaagataaaaagacttcggggtcctcaatagatttctataaaccgttaacaaatgtaatggacatggatgtaattttacgagggctgcgtcccgcgtctataaatagatgaacagtactcccgtactgttcacgcggacttgtcattttgcttttggtgtcacgcttgtactctccaccttctctcaggaccgaaggtacatttgtaatttgagatcatttctgtttttccatgttaataaaatagaaatgattctttggtg

SEQ ID NO: 95320 - DNA, 103 bp, Zea Mays
tctcaaatggtgaacatgttttggatttagcaagtaatagccaagttcacaattatgaaaacaagcttagctcaacaaaattgtatcaatatgagcaaaagag

SEQ ID NO: 95321 - DNA, 2255 bp, Zea Mays
ccatccacaccacagaccccagctaccgctaccgctaccaccaccaccaccaccactactggaacccccctccctttcaatacaaaacaaaaaagcgcacgcaggcagagctgctgcacgcggcgcacgcactcccactcctcccgttccgtccgctccaagcaaggcacccccatccagatggcggcctgggcggttccggcgctcgcggccgctgcgtgggcgctgcgggcggcggtgtgggcgtgcctcgcggcgtcggcgatgctcgtcgccgaggccgcgtacatgggcctcgccagcctcgcctccgccgccgcgatgctgtggcgccgcccggacgcgaggtaccgctgggagcccatgcccggaggctgcgacgtcgaggcggccactggggcggacttccccatggtgctcgtgcagatcccgatgtacaacgagcgggaggtgtacaagctatccattgacgctgcgtgtgccctcacatggccaccagaccgtattgtaatacaagtcttggatgactccactgatccgattattaaggaactagtggagcttgagtgccaggattgggccaccaaaaaaattaacatcaagtatgaggttagaaataatagaaagggatacaaagcaggtgcgctgaagaagggcatggaacatatatacgccaagcaatgtgaatttgttgctatctttgatgcggatttccaacctgaacctgacttccttttaaaaaccataccatttcttgtgcataacccaaagattgcacttgtacaagcacgttgggagtttgtgaactacgatgtttgcctgatgacaaggatacagaagatgtctctagactatcatttcaaagttgagcaggaatcaggatcatttgtatattcattttttggctttaatggtacagctggtgtgtggcgtgtatctgctattaaccagtctggaggatggaaagatcgcacaactgtagaagatatggacttggctgtacgggctagcctcaagggatgggaattcttgtatgttggtgatattagggttaagagtgaactaccaagtaccttcaaagcctaccgtcatcaacaacataggtggacttgtggtgccgccaatctcttcaggaaaatggcatgggaaatcattacgaacaaggaggtgtcaatatggaagaaacatcatctgttatacagctttttctttgtccgaagggttattgctccccttgtgacattcttgttttattgtgttgtcatccctttgtctgccatggttcctggtgtcagcattcctgtatgggggctggtctatattcccactgcaatcacatgtatgaacgccatcagaaatccttggtctctccatttgatgcccttctggattctcttcgagaatgttatgtccatgcaccgcatgcgtgctgctgtaaccggtttacttgagactgcacgggcaaatgattgggtagtcactgagaaggtaggagatcttgtgaaggatgacctagatgttccactccttgaaccagtgaagccaacagaatgcgttgagaggatttactttcctgagctcttgcttgcactccacctcctaatatgtgcttcatatgacttcgtacttggaagccacaaatactatctttacatatacctccaggcctttgcatatgttgtaatgggttttggtttcgttggaacgaaaactccatgttcatagctgccaatatgatgttactattccccatttcacagtaagttcctaggagtactgccactatgtgcaagatgaaatttgtctgatggtaaatgttattcgcattgcggggcccatgcttagtctagtgggtgtgtgggtggggggcggttgggcctttggttcttagattgctaacaagatgttcttcaacagttcaactgccattggtaaactcagttttatgatttgcctctgtaaacgcattttccttgacatacatgtgttttctcaataatcgccctgtgctagatgtattcatctgtagcagttccattgcagaactgaatataattggtatggatttcagattttggattcatggttgtaatagggcgagaggcaagtttgtatccaagttggatttgtaaattattatagcttattttttatgattgtcatgtatagattggcaccaggaaggaatgtatggcataatgagaagacaatgaaatatgaaattaattcttgtattgtgacatagcaataggcat

SEQ ID NO: 95322 - DNA, 2293 bp, Zea Mays
ccatccacaccacagaccccagctaccgctaccgctaccaccaccaccaccaccactactggaacccccctccctttcaatacaaaacaaaaaagcgcacgcaggcagagctgctgcacgcggcgcacgcactcccactcctcccgttccgtccgctccaagcaaggcacccccatccagatggcggcctgggcggttccggcgctcgcggccgctgcgtgggcgctgcgggcggcggtgtgggcgtgcctcgcggcgtcggcgatgctcgtcgccgaggccgcgtacatgggcctcgccagcctcgcctccgccgccgcgatgctgtggcgccgcccggacgcgaggtaccgctgggagcccatgcccggaggctgcgacgtcgaggcggccactggggcggacttccccatggtgctcgtgcagatcccgatgtacaacgagcgggaggtgtacaagctatccattgacgctgcgtgtgccctcacatggccaccagaccgtattgtaatacaagtcttggatgactccactgatccgattattaaggaactagtggagcttgagtgccaggattgggccaccaaaaaaattaacatcaagtatgaggttagaaataatagaaagggatacaaagcaggtgcgctgaagaagggcatggaacatatatacgccaagcaatgtgaatttgttgctatctttgatgcggatttccaacctgaacctgacttccttttaaaaaccataccatttcttgtgcataacccaaagattgcacttgtacaagcacgttgggagtttggatgttcctgacctggcctttgccgggtgattttgcagtgaactacgatgtttgcctgatgacaaggatacagaagatgtctctagactatcatttcaaagttgagcaggaatcaggatcatttgtatattcattttttggctttaatggtacagctggtgtgtggcgtgtatctgctattaaccagtctggaggatggaaagatcgcacaactgtagaagatatggacttggctgtacgggctagcctcaagggatgggaattcttgtatgttggtgatattagggttaagagtgaactaccaagtaccttcaaagcctaccgtcatcaacaacataggtggacttgtggtgccgccaatctcttcaggaaaatggcatgggaaatcattacgaacaaggaggtgtcaatatggaagaaacatcatctgttatacagctttttctttgtccgaagggttattgctccccttgtgacattcttgttttattgtgttgtcatccctttgtctgccatggttcctggtgtcagcattcctgtatgggggctggtctatattcccactgcaatcacatgtatgaacgccatcagaaatccttggtctctccatttgatgcccttctggattctcttcgagaatgttatgtccatgcaccgcatgcgtgctgctgtaaccggtttacttgagactgcacgggcaaatgattgggtagtcactgagaaggtaggagatcttgtgaaggatgacctagatgttccactccttgaaccagtgaagccaacagaatgcgttgagaggatttactttcctgagctcttgcttgcactccacctcctaatatgtgcttcatatgacttcgtacttggaagccacaaatactatctttacatatacctccaggcctttgcatatgttgtaatgggttttggtttcgttggaacgaaaactccatgttcatagctgccaatatgatgttactattccccatttcacagtaagttcctaggagtactgccactatgtgcaagatgaaatttgtctgatggtaaatgttattcgcattgcggggcccatgcttagtctagtgggtgtgtgggtggggggcggttgggcctttggttcttagattgctaacaagatgttcttcaacagttcaactgccattggtaaactcagttttatgatttgcctctgtaaacgcattttccttgacatacatgtgttttctcaataatcgccctgtgctagatgtattcatctgtagcagttccattgcagaactgaatataattggtatggatttcagattttggattcatggttgtaatagggcgagaggcaagtttgtatccaagttggatttgtaaattattatagcttattttttatgattgtcatgtatagattggcaccaggaaggaatgtatggcataatgagaagacaatgaaatatgaaattaattcttgtattgtgacatagcaataggcat

SEQ ID NO: 95323 - DNA, 97 bp, Zea Mays
gctatttgttgcagagatttagtgatactccttatcatcttgatagaaattcatttatgcattttttgtgatgtacacaactcctgctagttagaaa

SEQ ID NO: 95324 - DNA, 667 bp, Zea Mays
tttgacaacaagttgctgaagagtgaaatacctgaagcaatacattccttcccctaatgttatttatctacacccagggacctcttattgatctcctggtctttctcaaacccatatagctaattaattctatgtacatcctgcgtgccgcctatattacaagtccacttacacatacgctagctaagtttcccactcagcatatagatagatattacaatcctatgatgatttatataaaaacaaaattcagtacgtactgtcaggctgatcagctcatgttcagttcagaagttcagatgagaaggaacgctgcatgaggaaattcctgctgctgctgatggatgtacttgaagaagaatcaagacccctcctggaaggccacggagcgcgtgagcgcaacggggttcgcgtgaaggagcggcgagcttgtcatcatggccttcttggtggcctcgccgcgcttgggctcgaacaccgtcccgagctgcttgctgtgcccaccggcgtggtcgtctgctgcgtcctgctgcttcgtctggtcgcctttgatcccgacgagggaccagattgagctcctggccacctcgtccacgtcgtctatccggatgctcttgggcgcccacaccttggcgttgccgccgtttctcccatcgtcaccctcccg

SEQ ID NO: 95325 - DNA, 684 bp, Zea Mays
cgcggtccgtgggctaggaggaatggatgggtgggcccggcctacttgtcttcctccgctttttaaaataaccgtgcgtcccctctcctgccccctagacgccgctgctgacacgcctcccgagtcccgattgattgatttcctccagccagcgttaaagcaactacgaggggtagcgagtgagagaggtctcatcatctcatcgttcccatggagaaccgcaaggaggggcagcagggcgccacggtcgggtggatgaccgtgccggcgttcggcgagtgggacgttaagaacggcgccgtgccggactactccatggacttctccaagatccgggagatgcgcaggcagaacaagcgcgagctctccagggccagcctcggcggcgacgaggacctcctccagcagcagcagcagcagagtgccaaggctcagccgcccaagtcccccgccgccgccgtcgccgacgacgacgaccaccaccgcctgccgctgcacgacgactcccctacgggaaggaagaagttcctgagctacttccagtgctgtatcagagcatgaagagttgcaaaccttcctgtggtgtcactgtcactgttagaattatagtcattttctgtattattttaattccatgaattaacattatgatgatgatatataacaaataaataaccatagaaa

SEQ ID NO: 95326 - DNA, 2127 bp, Zea Mays
cagcgaggctctcctcgcgccttccgcgtttccgttccgctccaaaacctggtggccttgggctggccgcgcccgcgacatatgcctcctactggcgaaccccatccacacgacacgacactgctcagccgccggcctgggttgacttgactcaggcggggacacgcacacgttcgttcttacgtgcttccgccggcgcgggttggcgtggcagtcgggctcggccctcagatcctccaaagattggattttggaggagtgcgctgttgtgttggtggcggagcttcctggcgttgactccgaccttgctgttcctagcagctcccacccaagaggcatcgcggcgaccggatcggtcgatgtgtcgccggtagattggccggcgtcagcggagggtggagatggggaactgcatggacaaagcggtgccggtggacaacacctcctatcaatcgaaagcagggagcaaatcaatttcatcgtccaacccttcgacggtcaagactggttcgactcggtcgacatggactgtagcctcatacaaagatagtcgagagcttcctactcctaggacagaaggggaaatcttgtcatcaccaaatttgaaggcattctcgtttggtgatctcagaactgcgtcgaggaacttcagatcagacagtcttcttggggaaggaggatttggctatgtgttcaaaggctggattgatgagcaaactcttgccccttcaaagccaggaagcggtatggttgttgccatcaagaagctaaaaccagaaggttttcagggccacaaggagtggctgacagaggttgactaccttggccaacttcaccaccagaatcttgtcaaactcattggttattgcacagatggtgatcaccgacttctggtgtatgagtacatgcctaaaggaagtttggaaaatcatctattcagacgaggtgcggatcctttatcctggggaacaagactcaaagttgcaattggggctgctaagggtttatcatttctgcatgatgctgagaaccaagtcatatatcgtgatttcaaggcatcaaacattctccttgactcggagttcaatgcaaagctttcagactttggcttggcaaaagcaggtccaactggggacaggacccatgtttctacacaggtcatgggcacaagaggttatgcagctccagaatatgttgcaacaggtcggctctcagtgaaggcagatgtctacagcttcggcgtggtgctactggagctgctgacgggacggcgggcgctagacaagtcgaaaccattaaccgagcagaacctggtggagtgggcgagaccctacttgagcgacaagcgccgtctgtaccgcatcatggactccaagttgggcgggcagtaccctaagaagggcgcccacgccgtcgccggaatcgccctgcagtgcatccgcaacgaagggaagatgcggcctgccatgtccgaggtcgtggagaagctagagcagctgcaggatcccaggtacaacgtggcggcgccgccacaggtgaacacggcgtcgtcgtcgtcgtcctctggctcagtagtccccaggtcgcccaggaaggcacagccttctcccagacgcctgtcgggttcggcctccccgttgccagcaccagcaacaggctccccgctgccggggtcatcgaggagtagtagtaggactgcgcaggtgcactaggcgtgcgacagaaaggatgaaagggagcggctatacgtgtgtgtgtgactgtgttgttgtcgtaggcatgtagctgttggtttcattccatgtgtactagctgtatatttttgctgtattcactaccggaatccaaggctttgccgagtgttgcaatctttgccgagtgccttttgtcgggcactcggcaaagacggctttgccgagtgccgcactcggtaaagctaggctctcggcaacgaggctctttaccgagtgccggacactcggcataggtagacactcggcacagcctggtttgccgagtgttaaacactcggcaaagtgggctctcggcaaagggccgtcaacggccgtcccaaagctgacggccgtcagtctttgccgagagccagcggctggcactcggcaaaga

SEQ ID NO: 95327 - DNA, 1445 bp, Zea Mays
attgtgctaatgctagtacaattgaactggttgacaaacataccactccaacttaggcttgttcggttgcatgtagactggatgagattgaggaggattaaattccctttctattcaattttgactagcaagagatttaatcctctccaatcctaaccgagtagacacttaaagcttgttcggttaggagtggattgagggggattggagaggattaaatcctctcccatacaaatttatataggaggggatataattccttccaattccctcaatccacctcaaaccaaacaagctcttactggatttttagggttgtgactgtcctaaaaagtgatgccaagaaactgctgagctacaaaatatgcttctaggatgtattacagtgcataagaatattattgattgtccttttagtgtagtccagtccagtccagtggcaagacattaatattctactttggtaagattgttccttgtgttgataaaaaggtcttattacacgtgtgccgtgtggtttacctcttatgagagatgttcatgttttcttcccctttcctgctattttcgctttgcgtgtaatttagcctacataaataagatgtataatatgcttaaggagttgtttggcacaattgctgcttgttggaaaaactgcatatctgagaagctggtgaaaaacagcttctgcttattgactgtttttagttcgttttgagaagcagctgaactgataagctactgcaagggataccacaggtcggctctcagtgaaggcagatgtctacagcttcggcgtggtgctactggagctgctgacgggacggcgggcgctagacaagtcgaaaccattaaccgagcagaacctggtggagtgggcgagaccctacttgagcgacaagcgccgtctgtaccgcatcatggactccaagttgggcgggcagtaccctaagaagggcgcccacgccgtcgccggaatcgccctgcagtgcatccgcaacgaagggaagatgcggcctgccatgtccgaggtcgtggagaagctagagcagctgcaggatcccaggtacaacgtggcggcgccgccacaggtgaacacggcgtcgtcgtcgtcgtcctctggctcagtagtccccaggtcgcccaggaaggcacagccttctcccagacgcctgtcgggttcggcctccccgttgccagcaccagcaacaggctccccgctgccggggtcatcgaggagtagtagtaggactgcgcaggtgcactaggcgtgcgacagaaaggatgaaagggagcggctatacgtgtgtgtgtgactgtgttgttgtcgtaggcatgtagctgttggtttcattccatgtgtactagctgtatatttttgctgtattcactaccggaatccaaggctttgccgagtgttgcaatctttgccgagtgccttttgt

SEQ ID NO: 95328 - DNA, 2025 bp, Zea Mays
cagcgaggctctcctcgcgccttccgcgtttccgttccgctccaaaacctggtggccttgggctggccgcgcccgcgacatatgcctcctactggcgaaccccatccacacgacacgacactgctcagccgccggcctgggttgacttgactcaggcggggacacgcacacgttcgttcttacgtgcttccgccggcgcgggttggcgtggcagtcgggctcggccctcagatcctccaaagattggattttggaggagtgcgctgttgtgttggtggcggagcttcctggcgttgactccgaccttgctgttcctagcagctcccacccaagaggcatcgcggcgaccggatcggtcgatgtgtcgccggtagattggccggcgtcagcggagggtggagatggggaactgcatggacaaagcggtgccggtggacaacacctcctatcaatcgaaagcagggagcaaatcaatttcatcgtccaacccttcgacggtcaagactggttcgactcggtcgacatggactgtagcctcatacaaagatagtcgagagcttcctactcctaggacagaaggggaaatcttgtcatcaccaaatttgaaggcattctcgtttggtgatctcagaactgcgtcgaggaacttcagatcagacagtcttcttggggaaggaggatttggctatgtgttcaaaggctggattgatgagcaaactcttgccccttcaaagccaggaagcggtatggttgttgccatcaagaagctaaaaccagaaggttttcagggccacaaggagtggctgacagaggttgactaccttggccaacttcaccaccagaatcttgtcaaactcattggttattgcacagatggtgatcaccgacttctggtgtatgagtacatgcctaaaggaagtttggaaaatcatctattcagacgaggtgcggatcctttatcctggggaacaagactcaaagttgcaattggggctgctaagggtttatcatttctgcatgatgctgagaaccaagtcatatatcgtgatttcaaggcatcaaacattctccttgactcggtatacatgaaatgtctactcatccttgttctgggcaaacttctatttttttttggcaaatcttgctttattatttccttaacttctttctcatcaatgtaggagttcaatgcaaagctttcagactttggcttggcaaaagcaggtccaactggggacaggacccatgtttctacacaggtcatgggcacaagaggttatgcagctccagaatatgttgcaacagctgaactgataagctactgcaagggataccacaggtcggctctcagtgaaggcagatgtctacagcttcggcgtggtgctactggagctgctgacgggacggcgggcgctagacaagtcgaaaccattaaccgagcagaacctggtggagtgggcgagaccctacttgagcgacaagcgccgtctgtaccgcatcatggactccaagttgggcgggcagtaccctaagaagggcgcccacgccgtcgccggaatcgccctgcagtgcatccgcaacgaagggaagatgcggcctgccatgtccgaggtcgtggagaagctagagcagctgcaggatcccaggtacaacgtggcggcgccgccacaggtgaacacggcgtcgtcgtcgtcgtcctctggctcagtagtccccaggtcgcccaggaaggcacagccttctcccagacgcctgtcgggttcggcctccccgttgccagcaccagcaacaggctccccgctgccggggtcatcgaggagtagtagtaggactgcgcaggtgcactaggcgtgcgacagaaaggatgaaagggagcggctatacgtgtgtgtgtgactgtgttgttgtcgtaggcatgtagctgttggtttcattccatgtgtactagctgtatatttttgctgtattcactaccggaatccaaggctttgccgagtgttgcaatctttgccgagtgccttttgt

SEQ ID NO: 95329 - DNA, 245 bp, Zea Mays
gggcaggggcgcgcgggccgggctgagccacaccgtggatcgaaacccacgacacgcacgaccactaaacggaatccgatcgcgaaccaaaagtccaaagcggggcgagacgaacacacgacatcagacaaagaaatgtgcttcggcatgatgcaacacccatgacacttaggttttgtttatacatgacacggacacccgtcactatactggtttgaaattgggaagaaggagcgaaacgagaa

SEQ ID NO: 95330 - DNA, 288 bp, Zea Mays
atgcagggtaaccttttaccattccacgagtgtataaagttgataacaagaaagcctgacaaatccctacaaattagaattgatctaggacaactatctggaaaatcagctctatattgcttagatgcttcaattgcaaggtacctgatagcaaggaactgggacaagtacttgaagaagcacaaggtgcgagattggctccgtgtgattgcagccaacaaggaccacgacgtctatgagttgtggtacttcaacattgctgagaacgagggcgaggaagaagattag

SEQ ID NO: 95331 - DNA, 1914 bp, Zea Mays
tcccggcctctaagctcttcacatccccttgctcgtcctttccctccattaataattacatccgtctccaaaaggtctcctccctcggtctccctcgggctaggctagctagctaggttaccactctggtacaacatggctggtgatggcatggaggtatctgccagcgggggtggcggcggcaacaagcagccgcagatcagccttttggggctgttcctcgcatgcatggtcgccggcggcgtgcagtacggatgggcgctgcagctctcccttctcaccccctacgtccagacactggggattcctcatgctcttacatcagtcatgtggctctgtggacctattgctggcttacttgtacaaccctgcgtcggcctctatagtgacaaatgcacttctaagcttgggagacggaggccattcatctttacaggatgcatcatcatctgtatatctgtgatagtcatcggtttctcctcagacatcggttacgctctcggtgacacgacggaagactgcaatgtttacacggggaagcggctgcacgcggccttgttcttcgtgatgggattctggctgctggacttttccaacaacacggtgcagggccccgcacgcgcgctgatggcggacctcgcaggcagccacggacccagcacggcgaacgccatcttcgtgtcgtggatggcgatcgggaacatcctgggctactcgtcggggtccaccgacaagtggcacacctggttcccgttcctgcagacgagggcatgctgcgaggcgtgcgccaacctcaaggccgccttcctggtgtcggtggtgttcctgggcctgtccacggtggtgaccatgatcttcgcccgcgaggtgccgctggacccggcggcggcggcgaagcaggacgaggccggggagtcgtcgggcccgttcgccgttttcaagggcatgaagaacatgccccccggcatgccgcaggtgctcatcgtcacgggcctcacctggctctcctggttccccttcatcctcttcgacaccgactggatgggccgcgagatgtaccacggcaggcccgacggcagccccgaggaggtggccaggttccaggagggcgtccggcagggcgccttcggcctgctcctcaactccgtcgtcctcggagccagctccttcctcatcgagcccatgtgccgcaagctcaccgccaaggtcgtgtgggtcatgagcagcttcctcgtctgcgtcgccatggccttggtcaccgtcctcagctcctggtcgctcggcgacatcgggggcaacgtgcaggacgccgccgccgtggataagggcctcaagaccaccgcgctcgccatcttcgtcttcctcggcttcccattcgcggtcctatgcagcgttccgttcgccgtgacggcacagctggcggcggccaagggcggcgggcaggggctgtgcacgggggtcctcaacatctccatcgtggtgccacagatggtcatcgccattggctctgggccgtgggacgagctgttcggcaagggcaacatcccggcgttcgggctcgccgccgtcttcgccttcaccgctgccgtcgcagggatcatcatgctgccaaagcagcccaagaccagcttccggtccgtctccatgggaggagggcactgatgatcacaactctaggatgcatggtccactgtgcttcacgattcttttacctttgggagttggacggccaggtgtttgttctcaaggccgcttccgaggcctaaaccatttctaggccggatcatgacgaacaatctgtttcgctgggttgtaaaggaaaagttttacacgaacacacaacgtgtcggctatttaacttttggaaaaaaaagtgtagtacctagcaatactacattaaaaaaaattggacgg

SEQ ID NO: 95332 - DNA, 666 bp, Zea Mays
atggacagagaaggcagtgcgcacccacggaacaagcagatgcgagcgtgtagcgtccgatgggtgagcgactggagcagggcgcggctgaggaatgggcaaaggccaagctggggcaccgcagcgccagagaggacgcgcagggagatgaacgccgcgagggaactccgcgagctggggcaggccgtgcgcaaggaagaaggccagaggccgggcgaactgctcggcaaagaggagcttgggcgcgagatgcgcgccatggaacttggggcagtcggccgtgctagcagagggaggagctggagggtgttcgacggaaaaagcggtggccgtcgctgggcatcagagagacgcgcacagggacgagctggagtcagggagctcgacgcggcccgggcacgactcgccggacgagcagggaggtgggcgcgcgcgggagctggagcaacgcgcgccaaggaccgagctccgctggacgcggcgagcagggccgagccagggacggcggaagggcgactactagcaagctcaaaagccatggccgacgaactccggtgggtgaagcgacgagccttcacggcgaagtggaggtcgagcccatgtcaaggaaatagagatcaggggcaagctccatatggaagagatcaggggcgagctccaagatag

SEQ ID NO: 95333 - DNA, 547 bp, Zea Mays
catggtcccgagtaggagttagccgaagaaaacagagaagtgccggcgctgtcaaccgaagctcgcgccaacgtcgacccacatattcatcgtcattgatacctcagagtcgggcccgagagcttcctcaagtcgcctgggtagtgagcatggcctctttggacgggattggtagatgggagactgggaattgcttaccagcactccatcgccgtcgcggatctgtgtgccaccgtgggcaacgtcgtctgcatctcgattatcgtatgatatagactattacaggaagcttcgactttgggatgaaagttctctcatgataaaggcgtgtgataagaatatgcaacccgaaggtgacgtggatggacgccgaagctgtggctcaaggagcttcggcttggatggaagacgaaaccgacctaagggggaaaagactacttagtccttgataacttgtattataactaagagtaaatgtcaggggtatgaatgtaatcttatccaggctacgtcccgtgcctataaatagatgaacagtaacaccgta

SEQ ID NO: 95334 - DNA, 537 bp, Zea Mays
catggtcccgagtaggagttagccgaagaaaacagagaagtgccggcgctgtcaaccgaagctcgcgccaacgtcgacccacatattcatcgtcattgatacctcagagtcgggcccgagagcttcctcaagtcgcctgggtagtgagcatggcctctttggacgggattggtagatgggagactgggaattgcttaccagcactccatcgccgtcgcggatctgtgtgccaccgtgggcaacgtcgtctgcatctcgattatcgactattacaggaagcttcgactttgggatgaaagttctctcatgataaaggcgtgtgataagaatatgcaacccgaaggtgacgtggatggacgccgaagctgtggctcaaggagcttcggcttggatggaagacgaaaccgacctaagggggaaaagactacttagtccttgataacttgtattataactaagagtaaatgtcaggggtatgaatgtaatcttatccaggctacgtcccgtgcctataaatagatgaacagtaacaccgta

SEQ ID NO: 95335 - DNA, 1251 bp, Zea Mays
catggtcccgagtaggagttagccgaagaaaacagagaagtgccggcgctgtcaaccgaagctcgcgccaacgtcgacccacatattcatcgtcattgatacctcagagtcgggcccgagagcttcctcaagtcgcctgggtagtgagcatggcctctttggacgggattggtagatgggagactgggaattgcttaccagcactccatcgccgtcgcggatctgtgtgccaccgtgggcaacgtcgtctgcatctcgattatcggtgagtcccaatccaacctattagccttgacgtctacttcgcgtagcacctaatggtatcatggataagtgaccgaaacaccggactcctgctctccggcgtgtgagccaccgtgggacacagggcgccgccgcgtccggccgccgttaggaggagaaggagggtcgatggccgttgatcggtcagtgtgcggccaggattagatcacaccttggtgagctatggaccgttgatccagatccggatggtcacgattaaaatagtgcaccccttcgtttcattagatctcggccgatgatcgtcgatccgatggacagtgtcgcgtaccaatacactttaatgttggatctaatctggaccatcggatcaagatccaatggctcagaacgctctgtaccccttcatagtggcaattttgcttaagagcccctatcctttcttcgaatcaactcacagtcagtctcaggtcaaaagaaattgcaaccaagccctatttttaacgctttagaccatatcgtttatttaaatagaacccatagtccctatcctaatgagaaataggaaataaaatctgagaaatagatttcttgtataaaaagaattataaaacttagataaatcataacttattcattttaactctgattcttgtggttctcgaacttacgacctcatagcgacactattgggggccttcctcttctgaaggtcctcaaaaatgtgactaaccatttgttttcagtatgatatagactattacaggaagcttcgactttgggatgaaagttctctcatgataaaggcgtgtgataagaatatgcaacccgaaggtgacgtggatggacgccgaagctgtggctcaaggagcttcggcttggatggaagacgaaaccgacctaagggggaaaagactacttagtccttgataacttgtattataactaagagtaaatgtcaggggtatgaatgtaatcttatccaggcta

SEQ ID NO: 95336 - DNA, 1411 bp, Zea Mays
cccgtttggccatctctacccacaccaccgcaccgagagagcacagacgcgccgagccgccaaccagggccacgcaaaacagcagtacatcacccgccggctgccaccaatgtcgtccgccgcggtgccagaccagtcgccgcggcccgtgcgcttcggtatcctgggctgcgccgccatcgcgcgaaagctggcacgcgccatgctgctcgcgcccggcgcagccgtcgccgccgtcgggagccgctccgaagtgaaggcccgcctcttcgccgccgacaacggcctcgacgtcgccaccacccgcctccacggctcgtacgatgcgctcctcgacgacccggacatcgacgccgtctacatgccgctccccaccagcctccacgtgcgctgggctaccgcagccgccgcacgtggcaagcacgtgctcctagagaagcccacggcgctgtgcgccgccgacctcgacaccatcctcgcggcttgcgacaccgcgggggtccagttcatggactccaccatgtggatgcaccacccgcgcaccgccaagatgcgggagaccgtcgacaacaaggacgccatcggggacatcagaacgattaacagtgtgttcagctttcgagcaaacgaagatttcctccagaatgatatcagagtaaagccaggtcttgatgccctgggtgctcttggtgatgctgggtggtactgcatccgtgcaatcctgtgggctgttgactacgagttgcccaagactgtgatcgcactgcgtgaccctgtaaagaaccaagctggagtgcttcttgcctgcggcgcgacattgtactggtcggacggcaagactgccaccttcagctgctctttcctcaccaatctcaccatggacatcaccttagttggcacaaacggaactgtctatgtcactgactttgtcatcccatacgaagagaagtcggcggagttcccggtggcttcgaagtcgaacttcgctgagctccacgttgggtgggatcctctgccaagcaagcacgtcgtggcaacagacctgccacaggaggcccttatggtccaggaattcgcgaggcttgtgcagaacatccgggatgctgggggcaagcctgagggcaagtggccggccatcaccaggaagacgcagctggttttggatgctgtgaaagcctccattgacaaagggtctgcgccagttgaggtggctagctaaatgcaacaaacgagtcgcttccgattctgaaggttttagctttagtttttacaccatggcgtggtttgtgcttgcttgatatatttacacatgctaaacttctgtattgtacatgaagtcagtaaaccgctaattctggtaatttgagaaggtttcgtcaggctgaaacgtataattcggatggtattttta

SEQ ID NO: 95337 - DNA, 980 bp, Zea Mays
gtagtaaactattattagcctttctatttatagtggctgagagacgggcggacattctcgtaccacgttcaaaacggcaagtcgatcgatctgaaaccacagatcgatcgacgaccagcagaagacgacgtacgtgaaaccgcgagacagtgcgaggacgactggggtgtggcggtgcgatccatcgacaaggccatgggacaacggcgctttgaggacgaacgcgcagctctggcgactgtggcaagcttgctgctcatcctaacgacagcccaagctgctgctgctgctgcttctggacgccatctgtctttgcccacgcagaaggcggcggcggcgcgcatgaacgacaccagtagtagtgacatgcaggtcatcacacccgcgccgctcgctatctcgacggcggctcgaatggggccggacgggtgctccggggaggacgtggcggtgtaccagagcagcgccaaccctctgcccagcggcatcccggcctacaccgtgcgcatcatcaacgtctgcagcggggggtgcaccgtctacgacgtccacgtctcctgcggcgacttcgcgtccacggagctggtcgacccggccaagttccagcgcgtcggcttcaacgactgcgtcgtcaagggcggtggcgcgctcgagcccagcgagaccgtctccttccagtactccaactccttctcgtaccacctcagcgttgcgtccgtcgcttgccgttagataactgctggtgagccagtgccgttaaataactgaagccgtcggcccgtgatgatatatatataacacctggagtagctagctagttccacgtacgtgttggtgttgtgttgagtagtctacgtatgtgtacttcgatctgcattgtgtttgtgtgtgtctaactatttctacggtcgttgttgtcgctacacgtttttacgtctaatactatattctggtgaataaattgaagttattactcggtc

SEQ ID NO: 95338 - DNA, 526 bp, Zea Mays
gtagtaaactattattagcctttctatttatagtggctgagagacgggcggacattctcgtaccacgttcaaaacggcaagtcgatcgatctgaaaccacagatcgatcgacgaccagcagaagacgacgtacgtgaaaccgcgagacagtgcgaggacgactggggtgtggcggtgcgatccatcgacaaggccatgggacaacggcgctttgaggacgaacgcgcagctctggcgactgtggcaagcttgctgctcatcctaacgacagcccaagaaggcggcggcggcgcgcatgaacgacaccagtagtagtgacatgcaggtcatcacacccgcgccgctcgctatctcgacggcggctcgaatggggccggacgggtgctccggggaggacgtggcggtgtaccagagcagcgccaaccctctgcccagcggcatcccggcctacaccgtgcgcatcatcaacgtctgcagcggggggtgcaccgtctacgacgtccacgtctcctgcggcgacttcgcg

SEQ ID NO: 95339 - DNA, 1737 bp, Zea Mays
tttagttaattagttcaattaaacagcaatatgtaaatagcacggttcttgataatcacattacaatacatatatatgtatataatacatcagacttgagagcacacgacttccatgactggtcgacaaacactgatctatatgtagtttctgcgctgatactgatgggtggtggcgatcaagacgcaaacatgtctaggggttaactcctaacacgcagctttccaaaattggagccccggtgatggtgagactaagacacactcactaccttgcaagaaaccaaaccctaggctaaggtggaggcacgaacgaaccgacgatcgagaagaagcaaactttagcgaagaccacacagacagacaaagataccatcatccatgcaaacaacgcgtgacgtgacgcgtcggcggcaggacggatcaggcggtgcgggggatggctgcggcgacgagcggcgtcttcatctccagggagagcttgaggacctcgtcgaggcaaacggccgccgcgccgtcaggcagggcccactggaaggcgtgcacgaggcgggcaacccagaggcccacggtggtgaggcccaggttcttgccggggcagacgcgacgcccggcgccgaacggggccaggcggaggtcgacgccgcggacgtccacgtcggcgccgccctcggagggcaggaaccgctccggcgcgaacgcgtccgggtcggcccacacggcggcatcgtgggttatggcccacatattcaccatcgccgtggtgccagccgggaccaccatgccgttgcagagtggcacgtcggcggtggcgaggcgagcccagctcagcagcgggccaggcgggtgggcgcgcagcgtctccttcacaaccgcctgcaggtacggcatgcgcgccacgtcggcgtcggtggggcaacctccggcaccgacagccgcgtcgacctcggcgcgcaccctcgcctgcaccgccgggtggcgcaccagctccgccatgcaccactcggtcagaagcgccgtcgtgtccgtaccgcggaagaccatctcctgcaaaaacaaattatatgcatgtacagtatgtttttttcagcgacagagctttgttcttttttttcccttccgggaacaaccgacagcccgacacaaaactgtagaaccgacaggtatgcgcagttgagaactgagaagtatgcgcagttaaacaagctaggaaagcgatcgatttgaactttacccagaggatggcgaccatgtcgtcgtcgccgagcttctcgtcaccctcgagggagaggagcacgtcgacgaagtcagcattgtcgttgagggcggcggagttttggcggcggcgccggtgctcgtcgatgacgccacggacgaaggtctggacgcgcggcacgagcgcggcgcaccggcgggtgacgttgcttgggtcgtacaggtgggcgagccaggggaggtggtcggaccagttgaaggcgccgaggagctcgaacccctcgcgcaccatgctcttgagatgctcggcctccgcggcgccggcgcctgatgtgacgtcgtaccgcgtgccgaagacgctgcccatgatgttgttgagagcggcggcctggaggtgcgggcggagggcgacggcgccagaggccgactgttcggcggcgatggagcggagcatggacgagttgttctggctagctgcttctagtagctgctacggtgctacctaggccttgagatgagtgag

SEQ ID NO: 95340 - DNA, 1808 bp, Zea Mays
gtgcaatcgccctatataaacaaccccaagatccatggtggtggtcgtccgcccatagccgtaggcccgtaggtacattagctagaagctttagtagcggcgatgggcagcctaccgctcgacgcgtcactgcggccactggaccccgaggccttcgccggcgattcacgcgccatcgtggacttcctcgccgagtactaccgtgacgtcgataagtaccctgtgagggcggccgacctcgagcctggcaggctacggaagctgctccccgaggctgcgccagagcacggtgagccgatggaggacatactggaggacgtgcggcgggacatcctgccgggtctgacccactggcagagccccagcttcttcgcctacttccccatgaacggcagcgccgctgggttcgcgggggagatgttgtcggccggcctgaacgtggcgccgttcgtgtgggtggcgtcgcccgccgcagcggagctcgagagcgtggtggtggactggatgggtacgctgctcgggctgccgcagcggttactcttctcgggcggcggcggcggcgtgctacaggggagcacgtgcgaggccgtggtgtgcacgctcgccgcggcgcgggaccgcgcgctggctaggctggggcacgagagcatcgtgaagctggtggtctacgcctcggaccagacgcacgccaccttccagaagggcgcgcggctggtgggcatcccgccgtccaacttccgcgtcatccggacgacgtcggcctccgggtacggcctgacggccgacgacgtccgcgccgcggtcgatcgcgacgtcgcacgcggcctggtgccgctgtacctctgcgccacggtgggcaccacggggctcggcgcggtcgaccccgtgcgcgagctcggagaggaggcgcggcgacacggcatgtggctgcacgtggacgcggcgtacgccggcagcgcggccatctgccctgagttccagggcactctcgatggcgccgagctcgccgactcggtgagcatgaacccgcacaagtggttcctcaccaacgcggactgctgctgtctgtgggtggcaagcccaggtgccctgacctccgcgctgtccaccgacccggagtacctcaagaacgtcggcacggacggcacggggaagccggccgccatagactacaaggactggcagatctccctgtcacgccggttccgcgccatcaagctctgggtggtgctgcggcgctacggtgccgtcggcctgcgcgcgcacatccgccgacacgtcaccacagcaaagtggttcgagcggacagtggcggcggacgaacgcttcgaggttgtggtgccgaggaagttctcgctggtatgtttccgcctccgggagaggttcgcaggggacgacgcggcggacgagttgaaccgggagctcctcacggcggtgaacgcgagcgggcgggcgttcgtgacgcacttcgtggtggacggcaagttcgtgatccgcctcgcggtcggcggtgctatgacggagatgcggcatgtcatggacgtgtgggaactgctgcaggccagcgccgaccacgttttacgccgctactcctactagtgtattctgctgcacgtatacgtacacttttacgcgcacatgtaccaaaaaaataaagtatacacctactctccttgtgcttggtttagcttcaccactctgcacgccatgtactttcgcacgctgaggaccggaaatagcaagtgatttcatatcccattgaagattctcttcaatttctttgttaccaagccagccaaatgttttat

SEQ ID NO: 95341 - DNA, 1682 bp, Zea Mays
gtgatctcatgtagtttgaaacacatcgacaattaattttagtggggagtttaaaacctagttttcttaattcgttattttcttgattcgctgtcatgggtcgtgcaaacaaaaaaagaaaaaaaggaaataaaaatagaaaacacaaggacacaagctacgcacgcacgccacccccgccaacaggcaagcagagccgccgagtggccgctcagcctgggcaacgcctgctggccaatcccggttgccgtccacgcgagccaatggagtgccagcgacgtttcgttaaatcctagccagccactcctctgcccacacaatcccctctctcccacacggcggcaggcagcgactccatctccctgactcctcggacatcgaagctccatggccgcccagctccttccctagccgagctatggcttctcctatggcgccaccctttccctcggcaccttcccccagcaggattcctcctcccccatggaaatcagcagcgcgccgcgactctctctgctcgtgcgtgggatttgccgagcaggaggtccccatggccggcgcgcgctcttgctgtgtctctccctacgagctcgggcttctccctctcgcccccctgcctctgctcctccatggtggagtgctggcgagggcaccatctcttggcgctaccctgctccatccaatcccagctctccattgatggccaatgcctttcctgctcgtccatggagatctcgtcggcggctgactgcctcgcttcatggtgcccctcctcgctcctgctccctatggcgcgctgtagcagtgccgagctagtccgatcctccatctcatcgatgcctcccctgctgatatccccatggtcacttgcccctgtgtttcctcccatggcgcctcccttctctgtttcttcccctaacctgcgcacggcaagcccaggaccgagcgtccctgcctcccctcggacctgtgggcactagctcaggctccttttttcccaccatctccctcagccagtagcagtcgacctcctccccctgctgttcctgcagtccaagttctccccacgccgaccttcttctccggcaagtctggccgctgccatccctcggcatcgggctggggcacacgccgagctcctcctcacgtgctccttcgctggtctgcgtcctcgctcgagcagcagcagcagcgacgcccttcgctgtgtcgcgctcgtcagaacgggcctcacgtcgtcgatctgcgcagagtctacgcgtcatcgtcgaaacccgcggtgagctcctcgctgtcccatgttccttgaatttataaaatgactgaactaataagctgtgaaatgattgtgtatgtcgtttaatcgcagcccttgtcgacgtcacgcctcgcgcatcgctcgtcggcaaagagcccaaactaatggcatgcatgcgcgacgcgagttcgccacgttgttcgccttgaatgattcgcgatttgttttatttacgtattcggtcgatgatgtgcctgcgtgtttatatgtgtgtgaaaatatatttgtatgaatggacgcgtgtagaaaagaaaatgaagtagaaaagaactcggatatttttattttgataggaaaatatgcgatgcgattgtttgatgcgaaaaactaagttacaaaatgcggattatgttttgggaaatgc

SEQ ID NO: 95342 - DNA, 1595 bp, Zea Mays
aattcagatcagccgtgacccgctatttcgaattcgaaaaggccaccaggtgtttccttttaactccgccgccgtcgccgccgctgccgcatcttcgccagttttccccaagccacgaccatgccctccccctcccgctcgccaacgacgcctccggtcgcctcggagtggagctgcgtgcggtgcacgttgctcaaccctgaccactccgattcctgcgtggcgtgcgaggcctcgcgcccagtggaggttgacatcgacagccccgtcgtcgtgggcgccgccctcgcgttagcctcgcccaagcggagccggaggaagaatgaacgcagtgcctctcctccaccccagcggtttgggaggaagagggagcacgatgcatcgccggaggtggtcgaactctgcgatattgcgggaaaggggcccgccaccaagaaaggaaatcttgagatttgtttggataagaagaccttcaaaatcatgacatacaatgtctggttccgggaggatttggaattgagaagtaggatggatgctctcggggatcttataaagcagcactgcccagacttcatatgcttccaggaggttacaccatacatatatatgcttatgcaaaaatctgactggtggcaacaatacacatgcttgttgtcacatgagaatgctattcagatgccgtattactgcatgcagttgagcaaaatgccgacgaagccatctgactgcatcccattttcgaattcaacaatgggaagagaactatgcatcgcaagtgttaggacaggagagatcacaaagttgattttggccacaacccacctcgagagcccatgccctgcacctcccaagtgggatcagatgtatagcaaagaacgtgtggctcaggcaaagcaatccctggaaattctgggaggcttccccaatgccatactctgtggggacatgaactgggacgacaagggagacggccctttccctctgcaggatgggtggactgatgcttgggttgagctgaaacctggagaggatggctggacctacgacaccaaggccaatggcatgctgtcaggcaaccgcaagctgcagaagcgattggaccggtttgtgtgcaagctagcagacttcaagatggacagcattgagatgatcgggaaggaggcaatacctggtgtctcctacttcaaggagaagaagattcggaaagagaaccaaaggattgaactgcctgtctttccaagtgaccactttgggcttgttttgaccatcacccagcaaaaggatgacaacgtctgaacaaccgttacactgtccacattttagtgattgcaggacatttcatgttcttttgcgatttaggaatatagagcggttccactgtccacattttagtgattgcctctggattttgtaaatttggtggaggcatcagtttgctaggacgtgcaaatggtggtattattaccagatggctacttgttgatacctgatgcttagtttcttatcaaactttgggttggctaaaaaacatgccctctcgatgtcttactattatggccacacggaaagccagtaaaaacacctctcattaagtc

SEQ ID NO: 95343 - DNA, 2601 bp, Zea Mays
gcaaaagattatgggagatgcatagcagcaaaggtccctgagattgaacataatatgtgttccaaggagtttctagcactcagagcatgcatgcagactgtggtaatttcctgcgccattaaacaaatatataggcttgaattacttaggtgcatatacttatgtgtccaatttgtatgtaaggggccattatcctcagcactggatgaccttgaatcctaaattaatctcctgaaaatgttgggcaatcagatacaagggggcttgggcacatctggggcactgtctcatgcttatgttcagcatcctccgctgcgatgtgacataccagacactcagggtctgttctatgatgatgcaaataagttccttatagctccaactgctgatcggatattgtactggaaaacaattctacctactccatctggacctccaaactctgatccagttaatgaaggacctgtcttgtcagttcgatattcgctggatcataaagttattgggattcaacgatccagacatgaaattgagtttagaaatagggaaacaggggagacttgtagcaaaaagtgcagagctgattcagaaactgtacttggctttttctggacagattgcccaacatgtgatgttatacttgtaaaaacaagtggtcttgatcttcttgcctacgagcctcagccccatgcttttcacttggtggaatcgaagaagttcaatgtgagctggtatctttacacacatgaaagtaggctgattctacttgcttctggaatgcaatgcacgatgtttactggctatcagttttctgctggtgggattgtcaaaataccgaagtttgagatgatgatgtctaaaagtgaagcaaacaacaagcctgttctagctgcagatgatgtttacattgtaacagtctatggtaggatttattgcttgcagcttgacagagttagtatgtcattgaatctatatcgcttttaccgtgatgctgttgtacaacagtgtactctgccaacatactcaagcagaattgcagttagtgccgttgacaacataattatggttcaccaaatagatgcaaaagtagtcatgctttacgatgtgtccctggattcttatgccccagtttctgcaccacttccactgctattgagaggactgcccatcaatagtagacaagtatctcagactgcggatagccagtctagtgcatacggtggaaccatctatggagaaggttggaacttcctcattccagacctcatctgtgatgctgagaatgggctcttatggaagctccatttagatctggcggctattgctgctagtagttctgatgctccttcaattttggaattccttcagagacgaaagtctgacccaagcatggttaagactctatgcctagctatagttcggacaatcatcctggaaaggaggtcagtgcccacagttgctaaggcgatggatgttgtccttgattcctacacgcgtttgatgaaaatgggaggggcttttcctggggttaggcgaatacatgagcaaaatcagcagtcaggtagtcagcctattgatggctcccatgtggtttctcaggaatccagtcctggaacaacagttagtcctgctgtgaacccagaccacggaagtgaggctgtggatatatatgtgcagtcaaatccaggagttgagcatacaatagacaggggattactaaatataaacatatcttctgattctgtggacaatacatctgatgctgtcgacaaacgacagcaagctgtaggcgaagctagccgaccattgtcttcaggcacaatgacgcaacatggacaacatgctggaaccgtggcaatttctccaattgagatgttccagtctgtctttacacttgttgaagatgaaatgatgggtgatcctgcatatcttattgctgtcatcatagagtttctacggagtgtctcaaaggctgggcttaaggctcctcacaacctttatgtgatgacggcgacactactagctcgtagcaaccgttacgctgaaatagcattgtttgtgtcaaacaagattcttgagccgtgtaaagaactggcaatgcaacttatggagctgggtctgcagcacccgccaacgaggaagctgggcatggacatgctgagggagcgaggcctgcatcacgactacgtgactgcgatgctgcaagatgggtactacttggaggccctgcgctatgccagaaaatacaaggtgatcaccgtgcagcctgccctatttctggagaaagccctggcgaagaacagcgcccacaacctggctgcagtgctgagcttcttctgcgagttcactccgagcttcaaggccacatcggactttgtcagataccggcatattctgtctgaaatggtttgaacagctttccgttgtgcaaacttgttgtcccgaaatgacttggcacgtcctctgtaacaagcaacgtcacctcggagggtacttttatttaattcttttggtccctcttgcagaaaataatattttattgttgtgaataaaaaaacgttgcaattaccgatgaaaaacaagtctggcttgaggctaaga

SEQ ID NO: 95344 - DNA, 1987 bp, Zea Mays
ccaagagttggattcccttcagcttggtaccacaatcatatttgcaggtgtgacttggttttctcgctttttttactcctgacatttattcagattgactacataatcgcagcaagaatatttctcaagttatctttattcaagtattgaacatctgaacagaaaccactgtttttttgttttagttgtgtgctgagattttaaactttccttcttttcagttttctgctggtgggattgtcaaaataccgaagtttgagatgatgatgtctaaaagtgaagcaaacaacaagcctgttctagctgcagatgatgtttacattgtaacagtctatggtaggatttattgcttgcagcttgacagagttagtatgtcattgaatctatatcgcttttaccgtgatgctgttgtacaacagtgtactctgccaacatactcaagcagaattgcagttagtgccgttgacaacataattatggttcaccaaatagatgcaaaagtagtcatgctttacgatgtgtccctggattcttatgccccagtttctgcaccacttccactgctattgagaggactgcccatcaatagtagacaagtatctcagactgcggatagccagtctagtgcatacggtggaaccatctatggagaaggttggaacttcctcattccagacctcatctgtgatgctgagaatgggctcttatggaagctccatttagatctggcggctattgctgctagtagttctgatgctccttcaattttggaattccttcagagacgaaagtctgacccaagcatggttaagactctatgcctagctatagttcggacaatcatcctggaaaggaggtcagtgcccacagttgctaaggcgatggatgttgtccttgattcctacacgcgtttgatgaaaatgggaggggcttttcctggggttaggcgaatacatgagcaaaatcagcagtcaggtagtcagcctattgatggctcccatgtggtttctcaggaatccagtcctggaacaacagttagtcctgctgtgaacccagaccacggaagtgaggctgtggatatatatgtgcagtcaaatccaggagttgagcatacaatagacaggggattactaaatataaacatatcttctgattctgtggacaatacatctgatgctgtcgacaaacgacagcaagctgtaggcgaagctagccgaccattgtcttcaggcacaatgacgcaacatggacaacatgctggaaccgtggcaatttctccaattgagatgttccagtctgtctttacacttgttgaagatgaaatgatgggtgatcctgcatatcttattgctgtcatcatagagtttctacggagtgtctcaaaggctgggcttaaggctcctcacaacctttatgtgatgacggcgacactactagctcgtagcaaccgttacgctgaaatagcattgtttgtgtcaaacaagattcttgagccgtgtaaagaactggcaatgcaacttatggagctgggtctgcagcacccgccaacgaggaagctgggcatggacatgctgagggagcgaggcctgcatcacgactacgtgactgcgatgctgcaagatgggtactacttggaggccctgcgctatgccagaaaatacaaggtgatcaccgtgcagcctgccctatttctggagaaagccctggcgaagaacagcgcccacaacctggctgcagtgctgagcttcttctgcgagttcactccgagcttcaaggccacatcggactttgtcagataccggcatattctgtctgaaatggtttgaacagctttccgttgtgcaaacttgttgtcccgaaatgacttggcacgtcctctgtaacaagcaacgtcacctcggagggtacttttatttaattcttttggtccctcttgcagaaaataatattttattgttgtgaataaaaaaacgttgcaattaccgat

SEQ ID NO: 95345 - DNA, 2702 bp, Zea Mays
aggcaaaagattatgggagatgcatagcagcaaaggtccctgagattgaacataatatgtgttccaaggagtttctagcactcagagcatgcatgcagactgtggttaagaacaaggcttgaggctccatatttataggaagtttgatactaatctcttttggtaattgctgcggatttttgatccttttctatttttcagtcatcttaaaaagtagaacctcattttcttggctaaacaatcagtagagcctaagcacgcaagagacaaagaaaatgttgggcaatcagatacaagggggcttgggcacatctggggcactgtctcatgcttatgttcagcatcctccgctgcgatgtgacataccagacactcagggtctgttctatgatgatgcaaataagttccttatagctccaactgctgatcggatattgtactggaaaacaattctacctactccatctggacctccaaactctgatccagttaatgaaggacctgtcttgtcagttcgatattcgctggatcataaagttattgggattcaacgatccagacatgaaattgagtttagaaatagggaaacaggggagacttgtagcaaaaagtgcagagctgattcagaaactgtacttggctttttctggacagattgcccaacatgtgatgttatacttgtaaaaacaagtggtcttgatcttcttgcctacgagcctcagccccatgcttttcacttggtggaatcgaagaagttcaatgtgagctggtatctttacacacatgaaagtaggctgattctacttgcttctggaatgcaatgcacgatgtttactggctatcagttttctgctggtgggattgtcaaaataccgaagtttgagatgatgatgtctaaaagtgaagcaaacaacaagcctgttctagctgcagatgatgtttacattgtaacagtctatggtaggatttattgcttgcagcttgacagagttagtatgtcattgaatctatatcgcttttaccgtgatgctgttgtacaacagtgtactctgccaacatactcaagcagaattgcagttagtgccgttgacaacataattatggttcaccaaatagatgcaaaagtagtcatgctttacgatgtgtccctggattcttatgccccagtttctgcaccacttccactgctattgagaggactgcccatcaatagtagacaagtatctcagactgcggatagccagtctagtgcatacggtggaaccatctatggagaaggttggaacttcctcattccagacctcatctgtgatgctgagaatgggctcttatggaagctccatttagatctggcggtaagaagttgctaatggtcaattttttttgtgtcacacctctttcattgtgaatgcatttttgctctaacatgcttatcttgaattacaggctattgctgctagtagttctgatgctccttcaattttggaattccttcagagacgaaagtctgacccaagcatggttaagactctatgcctagctatagttcggacaatcatcctggaaaggaggtcagtgcccacagttgctaaggcgatggatgttgtccttgattcctacacgcgtttgatgaaaatgggaggggcttttcctggggttaggcgaatacatgagcaaaatcagcagtcaggtagtcagcctattgatggctcccatgtggtttctcaggaatccagtcctggaacaacagttagtcctgctgtgaacccagaccacggaagtgaggctgtggatatatatgtgcagtcaaatccaggagttgagcatacaatagacaggggattactaaatataaacatatcttctgattctgtggacaatacatctgatgctgtcgacaaacgacagcaagctgtaggcgaagctagccgaccattgtcttcaggcacaatgacgcaacatggacaacatgctggaaccgtggcaatttctccaattgagatgttccagtctgtctttacacttgttgaagatgaaatgatgggtgatcctgcatatcttattgctgtcatcatagagtttctacggagtgtctcaaaggctgggcttaaggctcctcacaacctttatgtgatgacggcgacactactagctcgtagcaaccgttacgctgaaatagcattgtttgtgtcaaacaagattcttgagccgtgtaaagaactggcaatgcaacttatggagctgggtctgcagcacccgccaacgaggaagctgggcatggacatgctgagggagcgaggcctgcatcacgactacgtgactgcgatgctgcaagatgggtactacttggaggccctgcgctatgccagaaaatacaaggtgatcaccgtgcagcctgccctatttctggagaaagccctggcgaagaacagcgcccacaacctggctgcagtgctgagcttcttctgcgagttcactccgagcttcaaggccacatcggactttgtcagataccggcatattctgtctgaaatggtttgaacagctttccgttgtgcaaacttgttgtcccgaaatgacttggcacgtcctctgtaacaagcaacgtcacctcggagggtacttttatttaattcttttggtccctcttgcagaaaataatattttattgttgtgaataaaaaaacgttgcaattaccgat

SEQ ID NO: 95346 - DNA, 105 bp, Zea Mays
atttaattcttattatgataaatttagatggcccagttagcattctctatggtataatttatcaggctgtaaactttaacatctttcttgtcgtaacacaatacc

SEQ ID NO: 95347 - DNA, 132 bp, Zea Mays
atggaggtgagggcgccagggaggagcggcggacgtggggagctcggccatgagaacgagcagagaaggaacaagaatggcttggacttgggagatgaggccgacagcacatcgtggaaggataagggatag

SEQ ID NO: 95348 - DNA, 478 bp, Zea Mays
cagcggaaataaattatttattacaaaatggttacaagttacaacatttacaagttatagcaagattacaatatatatcatcggagttggttacaaagaaattgattcaaaagattacaatttgaatgtataaaacatttataagttttaaaatacatgctagcttaagtgacaatcctcaataaagaagctaaagatgggatatacttatataagaaggccgagcccaccggcacttagcagcatccacaacagaacaaaattataacctgaaaaacaacagggaataaaaccctgagtacgcaattactcagcaagacttacccgactaaagaaaagactctcaagggtatgctggtttattgggaatcatggtaaggctcatcaaatttcaaatactcgtttttgcagaaaagcatactattagtggatccttatgccaaaattttacttcacaagttaagtattttcctgaatc

SEQ ID NO: 95349 - DNA, 107 bp, Zea Mays
tgtatttatataggctggaaggtgggtagttacatgacaaatctaatctggtacttatctgttacaattctatcatatctgttagaaactctaacttatctctttta

SEQ ID NO: 95350 - DNA, 1282 bp, Zea Mays
ccccgactcacgcgcgcccgccattgctgtcccggccacttcgctttctagctagctctcttgtcccttccatcactagctagcccgcctatatcatcattgccctgcgccgcacgctgctgtgctcttctcgactacgcgccaacaatggagaggtgggcgccgccgtcggtggtgcgggaaaagccgaggaggcggcctggccagccgtccttctcgtcgacgctgctggacgccatctgcgactccttggacgagcaggccggcggccatggagcgacggcagcaccaacgcgtgggagcgccaagaagcagcaacaggcgcccctgcattactactactactacaagccctccttggcggccagcaaccgcgcggcgcgcgcggacgactgcttgtccggccgtgggtacttctcgtcgtccgaggtcgagtgctccctccgccgcctccgccccatccgcacctctggcggcgccgggccggcctcggtggctcccgaggagaagcaacagctggcaccgcctggtgcagcgatgagggcgcggaagccgttcgccacccccgccagcgacagcggcaactgccgcaggccggcctctcccggcgcgcggctcgccagtttgctcagcgcaatcttctccggcaagcggcagcacccggctccggcggacgacgagccggcgtgctcgacggctccatccagcgtgcgcccctgcctcgctaagacactgccgtcggcgcgggcgcgggtgacccggaggcagagccggagcaggaccgtgcgtttcttggacatcgaaggcgatgttgctgtggccgcagcagccgccggttgcatgagattcccggtggtcgaagtgaaggacagcggtggcagcgaggagagcagcgacgcaagctccgacctgttcgaactggagagcctcgcagccctcgctccggtgaacggcatctccggttgccgtagaactttcgaaaacgagcttccggtgtacggcgacgattggaactgggcttgggcacgacattgcagtcgtccgtcgccgccgtttgggtacgtcagccacggtcggagttagggatggcaatcgggcctcggagttgcagaagcttgtttgatttcaaataggtagaggggcgaacatgtaaagctgtctttcttccgttcgttatttttttgtggcattttgttccccttttcagggcttctaaattgccccggaaataaatgtatcggcttattatatcttgtcatagtatccaaaacggtaatatcat

SEQ ID NO: 95351 - DNA, 2696 bp, Zea Mays
aaccctcactaaagcaccgcagaagggcccctacctgctttgctattgctacccagccgccattaatatcactaccaccagaccgcctcactttgaatctcactcccctccactcacacgctccatccaatggagctcactctcctccccttggtcctcctcctcgcactcctcgcaagcccctcgcttccccatgccattggcgacggcggcaacacgacgacgtacatcgtgttcatggatccggcgcgaatgccgtctgtgcaccggacaccggcgcactggcatgcggcgcacctcgagtccctgtccatcgacccgggtcgccacttgctgtactcctactccgccgccgcgcacggattcgcggcggcgctgctaccgggccatttgcccctgctccgcagcagccccgaggtgctccaggttgtgccggacgagatgttccagctccacacgacgcgctccccagagttcttgggccttctcacgccggcctaccagcctgccacgggcaatctggaggcggccacgcacgacgtggtgataggggttcttgacaccggcgtatggccagagtcgccgagcttcgcgggcggcaacctgccgccaccgcccgctcgctggaagggggtgtgcgaggctggcgtggatttcccgccgagcttgtgcgggaggaagctggtgggcgcgcgcagcttctcgcgcggcctccgtgcggcaaacggcggcgcaataggcgtggggaagaggacgttcaggtcggcccgggacagggacgggcacggcacgcacacggcgaccacggcggccggcgcggtggtggcgaacgcaagcctgctcgggtacgccacggggacggcgcgcgggatggcgcccggggcgcgcgtggccgcgtacaaggtgtgctggccggaggggtgcctcgggtccgacatcctggccggcattgacgccgctgttgctgatggggtgggcgtgctgtcgctgtccctcggcggcggctcagcgccgtacttccgggacaccgtagcggtgggcgcctttggtgcggcggcggccggagtgttcgtctcttgctccgccgggaactccggcccatccggatccaccgtctcaaactccgctccgtgggtcgccaccgtcggcgccgggacactggaccgcgacttcccggcatacgtgatgctccccacgggtgcgcgcctggccggcgtgtccctctacgcggggccttctccctccccacgccccgccatgctcccgctcctctacggcagcgggcgtgacaacgccagcaagctctgcctctccgggacgctcgacccggccgccgtgcgcggcaaaatagttgtgtgcgaccgcggcgtcaacgcgcgcgtggagaagggcgccgtcgtgaaggcggccggcggcgccggcatgatactggcgaacacggcagccagcggagaggagctcgtggcggacagccacctgctccccgcggtggcggtggggcgcgcggtgggcgacaagatacgggagtacgcggcgcgcggtggcggtaggcccatggcgatgctgagcttcggcggcacggttctgggcgtccggccgtctccggtcgtggcggcgttcagctcccgcggccccaacaccgtggtgccggagatcttgaagccggacatgattgggccgggggtaaacatcctggccgcctggacgggcgtcgctggaccgaccggactcgccaaagacggccgtcggactcgcttcaacatcatctcagggacttcgatgtcatgccctcacatcagcggggtggcggcgctcatgaaggcggcacacccagactggagcccatccgccatcaagtctgcgctgatgaccaccgcctacaccgtggacaacacgaactcctcgctccgggacgcggcggacggctccgtcgccaacgcgttcgcgtacggcgccggccacgtggacccgcagagggcgctttcgccgggcctcgtgtacgacatctccacgcacgactacgccgccttcctctgctccctcaactacagcgccccgcacgtccaagtgatcaccaaggcgtccaacgtctcgtgcggcgccccgaacaagtcccgccccggggacctcaactacccgtccttctcggtggtgttcggccagaagcggaagacgaagccggcggcggccctgcgtttcaggagggagctgaccaacgtcggccccgcggcgtcggtctacgacgtgaaggtggtcggccccgagtccgtcgccgtcacggtgacgccggcgaggctcacgttcaggcaggccggccagaagctcaggtactatgtcacctttgcgtccagggctcggcaaggccacgcgaagccggacttcgggtggatttcctgggtcaacgatgagcacgtcgtccgcagccccgtcgcgtatacgtggaagatgtgatgtgaggttccctgcctgcctaaaatctagctcgatgacgaaggaataggataggttggtgtagtttgctcaccgcttcgcaaagagaatcggcgtgaagctctctatctctctctctcggctgcagtgcagacctgtacttgtttcctatctttcttttcggacatcaagtaaccctgaatctgaatgacgaatccgccgtttggtgtttgccatatgaatctgactggattcctctgctgcct

SEQ ID NO: 95352 - DNA, 1985 bp, Zea Mays
ccctacctgctttgctattgctacccagccgccattaatatcactaccaccagaccgcctcactttgaatctcactcccctccactcacacgctccatccaatggagctcactctcctccccttggtcctcctcctcgcactcctcgcaagcccctcgcttccccatgccattggcgacggcggcaacacgacgacgtacatcgtgttcatggatccggcgcgaatgccgtctgtgcaccggacaccggcgcactggcatgcggcgcacctcgagtccctgtccatcgacccgggtcgccacttgctgtactcctactccgccgccgcgcacggattcgcggcggcgctgctaccgggccatttgcccctgctccgcagcagccccgaggtgctccaggttgtgccggacgagatgttccagctccacacgacgcgctccccagagttcttgggccttctcacgccggcctaccagcctgccacgggcaatctggaggcggccacgcacgacgtggtgataggggttcttgacaccggcgtatggccagagtcgccgagcttcgcgggcggcaacctgccgccaccgcccgctcgctggaagggggtgtgcgaggctggcgtggatttcccgccgagcttgtgcgggaggaagctggtgggcgcgcgcagcttctcgcgcggcctccgtgcggcaaacggcggcgcaataggcgtggggaagaggacgttcaggtcggcccgggacagggacgggcacggcacgcacacggcgaccacggcggccggcgcggtggtggcgaacgcaagcctgctcgggtacgccacggggacggcgcgcgggatggcgcccggggcgcgcgtggccgcgtacaaggtgtgctggccggaggggtgcctcgggtccgacatcctggccggcattgacgccgctgttgctgatggggtgggcgtgctgtcgctgtccctcggcggcggctcagcgccgtacttccgggacaccgtagcggtgggcgcctttggtgcggcggcggccggagtgttcgtctcttgctccgccgggaactccggcccatccggatccaccgtctcaaactccgctccgtgggtcgccaccgtcggcgccgggacactggaccgcgacttcccggcatacgtgatgctccccacgggtgcgcgcctggccggcgtgtccctctacgcggggccttctccctccccacgccccgccatgctcccgctcctctacggcagcgggcgtgacaacgccagcaagctctgcctctccgggacgctcgacccggccgccgtgcgcggcaaaatagttgtgtgcgaccgcggcgtcaacgcgcgcgtggagaagggcgccgtcgtgaaggcggccggcggcgccggcatgatactggcgaacacggcagccagcggagaggagctcgtggcggacagccacctgctccccgcggtggcggtggggcgcgcggtgggcgacaagatacgggagtacgcggcgcgcggtggcggtaggcccatggcgatgctgagcttcggcggcacggttctgggcgtccggccgtctccggtcgtggcggcgttcagctcccgcggccccaacaccgtggtgccggagatcttgaagccggacatgattgggccgggggtaaacatcctggccgcctggacgggcgtcgctggaccgaccggactcgccaaagacggccgtcggactcgcttcaacatcatctcaggtgagtggcggcgcactgtccccaccaaggtcttcagattcaaaaaatttgcactgtcagtaccatgctcttgcagtgttcagattcaaaatttctcgtgttcggtgctcagattcaaattttcacatgttgttgtcatgttgctgctagcctgtctggaattactatactgatttattattactgctcctcctactcctctacgcatagacgattcggtcagtaaaagacataatactggc

SEQ ID NO: 95353 - DNA, 602 bp, Zea Mays
agccactgggcgaggaaatgcagaagtaagccaaagagggatgaacatgtaatggtggcgcaggaggaagaacaggcttatgttcgcacaaattggagatgaacccaaagaggtcgtacatcacctgatggcatggtgcatcctgtagaggagagggtgtttgcggccttggatggcaaaaagaatgactcatatcgatgggtggtggatactggggcctcatatcatatgacgagatctcgggctgcattctccagcattgatggtggaacttttagaaccatcaaatttgttgatgcttcagtggtaaagattgaaggtcgtggcttagttcttcatgagtgtaagaatggggagcatcttacacttgccaatgcgtactatattcctgacttacaaccaatactattagtattggtcaacttaatgaaaagggcttcgatgtgcggatctaggatggcaccatgacgataagagatgagaatgagaagcttctaaccagaaatccccatggtctgagaaggttgtacaagctagagcgtcaaatcgcgtgaccggtgtgcttggcgacatgcgtcgaggaagatgtatggcgttggcat

SEQ ID NO: 95354 - DNA, 249 bp, Zea Mays
tcgccagaaaatgtatcgaaaaacttgttaacgatcaaaataaagatgagctccatgatatgttcatctgtcgtttgttgtaatgttgttacagtaccgcttcaaatcatatacaaatcattcttttcgaatttgttgtcggtaacacgtgaaaggaagatacctaatttacatgagagctcagcatattcatttgttctccatctcattctacaacttgcacggttcctgatgcccacagctcttaat

SEQ ID NO: 95355 - DNA, 303 bp, Zea Mays
atgcatgtccttttgggagctttgacaattcacccatcagtcccgcgtcccggactggaagatgaggaaggccgtgaggacgccgaccgcgccggtgagcgccagcgccagcgtcggcaccggcgcggtcaatcccacattctgaagcacgcctttcccggtggtcagctccacggccaccgctccgacgaagcccagcatcgccccgcggctcagccacacgtccagcccgccaccgcccttggctccctgctcgcacctcacgctcagcagcctcaccctcctgcccgcggggcgtgctga

SEQ ID NO: 95356 - DNA, 1486 bp, Zea Mays
accacacacacccacacaccccgcttcacgttctcaataatggcgccgttcccacgtcgtcttccggccgccgtgccacttctcctcctcctcggcgccgcagtggccagcgccggcgcggaggacaccgatggcggcaactcccgccggcggcactcccgcttgctgttcgcgttcggcaactcgctcaccgacacgggaaacggggccatcttcccggtgactgcaggcgggccattcacccggccgccgtacggggagaccttcttcggtcgtcccagcggccgggcttgcaacggcaggctcgtcctcgacttcctcgtggaggagctgaaggtgccagagccgacgccgtacctggccggcagtacggccgccgactttgcgaagaacggggccaactttgcgctgggtggtgcaacggcgctcgaccaggcgttcttagcaagcaaggggataaagtcgttcgtgcccatctctctcatcaacgagacgagctggttccagaacgtttcgaagctactggacgcgtcacactacggttcataaatactatatataaaagcgactatatatatacaaaatattattgttgagctaaaacctctcgtcttcgtttgacgacgacagatgagcgtaagatcatggcgaagtcgatcttctacgtcggggagatcggtgtcaacgactacttcgccgccctaagcaacaacgactccgtcgacgtcgcggtcagcctggtgccgcacatcatcgacaccatccgttcggccctgaccgtcatgatcgatgccggggcgaggacagtggtgatcacggggatgctaccgatcggctgcgagccgcagcagctggcccagttcgcaggcggcccggccggcgactacgaccctaccaccggctgcatcacgcggttcaaccagctcgccgagcaccacaaccacatgctgaggatgatgctgagggagctgcggaccaagtaccgcaggcgcaggcccctcaccctccactacgccgacatctaccgccccgtgatcgaggccgtcgcgtcccccgcctcgtacggcttcggcgacacgccgctggcagcgtgctgcgggggcggtggcggccccaacaacttcaacttcatcgccttctgcggcacgccggcgtcgaccacgtgcaccgacccgtccaagttcgtctcctgggacgggatccacttcaccgaggctaccaacaggcttctcgctcgtaaaatgcttcaggaactgctaagccgtggagcttacaatgttgcaatctgatttttctatgcccgcgagtcgtatcaacgtgtttcccatagcggatcggacctagcgtggaacctcttgtgtaataaaataataagtgtcatcacattcctcgcctttgacgacgagagaaccggatttcctttttctattatccaacaaaagatacatttaccgttgaactagtatgatgcatggggtttctattt

SEQ ID NO: 95357 - DNA, 1493 bp, Zea Mays
cttgttcagtgcctgcggagtatatgataatatgacaaatctcagcaaacaggaagcatcgctacaatattatatactagatgaggaagcagccagaccacacacacccacacaccccgcttcacgttctcaataatggcgccgttcccacgtcgtcttccggccgccgtgccacttctcctcctcctcggcgccgcagtggccagcgccggcgcggaggacaccgatggcggcaactcccgccggcggcactcccgcttgctgttcgcgttcggcaactcgctcaccgacacgggaaacggggccatcttcccggtgactgcaggcgggccattcacccggccgccgtacggggagaccttcttcggtcgtcccagcggccgggcttgcaacggcaggctcgtcctcgacttcctcgtggaggagctgaaggtgccagagccgacgccgtacctggccggcagtacggccgccgactttgcgaagaacggggccaactttgcgctgggtggtgcaacggcgctcgaccaggcgttcttagcaagcaaggggataaagtcgttcgtgcccatctctctcatcaacgagacgagctggttccagaacgtttcgaagctactggacgcgtcacactacgatgagcgtaagatcatggcgaagtcgatcttctacgtcggggagatcggtgtcaacgactacttcgccgccctaagcaacaacgactccgtcgacgtcgcggtcagcctggtgccgcacatcatcgacaccatccgttcggccctgaccgtcatgatcgatgccggggcgaggacagtggtgatcacggggatgctaccgatcggctgcgagccgcagcagctggcccagttcgcaggcggcccggccggcgactacgaccctaccaccggctgcatcacgcggttcaaccagctcgccgagcaccacaaccacatgctgaggatgatgctgagggagctgcggaccaagtaccgcaggcgcaggcccctcaccctccactacgccgacatctaccgccccgtgatcgaggccgtcgcgtcccccgcctcgtacggcttcggcgacacgccgctggcagcgtgctgcgggggcggtggcggccccaacaacttcaacttcatcgccttctgcggcacgccggcgtcgaccacgtgcaccgacccgtccaagttcgtctcctgggacgggatccacttcaccgaggctaccaacaggcttctcgctcgtaaaatgcttcaggaactgctaagccgtggagcttacaatgttgcaatctgatttttctatgcccgcgagtcgtatcaacgtgtttcccatagcggatcggacctagcgtggaacctcttgtgtaataaaataataagtgtcatcacattcctcgcctttgacgacgagagaaccggatttcctttttctattatccaacaaaagatacatttaccgttgaactagtatgatgcatggggtttctattt

SEQ ID NO: 95358 - DNA, 645 bp, Zea Mays
atgaagtttggcaagaggctcaagaagcaggtggaggagagcctcccggactggagagacaagttcctagcgtacaagcgcctcaagaggctcgtccgcctcgtcccggcctcctcgcccagcaggaggggcggccgcgcagccgatgccgccttcctgcgcctcctccacgccgaggtcgaccggttcaacgccttcttcctggagcgggaggaggacttcgtcatacggcacagggcacgtgcacgtcctgacgtccctcctatcatacggctggccaagatcctcaagaagtacgacaaacgcaccgggcggctgctgcggctgcccttcatcggaaaggtgctccggcagcccttcttcgccacggagctcatctccaggctcgtccgcgactgcgaggccaccatggaggccgtgttcgaggccagcacaggccacgcccgctcgtcggcggggacggcccccgtggcctcagccaggcagggcatcttccggaacaccgtggccgcgctggtgaccatgggcgagctccgcagcgggagttccacgtacggtcacttctcgctgccaccgatggccccgccggagtccgatctcctgcggcgcgtgtgcgtccaggtcgccggtcaagtgtccatctga

SEQ ID NO: 95359 - DNA, 1202 bp, Zea Mays
aaagcccaagccaaaccaaacaatttcacctcacgcacgaaaccgggaagcaagcaaggtcctcccaactcccagcaacccaaggtagcgcgcggcagcagcaagcagctcgacggcgacgatggcggcaacagcggttactactccagtaggcacgggcggcgctgcggcagcgagaagccggttcgcggcggcgtgcggggcgctcagccagtacgtcaaggcggccgaatccgagaggatgcacgcgaggccgcccgcgcctctgcggccgctcccgctcatgccgggcgccgacgtcgacgccagccctgccgacctagacctgcctcaggcggcgccggcgccggcgccggcgcagttgaccatcgtgtacggagggcgtgtgctggtgctcgctgacgtccccgccgacaaggcggcgggcctgcttcgcctcgccgccggcgcagcagcggaacgtgcagaaacagaggcgatcggtgccaagcgccgcgaccatgtctccggctctgcgtctgcgggcgctgacctgccagttgcgaggaaggcgtcgctgcagcggttcatggagaagcgcaaggctcgggtcgccgccgtccgcacggagccgtaccgacggccggacgtcagcgactcctgtcctgacaacctcaagcttgcgctctgattcctgttccgtgtccctacgcactttctataattttgtaggcgaggtataggattataggaagagcagcgaaacatgggtgtaccaagtgaaatccagatctgaacaaagttttctgaaaaacacagttgcacgtgctttctacggcattattttgtaaatctccagctttaaccacaacacaactgtttctcaataaaacagctttttgtagcttcaactataggtgtacattcgggccgtccggcctggcccggcccaagcccgaaaaggcccgtattgtttgaatttcgggccggcccggcccgtttgaatttcgggccatgccgggccgacccatgggcctagccctcggcccacggcccggcccgtaattgattaaacgtgccgggctcatttcgggcggcccgaaattataaaagcccgaaattcattttttggcccgaaattcacattagggcccgaaattcaatttttggcccgaaattcaatttttgtcccaaaattcacattagagccctaaattcaaaaa

SEQ ID NO: 95360 - DNA, 122 bp, Zea Mays
ggattttttctagtccctgctacttctggtcggcccgtgcgtacgatcgatttcaaacagctttctcagtcaaaaaaaaggttcattttgtcttaaaatcattgtatttctacgatttcaaa

SEQ ID NO: 95361 - DNA, 746 bp, Zea Mays
gcgtcgccgcccccgcgcccccgcctatataaaaaatctcgtcccgagtccattcatcacggggaactcctgcaaaactagacacttttacacagcgtggcagggcagcggcaagcagatcgcgagctaaagacaatggcagcagcggggagcgtccagggccacggcgcgcggttcgcggcggcgtgcggcgtgctcagccggtacgtaaaagcagcagcggtggcgactacgacgacggtggagctgcggccggcgggcacggtaggggtactccctctgatgcctggtgcggacctgtccacgcaagaggagcgcgaggcgggggcggggccggggccgtcgccgtcgccgagcgcgcagctgaccatctcgtacggcgggcgggtggtggtgctggacgacgtcccggcggacaaggccgccgaggtggtccggctcgcggccgcgcaaggcgcaccgcgggcgctgcgagcgccgccgaccaaggcggatgatctgcccatggcgaggaaggtgtcgctgcagcagttcatggagaggcgcaagggccgggtcgccacgcgcggttcgccctaccgccgtccggcgtcgttgccggaccatctcacgctcacgctctgatacagcttgttactactattactagctaggtgtgtgtagctgtagcagcataagaacagacgattgtacatggaaaaaaaagaaaacagaaataactctccgatcgagttcacgaagcaaaa

SEQ ID NO: 95362 - DNA, 626 bp, Zea Mays
gaaaacaaaacaaaccgaaagaagaaaggcgacgaggaagagaaggctctccgcgagatctgggggagctcccattctcaagatgcacgacttctgcttcaccatcccctacgggttcgccgtgctggccggcggcgtgctgggctacctccgccgcggcagcaccgcctccctggcggggggcgccggcgccggcgcgctgctcctcctcgcgggcttcgtcagcctgaaggccttcgagaagagacgcaactcctacgtcgccctcgcgctcgagacgctttgtgcattagccttaactttcgttatggggcaaagattcctcgagacttcgaagattatgccagctggtgtcgttgctggcctcagtgctgtgatgtccgcgttttatctgttcaaaattgcaagcggcggcaaccacatcccaccaaagaaagagtaaactggactctaacttgtaaagtatgttcgattgaactcggaagactacgagccactgcgttatctagttgcatggtaacttcaggtactagcatcttgttctccatttgtggtgtggctagagtgtaccatggtttgtgaacattgtaaaagaaataagtatgcggttcacggaaatgaatatg

SEQ ID NO: 95363 - DNA, 1863 bp, Zea Mays
caagcagacgagaagagagaaaaaaactaaaaaaaatggcgccttcattgacagggaaatgacctgacattgtttcagagctagtccgccgtacaagtacaaggatacagccgcaggcccgcagaggaagaggagagcctactctcctgccatggccgcgccgagtccgctcccccgcttcctgatactcctgctcgccgtaacctcctccgcgtttgccgccgccgcggcaaccggggctccggtggtgggggaggactacgtccgtccgccgccggcgcggtgccaccgcaaggcactccttagcctcttcccttggagcaagaaggaggagtccgccgcctcctccgatccgcagcaggtgcacatttctctagctggagaaaagcacatgagaataacatgggttaccaatgataactctgtcccatctgtggtggactatggaactaaagaaagtacatacacaatgaaatctcaaggagaaagcacatcctacagctacttattgtatagttcaggaaaaattcatcatgttgtcatcggacctcttgaagataacactatttattactaccgatgtggagggcagggtccagaattccaatttaagaccccgccctcccaatttcctttgtcattggctgttgttggtgatcttggtcagactagttggacaacatcaaccctgaatcacattaagcagtgtgagcatgatatgcttttactccctggtgatctatcttatgctgattatatgcaacacttgtgggattccttcggcacattggtggagccacttgctagcaaccggccttggatggtgacagaaggcaaccatgagaaggagcacattccattttttgagtcaggatttcaatcttataatgcacgatggaaaatgccttatgaagagagcggatctagatcaaatttgtactactcttttgaagttgctggtgcacacatcataatgctaggttcatacacagattatgatgatagctcagatcagtatgcttggctaaaggctgatcttgccaaggttgatagaaagaggacaccctggctcattgtgttgttgcacgtaccatggtacaatagcaattgggctcatcagggtgaaggcgacagtatgatggcttcaatggagcctttgctgtacgctgctcatgtggatatggtaatagcaggtcatgtccatgcttatgaacgtgcggagcgagtctacaattccagacctgatccttgtggcgctgtccacataactatcggcgacggtgggaaccgtgaaggcttggcccgcaggtaccgtaacccgaagccagcgtggtcggtcttcagggaagcgagctttgggcacggcgagctaaagatcgtgaactccacccatgcccactggacctggcacagaaacgacgacgaagagccggtgagaaccgatgacgtgtggataaactctcttgctggttcagggtgcatccaggagggcagccgtgaccgtgagtcgaggaagatcctgatgtctccttgatgcttagcagtatagcttgggcctgcgatgtactgtgtatataatgcgtgctacttgataatctaacacctagtaaaagttaatgcgtcgtgctgcttgcctgcgtgtatactggagactggtttgatctggcgcgtttgctgctcttgttgtgttgtaccactatggatgtttgtagcaaagtgacatacgacggtgttgtaatggactgaagatgaatagatgatgttccagtaaggagtgttttgccgtgtctaggaagatacatcaaaatataaatcactccctccttatcaaaatacagttttttcttgctttcttttttttct

SEQ ID NO: 95364 - DNA, 898 bp, Zea Mays
accgggcgaactccacacatccacaccggctgtggggacgacaagggagtatgaactaaagtggtccttggccttattaagggacaggttgcaagattcaaccaattattctgtatgagtattgttgctaggaagcatgtgagaaggtaataaggattcaaaccaccttctcagttcatctgtgatatttgagctggcatgtcagtgtcctcttcattcaagtgcggctggataacaaatggattcaaaaaggctatcgttgtcatcagtacatggagattttttgggacaaacatcacaaagtcattcatgctccgagaagtatgagtggagaaacttaatctttcatcaaagtgataaagcaacaagggatcaatgtgatcatgttgcaacccggcacttacctctgcatatgcctcgcagggaagtgtggtttaggattttctccctggttaatctgcggcagttctcccccgcaagggatgatttggtcttccaagattggtgggctaatttggaggccaaggtcccttatgcgctgcgcaaagggattaactcccttgtgatgttggtggcatggtggctttggaagcagcggaataaatgtgtgtttgagggggatgctcctagtggcaaccagattattcagaatatcaaagacgacgttcagaggtggtgtctcgcgggtgccaaggatctgggcaccatctggccttagtttaggggcagctttggctgtcttctagatgaatgtttatttttatttttattttattttatttttttgttatttttttgttgtttctctgtactctggtcttctttagaccattggtatttcttctatcttaatatatctaatgcgcagttctcctgcgcgttttagaaaaaaaaatat

SEQ ID NO: 95365 - DNA, 574 bp, Zea Mays
cagaacgcttaggcccctcctctcttcaggatttagggcgggtgcaatccgccacccggccggggagatttcctctccgacagagggcattggcggttaggcacgagccacacgaagggcatcgacggcaagtcaccaaccttaggcatgacaacgggcattggcggcaaggcgccaaccttcggcacgacgatgagcattggcgacatcgtcacttttggcatgacggggggtactgcagccgacataaggcagcgcggcggtgtttggcaccacatggatctgtggcacgacgcccaccgtgggaactgtcggtatggcgagcatcagtggaagggtggccacgagcacgatcgatggcttagacatgacatgaaggctcgggatagcaacgggagcgacgagggggggcatgagcaagatgccgcatgacgtggcacgtagtgctcccgtcgccgacgagcaagatgagcgccatcgtcacgagcatcgtggcggagaagagagacgaagtgtcacaagtcattgctaacggctaggagaagtgcttcctcaggagtgaggagctacaagg

SEQ ID NO: 95366 - DNA, 583 bp, Zea Mays
atcccaaggcataatttagctactacccctacccccgcgcattggttccgttccatcccaagctaacacaggcatcgtatatatggcgggcgacgacggggcggacgcgtcggagcggctggagagcatcctgacggcggaggcggcggcgtcgccgtgggccgcggccgccatcgagctgcggctgctgacgcggctggcggcgcccgcggtggtgatgtacatgatcaactacctcatgtccatgtccacgcagatcttctcgggccacctcggcaacctggagctcgccgccgcgtcgctcggcaacgccggcgtccagatgttcgcctacggcctaatgctgggcatgggcagcgcggtggagacactgtgcgggcaggcctacggcgcccacaagtacgagatgctgggcatctacctgcagcgctcggccgtgcttctgtgcgtcacgggcgttccgctggccgtcatctacgccttctcggagccaatcctggtgttcctgggtcagtcgccggagatcgcccgcgccgcgtccgtcttcgtgtacggcctcatcccgcagatcttcgcgtacgcc

SEQ ID NO: 95367 - DNA, 2075 bp, Zea Mays
gcctcgacgagcgagtcgaggactcatcctagctagctaagctgtccgacagcgcagcagaccgatacgagtacgacgatgatgagtagcaccggcggcgagagcaagctggagagcccgctgctgggcctgcccgcgccgggctcgtcggccggcagcgggcacagccacggcgaggcggtgagcgggcagctggagagcatcctcagcgacgcctccctgccgtggaggcggcggatgctgtcggcgtccatggtggagatgcggctgctcgtgcgcctggccgcgcccgccgtgctcgtctacatgatcaactacctcatgtccatgtccacgcagatcttctcgggacacctcggcacgctcgagctggccgccgcgtcgctcggcaacaccggcatccaggtcttcgcctatggcctcatgctgggcatggggagcgcggtggagacgctgtgcgggcaggcgtacggcgcgcacaagtacgacatgctgggcatctacttgcagcgctccaccatcctgctgatggccacgggggtgcctctgaccgtgctctacgccttctcccgccccatcctggtcctcctcggggagtcccccgagatcgcctccgccgccgccgtcttcgtgtacggcctcatcccgcagatcttcgcgtacgccgccaacttccccatccagaagttcatgcaggcgcagagcatcatggcccccagcgcgtacatctccgccgccacgctggccgtgcacctcgccctcagctacctcgtcgtgtaccagttcgggctgggcctcctcggcgcgtcgctcatgctcagcgtcagctggtgggtcatcgtcgccgcgcagttcgcctacatcgccaccagccagcggtgccgcctcacctggacgggcttctcgtgggaggccttctcggggctccccggcttcctcaagctgtccctcgcctccgccgtcatgctctgcctcgagacctggtacttccagatactcgtgctcatcgcgggactcctcaaggaccccgagcttgccttggcctcactctctgtctgcatgtcaattacagggtgggtgttcatgatatcagttgggttcaatgcagcagccagcgtaagagtgagcaacgagcttggcgccggcaacccaaagtccgcggcgttctctgtggtggtagtgacgctgctctccttcgtcctgtcggtcataatctccatcgtcatcctgctgtgccgggactacatcagctacatcttcaccgagggcgacgacgtgtcgcgggcggtcgcccagctcagcccgctgctggcggtcaccctcatcctcaacggcatccagcccgtcctctctggggtagctgtggggtgtggatggcaagcgttagtcgcatacgtcaatgtcggctgctactacatcgtcggcatcccccttgggtgcctcctgggattctacttcgacctgggagcagcggtacgtacaggttcttcctcacctcatcctgatgctgtgcgtaatggcgactgcatatatgactgcctgcagggtatctggagcggtatgatcgggggcaccctgatgcagaccatgatcctggtgtgggttacattcaggaccaactggaacaaggaggttgaagaagcgcagaaaagactgaacaaatgggaagacagtaaagcgcctgtccagtgagcccaagaacgaaataaggcttctctgttgccaaaccaagaacgagagacgtgggaaattgatgcaattcaccctgatgcagattcggcaattgatgcaaggttgcaattcagtgtcctgaaatgtctacgaggagaggagaggagatgagatggctggaattttaaatactactcttgcatcacgcaattcaattctgtgttccgttattatatatcgttcactgatgcgacagcatagcagactagtagtcaataataatttttgttggaattgccacgaacccgccaccataaggcattgttcgtttctactgaattggtggatcggaacgatttctaaccagattgtttctctaatttatataaactttgattaggtgg

SEQ ID NO: 95368 - DNA, 2003 bp, Zea Mays
gcctcgacgagcgagtcgaggactcatcctagctagctaagctgtccgacagcgcagcagaccgatacgagtacgacgatgatgagtagcaccggcggcgagagcaagctggagagcccgctgctgggcctgcccgcgccgggctcgtcggccggcagcgggcacagccacggcgaggcggtgagcgggcagctggagagcatcctcagcgacgcctccctgccgtggaggcggcggatgctgtcggcgtccatggtggagatgcggctgctcgtgcgcctggccgcgcccgccgtgctcgtctacatgatcaactacctcatgtccatgtccacgcagatcttctcgggacacctcggcacgctcgagctggccgccgcgtcgctcggcaacaccggcatccaggtcttcgcctatggcctcatgctgggcatggggagcgcggtggagacgctgtgcgggcaggcgtacggcgcgcacaagtacgacatgctgggcatctacttgcagcgctccaccatcctgctgatggccacgggggtgcctctgaccgtgctctacgccttctcccgccccatcctggtcctcctcggggagtcccccgagatcgcctccgccgccgccgtcttcgtgtacggcctcatcccgcagatcttcgcgtacgccgccaacttccccatccagaagttcatgcaggcgcagagcatcatggcccccagcgcgtacatctccgccgccacgctggccgtgcacctcgccctcagctacctcgtcgtgtaccagttcgggctgggcctcctcggcgcgtcgctcatgctcagcgtcagctggtgggtcatcgtcgccgcgcagttcgcctacatcgccaccagccagcggtgccgcctcacctggacgggcttctcgtgggaggccttctcggggctccccggcttcctcaagctgtccctcgcctccgccgtcatgctctgcctcgagacctggtacttccagatactcgtgctcatcgcgggactcctcaaggaccccgagcttgccttggcctcactctctgtctgcatgtcaattacagggtgggtgttcatgatatcagttgggttcaatgcagcagccagcgtaagagtgagcaacgagcttggcgccggcaacccaaagtccgcggcgttctctgtggtggtagtgacgctgctctccttcgtcctgtcggtcataatctccatcgtcatcctgctgtgccgggactacatcagctacatcttcaccgagggcgacgacgtgtcgcgggcggtcgcccagctcagcccgctgctggcggtcaccctcatcctcaacggcatccagcccgtcctctctggggtagctgtggggtgtggatggcaagcgttagtcgcatacgtcaatgtcggctgctactacatcgtcggcatcccccttgggtgcctcctgggattctacttcgacctgggagcagcgggtatctggagcggtatgatcgggggcaccctgatgcagaccatgatcctggtgtgggttacattcaggaccaactggaacaaggaggttgaagaagcgcagaaaagactgaacaaatgggaagacagtaaagcgcctgtccagtgagcccaagaacgaaataaggcttctctgttgccaaaccaagaacgagagacgtgggaaattgatgcaattcaccctgatgcagattcggcaattgatgcaaggttgcaattcagtgtcctgaaatgtctacgaggagaggagaggagatgagatggctggaattttaaatactactcttgcatcacgcaattcaattctgtgttccgttattatatatcgttcactgatgcgacagcatagcagactagtagtcaataataatttttgttggaattgccacgaacccgccaccataaggcattgttcgtttctactgaattggtggatcggaacgatttctaaccagattgtttctctaatttatataaactttgattaggtgg

SEQ ID NO: 95369 - DNA, 2160 bp, Zea Mays
gcctcgacgagcgagtcgaggactcatcctagctagctaagctgtccgacagcgcagcagaccgatacgagtacgacgatgatgagtagcaccggcggcgagagcaagctggagagcccgctgctgggcctgcccgcgccgggctcgtcggccggcagcgggcacagccacggcgaggcggtgagcgggcagctggagagcatcctcagcgacgcctccctgccgtggaggcggcggatgctgtcggcgtccatggtggagatgcggctgctcgtgcgcctggccgcgcccgccgtgctcgtctacatgatcaactacctcatgtccatgtccacgcagatcttctcgggacacctcggcacgctcgagctggccgccgcgtcgctcggcaacaccggcatccaggtcttcgcctatggcctcatgctgggcatggggagcgcggtggagacgctgtgcgggcaggcgtacggcgcgcacaagtacgacatgctgggcatctacttgcagcgctccaccatcctgctgatggccacgggggtgcctctgaccgtgctctacgccttctcccgccccatcctggtcctcctcggggagtcccccgagatcgcctccgccgccgccgtcttcgtgtacggcctcatcccgcagatcttcgcgtacgccgccaacttccccatccagaagttcatgcaggcgcagagcatcatggcccccagcgcgtacatctccgccgccacgctggccgtgcacctcgccctcagctacctcgtcgtgtaccagttcgggctgggcctcctcggcgcgtcgctcatgctcagcgtcagctggtgggtcatcgtcgccgcgcagttcgcctacatcgccaccagccagcggtgccgcctcacctggacgggcttctcgtgggaggccttctcggggctccccggcttcctcaagctgtccctcgcctccgccgtcatgctctgcctcgagacctggtacttccagatactcgtgctcatcgcgggactcctcaaggaccccgagcttgccttggcctcactctctgtctgcatgtcaattacagggtgggtgttcatgatatcagttgggttcaatgcagcagccagcgtaagagtgagcaacgagcttggcgccggcaacccaaagtccgcggcgttctctgtggtggtagtgacgctgctctccttcgtcctgtcggtcataatctccatcgtcatcctgctgtgccgggactacatcagctacatcttcaccgagggcgacgacgtgtcgcgggcggtcgcccagctcagcccgctgctggcggtcaccctcatcctcaacggcatccagcccgtcctctctggtcagcagtctctgcacatatagtctgcagcagacactgcattgctcatcgatggcacgtccattctacagtgtagtagtaaataaatcctgtggatggatataatgcaggggtagctgtggggtgtggatggcaagcgttagtcgcatacgtcaatgtcggctgctactacatcgtcggcatcccccttgggtgcctcctgggattctacttcgacctgggagcagcggtacgtacaggttcttcctcacctcatcctgatgctgtgcgtaatggcgactgcatatatgactgcctgcagggtatctggagcggtatgatcgggggcaccctgatgcagaccatgatcctggtgtgggttacattcaggaccaactggaacaaggaggtacaaactgcaaaagcttaatttgaatttgcctctaaattcactccgaatgtccttggattgcaggttgaagaagcgcagaaaagactgaacaaatgggaagacagtaaagcgcctgtccagtgagcccaagaacgaaataaggcttctctgttgccaaaccaagaacgagagacgtgggaaattgatgcaattcaccctgatgcagattcggcaattgatgcaaggttgcaattcagtgtcctgaaatgtctacgaggagaggagaggagatgagatggctggaattttaaatactactcttgcatcacgcaattcaattctgtgttccgttattatatatcgttcactgatgcgacagcatagcagactagtagtcaataataatttttgttggaattgccacgaacccgccacc

SEQ ID NO: 95370 - DNA, 1503 bp, Zea Mays
atgggcggcgacggggcggacgcgcacggcgcgtcggcgcagctggagagcgtcctgacgtcgtcgtcgtcgtcgttcccgtgggccgcggccgccatcgagctgcggctgctgacgcggctggcggcgccggcggtggtgacgtacatgatcaactacctcatgtccatgtcgacgcagatcttctcgggccacctcggcaacctggagctcgccgccgcctccctcggcaacaccggcgtccagatcttcgcctacggccttatgctgggcatgggcagcgcggtggagacactgtgcgggcaggcctatggcgcccacaagtacgagatgctgggcatctacctgcaacgctcggccgtgctcctgtgcgccacgggagttccactggccgtcatctatgccttctccgagccgatcctggtctttctagggcagtcgccggagatcgcccgcgccgcagccatcttcgtgtacggtctcatcccgcagatcttcgcgtacgccatcaacttcccgatccagaagttcatgcaggcgcagagcatcgtgctcccgagcgcctacatctccaccgcaaccctggcgctgcacgtgctgctcagctgggtcgtcgtctacaaggtcggtctgggcttactgggggcttccctgctgctcagcctcagctggtggctcatcgtcgccgcgcagttcgcgtacatcgtggtgagccccaggtgccgccacacctggaccggcttcagcttccaggccttctcgggcctgtggggcttcctcaagctctccgccgcgtccgcggtcatgctctgtctcgaggcctggtactaccaggtcctggtgctcattgccgggttgctccccaaccctgaacttgcattggatgcgttgtctgtatgcatgactattaatgggttggtgttcatgatctcagtagggttcaatgctgctgccagcgtgagagtgagcaatgagctcggtgccggccacccgaaatctgcctacttctcggtgtgggtagtgactgcgatctctacgataatatctatcatgcttgccattgtgatcctctgcctccgcaactacatcagctacatcttcacggagggtgaggtggtgtcaaacgcggtggcggatctctgcccgttgcttgccatcacgctcatcctcaacggcatccaaccagttctgtcaggtgtcgccgttgggtgtgggtggcaagaattcgtagcctacgtgaacattggctgctactacatagttggtgttcccctcggcgccatcctcgggtttgtcttcaagttcggtgtaaagggcatttggagtggcatgattggaggaactttcatgcagacggctatcttactgtgggccaccttgagaactgattggaacaaagaggtagaggaagcacagaaaaggctacacaaatgggaggatcagaagacgacgacgacggagcccctccttgcgggggtcgtcggcaatggcaatgccaattag

SEQ ID NO: 95371 - DNA, 670 bp, Zea Mays
gaggttcatcgaggtctgctgctcgtagctcccgtcgctccactcaagatccaacaaaagtggagcaactgcgagaagaacttaggcgacatcaggattacttgaagcaacaagttgtgcaacatgaatattatgctacacagattcaacaacagcaaacactcatacaacaactagcacaggcccaagggatacacgtcccggtgccccccaccacctcccgttcattatacttggtcttcacctccacctatacctacatctccatctaccgaacatcagacccctctagctaccttgccgacgcataaacaagaagacaggttagactttgtcgaaaccctcttcactagtggaggtatcgaacatcactcgtcactgtaacccgatagtgatcggcgactgtgagcttccatgttattatgttctgatacttgagacttttattatgactatgtatgagatattgtctcttattagtactagatgatgagataatgtgtcttattatgactatgaatgagacttttgtgatgtaattgatgagactatagatttaaatattgttatgtgattgtgtgtgagatgttttatgtgaaaatatgttgtgatatatagctgttgatatatttgttatgttgtggaatatggtgtaaaataaaaataaaca

SEQ ID NO: 95372 - DNA, 2745 bp, Zea Mays
gcgcgcggccggtctcaggcccgcaggacagcgcacagtactcctccgatcctcgtgtgtgattaattccacagagcagtacgtcgtagatagatatcttgatactgtgagtgtggggtacgtacggtatggcgccagcccagcatcaagcagcagctgacagaggcagcagggaagagatcgtcatcgtggacctcgagagcgaggccggcgccgacgacgcggcggcggcggcggcgacgatgcagcggcaggactcgctgtacgcggccgcaacaagagccgccggcgccaaccaccacggacaggacagctgggccaggacgctgcggctggcgttccagtgcgtggggatcctgtacggcgacattggcacgtcgccgctgttcgtgtactcgagcacgttccgggacggcgtcggccacccggacgacctgctcggcgcgctctccctcatcatctacagcttcctgctcttcaccgtcatcaagtacgtctacatcgccctgcgagccaacgacgacggtgacggtggcactttcgccctctacactctcatctcgcgccacgccaaggtgagcctgatcccgaaccagcaggtggaggaggacgacctcgtcgccaagtacaaccgcgacaagccgccggcgacgctccggcgagcggaatggatgaaggagctgctcgagacgaacaaggccgtcaaggtctcgctcttcctcatcaccatgctcgccaccgccatggtcatcagcgacgctatcctcacccctgcaatctcagtcctctccgccgttggcggtctcaaagagaaggcgacttttctcaccacagacgagatagtctggatcaccgtggggattctggtggcgctgttcgcgatccagaggttcgggacggacaaggtcggctacctgttcgcgccgatcatcctgctctggctgctcctgatcgcggccgtcggcttctacaacctggtgaagtacgacaccggcgctctcagggcgttcaacatgaagtacatcatcgactacttcagacggaacaagaagaaagggtgggcctcccttggaggcatactcctttgcttcacaggcacagaagccctttttgctgatctaggctacttcagcatcaggtcgatccagctgagctttggcttcggtttagtcccctcagtgctgctcgcttacatcgggcaagcagcgtacttgagagtgcacccggaggatgtggccaacactttctacagatccactccaatctccttgttctggccaacgttcattctcgcgctagcagcatcgatcattgggagccaagccatgatctcctgcgccttcgcgacaatctcgcattcccagacactcggttgctttccgagggtaaagatactgcacacctcgaggcaatactcgggccaactatacatccctgaagtaaactacctgctgtgcttgggtgcttgcctcgtcacagttggcttcaggacaactgtcatcattggggaagctcatggtatatgcgttgttcttgtgatgatcgtcacaaccctgttgctgacgatcgtgatgctcctagtatggaagatcagcgtctggtggatcgtcgcgttcttccttgttttcatgtcgtccgagtcgatctatctatctgccatcctgtcccgattcgcgcacggcgcgtacgtgcccgtggcaatgtcggcggtcctgatggtggtgatggtcgtgtggcactacgtgcacgtgaacaagtacaggtttgagctcgagcactctatcccccgcgacaaagtgaaagagctccttgagcgcagcgacatacagagggtgccagggatcggcctcttctacaccgagctggttcagggcatacccccggtgttccgtcatctcatcgagaagatcccttccatccactcggtgctcattttcgtctccatgaagcacctgcccatcccatctgtcgacatgtcggagcgctttctctttagacaggtagacagagaagattacaaggtgttccagtgcgtggcacggtatgggtacagggaccccttcgaggaggccaaggacttcgttgacaaacttgtagagcatctccagtactacatccgggatgtcaacctctatggcctgggctgcgagccgatgatgaagcagtccttcagctactgcagttctcgcgctgagagctttggcagccatgaaaaaaccaaagtaaaggcagtctacgctgaggagatgctcacaccagcagagtcattctcggagcacgcgaggcaagctagtggaaagaacaagctttttacacaatttcagggagacaagatgaatatagtagagatgatgaagattcagcaggagcaacaggctgtccttgaagagatgagtaaaggtgtggtgtacatatttggagagagcgaggtggtggcaagaccccactcctcactcattaagaagatagctatcaactacatatactcttttcttagaaagaactccaggaatggtgagaagatgctgtcgatcccccgtcgacagatcctaaaggtcggagtctcatatgaaatctaaaaagtgtggatgaagaacaggatatctgattgcacacacaacttaatttgatgccaaagaaggactctgtattcatttgtttcatggaaaatcaatgtgcttgatttacttactacagcaatgatggatacagaaccttagttttatgcataagtgcttcattgat

SEQ ID NO: 95373 - DNA, 620 bp, Zea Mays
gcgcgcggccggtctcaggcccgcaggacagcgcacagtactcctccgatcctcgtgtgtgattaattccacagagcagtacgtcgtagatagatatcttgatactgtgagtgtggggtacgtacggtatggcgccagcccagcatcaagcagcagctgacagaggcagcagggaagagatcgtcatcgtggacctcgagagcgaggccggcgccgacgacgcggcggcggcggcggcgacgatgcagcggcaggactcgctgtacgcggccgcaacaagagccgccggcgccaaccaccacggacaggacagctgggccaggacgctgcggctggcgttccagtgcgtggggatcctgtacggcgacattggcacgtcgccgctgttcgtgtactcgagcacgttccgggacggcgtcggccacccggacgacctgctcggcgcgctctccctcatcatctacagcttcctgctcttcaccgtcatcaagtacgtctacatcgccctgcgagccaacgacgacggtgacggtgagcaaacaaaatatactatatagttagtatacactggctgatgtcgcatgcagtcgtactcgtacatactagtcgtacgtacgtac

SEQ ID NO: 95374 - DNA, 2582 bp, Zea Mays
actatactaccgacgaagccgcgcgccgccggcgtggcgggaaagatggcacacaccggtgcagcaggtggcccggagacgtcgttgccccacagcggcgacctggagctggagctgccgccgccggtgaactggctccggcaggactcgctgtaccgcgacgcgacgaggccagcccacggcgcccaccaccacggagggcaggagagctgggtgcggacgctgcggctggcgttccagtgcgtgggcatcatgtacgccgacctcggcacgtcgccgctctacgtgtacgccaacaccttcaagtacggcgtccaccacgaggacgacgtcctcggcgtcctgtccatcatcatctacagcttcgccctcttcaccatggtcaagatcgtcttcatcgcgctctacgccaacgacgagggtgacggtggaacgtttgctctgtactcgttgatctctcgctacgccaagatctgcctgatcccaaaccaacaggacgaggacgagctcgtgctaaggtacaagcaccaagcgaagccgtcggcgacgcggaggagagctcagtggatgaagaacttcctggagacgagcaaggcagcgaagatttcgctcttcttcctcaccatccttgccaccgcgctggccatcagcgactgcatgctgaaccctccgatctctgttctagcggcggtaaatggtctcaagttgaaagcacctcatctcacaaaagatgccgaggtgtggatcacagttgggatcctagtagctctcttctcggtccagcgcttcggcaccgacaagatcgcctacacgtttgcgccggtcgtcaccgtgtggctcctcctcatcggaggcattggggtctacaacgtcatcaagtatgacattggcaccttgagggcgttcgaccccaagtatatcatccactatttccagaggaataaaaagaaaggatgggtgtcgctgggtgagattctactctgcgtcacaggcacagaagcccttttcgctgatctcggctacttcagcatcagatcgatccagctgagctccaccttcggcttgttaccatcagtactgctcacctacattgggcaagcagcgtacctaaggaaacacatggacatggacatatctaacgctttcttcaattcggtcccaagctctttgttttggccggcattcatcctcgcgctcatcgcatcagtcattgggagccaggctatgatctcgtgcgccttcgcgaccatgtcgcatttgcaggcacttaactgcttcccgcgggtcaagatactccgcacatcgaggcattactggggccagatgtacatccctgaagtaaacatcttcctctgcgtatctgcttgcgtggtgacactgagcttcaggacaactggtttcatcgcaagagcacacgaaatctgcgtggtccttgtgatggtcatcacgacgctcttgatgacaatagtgatgctcctcgtatggaaggtaaacatctggtggatcgccatcttcttcgcggtcttcatgtccacggaactggtctacacaggtgcagtcctatacaagttcgtccacgggccttacctgtcactggccatgtcagcggttctcatggcgatcatgatcgtgtggcactacgtgcttgtcaagcgctacaaatacgagctcgagcacactgtgtcgcgggacaaggtgaagggcatcctggagcgccaggacctcaagagggtccctggccttgggctcatctacaccgagctggtgcagggcataccgccgatattccctcacctcatagagaagatccctacggtccattcggtggtcgtcttcatcaccgtgaagcatctgccgattccgcacgtcgacgtctccgagcgcttcctgttccggcaggtggagccgaagcatctcatggtgttccgttgcgtggcccggtacgggtatcttgacacgcttgagatggccagtgagttcgtcaagatcttggtcgagtacctccagtactatatcagggacatcaacctctatgcgttaggtgacccgttgatgagggttagcaattgtagcgctcgtatcgatagcttctctacggagaagccctcgggacgacatgccgtctatgccgaggaaatgctcacaccaattcagtccttttcggagctcacgatgcatccagtcggcatcaacagtgtcctgacgcatctccagacagcaaaactgaacgtggaggagatgatcaagattgaagaagaccaaaagatggtggaacgggaggtagacaatggcgtcgtttatattcttggggagactgaagtggtagccaagcctcactcaaatttgttaaagaagataattgttaactatgtatacagcttcctaaggaaaaattcaaggaatggtgagaagatgctatctattccacgtggccaactactaaaggttggaatagcatatgagatctaggtcttaaaatagctgattatacttgaaagattattattctccgtatagatacatgtaagtatgcttccaagcattattggtcgtcaagaatgaaataagagctcagattcatg

SEQ ID NO: 95375 - DNA, 2514 bp, Zea Mays
atggcggcacatcagcatggtacggccggccggggtggtggtggtggtagcatggagatcttcccctacagctacagcagcggccgcgacctggagctggtggacctgccggcggaaccggtggacgtgaagcgccaggactcgctctaccgcgacgccaccatgccggcgcaccacggccacaacggacaggagagctgggtccggacgctacggctggcgttccagtgcgtgggcatcctgtacgccgacctcggcacctcgccgctctacgtgtacgccaacaccttcaagtacggcgtccaccacgaggacgacgtcctcggcgtcctgtccatcatcatctacagcttcgtcctcttcaccatgatcaagatcgtcttcatcgccctctacgccaacgacgacggcgacggtggcacgttcgcgctctactcgctcatctcgcgctacgccaaggtgtgcctcatcccgaaccagcaggcggaagacgagctcgtgtcgaggtacaagcatcgcagcaagccgtcggcgacgcttcggagagcccagtggatgaaggacctgctggagaccagcaagactgcaaaggtctcgctcttcttcctcaccatcctcgccacggcgctcgccatcagcgactgcatgctaacccctccgatatcagtactcgcagctgtcaacggactcaagctgagagcaccgcatctgactacagatgagactgtgtggatcacagtgggcattctggtggttttcttcgcggtccagcgcttgggcaccgacaagatcggctacacgttcgcgccggtggtcttcgtgtggctcctcctcatctccggcatcgggctctacaacacggtcaagtacgacgtcagcacgctgaaggctttcaacgccaagtacatcgtcgactacttccgaaggaacaagaagaaagggtgggtttcgctgggtgaaatcctcctctgcttcacaggcactgaagctctcttcgctgacctgggatacttcagcatcagatctatacagctaagcttcaccttcggcttgttaccttcagtgatgctgacgtacattgggcaagcggcatacatgaggaaacacatagacacgcttgacatatccaacgttttcttccaatccattccaagatctttgttttggccaactttcgtcctggctctcatcacgtcggtcatcggaagccaagccatggtctcgtgtgccttcgcaaccatgtctcatctacaggcgctcaactgtttcccgagggttaagattctgcacacgtcaaggcgttactcaggccagctctacagccccgaagtgaacgtcttcctctgcattgccgcctgcgtcgtcacccaccgtaccctacagaaatctgagtcgcttatacataaatactatacgtgtttctgctaccgcctgtgcatgcatgcatgcattcgaacagagatctgcgtggtcctcgtgatggtgatcacgacgctcctgatgacaatagtgatgctgctggtgtggaaggtgaacatctggtggatcgccgtgttcttcgccgtgttcatgtcgacggagtgcgtgtacacggccgcggtcctgtacaagttcacccacgggccgtacgtgccgctggccatgtcggccgtcctcatgttcgtcatggccgtgtggcactacgtgcacgtcaagcggtacaggcacgagctggagcgcaccgtgtcgcgggacgcggccagggacctgctggagcgcggggacctcaagagggtcccggggctgggcctcttctacaccgagctggtgcaggggatcccgcccatcttccctcacctcgtcggcaagatccccaccatccactccgtcgtcgtcttcatcaccgtgaagagcctgccggtgccccacgtccacgtcacggaccgcttcctcttccgccaggtcgagcccaaggagttcatggtgttccgttgcgtggcgaggtacgggtaccgcgacgcgctcgagacggccgctgatttcgtcagcgtcctcgtcgagtacctccagtactacgtcagggacctcaacctctacggggttgtcggtgatgagccgttcaagatcgtcttccacagtgctcgggtggacagcttttcttgggagaagcactcgtcgggacatgctgtctatgccgaggagatgctcacaccagcccagtccttctccgagctcacaatgcatccggtctccatgagcagtagactggcacatttccagacagggaaaatgaacctggaggagatgttgaagatcgaggaagatcaaaagatcatccaacgcgaggtggacaacggtgttgtttacataattggggagagtgaagtagtagccaagcctcattccaacttgttcaagaagattattgtcaactacgtctacagcttcctaaggaagaactcaaggaatggagagaagatgctatcaattccaagaggccaactgcttaaggttggaataacatatgagatctaa

SEQ ID NO: 95376 - DNA, 526 bp, Zea Mays
ggcttggattgaatgaagaggttcgacccaacatggattcgaagacaaagttcagtgatgtcaagggagttgacgaagctaaagttgaacttgaggaaattgttcactacctacgagatcctaagaaatattatatcagtttgaggaaaaaactccaagctgaaagagaggaagctgctaggaagcaggaagagttgcaagcacaactacaagctcaacaggccgcacttgaagaaaaccaaagtttgctgcgccaggcccaagaggaagtgaaggggatgcataccaagtttaaagagaccaatgcactgctacgagttgtcctgaaacttcagaaagattgaggtagggatgtataccaagtctgaggatgatgccttcgcttaaggtttttctaccttgctagaacatatctgtggttagaactttgtcagaactacgtgcaatctgtttgaatgcttcaaacctttgtggtggaacctttgtatgtttgaacctctgttgtggaagaactagtatgctggaa

SEQ ID NO: 95377 - DNA, 2495 bp, Zea Mays
ctgttatttcttaaaaacaaaatgcgcgcacacacagtgacacaggtgactagccgacctattgctccgcctcgtctacaccacacagctcagccggcacagccgctactcacctctcgccaaacttcctcttccgagaatgccagattatccactgcggcctcttcctcgtgctcctcctccagtcctcccttcccaccatgattaccacccacctctccccagccctcaagcaccgctccccgtccccgctccactccacctaccactcccaccaccacctccccgtgcacctcccgctccccctcccccgccgccactgccacctcgctaagcccgccgccgccgcctcgccagaccttctcgcgagcatcgagtccgtggcctccgcggcctccgtgctggccgccatcgtgctggtccacgagtcgggccacttcctcgccgcggcgtcccggggcatccacgtctcccagttctccatcggcttcggcccggcgctggcccgcttccgcctcggcgccgtcgagtgcacgctccgcgccatcccgctcggcggctacgtgggcttccccgacgacgacccggagtccggcttcgcgcccgacgaccccgacctcctccgcaaccgccccgtcccggaccgcctgctcgtcgtctccgctggcgtcgccgccaacctcgccttcgccttcctcgtcgtgtacgcgcaggcgctcaccgtcggcgtgcccgtccaggcgcggctccccggggtgctggtgcccgaggtcctcccgggctccgccgccgcgcgcgcgggcctcctccccggggacgtcatcctcgccgcccccggcgccgcgccggacccgtccgtgcccgtcctcgtcgacctcatgaaggcgagccccggcaggaaggtgcccctcaccgtcttcagagccgcgcccgggaagctggagccggacccgcggcccgtcgagctcaccgtcgtgccggacaccagtgccgacggcacgggccgcatcggcgtgcagctctcccccaacgtccgggtcacgcgcgtgcgccccgagaacctggccgacgccaccgtcctagccgcgcgcgagttcgcgctcctgaccgtcaccgtgttcgacgggctcaggcagacactgctcaacttctctcagtcggccgacaaggtgtccggccctgtcgccatcatcgcggtgggagcggaggttgccaggtccagcgctgacggcctgtttcagtttgcggcggtgatcaacctcaaccttgcggccataaacttgttacccttaccagcgttggacggtggcacgctggcattgatccttctcgaggcagctcgtggtggccgcaagattccgcgagaagttgaacaggggatcatgtcatcagggatattggtggtgctcatggttggcatgttcctcatcgtgcgtgacacactcaaccttgatttcatcaaggagatgttgtgatgatgcttcggatggaaattaactgatcgcagctgtagtaaaattgccggtatcagaacatggttggcttgggaaattaaggttagttgttgttattcttttttttcacccttttagggttgatttggtgacaagtggatcagggggaattggaggggattgagggagaaatgaactaatttctccctcagtccccttcaatcatcccgtgattccgggtcaccaaatcagccatgggactgctctagcactccagctttgctacactgatcgtaggtccttctattgctattttcggaatgaagtttgtgatcgaggcacaaaaaaaaaacctgacttgttcaaatgtaaattaccaattccaatgcataggtagttgctcaaccttgtgctttggaatcaaatcaagcttatagcatcactagtgcactgtgcattccttccaaaagaaaaaaaaacatcactacatggttttgtctcctatctgatattactgacattttagaagcctatgaatctggtcattatatttcaatttggctagacatctgtttttctcaatcccagtatataaggcgtcgaagaccaagaaatatatttaattctctctataccactacatcgatgtacgtatacgcagagggagcacaccttatattgtaggacaagaacaaaaaaaaatagttacgccttatattctaggatggagggagtaaaattctacctttgttgcgtgaactgatgtattggaatttgctacacttcccatatatccttttgtagttgtgttgctgttttccaaatgaatcttttcaagtttctattaagtgtacatccagggcaaaagaaatggtgagaatatgtactccaaaattcttagctgcaacttgcaaggcgcacatcccggtttgtgataaaagcgcttgcttttccgttctacggatctgagttgctttcactgtatagaccattggagcacagcttaatacctgcataaaaatgtataggccatggtttatt

SEQ ID NO: 95378 - DNA, 764 bp, Zea Mays
aacaatgttttcggtaatatttgtggatactactcgaacagtttcttttttatcatgtctgcgtttcttatagaggttagtaaatcagcaatagtgtccttgcccataagactctaattctaggttattcctaatttttctataatcaacatgttttgtcttttctttaaatttaggattttaaagcatatacgtgagacaaaatcaaggccgttccactcacctccaacaacagctcgtgtaaaccttcctcatcttttcgccgtcccgcatccagggcgattgctcccgcgaatttacgcgagggcaggagccttcggtgagagaggcctgctcggtgccggaggaggcggcggcagcgtcgacgccaggttgtgggagatgccgtctccaacgtctggtggtccggatctacaggcgtaatctcgccgcgacaaccagagggtgcaaaccaggactccgacggtggtgtgtacctgcgaggtgcgtccctgggtcaaggagcagcccagcctccgatgttaggacgtgctggagtcgattcgaatccacttggagctgcttgttagttggatggccaaatagattggatgggcctgtaagaacatcttttctgttatgctatcaaaggcaacaaatagatgctaatagcagatgctgaatgtttgttgcacctcccttcctctgcccgtgtggtgctgtagaccctcacttttctgttttcttgtccactagctctaggttactgcatgtagctttgcttc

SEQ ID NO: 95379 - DNA, 1442 bp, Zea Mays
acacattcatccattcatcacccatcgtgtgcttcagctactacgcatagatataattaattaagcgcggacgacgacgtacgtaacagtatggctgctgctgctgctactgtcgtcacaccatcctcgcctcgctccatggctgttgccgccgccattattgccttcttcttcgcggtgaccgcggcggcagcgtcgccggtgcccgcgatctacgtgctcggggactccctggcggacgtcgggaacaacaaccacctggtgacgctgctcaaggccgacttcccgcacaacggcatcgactacccgggccagaaggccaccggccgcttcagcaacggcaagaactccgtcgacttcctcgccgaaaacctggggctggcgacctcgccgccgtacctcgccttgtcgtcgagcagcaaccccaactacgccaacggtgtcaacttcgcttccggtggcgccggagtctccaacctcacaaacaaggaccaatgtatcagcttcgacaagcagatcgactacttcgcgacggtgtacgcgtcgctggtgcagagcctggggcaggcgcaggccacggctcacctggccaagtccctcttcgccatcaccatcggcagcaacgacatcatccactacgccaaatccaactccgccgccaataccaagcaggccagtgccagtggcgccgccgccgacccatcgcagcagttcgtggacgcgctgatccacatgctcaccgggcagctgcagcgcctctacgccctgggcgcgcgcaaggtgctgttcctgggcacggggcccgtggggtgctgcccgtcgctgcgggagctcagccccgccaaggactgcagcgccgaggccaatggcatctccgtgcgctacaacgccgccgcggcgtccctcctcggcgccatggccgcgcgctacgcggacatgcactacgcgctcttcgactcctccgccgcgctgctccagtacatcgaccaccctgcggcgcacgggttcaccgaggccaaggccgcctgctgcgggctcggggacatgaacgccaagatcgggtgcaccccgctaagcttctactgcgacaacaggaccagccacgtcttctgggacttctaccatcccacggagaccaccgcccggatgctcaccagcacggcgttcgacggctcggcgccgctcatcttccccatgaacataaggcagctcagcgccatatagctaggccaccagaattagagtggtgtccttctaccttgtatatgttgttgtgtatcacatagtggccttggacgtatgtacgtcgtcctagaagaaatcaaacgatatagcaaacctcatagaaacttgcatatctccaaagaatgtatgaattctagattcatatacaaattaacaaatctcatagaagcttgcattggcaacgcacgcgtttaaag

SEQ ID NO: 95380 - DNA, 1535 bp, Zea Mays
ctggggaaccgctcgcctatcctcaggatttcgttgtatgccgatgacgcggctctgtttgttaagccaaaaaaagaggaaattgagacaattgtcagtttgctgaccttatttggagaggcttctggtctgatgaccaattttcgaaagtccacaattgtgcccatttgttgccagggactaccgcttgacgacattcttgacggcctccctgctggaagagcaaccttcccgatccgatacttgggtctgcctctcacttcgactaggctaaggaaacgagaccttcagtttttggtagacaaggtcttgggcaagctgagtagttggaatatgaggaatttctcgttggcgggccgtttgactcttgttaaaacggtgatcacctcgcaagcaatctacatgctatccgcccttaacgcgcccaaggaaattataaatctccttgactccaaaagaagacagttcctttgggcgggtttagacaggctaactggaggaaaatgcaaagttaattggaagcgtgtggcgaggccaaaagccctcgggggcttgggggtcttgcatttgggtgcttttgcgcgtgccttgcgcttaaggtggttatggcaaatttgcacatctccttataatgcctggggaaatttggaaacgccttgcactaatgttgattgtctgctttttgtggcatcaacagaaattaagattggagatggctccaagatatcattttgggatagcgcttgggcagggggaaggaggccgaaagacttggcacctagtctattctccatatcaagacataagggcaaatcactggcaggggcggttagggacaatgcgtggatcacagatctcgcactgctaggcagtgtaattacgacccaccaccttcatgagttctttattctttggtccgaggttcaaaagatccagcttgacccaggggctcaggatatcatcacctggaaattcactgcagaccatcgctactcagtgaaatcagcatatttggcgctgcttttaggctcagttcgcactaacttagacctcatcatttggaagaattgggcgccaccaaagtgcaagtttttcagctggctagcgattcaaaatcgcatttggactgccgaccgtttagctaccagaaattggccccattccccgacttgtgttctttgtcaaggtgttctggaatcaggtctgcatctatttgtggaatgccggttcactaaacggatttgggaggagattgctgtttgggttgccattgaggatttgaagctgtctaactgggagctatctcacacgctgatgcattggtgggagaacttggctatgatatcggggtgtagcagaaaggggctcagatcattgtgatccttgttaattggataatatggcgggaaaggaatgcgaggacttttgatcgcaggttttcgaccagtcagcagatcataactctgattaaatgcgacgcggcagcctggattgcagccggggctaggcaattagctacccttttatcctcgtca

SEQ ID NO: 95381 - DNA, 1794 bp, Zea Mays
acggacggcgaaaactaaaaggcaaaagctgacggacgggacaggtgacaaatccacgcggagtccgctgaaattttggtcgccccatgcccgttctagacgccatggacgatgcggcggcggcggcggtagataggcacggcggcttctagaccgtctccgttttctgcgcgttggccgtcgggggaagtacacaataaacaaagcaagagcagaggtccaactgggctgctgcgtcctctgcctcttctccttcctgtcgttctgcgctgccccgacccccgagtgcccctggtcttgtccaactctccctgctgacctcggagcggagcggagcggagcaagcagccgccaggagggaaggatccatggccgggagatcgcggtacgacaaccccttcgaggagggcggcgccgacgaggtcaaccctttcgcggaccaagctaagagaggaggatcgactgctcagtccggctactctggtggcgcgttctacacgacgcaatcgcaacgccctgctcctcctagcacacgcctttcgcctcttcctcctgaacctgccgacttctacaacgacttcgctaccccagtggatatccccatggacacaaacaaggacatgaagacaagggagaaggagcttctggccaaggaggccgagctgaacaggcgtgagaaggaaataaaaaggcgagaggatgctgcggcacgagctggtatcgtgttggaagagaagaactggcccccgtttttccccatcattcataacgatatcggcaacgagatacctgtccatctgcaaagaacgctgtacgtcgcgttcgcgtcgctcttagggttggtcttgtgcctgttttggaacataatctgcattactgctgcctgggcaaaagggtcaggtcctaagatatggtttctcgcaatcatatacttcatcctcggatgccccggtgcatactacctttggtaccggccactataccgcgcaatgaggaacgagagcgctctcaagttcggatggtttttcctcttctacttgattcatatcgccttctgcgcgtacgcagctgtttctccttcaattctcttcgtgggaaaatcgttaaccgggattttgccagcaatcagcttgataggcgacagcgtcattgttgggatcttctacttcattggctttgcattgttctgcctggaggctttgctaagcgtgtgggtcattcagcgcgtctacctgtacttccgagggagcgggaaagaagcggagatgaggcgtgaagcagcacgcggtgcagcgagggcagcgttttgatgaaaaccgtatatagatgatatatataggcacgacttacatactgttcataatagtttgaagtgctttaggtcaagaggcatgtgtgtacagtagggttggcgtcttgtacatctttaaggccggtttggtgaaacatggaaatggaatgaatccataaaggagagatccgttgttattcaaaattaaataacaaggatctcttctccatgggtcccatccattttcctctccaccaaaccagccctgagttcctatcgccacggtgttttgagccctccagattgatcaatcgtggtacatatgacagtgttagtatatggagtaaatacacatggacgggtaaacctagctagactctttgttccatatgtgcatttttgtgtcaccgccttgtatcaattatttatagacgtaatgaagttgtaatgatgttctcactcgagatttttgagtggggaaattgcaaaagcatacttatgtc

SEQ ID NO: 95382 - DNA, 1975 bp, Zea Mays
acggacggcgaaaactaaaaggcaaaagctgacggacgggacaggtgacaaatccacgcggagtccgctgaaattttggtcgccccatgcccgttctagacgccatggacgatgcggcggcggcggcggtagataggcacggcggcttctagaccgtctccgttttctgcgcgttggccgtcgggggaagtacacaataaacaaagcaagagcagaggtccaactgggctgctgcgtcctctgcctcttctccttcctgtcgttctgcgctgccccgacccccgagtgcccctggtcttgtccaactctccctgctgacctcggagcggagcggagcggagcaagcagccgccaggagggaaggatccatggccgggagatcgcggtacgacaaccccttcgaggagggcggcgccgacgaggtcaaccctttcgcggaccaagctaagagaggaggatcgactgctcagtccggctactctggtggcgcgttctacacgacgcaatcgcaacgccctgctcctcctagcacacgcctttcgcctcttcctcctgaacctgccgacttctacaacgacttcgctaccccagtggatatccccatggacacaaacaaggacatgaagacaagggagaaggagcttctggccaaggaggccgagctgaacaggcgtgagaaggaaataaaaaggcgagaggatgctgcggcacgagctggtatcgtgttggaagagaagaactggcccccgtttttccccatcattcataacgatatcggcaacgagatacctgtccatctgcaaagaacgctgtacgtcgcgttcgcgtcgctcttagggttggtcttgtgcctgttttggaacataatctgcattactgctgcctgggcaaaagggtcaggtcctaagatatggtttctcgcaatcatatacttcatcctcggatgccccggtgcatactacctttggtaccggccactataccgcgcaatgaggaacgagagcgctctcaagttcggatggtttttcctcttctacttgattcatatcgccttctgcgcgtacgcagctgtttctccttcaattctcttcgtgggaaaatcgttaaccgggattttgccagcaatcagcttgataggcgacagcgtcattgttggggtgagtgagtgagtctaccgctattattcagtctgaatccagtaaatcagaattccacaggataatagtacctatatttcctgcaaagacaaattgtacatacatcaaaagcatctcgcatggcatgttttatgtggacacgacaataactccgttcttggatgttaaaactattttgacaatctccagatcttctacttcattggctttgcattgttctgcctggaggctttgctaagcgtgtgggtcattcagcgcgtctacctgtacttccgagggagcgggaaagaagcggagatgaggcgtgaagcagcacgcggtgcagcgagggcagcgttttgatgaaaaccgtatatagatgatatatataggcacgacttacatactgttcataatagtttgaagtgctttaggtcaagaggcatgtgtgtacagtagggttggcgtcttgtacatctttaaggccggtttggtgaaacatggaaatggaatgaatccataaaggagagatccgttgttattcaaaattaaataacaaggatctcttctccatgggtcccatccattttcctctccaccaaaccagccctgagttcctatcgccacggtgttttgagccctccagattgatcaatcgtggtacatatgacagtgttagtatatggagtaaatacacatggacgggtaaacctagctagactctttgttccatatgtgcatttttgtgtcaccgccttgtatcaattatttatagacgtaatgaagttgtaatgatgttctcactcgagatttttgagtggggaaattgcaaaagcata

SEQ ID NO: 95383 - DNA, 390 bp, Zea Mays
atgtggcggatgccgcggccgagtccgccaaagccgggtcgccctcgcccggctttgacagaggatgagaactcttcattggtttgttcttcaggatttcgctcaccaaacgaggtgcgagtttgtaacgggaaaccggtgacgattgtggcatcccaagaaggattcaaccctgcaggaaagcgagcactcatcagcaaaaacaaggtcagcttaaggatgctgcttcataagtcatgtgctcaaccacctggagttcaacggttgcagactagtgatcctgaagacaatgaggctactcaaacttttgtccggaagatattaacagacagcctgcagaagcttgaaaatgaggctccgatagttcacagagtcatctacttaagctga

SEQ ID NO: 95384 - DNA, 1298 bp, Zea Mays
atggcgtcgacgacgggggacgacgcggtcggtacacgtaagggcggcaccggcgccgggggcactcctcctcctaccacgcagacgcagacgcagccgcccccgccgcccgagcaggggctgcggtgcccgcgctgcgactcccccaacaccaagttctgctactacaacaactacagcctctcgcagccgcgctacttctgcaagacctgccgcaggtactggaccaagggcggcgcgctccgcaacgtgcccgtcggcgggggctgccgcaagaacaagcgctcgcgctccgcggccgccgtggcggctgctgctgctgcggcggcggcggcctcctcctcgcggctctcgctcaacctgcccccagaggccgccgccgccgccgaccagcaggcggcgcggctgggcttcctcggcgctcatcatccggtggcgtcgtcgacgatcgacggaggcggccccgccgcggccgactaccaccaccagcaggcgggcgccgccgccgtcgggatgatcgcgctgccgcggctccacgcgcccggcgtcgtcggccagtacgtgccgttcggggagtggcaccccgggacggccggggacgtggtgaccggtggcgcggcggtgagcagcagcagcagcagcatcgcgtcgtccatcgagtcgctgagcttcatcaaccaggacctccactggaagctgcagcagcagcggctggccaccatgttcctgggcgcgccgacgagcgccgccgcggccgcggccgcccacgccgacagcgcggcgcatgtgggcggcgccttcatgcagatgtcggtggcggagtccaccatgaccatgccgccgccgccgctggcgacgtcgtggttcatggacagctcctgctacgcgctcccttccccgacgatgaccgcgcacgctagcacggccgcggccgtagcagccgccaccggtacctgcaacgtcgtcaacggcgctggcgctggcgacgacgacagcgccgcgtcgaacaacaacaacaactgcgggccggggagcgcgatccagtcgtggggcgacatgtcggcgttcgcgatgctgccttgatggctggatggctggcgcgcggcgcgccaacaggaagaagaagagacctccagtttggaattgaagctagcagggctgattccgaaggaattgagctagcgacggagatacctatattttaatgaatctcttaaacagtgtagctgtccatctcgatctaactgcatattgtatttgttgatcgtcgtgtgagtaatgagtatattatatatata

SEQ ID NO: 95385 - DNA, 947 bp, Zea Mays
ttgtttttttatatatatttcacattgaatgcttggcaacaagagatgtgagcttgtgtcctaattgttttgatttggagcattaaattaggtgaaagattcgttactcgaggttgaactttgtgacgagcatagctccagatgctctgcaattgatgaaatcgataagcatggaacctttcttttaccaagaaatagtactgaagaaaagctgttggatttgttgtcatcatataaggatgtcaaaatcatacaattctcatctatggttgatgccttcggtggttttgctgatgcagctgtggagaagaagttccgaaatcgtgtgaacaggtatgtgggcctatggtgctgtgtggagttccgtgaaattggtcacatatattatgacatgtactgggacgagaaaccagggtggaagccacaccctccagagactagggaacaggatcatccaccttggtcatgactactgacaagaagatgctagaaagatcgtgatgatgaagatctgagatcttctagggcaccctgctccaatcgattcttcaggccaattttgtgctgttctagttgtgttcttccatgggtcgctgctgttcgcttgtggccccttgttcgcagctcatcggtcgaagcatggggctcaatgatttagttgggacaacatttagatcacgacttagttccattttccatagtttttgcatcatgttcatagttgatacaggcatcagctccaaaggagaaaaggccattattgttaaatgttgtggaaaacttggctgccagctgctgcaataggaagctgtcgtaactgttgtgcaaaactttgcccccgctgctctgttaggaaatatttggagcagctatctttttgacacattgttctcaagtcttaaccatgaagcattgtcttaatatatataagaaggcatttggtcata

SEQ ID NO: 95386 - DNA, 2536 bp, Zea Mays
cccagctttcccgtaacgtaacgggacaccacacttctataccgtgcacgcgacgaccctgccgtcggaccggacccactgcgcacccaccgcccagcgggacccacgcggtccttgtcccctcactgcctgcgcagaatgtccccggcccccacccgctgaccccgcctccgcctccgccctccggcgaccccgatccccgccggcgaaatggcggcgtggtgctctgccgagtccaccaagccggtcttcgtcgggatctacggggccgtcctcggcggcttcgcggtctccgccctcttcttcctgctctcctccttctcctcgctctccgcgcccacgctccccctccccgccgcggccatcgctggggccaacctctccgcgcctactctcgcccaggctgaaaccatgtacaaccgccccatctggaagcccccgccccggcgggcgcggatgccctctccgcgcgcgttccgcctcacccgcgacatggtcgccgcccgcgcccgcgacggtgtgatcgtcgtcaccttcggcaactacgcctttctcgacttcatcctcacctgggttcgccacctcaccgacctcggcgtagacaacctcctcgtcggtgccatggacaccaagctgctccgggagctctacttccggggcgtgcccgtcttcgacatgggcagcaggatggtcaccgaggacgccgggtggggctccccaaccttccacaagatgggcagggagaaggtgctgctcatcaacgcgctcctgcctttcgggtacgagctgctcatgtgcgacactgacatggtatggctcaagaacccattgccctacctcgcccgataccccgacgcagatctcctcacgtccagcgatcaggtcatacccaccgtcaccgacgacagcctggagaactggagggaagttactggtgcgttcaacattggtatttttcattggcgacccactgaacctgctaaaaggctggcaaaagattggaaagatttagtcatatctgatgataagttgtgggaccagaatgcttttaatgatcttgtacgcaaaaaatttggacagccagttcaaggagatgatcttgtatattcttatgatgggaaactgaagctgggagtgctaccagcaagtatattttgtagcggccatacatattttgtgcagggcatgtataagcagcttcatttggaaccatatgctgttcatactacttttcagtatgcgggcactgaaggaaagcgccatagattgcgagaggcaatgcttttctttgatcaaccatcttattatgattctccaggaggtttcctgtcatttaaacctaacattccaaaaagtttgctattagatggtgctcatactgttgaatctcattttgagttggttaactaccagctgaagcaaataagaactgcacttgcggttgcgtccttgttaaagcggacactggtaatgcctccattatggtgcaggcttgatagaatgtggtttggacatcctggaattttagagggaacaatgaccagacaaccttttctctgcccactggatcatgtgtttgaggttcatgttatgctgaaggacttgcccaaggaagagtttggtcaacatattgatttcagagaatactcctttcttgagaatccatcattacctaaagaggtgaaagattcgttactcgaggttgaactttgtgacgagcatagctccagatgctctgcaattgatgaaatcgataagcatggaacctttcttttaccaagaaatagtactgaagaaaagctgttggatttgttgtcatcatataaggatgtcaaaatcatacaattctcatctatggttgatgccttcggtggttttgctgatgcagctgtggagaagaagttccgaaatcgtgtgaacaggtatgtgggcctatggtgctgtgtggagttccgtgaaattggtcacatatattatgacatgtactgggacgagaaaccagggtggaagccacaccctccagagactagggaacaggatcatccaccttggtcatgactactgacaagaagatgctagaaagatcgtgatgatgaagatctgagatcttctagggcaccctgctccaatcgattcttcaggccaattttgtgctgttctagttgtgttcttccatgggtcgctgctgttcgcttgtggccccttgttcgcagctcatcggtcgaagcatggggctcaatgatttagttgggacaacatttagatcacgacttagttccattttccatagtttttgcatcatgttcatagttgatacaggcatcagctccaaaggagaaaaggccattattgttaaatgttgtggaaaacttggctgccagctgctgcaataggaagctgtcgtaactgttgtgcaaaactttgcccccgctgctctgttaggaaatatttggagcagctatctttttgacacattgttctcaagtcttaaccatgaagcattgtcttaatatatataagaaggcatttggtcata

SEQ ID NO: 95387 - DNA, 1386 bp, Zea Mays
aactacacccgcatccaaacaataacattggtattgtagatcaatttcatttctccttaaatttggtatttctagaccaattcaatttcaccacttgtaacgggaaaaaggcacttccccgtgaccccgtttcctccagtttcctaccttcctctcgtcccagcagccgcaagccaaaaccctagcaagcaaaccaccggagcagcggcgctcgcgcgggcggagccatggcggacgacgattacaacgaaatcgacatgggctatgaggatgagcctccagaacctgagattgaggaaggggccgaagaagagcttgagaacaacgaagatgcccctgatgatgtcataggtggagagggtgaagataaggaacaggaaaagaccaagcgtgagcgcaaaacaacaaaatatatgacgaagtatgaacgtgcgcgcattcttggtacacgagccttgcagataagcatgaatgctccagtcatggttgagcttgagggagaaactgaccctcttgagattgcgatgaaggagcttagagcgcgcaagatacccttcacgatcagacggtacctacctgatggaagttatgaagactggggagtagacgagctcattgtggaggactcctggaaacgccaggttggtggagactgaagatgctgatctacttggcatggaaaggatgtgtagttacaggtcttcgttgcctctgagtggatgctgaacagtgaatgaaccaagacgaaacgatgctatgctagatgttaccttgacgtctgtggttgccttggaactctggaaccgtgatggctggtggacggtggttgagttatgcttgttcgtttcagtttcagacatgctgtgcagatgattcgtaaactgactcgtctttcattcatttggaagggtttatcgtatcttgctatcttttgtaatgagttgtatgctacatccggcatgagaccatgttgctgttgcttgtttcattaaactccaacggtttccataggagaggagcaaatccagatgggtagttcacagcatagctgagcggaaagtatgcagaccagagcatggcgtatttggtgtgttccatgctactgctctgtttaagactgttttgtatcagagtttgcaaagatggataccatgtatccagatcatcttgctcattgatgcgtttttactgtggtattctggctaaatacaggtatgcttcatgtatcacatgatgacaaacttgacagacatttgtgtggatcacgtttgctgctgctgcctccctccctcggattgagatggagctccttcatcattcctcggaatcagactcgagggggcaggagccgtcgtcgacggtggccagcgggtcgaacatgtcgga

SEQ ID NO: 95388 - DNA, 957 bp, Zea Mays
aactacacccgcatccaaacaataacattggtattgtagatcaatttcatttctccttaaatttggtatttctagaccaattcaatttcaccacttgtaacgggaaaaaggcacttccccgtgaccccgtttcctccagtttcctaccttcctctcgtcccagcagccgcaagccaaaaccctagcaagcaaaccaccggagcagcggcgctcgcgcgggcggagccatggcggacgacgattacaacgaaatcgacatgggctatgaggatgagcctccagaacctgagattgaggaaggggccgaagaagagcttgagaacaacgaagatgcccctgatgatgtcataggtggagagggtgaagataaggaacaggaaaagaccaagcgtgagcgcaaaacaacaaaatatatgacgaagtatgaacgtgcgcgcattcttgcatgaatgctccagtcatggttgagcttgagggagaaactgaccctcttgagattgcgatgaaggagcttagagcgcgcaagatacccttcacgatcagacggtacctacctgatggaagttatgaagactggggagtagacgagctcattgtggaggactcctggaaacgccagtgaatgaaccaagacgaaacgatgctatgctagatgttaccttgacgtctgtggttgccttggaactctggaaccgtgatggctggtggacggtggttgagttatgcttgttcgtttcagtttcagacatgctgtgcagatgattcgtaaactgactcgtctttcattcatttggaagggtttatcgtatcttgctatcttttgtaatgagttgtatgctacatccggcatgagaccatgttgctgttgcttgtttcattaaactccaacggtttccataggagaggagcaaatccagatgggtagttcacagcatagctgagcggaaagtatgcaga

SEQ ID NO: 95389 - DNA, 793 bp, Zea Mays
acgggaaaaaggcacttccccccgcaagccaaaaccctagcaagcaaaccaccggagcagcggcgctcgcgcgggcggagccatggcggacgacgattacaacgaaatcgacatgggctatgaggatgagcctccagaacctgagattgaggaaggggccgaagaagagcttgagaacaacgaagatgcccctgatgatgtcataggtggagagggtgaagataaggaacaggaaaagaccaagcgtgagcgcaaaacaacaaaatatatgacgaagtatgaacgtgcgcgcattcttggtacacgagccttgcagataagcatgaatgctccagtcatggttgagcttgagggagaaactgaccctcttgagattgcgatgaaggagcttagagcgcgcaagatacccttcacgatcagacggtacctacctgatggaagttatgaagactggggagtagacgagctcattgtggaggactcctggaaacgccaggttggtggagactgaagatgctgatctacttggcatggaaaggatgtgtagttacaggtcttcgttgcctctgagtggatgctgaacagtgaatgaaccaagacgaaacgatgctatgctagatgttaccttgacgtctgtggttgccttggaactctggaaccgtgatggctggtggacggtggttgagttatgcttgttcgtttcagtttcagacatgctgtgcagatgattcgtaaactgactcgtctttcattcatttggaagggtttatcgtatcttgctatcttttgtaat

SEQ ID NO: 95390 - DNA, 258 bp, Zea Mays
acctcgaatagccagaaactatcgccagcaaagggagaacgccgaggtgagagagataatgcggtggtggtgctcatggtcggatgaatgggggtgtcgagctatgcgcggttgacgtcctcatcggagcaaaccccttcaccgttggttgccttgtaccgtggcctgggaagtcggtgactgctcatcatggtaggaggccccgaccgaccgtgcaaccgtgtgccgacgctgtggctgtgcgccaatgaaatcacg

SEQ ID NO: 95391 - DNA, 192 bp, Zea Mays
atgcggtggtggtgctcatggtcggatgaatggggtgtcgggctatgcgcggttgacgtcctcatcggagcaaaccccttcaccgttggttgcctcgtgccgtggcctgggaagtcggtgactgctcatcatggtaggaggcctcgaccgaccgtgcaaccctgtgccgacgctgtggctgtgcgccaatga

SEQ ID NO: 95392 - DNA, 3940 bp, Zea Mays
tttattttttcttaactgctagtgatcctgaatctttgttaatatagggaattaaccgggagagagtggaacaaatggagtttcgccttaaggaagatattcttcaggaagcttcaaggtatggtaataagatactggtcactgatgagctgccaagtggtcagatggtggatcagtgggaatcagttgtgtatgatacagttaagactccacttgaggtatatgaggagttgcaacatcaaggctacctagttgactacgaacgtgttccaattactgatgagaaagcaccaaaggaaggagattttgacaacctggtacgtcgaatctctcaagttgatatagaaacagaaattgtgtttaactgccaaatggggagggggcggacaactactggtatggttatagctacattggtttacctaaaccgaattggagcttcaggtatccctagaacgggctctattgggaaggtcttctatgctggaaatgatgtagacgattatatgcctagctcagaagaagcaatactcagaggcgaatatgctgtcattaggagtttagtccgagttctcgaaggtggtgttgaaggcaaaaggcaagtggacaaagttattgacaaatgcgactccatgcagaacctaagagaagctattgctacttaccgcaataacattcttcggcaacctgatgagatgaaacgagaggcatcactttccttctttgtggagtacttggaacgttattacttccttatatgctttgctgtctatgtgcattcggtgagctctgctcaccaaacaacattatcagtagaagttagtttttctgattggatgagagcaaggcctgaactgtacagcattcttcgaaggctattgagaagagatccaatgggtgctcttggttactcaagttcaaaaccccctcttacaaaaattgttgagtctgctaatgggcgtccacaagatatggacgttgttgctgccatgaggaatggagaagttcttgggcgtctaactgttttaaaaagcgaccactgcccaggcagccacagccttaatttacccgagagggtggagggtgcaccaaattttcgggaaatccctgggtttccagtctatggtgttgcaaatcctacagttgatggtattcgagctgttatccagtgcatcagtacaagcaagggagggcgacctgtgctatggcataatatgagagaagaaccagttatctacataaatggaaaaccatatgtgctacgcgaagtggaaagaccttgcaagaatatgctggagtacacagggattgatcgtgatagggtcgaacgcatggaagctcggctgaaggaggacattttacgcgaggcagaaagatatggtggagcgataatggttattcatgaaactgacgatggagagatctttgacacatgggaaaatgtagataatgaagctgttctgactccgttggaggtatacaaaaacttggtgagtgaaggccttccgatcaaatatgcacgggtgcccattactgatggtaaagctcccaaaagttcagactttgacacgatagccttcaatgttactgctgctagcaagggcactgctttcgtattcaattgccagatgggcaggggcagaacaactacaggaactgtgattgcttgcttgctgaaacttcgaattgatcatggcagacctattagaatcccagtttgtcaatatgaccatgaagatgatgctatttactcaactggaggagatgcaacagatcacaatggtcacttgaattcagaatcatggaaacctcgtactttgacgaagttaaattctggatttggaatcaatgacattcttctgctgcgaaaaattacaagattatttgataatggaattgagtgtaggcagactttggatactgttattgatagatgttcagctttgcagaatattcggcaagctgttttgaactacacaagagtaattaatcaacaacatgttgagcctagagttaggagggttgcattaaatcgtggcgctgaatatttggagagatacctcaaattaattgccttttctgcataccttggtagtgaagcatttgatggtttctgtggacaaggacaaacaaagatctcatttaaaggatggctgcaacagcggccagagatccaaaccatgaaatggagcataagactgcgacctggccgttttttcactgtgccgcatgagcagaaagcaacatatccacctccacaaggtgatgtaacaatggaaaccattgtcaaagctcgtagtggttctgttctgggaaagggatcaatactcaaaatgtacttctttcctggacagaaaaggtcaagcagtgtgaatttccggggtgcacctcatgttattaaggtggatggataccctgtgtatagcatggcaacacccactattgatggagcgagtgatgttttgtcgtatctgggctctaaagacacaaccggaagaaacattgcacagaaggtggtcgtcacagatcttagagaggaagtggttgtttacatcaagggatcgccatttgttttgagagaactagatcaacctgttgatactttgaagcatgttggcattagtggtccaatggtagagaacatagagacaaggctaaaggaggatatactctctgaagttaaacagctaggtggtcggttactgcttcatcaagaagaatttaatgcagccacaaatcaatgtagtgtggtaggttactgggaacacatagatctggaggacgtgatgacaccagctgaagtgtacagcacattgagagacaagggctattgtatcgagtacaaaagaatacctctaaccagggaaagagaagcattagctgccgatgtagatgctatacaatcatcaattgatgaatctgctaggtactatctctttatttcacacactggatatggaggtgttgcttatgcgatggccattacctgcctgggactgagtgcagatgcaaagtttgtaatggaagaaacagcagaaacacactttgtatcaacatctcttgcgaaaaatgtgtccatcaaaactaaaactgacatagcacttaagcagggtgactaccgtgacatattaaaccttactagagtgttggtacatgggcccaagagcaaagaagaggttgacacagttattgacaggtgttctggtgctggtcatctgcgcgaagatattatgcattacaggaaagcactgcaagattgttcacatgacgacgacgacgactgtgatgaggaacactcttatctcactgatatgggcacaaaagctttgaggcgttacttttttctgatcaccttcagatcctacctatacagcacgacatcatgcaaaacaacatttacatcatggatgaaggcaaggcctgaacttggccacctttgcgacaatctaaagctggacaaataggccatcttcatgtgacgtgattatgtagttgtgtcacttccttggacacattcacccagagtttcaaaaaggaaggagactaaaagaacgggtagagaggaagcagtggttatgggagttgtggacaatgaaagagcagcttaggctgtccgaaagtagggcattgtactatacttgtcggtgttaattgacaccagcaagcatgtatatattgtcaggcgtattatagatgaacatattagatatttctattgtagtattttctcaaattttaaaagaatcatttcatgcagttcattctcatgtatgtatctgatatgcttgctttttcagcagcgtttttttagacaaagctcttcggcagctttgatttttgacttctctgccttctgggcgtcaatatggccgcagccttttctaggagttgtattgagctaggatgaagcttgaaagaaatacgatgtcttgtttctaaa

SEQ ID NO: 95393 - DNA, 4332 bp, Zea Mays
ccgcctattggcctcgtccgcttccgcttcgacccctccccggcccgcctcggcctcgcgctccctcctcctcctcctcctcctcgcctccgcacccgggcaacccccgccctgccacggcgccgcggccagagccaggctctcccgcgtggaattcacgggacggaggccgctggtgccgcccgccgccgcctccgccaagatggacgccggggagatggaggacgtgcgggccgccgcggccgccgaggaggtcatcagcagcaggggcggctccgtgctggggaagaagaccatcctcaagagcgaccacttcccgggctgccagaacaagcgcctctccccgcagatcgacggcgcgcccaattaccgccaggctgggtcgctgcgtgttcatggtgttgcaatgcccacgatggaagggattgctaatgtgctaaatcatatcggagcacacaagaaaggaaagcaaacccggattctatggcatagtcttcgggaggaaccagttatctacatcaatggtcgaccctttgttttgcgggatgttgaaaagcccttctcgaatcttgaatacacgggaattaaccgggagagagtggaacaaatggagtttcgccttaaggaagatattcttcaggaagcttcaaggtatggtaataagatactggtcactgatgagctgccaagtggtcagatggtggatcagtgggaatcagttgtgtatgatacagttaagactccacttgaggtatatgaggagttgcaacatcaaggctacctagttgactacgaacgtgttccaattactgatgagaaagcaccaaaggaaggagattttgacaacctggtacgtcgaatctctcaagttgatatagaaacagaaattgtgtttaactgccaaatggggagggggcggacaactactggtatggttatagctacattggtttacctaaaccgaattggagcttcaggtatccctagaacgggctctattgggaaggtcttctatgctggaaatgatgtagacgattatatgcctagctcagaagaagcaatactcagaggcgaatatgctgtcattaggagtttagtccgagttctcgaaggtggtgttgaaggcaaaaggcaagtggacaaagttattgacaaatgcgactccatgcagaacctaagagaagctattgctacttaccgcaataacattcttcggcaacctgatgagatgaaacgagaggcatcactttccttctttgtggagtacttggaacgttattacttccttatatgctttgctgtctatgtgcattcggtgagctctgctcaccaaacaacattatcagtagaagttagtttttctgattggatgagagcaaggcctgaactgtacagcattcttcgaaggctattgagaagagatccaatgggtgctcttggttactcaagttcaaaaccccctcttacaaaaattgttgagtctgctaatgggcgtccacaagatatggacgttgttgctgccatgaggaatggagaagttcttgggcgtctaactgttttaaaaagcgaccactgcccaggcagccacagccttaatttacccgagagggtggagggtgcaccaaattttcgggaaatccctgggtttccagtctatggtgttgcaaatcctacagttgatggtattcgagctgttatccagtgcatcagtacaagcaagggagggcgacctgtgctatggcataatatgagagaagaaccagttatctacataaatggaaaaccatatgtgctacgcgaagtggaaagaccttgcaagaatatgctggagtacacagggattgatcgtgatagggtcgaacgcatggaagctcggctgaaggaggacattttacgcgaggcagaaagatatggtggagcgataatggttattcatgaaactgacgatggagagatctttgacacatgggaaaatgtagataatgaagctgttctgactccgttggaggtatacaaaaacttggtgagtgaaggccttccgatcaaatatgcacgggtgcccattactgatggtaaagctcccaaaagttcagactttgacacgatagccttcaatgttactgctgctagcaagggcactgctttcgtattcaattgccagatgggcaggggcagaacaactacaggaactgtgattgcttgcttgctgaaacttcgaattgatcatggcagacctattagaatcccagtttgtcaatatgaccatgaagatgatgctatttactcaactggaggagatgcaacagatcacaatggtcacttgaattcagaatcatggaaacctcgtactttgacgaagttaaattctggatttggaatcaatgacattcttctgctgcgaaaaattacaagattatttgataatggaattgagtgtaggcagactttggatactgttattgatagatgttcagctttgcagaatattcggcaagctgttttgaactacacaagagtaattaatcaacaacatgttgagcctagagttaggagggttgcattaaatcgtggcgctgaatatttggagagatacctcaaattaattgccttttctgcataccttggtagtgaagcatttgatggtttctgtggacaaggacaaacaaagatctcatttaaaggatggctgcaacagcggccagagatccaaaccatgaaatggagcataagactgcgacctggccgttttttcactgtgccgcatgagcagaaagcaacatatccacctccacaaggtgatgtaacaatggaaaccattgtcaaagctcgtagtggttctgttctgggaaagggatcaatactcaaaatgtacttctttcctggacagaaaaggtcaagcagtgtgaatttccggggtgcacctcatgttattaaggtggatggataccctgtgtatagcatggcaacacccactattgatggagcgagtgatgttttgtcgtatctgggctctaaagacacaaccggaagaaacattgcacagaaggtggtcgtcacagatcttagagaggaagtggttgtttacatcaagggatcgccatttgttttgagagaactagatcaacctgttgatactttgaagcatgttggcattagtggtccaatggtagagaacatagagacaaggctaaaggaggatatactctctgaagttaaacagctaggtggtcggttactgcttcatcaagaagaatttaatgcagccacaaatcaatgtagtgtggtaggttactgggaacacatagatctggaggacgtgatgacaccagctgaagtgtacagcacattgagagacaagggctattgtatcgagtacaaaagaatacctctaaccagggaaagagaagcattagctgccgatgtagatgctatacaatcatcaattgatgaatctgctaggtactatctctttatttcacacactggatatggaggtgttgcttatgcgatggccattacctgcctgggactgagtgcagatgcaaagtttgtaatggaagaaacagcagaaacacactttgtatcaacatctcttgcgaaaaatgtgtccatcaaaactaaaactgacatagcacttaagcagggtgactaccgtgacatattaaaccttactagagtgttggtacatgggcccaagagcaaagaagaggttgacacagttattgacaggtgttctggtgctggtcatctgcgcgaagatattatgcattacaggaaagcactgcaagattgttcacatgacgacgacgacgactgtgatgaggaacactcttatctcactgatatgggcacaaaagctttgaggcgttacttttttctgatcaccttcagatcctacctatacagcacgacatcatgcaaaacaacatttacatcatggatgaaggcaaggcctgaacttggccacctttgcgacaatctaaagctggacaaataggccatcttcatgtgacgtgattatgtagttgtgtcacttccttggacacattcacccagagtttcaaaaaggaaggagactaaaagaacgggtagagaggaagcagtggttatgggagttgtggacaatgaaagagcagcttaggctgtccgaaagtagggcattgtactatacttgtcggtgttaattgacaccagcaagcatgtatatattgtcaggcgtattatagatgaacatattagatatttctattgtagtattttctcaaattttaaaagaatcatttcatgcagttcattctcatgtatgtatctgatatgcttgctttttcagca

SEQ ID NO: 95394 - DNA, 258 bp, Zea Mays
atggccgccgctgctccaggtccaggaccatctcctcatcaacgaccgctccgctgcttcctactgctggtcctgctcgtctcttctccgcattattcctcgggggctcgcacatcaccagacctcgccggcggcacactccagtacggtgcacggaaactcatcagcatcgacaacccggtcactcctccgccgccggcgccggtatcgggacctccaattggccctggatttgtcaggccgccgcaggaggtgtga

SEQ ID NO: 95395 - DNA, 2532 bp, Zea Mays
atgcccgcgcgtgccctcgcctccgccgccctcgcgacgctgcgccctcccccgcgatgcccgcgccctccgtccgccgcgagatccccgcccttccctcaaaccctgtcctgcacctcgtgcctccgcctccactcgcgatgctcctgcccgccccaccgccgtgacaaccgccttcgcatccgccgccagatccccgcccttcccccaaaccctgcccccatcgtctctgcagatccggcgttcgctcgggtctccttgcctcgccggggtcccaccgcgatggtcgaggagcatggtgggcgcggggaggcgggaacgagcggcggaggagatgtcgagtacgacgacgatgactcgatgcgtcccaccgccgagcccgccaaggaggaggacatcgagggagctgtgtgcagcgccccctgtcgtcgcgccgtcaggaatactaccccctccccctcgcgcgacatggtggatgcacgggccagtaccggtggtgaggatcccacggccgtggacgtcgtcgtgacacaactagctctgcaccggctgcgtccacctctagactttcttgcatcgcctatcgccctgctggaagattgtaaatacagtgaacatcatcgatgccaaaatcagagatcggatgttaaggggaactgctgtcggggcctaggttctcggactggtggtcgtgcgcggggctgcggtccgccttcgacctgcccatcgcggcggcgtagctgcagatcaaagcaaagcaggggcgagcaaagcagggccgcccagatcgagacgtcgtcgaggccgagcagagctccacacctccacctaggccacccgcttgccagagtggaggacgagctcctcctgtgccttcgccagctatgtgctccgtgctccgccgcctgtctccctaggccacagggaggttgtgtgggggttgcatctgacaacgccaaggcaccgtcgagaccgagcagagctctgtgccttcaccaggtcgcccacccgtccaagtggaggacgagctcctcctcaacagccagtaggccgagctcctccccgcggacccaccctcagccaagatccatagcccgctccgagccagcgcgccacgagctccaccgaggcaccgatcctatctccgccccatgtcttcaagggggaggggcctgaacctgaagcacgggaaggcaaccagggagccattgattataaatatcatgtggagaaacttaattatcatggctttgtttcaagtttcatttctcctcactctcaacttcaagggaataagcctcctgcagttgaaaaatgatgatccagcacatgcagataaagtgaaaaataccttcatattcaacacatttgttttctgccaggttctgcgttttagcttttgcttataaaagaagtttctgccttttgtctaatgcgactccagagctttatgcaacaaatgcagtagtggcctgacatgtgtaattttgtcttcttaggtgttcaacgaattcaattcgtgtaaaccagatgagctgaatgtattcaagggcatttcagagaaccatctgtttattggcatcatagctataacagttgtactccaggtagaatctctagaatgagtttcctttcttaactaagataaattgatttaggtctaagaaactgttttagatcacctggactttgccacgaataccttttatcagaaaatggggggaacgataaaggatgctggaaaatgaaatatattattatagctaataaattggctttcctggaggaactaggatttggacccagccaagtggccaagtgtatggaagaatcgtgtcgtggcacagacgaccagctgcttgactctccctcttctgtctgatcacatttgtacgcaagatatagatagtactactatacagtggagtcttcttgcagtttgtctattttacacaactgacatagtcttcaggtatctcattgtctgttcttatttagttatattaatgatgtttactattaattttgaccatcacaacttcgacttgtccagctctgcctctatttgtcggttcagctctgcttctataatttttttggtccactgtacaatgggctcctttattacctccttgagaatccttttcagtttggtccactgtctcatcatccatcgaatcacggccgaggcacacaatctaaaaggcaaaagaattatagaggcagagctggacatagtcttcagttgaatttaaggttcctcttcccttgtttggaagaggttatgatcattgtacgctcccggctcaatgttgaacactcttgaagtacactgtgaagttgcagaggatggtcatcagaatctcaaagatcaagaattgccataaaggtgctgatgagttctttgatgatatatgtaatttcaattacatgaactataagaaagtgcaaattgaataagtagagatgatataatattacatatttatatcatcaaaataatattaatattacgatgatattttatcacaa

SEQ ID NO: 95396 - DNA, 1238 bp, Zea Mays
atgcccgcgcgtgccctcgcctccgccgccctcgcgacgctgcgccctcccccgcgatgcccgcgccctccgtccgccgcgagatccccgcccttccctcaaaccctgtcctgcacctcgtgcctccgcctccactcgcgatgctcctgcccgccccaccgccgtgacaaccgccttcgcatccgccgccagatccccgcccttcccccaaaccctgcccccatcgtctctgcagatccggcgttcgctcgggtctccttgcctcgccggggtcccaccgcgatggtcgaggagcatggtgggcgcggggaggcgggaacgagcggcggaggagatgtcgagtacgacgacgatgactcgatgcgtcccaccgccgagcccgccaaggaggaggacatcgagggagctgtgtgcagcgccccctgtcgtcgcgccgtcaggaatactaccccctccccctcgcgcgacatggtggatgcacgggccagtaccggtggtgaggatcccacggccgtggacgtcgtcgtgacacaactagctctgcaccggctgcgtccacctctagactttcttgcatcgcctatcgccctgctggaagattgtaaatacagtgaacatcatcgatgccaaaatcagagatcggatgttaaggggaactgctgtcggggcctaggttctcggactggtggtcgtgcgcggggctgcggtccgccttcgacctgcccatcgcggcggcgtagctgcagatcaaagcaaagcaggggcgagcaaagcagggccgcccagatcgagacgtcgtcgaggccgagcagagctccacacctccacctaggccacccgcttgccagagtggaggacgagctcctcctgtgccttcgccagctatgtgctccgtgctccgccgcctgtctccctaggccacagggaggttgtgtgggggttgcatctgacaacgccaaggcaccgtcgagaccgagcagagctctgtgccttcaccaggtcgcccacccgtccaagtggaggacgagctcctcctcaacagccagtaggccgagctcctccccgcggacccaccctcagccaagatccatagcccgctccgagccagcgcgccacgagctccaccgaggcaccgatcctatctccgccccggggaggggcctgaacctgaagcacgggaaggcaaccagccctctgggtccaatcagaaattggcagggaattccaacacagatttg

SEQ ID NO: 95397 - DNA, 2410 bp, Zea Mays
gatgccgtggcccgtgtggatcagatgacttggcggctacgaagggttctctctttccattcctccgcgccgccactagctgtcctaaaccctaccaccacttgagcctccaccttctccgcgtctcaccttcttctccgttctccttccgctcccctcttcacaacgaagccctagtgtcccgcgacatggcatctggtctggaggagaaactcgcggggctctcaacgggcggcgacgggcaaaatcctccgccggcgggtgagggcggagaggagccgcagctctcgaagaatgcgaagaagagagaggagaagaggaagaagctggaagaggagcggaggctcaaggaggaagagaagaagaacaaggctgcggctgccagtggaaaacctcagaaggcatctgctgctgacgatgatgacatggatcccactcaatactatgagaataggctcaaggctcttgattcactgaaggccacaggtgtaaacccctatccccataagttcccggttggcatttctgtacccgaatacattgagaagtacaggaccttgagcgagggggagaagcttacagatgtggcagagtgtttagctgggaggatcatgaacaagagaacatcgtcgtcgaagctattcttttatgatctttatggtggtggcatgaaggttcaagtgatggctgatgccaggacctcagagttggatgaagctgaattttctaagtaccactcaggtgtgaagcgaggtgatattgttggcatatgtggatatccaggaaaaagcaaccgaggggagcttagtgtatttccaaagagatttgtcgtcctctctccatgtcttcatatgatgcctcgacagaagggtgaaggaagtgcagtgcctgtaccgtggactccaggaatgggtaggaacatcgaaaattatgttttgagggaccaggaaactcggtatcgtcaaaggtatcttgatcttatggtaaaccatgaagtgaggcacatcttcaagacacgatctaaaattgtctcatttatccgaaagtttcttgatgaccgtgaatttttggaggtggagactccgatgatgaacatgattgctggtggagcagctgcaaggccttttgttacacatcacaatgaattaaacatgcggctttttatgcgcattgctcctgaattatatctgaaggaactggttgttggtggattggaccgtgtttatgaaattggaaagcaattcaggaatgaaggaattgatttaacacacaatcctgaattcacaacttgtgaattttatatggcgtatgcagattataatgatttgatggagcttactgaaaccatgttgtcaggcatggttaaggacctgacaggtggctataagataaaatatcatgcaaatggagttactaaccccccaatagaaattgatttcacgcctcccttcagaaggatagatatgattaaagatttggaggctatggccaatctcagtataccaaaagatctatcaagtgatgaagcgaatcgttatttgatagaagcatgtgtgaagtatgatgtgaaatgtccacctccccaaacgacatcgcggttgcttgacaagttggttggccatttcttggaggagacatgtgtgaatccaacatttatcatcaatcatccagagataatgagtccattagcaaagtggcataggtcccgacctggattgactgagaggttcgagttgtttgttaacaaacatgaggtgtgcaacgcatacacagagttgaacgatcctgttgtgcagaggcaacggtttgaggaacaactaaaggaccgtcaatctggtgatgacgaagctatggctttggacgaaacattctgtactgcccttgagtatggtttggcaccaacaggtggttggggcttgggaattgatcgcctcacgatgttgctaacagattctcagaacattaaggaagtacttctattcccggctatgaagcctcaagagtagtaatccacagccaaaagccacaaaaggctcaaagcaaacatgatgctacataggctggaggatacatcaaagttggacctgttgtgaattatacttatttttgctcttgtgcgtgcgaggtttccatttttcattatttgtatttcccagcagacagttattaactaaatactgtaacgtcacagtaagttcagtttaacttcaaacattgtagttttgaggagattgcaaatatttcgggtcaatgcaattggtgcttttgatagccatgcaaaatgcctcttctcgtcatgatcgtgtttgctttatgctgatgttcagccatcattcaggttaaactggcatgtaaatgtaaaccgtgcaatcagctgggtttgatattataaattttaattggcaataca

SEQ ID NO: 95398 - DNA, 701 bp, Zea Mays
atgtatgtgatcagaaaataactgctagcaacccacaattaggtgggtccaattgagatagaacattaaaagctacattaccattttcatcgtgactaatgagtaatgacattgacatcccatattttacccccatgccttggcaccagcaaagaacgatgattgcctattaccctgtgctgggcttgaggtggatgagggaacatacaccctacactatggtgatatttcaagatatctgtatgattctagattcactgggcgtgctgtgtccattgttctactttattggaagttctgtttgagatgctgcatcttcagttgtctactgccccggtgctgattatgttgtataattcagacgtgctcattgttgattttgtacacgagtttgcactgcataggcagataggctggaggatacgctaacttggatatttgtgtcacagctcaaagcaaacatgatgctacataggctggaggatacatcaaagttggacctgttgtgaattatacttatttttgctcttgtgcgtgcgaggtttccatttttcattatttgtatttcccagcagacagttattaactaaatactgtaacgtcacagtaagttcagtttaacttcaaacattgtagttttgaggagattgcaaatatttcgggtcaatgcaattggtgcttttgatagccatgcaaaatgc

SEQ ID NO: 95399 - DNA, 2585 bp, Zea Mays
gatgccgtggcccgtgtggatcagatgacttggcggctacgaagggttctctctttccattcctccgcgccgccactagctgtcctaaaccctaccaccacttgagcctccaccttctccgcgtctcaccttcttctccgttctccttccgctcccctcttcacaacgaagccctagtgtcccgcgacatggcatctggtctggaggagaaactcgcggggctctcaacgggcggcgacgggcaaaatcctccgccggcgggtgagggcggagaggagccgcagctctcgaagaatgcgaagaagagagaggagaagaggaagaagctggaagaggagcggaggctcaaggaggaagagaagaagaacaaggctgcggctgccagtggaaaacctcagaaggcatctgctgctgacgatgatgacatggatcccactcaatactatgagaataggctcaaggctcttgattcactgaaggccacaggtgtaaacccctatccccataagttcccggttggcatttctgtacccgaatacattgagaagtacaggaccttgagcgagggggagaagcttacagatgtggcagagtgtttagctgggaggatcatgaacaagagaacatcgtcgtcgaagctattcttttatgatctttatggtggtggcatgaaggttcaagtgatggctgatgccaggacctcagagttggatgaagctgaattttctaagtaccactcaggtgtgaagcgaggtgatattgttggcatatgtggatatccaggaaaaagcaaccgaggggagcttagtgtatttccaaagagatttgtcgtcctctctccatgtcttcatatgatgcctcgacagaagggtgaaggaagtgcagtgcctgtaccgtggactccaggaatgggtaggaacatcgaaaattatgttttgagggaccaggaaactcggtatcgtcaaaggtatcttgatcttatggtaaaccatgaagtgaggcacatcttcaagacacgatctaaaattgtctcatttatccgaaagtttcttgatgaccgtgaatttttggaggtggagactccgatgatgaacatgattgctggtggagcagctgcaaggccttttgttacacatcacaatgaattaaacatgcggctttttatgcgcattgctcctgaattatatctgaaggaactggttgttggtggattggaccgtgtttatgaaattggaaagcaattcaggaatgaaggaattgatttaacacacaatcctgaattcacaacttgtgaattttatatggcgtatgcagattataatgatttgatggagcttactgaaaccatgttgtcaggcatggttaaggacctgacaggtggctataagataaaatatcatgcaaatggagttactaaccccccaatagaaattgatttcacgcctcccttcagaaggatagatatgattaaagatttggaggctatggccaatctcagtataccaaaagatctatcaagtgatgaagcgaatcgttatttgatagaagcatgtgtgaagtatgatgtgaaatgtccacctccccaaacgacatcgcggttgcttgacaagttggttggccatttcttggaggagacatgtgtgaatccaacatttatcatcaatcatccagagataatgagtccattagcaaagtggcataggtcccgacctggattgactgagaggttcgagttgtttgttaacaaacatgaggtgtgcaacgcatacacagagttgaacgatcctgttgtgcagaggcaacggtttgaggaacaactaaaggaccgtcaatctggtgatgacgaagctatggctttggacgaaacattctgtactgcccttgagtatggtttggcaccaacaggtggttggggcttgggaattgatcgcctcacgatgttgctaacagattctcagaacattaaggaagtacttctattcccggctatgaagcctcaagagtagtaatccacagccaaaagccacaaaaggcaaagaacgatgattgcctattaccctgtgctgggcttgaggtggatgagggaacatacaccctacactatggtgatatttcaagatatctgtatgattctagattcactgggcgtgctgtgtccattgttctactttattggaagttctgtttgagatgctgcatcttcagttgtctactgccccggtgctgattatgttgtataattcagacgtgctcattgttgattttgtacacgagtttgcactgcataggcagataggctggaggatacgctaacttggatatttgtgtcacagctcaaagcaaacatgatgctacataggctggaggatacatcaaagttggacctgttgtgaattatacttatttttgctcttgtgcgtgcgaggtttccatttttcattatttgtatttcccagcagacagttattaactaaatactgtaacgtcacagtaagttcagtttaacttcaaacattgtagttttgaggagattgcaaatatttcgggtcaatgcaattggtgcttttgatagccatgcaaaatgc

SEQ ID NO: 95400 - DNA, 2472 bp, Zea Mays
gatgccgtggcccgtgtggatcagatgacttggcggctacgaagggttctctctttccattcctccgcgccgccactagctgtcctaaaccctaccaccacttgagcctccaccttctccgcgtctcaccttcttctccgttctccttccgctcccctcttcacaacgaagccctagtgtcccgcgacatggcatctggtctggaggagaaactcgcggggctctcaacgggcggcgacgggcaaaatcctccgccggcgggtgagggcggagaggagccgcagctctcgaagaatgcgaagaagagagaggagaagaggaagaagctggaagaggagcggaggctcaaggaggaagagaagaagaacaaggctgcggctgccagtggaaaacctcagaaggcatctgctgctgacgatgatgacatggatcccactcaatactatgagaataggctcaaggctcttgattcactgaaggccacaggtgtaaacccctatccccataagttcccggttggcatttctgtacccgaatacattgagaagtacaggaccttgagcgagggggagaagcttacagatgtggcagagtgtttagctgggaggatcatgaacaagagaacatcgtcgtcgaagctattcttttatgatctttatggtggtggcatgaaggttcaagtgatggctgatgccaggacctcagagttggatgaagctgaattttctaagtaccactcaggtgtgaagcgaggtgatattgttggcatatgtggatatccaggaaaaagcaaccgaggggagcttagtgtatttccaaagagatttgtcgtcctctctccatgtcttcatatgatgcctcgacagaagggtgaaggaagtgcagtgcctgtaccgtggactccaggaatgggtaggaacatcgaaaattatgttttgagggaccaggaaactcggtatcgtcaaaggtatcttgatcttatggtaaaccatgaagtgaggcacatcttcaagacacgatctaaaattgtctcatttatccgaaagtttcttgatgaccgtgaatttttggaggtggagactccgatgatgaacatgattgctggtggagcagctgcaaggccttttgttacacatcacaatgaattaaacatgcggctttttatgcgcattgctcctgaattatatctgaaggaactggttgttggtggattggaccgtgtttatgaaattggaaagcaattcaggaatgaaggaattgatttaacacacaatcctgaattcacaacttgtgaattttatatggcgtatgcagattataatgatttgatggagcttactgaaaccatgttgtcaggcatggttaaggacctgacaggtggctataagataaaatatcatgcaaatggagttactaaccccccaatagaaattgatttcacgcctcccttcagaaggatagatatgattaaagatttggaggctatggccaatctcagtataccaaaagatctatcaagtgatgaagcgaatcgttatttgatagaagcatgtgtgaagtatgatgtgaaatgtccacctccccaaacgacatcgcggttgcttgacaagttggttggccatttcttggaggagacatgtgtgaatccaacatttatcatcaatcatccagagataatgagtccattagcaaagtggcataggtcccgacctggattgactgagaggttcgagttgtttgttaacaaacatgaggtgtgcaacgcatacacagagttgaacgatcctgttgtgcagaggcaacggtttgaggaacaactaaaggaccgtcaatctggtgatgacgaagctatggctttggacgaaacattctgtactgcccttgagtatggtttggcaccaacaggtggttggggcttgggaattgatcgcctcacgatgttgctaacagattctcagaacattaaggaagtacttctattcccggctatgaagcctcaagagtagtaatccacagccaaaagccacaaaaggcaaagaacgatgattgcctattaccctgtgctgggcttgaggtggatgagggaacatacaccctacactatggtgatatttcaagatatctgtatgattctagattcactgggcgtgctgtgtccattgttctactttattggaagttctgtttgagatgctgcatcttcagttgtctactgccccgctcaaagcaaacatgatgctacataggctggaggatacatcaaagttggacctgttgtgaattatacttatttttgctcttgtgcgtgcgaggtttccatttttcattatttgtatttcccagcagacagttattaactaaatactgtaacgtcacagtaagttcagtttaacttcaaacattgtagttttgaggagattgcaaatatttcgggtcaatgcaattggtgcttttgatagccatgcaaaatgc

SEQ ID NO: 95401 - DNA, 2456 bp, Zea Mays
gatgccgtggcccgtgtggatcagatgacttggcggctacgaagggttctctctttccattcctccgcgccgccactagctgtcctaaaccctaccaccacttgagcctccaccttctccgcgtctcaccttcttctccgttctccttccgctcccctcttcacaacgaagccctagtgtcccgcgacatggcatctggtctggaggagaaactcgcggggctctcaacgggcggcgacgggcaaaatcctccgccggcgggtgagggcggagaggagccgcagctctcgaagaatgcgaagaagagagaggagaagaggaagaagctggaagaggagcggaggctcaaggaggaagagaagaagaacaaggctgcggctgccagtggaaaacctcagaaggcatctgctgctgacgatgatgacatggatcccactcaatactatgagaataggctcaaggctcttgattcactgaaggccacaggtgtaaacccctatccccataagttcccggttggcatttctgtacccgaatacattgagaagtacaggaccttgagcgagggggagaagcttacagatgtggcagagtgtttagctgggaggatcatgaacaagagaacatcgtcgtcgaagctattcttttatgatctttatggtggtggcatgaaggttcaagtgatggctgatgccaggacctcagagttggatgaagctgaattttctaagtaccactcaggtgtgaagcgaggtgatattgttggcatatgtggatatccaggaaaaagcaaccgaggggagcttagtgtatttccaaagagatttgtcgtcctctctccatgtcttcatatgatgcctcgacagaagggtgaaggaagtgcagtgcctgtaccgtggactccaggaatgggtaggaacatcgaaaattatgttttgagggaccaggaaactcggtatcgtcaaaggtatcttgatcttatggtaaaccatgaagtgaggcacatcttcaagacacgatctaaaattgtctcatttatccgaaagtttcttgatgaccgtgaatttttggaggtggagactccgatgatgaacatgattgctggtggagcagctgcaaggccttttgttacacatcacaatgaattaaacatgcggctttttatgcgcattgctcctgaattatatctgaaggaactggttgttggtggattggaccgtgtttatgaaattggaaagcaattcaggaatgaaggaattgatttaacacacaatcctgaattcacaacttgtgaattttatatggcgtatgcagattataatgatttgatggagcttactgaaaccatgttgtcaggcatggttaaggacctgacaggtggctataagataaaatatcatgcaaatggagttactaaccccccaatagaaattgatttcacgcctcccttcagaaggatagatatgattaaagatttggaggctatggccaatctcagtataccaaaagatctatcaagtgatgaagcgaatcgttatttgatagaagcatgtgtgaagtatgatgtgaaatgtccacctccccaaacgacatcgcggttgcttgacaagttggttggccatttcttggaggagacatgtgtgaatccaacatttatcatcaatcatccagagataatgagtccattagcaaagtggcataggtcccgacctggattgactgagaggttcgagttgtttgttaacaaacatgaggtgtgcaacgcatacacagagttgaacgatcctgttgtgcagaggcaacggtttgaggaacaactaaaggaccgtcaatctggtgatgacgaagctatggctttggacgaaacattctgtactgcccttgagtatggtttggcaccaacaggtggttggggcttgggaattgatcgcctcacgatgttgctaacagattctcagaacattaaggttcgagtatttccactagttttctatatgatgtattgatgtccaatgccttcttgatcttcttggctttcagtggattattattgactgatagattaccttccaatgcaaactcaggaagtacttctattcccggctatgaagcctcaagagtagtaatccacagccaaaagccacaaaagggtatgcttacgagtctgtaacttttaagactctttgtttgctcggttgaaaacattaaagcatgtaaggcattttttctatgcatttttcaagttgaaagaacatttaaataatgcacctttctgaggtatggtttagagttagggtgtctataattcaatacacatttttaggccaagtgacctcttaacgtttttctgcatttagactgtgctcaggatcgttcaactctgtgtatgtgtataggtgttctcacagactttttaaggttgtataaaattatgacttccaccacagaaattataa

SEQ ID NO: 95402 - DNA, 951 bp, Zea Mays
gagtcacaactcacaatcaccccgttcatcttccatgagcccaataattataccaacaaaacaaacttctacagagaaaaaccagctgcagcagaccaaatctgaagagaatctgcatagcatagttccttctactaaatactaatgctcctatttagttaactgtcattaactaaagaaaaaatggcatgcaaggtttaaacgtaaatcgtctgcattcatcatctctgtcaatcagtcaacagaaagtgtacaacatgcgactggtctggaaattgttgtctgttctaaatgttgcttctgttgctaatatgccttgagagcatctccacatggaaaactcaacagctcaacaattatttgtcctcctgcacaggagtaaaaagaagcaagaaaactcttgcaaatattttgtcctcagctcgtggcatatgaaactctttggttcttcaactgtggtgttatttaatattctctctcgttatggggaacaccgtagaactctgccaggtactccaaagcttcatgattcccatcacaaaccttccaaagtgatgcaacttcgcccggagcaaccgtgccccactcctggcagtcattcagaaattccaaaagcttggagtaataagaatcgtagttgagaagcaagaccgggaccgggagcgctgacccgatcctctctagttgaatcagcgccaagatctcaaacagctcgtccagcgtcccaacccctcctggcagcgcaaccacagcggttctgtcagtagagctgctccgcaccgcagcatccaccaggccatgcttcctcgcagagaagaacctgaaattcagcttagcgcatagcgatcaccatgtctcataagctgtggtgaatcttattttgcatcctcagaaaattcaggtacctgcatgtgaggtaggtctccggtggcaggtaaggatggaagcctg

SEQ ID NO: 95403 - DNA, 3725 bp, Zea Mays
ctcctcctcccttccacactcctctccactcacgattctcttcccttgattccgctagctgatcagcgtctcgccggagtaatacacagcagcagtaagaggccatggagatggtgcggcggaacctgaagcggcaggcgtcgcgctcgctttccgccttcgctggcgccgcatccccgcacgccgtcgaccaggagaacctccaccccaacctcgcctccacgccgccggcgtcgcccgccaagggcacctcctcgccgcgccccaagcacccagcggctgcggctgcggctgcggctcaaccggcggccaccgccgaggaggatcactccacagcccctacgaccgcgccagcggacgacgagcgcttcgtcaaggtggtggtgagggtgcggccgacggtgagccggccggtgaacggcaaggatctgtggttcgtccgcaagaccgccccagactcagtcgctgtcggcgaccggtccttcccagtggatggcgtcctcgacgacagggcctctcaggccgatgcgtttgatctggtgggattgcccatgatcgagaatgctatggccggattcaacacctccctcgtctgctatggccagagtggcaccgggaagacatacaccatgtggggccctctcggcgccatggttgacagtggctctgaccatgctgaccgcggcgttgttcctcgggttttccagaacctgttctctcggatccaaagaatgggagagagttctcctgagaagcagacgagctaccagtgccgttgctcgttcctcgaggtgtgcagtaatttggttgttttcaactgaaccgtgtcttggaaacggtttctagagcttaaatcagaaataatatatatgatttgcttttccaaattgttgcaggtacataacgagcagatcaatgatctgttggaaccatctcagcgtgacctacagataagagagaacgctagcaatggtatccatgttgagaacttgactgatgaatacgtgtcaacagcagatgatatcagtcagatcttgatgaagggactgtcaaacagaaaagttggtaccaccagtatgaacttaaaaagttcccgctctcatgtgatattcacctgcgttattgaagcatggagcaagggttcatcaaatgggtttagcagctcaagaactagcagaatcacctttgttgacctcgctggtcctgacactgatgaacttggtgcagcaaagcattccacaaaggaagaaagacatcttaagaagtctctttcaaggcttgggaaactagttaacgttctttcagaaactccagagtcacataaagttgatttaccatatgagcaatcccgtttgacacatgtgctgaaggatacactaggtggcaactccagggttatatttttgtgttcgatttcttcagagcacagatgcagatctggaactttaagtacactaagatttggtgagcgagcaaagctaatgccaaacaaacctgtgataaatgagatatcagaagatgatgttaatggtttgagcgatcagatacgtcagttaaaggatgaactcataagaacaaagtctggagacaccacaacttgcaaggctaggtacttcagtgcacaaagtgcccgtgaaagtttgcatactttgcgagtgagcctcaaccgctctcttatctttcctcacatagaagttgattcagaggaagaaatggatgttgatgaagaagatgtgcaagaactgcgtgatcaaattagcaagattcactcttcatctgaagatacattggatgactttatggatgcagaaagtggagacgaaagcactccttgttctgtgggaagaagtgaagatgatcaagtaatcatagatgattttgaaggtccacaacaggaagagcaaaaagaagtatctaacaatacaaatgctaatgaagacctcggttctgacagaaaatctaatctatcaattattgcctccacacggttatcacctattcaggatccaacattgtgctcttctccaaagatccacaacaaggcaagaatgagcatcacttcactggggctatcaccaagcaagattagaatatcagacagcccaggtgatagaaatgttgaaatgtgtacaaatagtgcatttcgttcctctctacaatcaagcaagcttagccccactgactcactggctgcaagtcttcaacgtggcttgcacattatagagtaccatcaacagaatccagccccaagaaaatcatttattggtctttcatttgaccatttcgctcgtcagtcagtagcaaaaatcagttcagctgttcaggctctaccagaggaccaaggaaacaacctttgttcattctgcaagaagccaatgaacacaaatgataatcagacagaaaacgtaaatttagacaaacagattaaggatggcaacataactaaggaaattgcttccaagagagaaactgagcttgaagctttatgcgaagaacaaagagcaaagatccaggagctgagcagtttgattgaccaatataagaacaggtcagaagaactaactagtgaaggcaaggtttctgtctcactcagtgtgaatgagagggaggtacttcttgctgaaatccagagtctgagggagcaactcaaaaaccagactactgtatcaactactggtagccttcttgaccagttaaggaacggcagcacagaccaggagtatgaacttgacaaagaaaggcagaaatggatggagtctgagagcaagtggatttcacttaccgaagagttgagggtcgatctagaatcaaacaggatgcacgcagagaagaccgagatggagctctgcaacgagaagaagtgcacagcagagctagatgacgctcttcaacgagcgatgtacggccacgccaggatggttgagcattatgttgagctgcaggagctgtataatgatcttctcgagaagcaccgccgagtgatggaggcgatctctgaggtgaagagggcggctgccagagcaggcaggaagggctgtgggacggccttcgctgctgccctcgccgccgagctctccacggtgagaatcgaccgagaaaaggagagggctcagctgaaagaacaaaacagaaggctccgcattcagctgcgagacactgccgaagctgttcatgctgctggagaactgctcgtcagattgagagaaaccgaggaagcatctacactagaaaaggagaggactgccgcgttgttgcaagagaacgagaagctgaagaagcagctggagaagctgaggaagaagcacgagatggagctggagacgatgaaggtgcaccttgcggagagccggctgccggagtcggctttgggtgccttctaccaccacgagaacgagaggacgccggacgacgatctgtcctggcgggccgccttcgcttctgcgtacagtgactgaagttacctgactggggattgcttgggagttgagtctcgtcaactgagacaggttgacaattggggcatgagcatttctacgaccttgtttgattttaagtacatgactcgattggggcatggggcaaagtttttatgtatactgcttgtatgggaactgaatttgaacgagttttatgtagtctttcgagtatttttttggtcgatcccccagttcctgtttaccgtactgccaaagtgcagcctctggtcccacctttaactccttttt

SEQ ID NO: 95404 - DNA, 3551 bp, Zea Mays
cgcatttcatctttccaatcaagcgagaagcgtctcctcctcccttccacactcctctccactcacgattctcttcccttgattccgctagctgatcagcgtctcgccggagtaatacacagcagcagtaagaggccatggagatggtgcggcggaacctgaagcggcaggcgtcgcgctcgctttccgccttcgctggcgccgcatccccgcacgccgtcgaccaggagaacctccaccccaacctcgcctccacgccgccggcgtcgcccgccaagggcacctcctcgccgcgccccaagcacccagcggctgcggctgcggctgcggctcaaccggcggccaccgccgaggaggatcactccacagcccctacgaccgcgccagcggacgacgagcgcttcgtcaaggtggtggtgagggtgcggccgacggtgagccggccggtgaacggcaaggatctgtggttcgtccgcaagaccgccccagactcagtcgctgtcggcgaccggtccttcccagtggatggcgtcctcgacgacagggcctctcaggccgatgcgtttgatctggtgggattgcccatgatcgagaatgctatggccggattcaacacctccctcgtctgctatggccagagtggcaccgggaagacatacaccatgtggggccctctcggcgccatggttgacagtggctctgaccatgctgaccgcggcgttgttcctcgggttttccagaacctgttctctcggatccaaagaatgggagagagttctcctgagaagcagacgagctaccagtgccgttgctcgttcctcgaggtacataacgagcagatcaatgatctgttggaaccatctcagcgtgacctacagataagagagaacgctagcaatggtatccatgttgagaacttgactgatgaatacgtgtcaacagcagatgatatcagtcagatcttgatgaagggactgtcaaacagaaaagttggtaccaccagtatgaacttaaaaagttcccgctctcatgtgatattcacctgcgttattgaagcatggagcaagggttcatcaaatgggtttagcagctcaagaactagcagaatcacctttgttgacctcgctggtcctgacactgatgaacttggtgcagcaaagcattccacaaaggaagaaagacatcttaagaagtctctttcaaggcttgggaaactagttaacgttctttcagaaactccagagtcacataaagttgatttaccatatgagcaatcccgtttgacacatgtgctgaaggatacactaggtggcaactccagggttatatttttgtgttcgatttcttcagagcacagatgcagatctggaactttaagtacactaagatttggtgagcgagcaaagctaatgccaaacaaacctgtgataaatgagatatcagaagatgatgttaatggtttgagcgatcagatacgtcagttaaaggatgaactcataagaacaaagtctggagacaccacaacttgcaaggctaggtacttcagtgcacaaagtgcccgtgaaagtttgcatactttgcgagtgagcctcaaccgctctcttatctttcctcacatagaagttgattcagaggaagaaatggatgttgatgaagaagatgtgcaagaactgcgtgatcaaattagcaagattcactcttcatctgaagatacattggatgactttatggatgcagaaagtggagacgaaagcactccttgttctgtgggaagaagtgaagatgatcaagtaatcatagatgattttgaaggtccacaacaggaagagcaaaaagaagtatctaacaatacaaatgctaatgaagacctcggttctgacagaaaatctaatctatcaattattgcctccacacggttatcacctattcaggatccaacattgtgctcttctccaaagatccacaacaaggcaagaatgagcatcacttcactggggctatcaccaagcaagattagaatatcagacagcccaggtgatagaaatgttgaaatgtgtacaaatagtgcatttcgttcctctctacaatcaagcaagcttagccccactgactcactggctgcaagtcttcaacgtggcttgcacattatagagtaccatcaacagaatccagccccaagaaaatcatttattggtctttcatttgaccatttcgctcgtcagtcagtagcaaaaatcagttcagctgttcaggctctaccagaggaccaaggaaacaacctttgttcattctgcaagaagccaatgaacacaaatgataatcagacagaaaacgtaaatttagacaaacagattaaggatggcaacataactaaggaaattgcttccaagagagaaactgagcttgaagctttatgcgaagaacaaagagcaaagatccaggagctgagcagtttgattgaccaatataagaacaggtcagaagaactaactagtgaaggcaaggtttctgtctcactcagtgtgaatgagagggaggtacttcttgctgaaatccagagtctgagggagcaactcaaaaaccagactactgtatcaactactggtagccttcttgaccagttaaggaacggcagcacagaccaggagtatgaacttgacaaagaaaggcagaaatggatggagtctgagagcaagtggatttcacttaccgaagagttgagggtcgatctagaatcaaacaggatgcacgcagagaagaccgagatggagctctgcaacgagaagaagtgcacagcagagctagatgacgctcttcaacgagcgatgtacggccacgccaggatggttgagcattatgttgagctgcaggagctgtataatgatcttctcgagaagcaccgccgagtgatggaggcgatctctgaggtgaagagggcggctgccagagcaggcaggaagggctgtgggacggccttcgctgctgccctcgccgccgagctctccacggtgagaatcgaccgagaaaaggagagggctcagctgaaagaacaaaacagaaggctccgcattcagctgcgagacactgccgaagctgttcatgctgctggagaactgctcgtcagattgagagaaaccgaggaagcatctacactagaaaaggagaggactgccgcgttgttgcaagagaacgagaagctgaagaagcagctggagaagctgaggaagaagcacgagatggagctggagacgatgaaggtgcaccttgcggagagccggctgccggagtcggctttgggtgccttctaccaccacgagaacgagaggacgccggacgacgatctgtcctggcgggccgccttcgcttctgcgtacagtgactgaagttacctgactggggattgcttgggagttgagtctcgtcaactgagacaggttgacaattggggcatgagcatttctacgaccttgtttgattttaagtacatgactcgattggggcatggggcaaagtttttatgtatactgcttgtatgggaactgaatttgaac

SEQ ID NO: 95405 - DNA, 2028 bp, Zea Mays
cagctcgagaagaaaatcctaccgtgctcgattcttccctgcgcgtctcctccgcttggagcttcctacgctccctgcgtccctctgtggccggaactcccttcatggccggagctcggacggcgctcggtcctgccactcccatggccgcgcccccctgcttctctctctcagcgctcgcggctctttctttcctgctccgtccatggctgtttgcctctgctcgcggcgtccctgctcgcccagccgagctctccactgcccagctccatctcacggcgctctgtctgctcggttccatggcctcggtactccagctcgtcgtgacctgctccctctgtttccatggcaggctctctgctcgtcgcgcgcgcctggacgatctccctggtggctgcctgttctccctgtgtaccgcgcgagttctttggtagacgcgcgctggccgtgctccacttcgccccatcgcggcgctccagttccaactcgctgcgcgccgagctcttcgctgttgtccgtgcgcgcgcgccgctcgtcgacctctctgctcacgtatagctcgctctttccttgtttgccgcgcgcacgaatttcatctgctcccacaagcatgtcgagttcccgcaccatcatcgcttctgtcacaagctcgttgaccacagttattttgatcgtgtcagctcgcgactgtggtcatgttcatcgaattcgccaacactttgttgccgattcgattgtcgtcgtttcgcgtgttgtcgagcccgtcgttttccccgttttgtactcgcatggttttctgctcgccggtgcgccctctcggctcgctcggctttaattcctaatcgcgtcgtcgattccaccggttagcgtcgttgcgtcgcgggtgcagctctatatacatcaccctcccgtgtcgtcgtcgttccgcgtgtcagcaagaaaaccaaagaatcaggtgaagacgaagctagcagcgcgatattccctaagcgctcgataaattgcctggatcggaaaatcgctaccgatctcgtggattcgtgtcagctctggaaacggtaagctgataaattattcagaatagtttgatcgatgaataaattaaagtgctagtgcgatgctcattaaggtgctcgataaattgcgtaagtcacgaaactctcatcgacttcgcagttcttgcgattatcgagccagattgagttatagcgagttatttcgctattccggtcacttagctgaattagtggaccgagtagaattttggcaagcatgtgtgatgatgaaatattttattcacttataaagatgtagtataatttataaagaaagggattaattcagaatttaattaattaactaataagttgtgattaggctaattgtatttcatgtgtataatttgttgttcgtgatgtttgcgttaggtttgaaaagcgtaattattgcgcgtagtcgtatattaataactagtgttttcgtacaaacttgtacaacgcctcaccgctaggtgttaaattcgctatcgcgtagcactatttaggtttgtaatattctcgtttatatgcattcatgtgcataatgcatttcattcaggtacgttaattaatcgcgtgatgcggagaacgacccaagtcgaccccaagcatgggccaatccacatgatgatgctaatggacaaacctgaagaggatcgtcaagtggacatcgtctaacaacactaacctagtgttacccaggcaagccccggtgcatgcaaccccttccttgtgtttttaaattatttttacatactttaagtctagtgaatgtgcattaggtttataggagttgcttgaaaactctttgatgcattggctaccttgaaatccatcccttttatagatacttctggtgaagtatcaaaatataatttacaaaaaaatgcttagccctgcttataagcagatagagtttgtcctttgcacttatgcctagctcaggtttatcctgaggaaggatgatttctacctgcaagaatattttcat

SEQ ID NO: 95406 - DNA, 2016 bp, Zea Mays
cagctcgagaagaaaatcctaccgtgctcgattcttccctgcgcgtctcctccgcttggagcttcctgcgtccctctgtggccggaactcccttcatggccggagctcggacggcgctcggtcctgccactcccatggccgcgcccccctgcttctctctctcagcgctcgcggctctttctctcctgctccgtccatggctgtttgcctctgctcgcggcgtccctgctcgcccagccgagctctccactgcccagctccatctcacggcgctctgtctgctcggttccatggcctcggtactccagctcgccgtgacctgctccctctgtttccatggcaggctctctgctcgtcgcgcgcgcctggacgatctccctggtggctgcctgttctccctgtgtaccgcgcgagttctttggtagacgcgcgctggccgtgctccacttcgcccatcgcggcgctccagttccaactcgctgcgcgccgagctcttcgctgttgtccgtgcgcgcgcgccgctcgtcgacctctctgctcacgtatagctcgctctttccttgtttgccgcgcgcacgaatttcatctgctcccatagcatgtcgagttcccgcaccatcatcgcttctgtcacaagctcgttgaccacagttattttgatcgtgtcagctcgcgactgtggtcatgttcatcgaattcgccaacgctttgttgccgattcgattgtcgtcgtttcgcgtgttgtcgagcccgtcgttttccccgtcttgtactcgcatggttttctgctcgccggtgcgctctctcagctcgctcggctttaattcctaatcgcatcgtcgattccagcggttaacgtcgtcgcgtcgcgggtgcagctctatatacatcaccctcccgtgtcgtcgtcgttccgcgtgtcagtaagaaaaccaaagaatcgggtgaagacgaagctagcagcgcgatattccctaagcgctcgacaaattgtctggatcggaaaatcgctaccgatctcgtggattcgtgtcagctgtggaaacggtaagctgataaattattcagaatagttcgatcgatgaataaattaatgtgctagtgtgatgctcattaaggtgcttgataaattgcgtaagtcacgaaactctcgtcgacttcgcagttcttgcgattatcgagccagattcagttatagcgagttatttcgctattccggtcacttagctgaattagtggaccaagtagaattttggcaagcatgtgtgatgatgaaatattttaatcacttataaagatgtagtataatttataaagaaagggattaattcagaatttaattaattaactgataagttgtgattaggctaattgtatttcatgtgtataatttgttgttcgtgatgtttgcgttaggtttgaaaagcgtaattattgcgcgtagtcgtatattaataactagtgttttcgtacaaaattgtacaatgcctcaccgctagatgttaaattcgctatcgcgtagcactatttaggtttgtaatattctcgtttatatgcattcatgtgcataatgcatttcattcaggtacgttaattaatcgcgtgatgcggagaacgacccaagtcgaccccaagcatgggccaatccgcagaatgatgctaatggacaaacctgaagaggatcgtcaagtggacatcgtctaacaacactaacctagtgttacccaggcaagccccggtgcatgcaaccccttccttgtatttttaaattatttttacacactttaagtctagtgaatgtgcattaggtttataggagttgcttgaaaactctttgatgcattggctaccttgaaatccatccttttatagatacttctggtgaagtatcaaaatataatttacaaaaaaatgcttagccctgcttatacgcagatagagtttgtcctttgcacttatgcctagctcaggtttatcctgaggaaggatgatttctacctgcaagaatattttcat

SEQ ID NO: 95407 - DNA, 360 bp, Zea Mays
gcaaatgctaacatgcacaatgagattgtagaagttcaaaagaatgaagttgttgcttctatagttaatcttaagagaatgttagaacaacaagtacaagagatttcaaatcttcaggaggacaacaaagacctcaaagcagcaaagactgatttgcataatgaggttatgttacttcaaaaatagaaaattgtagcactgactcagttacaagaatctgaggctcaaatcaagaatctttagagtgacttggaatagcagtagaaccaaatttcagttatccagcaagcaaatgaagaaacaaaggataaaaattcaaacttgcaaaagcaattggaagaaactaagactaatctgcaa

SEQ ID NO: 95408 - DNA, 460 bp, Zea Mays
catctctaaaccctaatcaatcagtcggtcgccgccgtccgcccgtccgctcagccggccgagcgctcgagcctcctccgtcccgctcccgcccgtccgccgagcgccgacggcccgagcagccagcaccgcccagcaggcgagccgctccgcctccgcgcctctatccgccgtccgctcgtcccgaggccgcgagccgctccgcggctacgaccctccgcccgccgtctgcccgtccagcgagcgcccgacgacccgagcagcggagcaggcgagcagctccgcgcctccggccttcgcccgccgtccgctcgggctcggaccgagccgctccgcccaccgtccgccgagcgcctgacggcccgagcaggcgagcagctccgcgcctccgcccgccgtccgctcggcccgagcagctcactcgctcagccgcagagccgctgtgccttccgcttccagg

SEQ ID NO: 95409 - DNA, 103 bp, Zea Mays
gcatcatcgccctttgtcagcactccatttcacgtattcgggctagtttccatgtccccaagtacatttcacttgcagtggtcagtggatacttttacccaag

SEQ ID NO: 95410 - DNA, 77 bp, Zea Mays
ttgattatcttatttttttggtttttagagcgaaatgatttgatccatcatctcacttctcactttttatttagttt

SEQ ID NO: 95411 - DNA, 2577 bp, Zea Mays
gacaaaaatcaaaagaaaaacaaacacgacagaaattttatacccatgcccttcgcatgtagttgcagtgaaaaggctcttttgtatttttgtatataggcgctgccgtccttcaacttcaagtcacgcgaactgaaatgcagccaagccctccagcgccgcaaccaacgcccgactcactcccgccgcgagcacttcccacccaagcggcgatggcgacgcaggacgagctccaggcggccgtcgccgcggtcacggagaagaagcgccgcctccgggaggcattcgaccgcctcgtctcctgcgccccggtccctgtccccttccgctgggaggacgtcgacgcgcacctcgccgccatcttccgccacctcggctccacccacgccgacgtcatagccatcgctgggggtccagccaccgctgctcaccacttccagttccagcacacggtcaaggaggagcaggaccaggaacgccgcgtcgggcgcggcgcgtcggaggagggacaaggtagcaatgcggaggaaggcaggagcgcgtcgtcgcaccaggaacgcggggaggaggaaggggaggtccgggaggcgtcagttgcgcgtcccgaccgagaagccgacgaagcgggcaacattctcggggcggaggcggttccagagcagctagacgacgagaaggaggatgacatggggacaatcgtggcgtctccccaccaacgcaatgatggcatcgagatggtagtggaggaggaggaggaggccgtcaaggggaacgcagacagagaaggccgcgaggacgaggcggaggaaggggagtggcggcagcagcatccgcacgccgcaggcgggggagagacgtcgtcggctctggcgaaagccgtcgccgcggcgtgcgcgaacatggacccctccgcgctggtggactcgctgcgcgtcagcggcaggagctccccccgcgcgttcctcccggcgctgctcggcgccccggacccccacgctctccttgtccgtgccgtcggcggcgttttggacatggcctcagcggagcgcgacgcgagcaagtggtggtgcgcaaactgcgtcgcgctggtcgaatgcgcgccccgcctccccgcgccgtcgccggacgcgctggcgcatgcaaagcgcctggcggggcgctggaaggagatggtggttgcgggccctgcgggtggcggggacacgggcgggatggccggatggggccttctcaccttcattgcttcctacgacattgccccggagttcgatgctgatgagatcatccgtctcttcggtgatatcgcgtctgaggtgaaggacaactgcgttgagctctgcaagcggcttggcctcatcggaaagatgactgattcagtcgaccatttcatcgaaaatgggcagccaatcgatgctataagactggcacgtactttcggtttgactggcaagtatactccacttgccatcatgaatgattatattgagaatgccaagaaggatgctgaagacatactaagcaaggagagctatacaccagagtctcggaagcaagcgatggcaaagaaggttgatgctctaatatttttatggagtgcaatcgatgggtacgatatggattctgttcagcgtagtagcatcaaggcagaaattacccagctgttacacaagtacgcaaacaagcagcaaagtctggcaggtgttcctgcctccatttcaagttcgcaccagcagcagaagtttcaggaggagtatcggcagcggccaccggtggaacaggagacgcagcagcgaaaggcacatgagctgcagcaagaaacagaagagaaacagcaccaccagcagcggaaggcacaagagacgcagcatcagcacatccaagatcaacaagagacgcagaagcgggaaatgtggcagaaccggaaaaggagaaggcaaaacaagaatcgcaagaggaaacagcgcaggcagaatctgcagcagcagagtaaacgtccaaggctacctccatatgtcaggccaggagttggcaaccagcacgggcagccattttcaggaggtcgattcgcagcctgtgccactaccatacctccatattattggtccatgggatgatcgctctcggcatcacatgccagtgttgccagagtaagtgctcggtgttctattagtaaattgatggtccagaatagaagagaaagctgttcggtgctgattggtttcgcttagctttccgtaaagaagtttttaagtccctgcagtcacttgtgtatatgatatgcacagtttagctaccctcggtggctctgttaacaatcgactttatatgctggatatgcctagtagttactcataagaatagaaaaaaagacagaatagattaaaatctgaacggagtgattactgcatataacaggacctctcagatccctgaacttatctaagaagattgtctcgcagaaaaatatatatatacatgccagtctgtcaggctagaagaaaaacaactccagtctctcagatcactgaagaaaacataccactctatttctccaaagtcctaactgaactcctgcgc

SEQ ID NO: 95412 - DNA, 2122 bp, Zea Mays
agtatcgacgcccttctaaaaccctaactccctctgtgtcctcgacgccgccaagccatcctccctctggagtaccgaccgactctccacctcaggaccgcaagctacttcctccgcctcgacaggcgtcggcgagatggtgaagagaagcaagaagagcaagagcaagcgcgtcacgctgcggcagaagcacaaggtgctgcgcaaggtgaaggagcaccaccgcaagaagcgcaaggaggccaagaaggagggcaaggccggccagcggaagaaggtcgagaaggaccccgggatccccaacgagtggcccttcaaggagcaggagctcaaggcgctcgaggcccgacgcgcgcaggcgctccaggagctcgagctcaagaaggaggcgcgcaaggagagggctcggaagaggaagctaggattgctcgaggatgaggaaattgctaatttggcatctgcagcttccgcgcagggcagtgagtttgcagcaaaggatgcagcaaaggataaagctcctttaacagtggcaaagagcaatgatcattctgagagatctttctacaaggagcttgttaaagtaatcgaagcttctgatgtgattcttgaggttcttgatgcaagagatccgctgggcacccgttgcattgacatggaaaagatggttaggaaggctgatccaagtaaacggattgtactacttctcaacaagatagatcttgttcctaaggaggcggtagagaagtggcttacatatctgagagaagaaatgccaacagttgcgtttaagtgtaatacccaagagcagcggaccaagctgggatggaaatcttcaaaactagataaaacaaacatcatcccacaaagtagtgattgccttggtgctgagaatctaattagattgctcaagaattattccagaagccacgagctcaaactggcaattacggtgggtattgttggactccctaatgttggcaagagcagtctgatcaacagcctgaagaggtcccgagtggttaatgtcggttccactccaggggttactagatcaatgcaagaagttcaattagacaagaaggtaaagttgttggattgtcctggtgttgttatgctcaaatcttccaacagcggtgtgtctgtagctcttcgaaactgcaaaagagttgagaaaatggaagatccagtcactcctgttaaggagatccttggtatttgcccacatgagaagttgctgtctatgtataaggttccaagcttcagttcagttgatgatttccttcagaaagtatcaactgtacgggggaaattgaaaaagggtggtgtggtggatgttgaagctgctgcgagaattgtgcttcatgactggaatgaaggtaaaataccatattttacactgccacctaaaagagatgctgtggaggactcagatgtagtgattatatcagaagatgggaaagaatttaatattgatgaaatttacaaagctgagtcttcatatattggtggtttgaagtccattgaggagttccatcatattgagattcctcctaatgctccaccggcaattgacgaagagatgctagaggatggcagcaaaccaagtgaacccgctcaggaaaaccgggaggagcaaatgtctgacgcgaacgacccacaaggaagcaagccagccaccgccagcacgcagaacgacaagttgtacaccgccgagggcatactcgaccctcgcaagaggaaagcagagaagaaacggcgcaaggcgaacaggttcagtgtgctgaacgacatggacgcggactacgatttcaaggtggattaccagatggaggacgccgcggatggtgaagacgaagacgctggggatgaagccaaggaggataatgagccgatgactggcgtcgacgattcgtgaaattttggccccttcgtcgtgtatgaggtgatggctaggctcagcgggggttgcaaaattgacccaccaaggttttgtgctcagtttgcttgtttaatgaaaagattatactatgagaaggcttgcgttttacctgttccagtacctacttttacctgcttttgcataagttgcattcattgatcttgatgcgctatcggtcgcatt

SEQ ID NO: 95413 - DNA, 1891 bp, Zea Mays
agtatcgacgcccttctaaaaccctaactccctctgtgtcctcgacgccgccaagccatcctccctctggagtaccgaccgactctccacctcaggaccgcaagctacttcctccgcctcgacaggcgtcggcgagatggtgaagagaagcaagaagagcaagagcaagcgcgtcacgctgcggcagaagcacaaggtgctgcgcaaggtgaaggagcaccaccgcaagaagcgcaaggaggccaagaaggagggcaaggccggccagcggaagaaggtcgagaaggaccccgggatccccaacgagtggcccttcaaggagcaggagctcaaggcgctcgaggcccgacgcgcgcaggcgctccaggagctcgagctcaagaaggaggcgcgcaaggagagggtatgtcatgtctggccgtctgttatcgttggtgctatccctgctgttagtttgtgtccggagcaaatagtatttcagtcttacagccgaatcaatcttcattccgcaagcctaattcacctccatgccccgtcagttccattgtgagattaactttcttagatgattccctatattggtagtgtacatagtaaccattaggaatgcaaatggggcggcgtgcagtgttatgctcagagttcaaagttatggtaaatgaacttgttgtttttcagtagtcgataaacacattccacgttcagcacaagttccaggtttggtgcgtattgggaaaaagttatgctataggctattgttgaacaaactaacaccctctcactctaataaattggtcaatgttgatcatccttgacacaatctagtcatggtcagagaaagccatgcagtgaaggaagaagtggtttatttgtcatgaaagccttgctctaactgaaagttaaacagaagaggggttgctaattataagctaattgaagcagaacatacatttatttggattgagcctggtcagccatgtagagcagagtccgtgacgggttctctcgaatggagtagtccatgctacaatgctaatagttaaatggatttgatttggatgtagcaatggggatgatgagacggaaaacaggctctttcttcagtgtctgccaatggagtaagacatgtgcctaatcttgcttatttaactcctctaatggtgtagttattaaatataaagtaacacataactaaatcataagcaggcacatgtgcactcagtctaatcaattgagttgacaagatctgcattcttagtgattacctctagcttcaagtttcttttgatttgctcaaactgttactgattgctaataattgaggactaatcgccacttgcttggacatgattgagcttgctggtggattgggaaagcagcggaggagttcttcggcaactttgtctcagggaggctcacaactcaacggagagaatgaggccaaaggtggaagagccggggctgggagtgggaggagagaaggcggcagcggcagaaatgggaagctgacactagagttgcaaactctgctcagaggtggatttggtgcgtgagggtggcggcggactgggagatgctggcgccgctggactatgcgggtcacccataacaacctactccatctaagtgggttagcttgcaggcttcagtgggttagcggcgtgtaccaggccagtggcttggtggcatggcccaaaccatttgcaagcctagttagtagttacgtttggctgatggcctgctaccgttagtatctgccatgatagtttttgccccaacctttattgtcccttattacaacctaaagcttgttagaacttagaacaggtattgctgtatctataattgtgttgtcttgtgaaattatggtaattgatctcagacaagctgg

SEQ ID NO: 95414 - DNA, 567 bp, Zea Mays
atgtccgtcgccgccgcgggccagtcggtggctgtggctaagaaagaggagttcagcaagtcaccgtccaactcgccagcctcgtcaggcggcacgaacggtggctcgtcggctgtcccgtggccgaatcagctccacgcgcagaacaacaccccggcgccggtgcaggccatggaactcgtcgtcgcactcaccacctgcgccgactccgtcgcaacctgcaaccatgacaccgccaactactacctcacgcggctgggcgagatggcctcccccgcggggcccacgccgatgcaccgcgtggccacctacttcgcggaggtgctcacgctgcacgtgtctattatgtttcaagaaaaaaagaatgcgccatcgctggggatgggtacgatgatcaagcgtcgaggcatggtatctgcccacaccgttgtcagggcctcccgcgggtacccatgctcgacctactccatcgaagctagcagtgcaggcgtagaacctatgaaacatggatatgtggttacaaagttcaactttcagtcaagttttgttcaacaaggatctgattga

SEQ ID NO: 95415 - DNA, 220 bp, Zea Mays
accgtgtgtcttgtgttgtggcgcaaggcaccagcagcagtgggcgctccccttcgccggcgccgggcaggtcagtccgccgccgcagcaggcgccaccggataggaagggccgcggtggaggcagggtcatggattcaggctccagatccagcggcagagccaggttcgacgacgaagacagcctcaccacgcgccgcgaggtctcctcctcgctccaa

SEQ ID NO: 95416 - DNA, 1204 bp, Zea Mays; identical to SEQ ID NO: 89936

SEQ ID NO: 95417 - DNA, 98 bp, Zea Mays
gatatttttcttaatagaatgtgatgatatgtgcaatttcttcgttagagggattttgatcatccctattactactactatcactctagctaggagtg

SEQ ID NO: 95418 - DNA, 1611 bp, Zea Mays
gcttcgtcgacgacacgctgcaaacttgtcccatccctagcaacaaaaaaagaaaagaaaatggacatcaagatcccgttgattgtggtagccttcgttattctcctcctcctctgcagcaggctcatcaggggctacacgaagccatcatcagcggcagcgcttcgcctgccatcagggccatggcagctgccgctcatcggcagcctgcaccacctcctgctgtcgcgcttcagcgacctgccccaccgggcgctgcgcgagatgtccggaacctacgggccgctcatgatgctccgcttcggcgccgtgcccacgctggtggtctcctccgccgaggccgccagggaggtgatgaggacgcacgacctcgccttctgcgaccgcagcctgaccgtcaccttcgacaccatcagctgtgggggcaaggacctcatcttctccccctacaacgcccactggcgcgagctccgcaagctgtgcatgctcgagctcttcagccagcgccgcgtgctcacgttccggggcatccgggagcaggaggtggcgcacctcctgcgctccgtctccggggagtccgccgacggccggcccgtcaacctcagcgaggggatctgccgcatgatcaacgacatcgccgcgcgcacggtcgtcggcaaccggtgtaagtaccgggacgagtacatgcgcgagctggacgaagtggtgcggctggccggcgggttcaacctggcggacctgtacccgtcctcgcggctggtgcgccggttcagcgccgccgcgagggacgccaggaggtgccagaggaacatgtaccgcatcatccagagcatcatcgaggagcgtgaagccatgccgacgccggagcgtgacgaggaggaccttctcgctgtcctcttgaggctgcagaaagaaggtggcctgcagtttgctctcaccaacgagatagtcagcgccgtcattttcgatattttctcagctgggagtgagacgtcgtcaaccgttctaatctggacgatgtcggagctagtgaagcatccgcgggtgatgcgcaaggcccagtccgaggtgagggaggccttcaagggacaagacaaggtaaccgaaggcgatctgggcaagctggaatacctacggctggtggtcaaggaggctctacggctgcacgctccggtgccactcctgctgccccgggaatgccgcgagccgtgccgggtgctgggctacgacgtgcccaaggggaccaaggtgttcgtgaacgcctgggcgatcgccagggacgggaggctgtggcgcgacggcgaggagttcaggccggagaggttccagggcagcggcgtcgatttcaggggcaacgacatggagttcataccgttcggggcaggcaggaggatctgccccggcatcacgctcgggctggccaacctggagctggcgctcgcgagccttctctaccattttgactgggatctgcccggtggcgctaggttggaggagctcgatatggcagaggcctttgggataacgctgaggaggaagtccgcgttgtgggtcaaggccaaaccttacgggaattttatgccaaattaatcaggtgacttgtgatgtgaa

SEQ ID NO: 95419 - DNA, 106 bp, Zea Mays
gtacgcactcttggaatggcgttgttggtggcctcctttaatttacagtgcttggggaattacaccgctgcagcactttcctactacatatttaactctatgttcg

SEQ ID NO: 95420 - DNA, 504 bp, Zea Mays
cacctttgcctgtccaccaacatctataactttgaaaggatgccattctggttgcctgatctcatcttcccatttcgagcacagaattgacaatgacaactcgtctgctgttttctctttgcaagagacaatgaaagctttcttgtcaagctcacccatttttttgacaccaacaatggatcgagctgatgacatattaacttatacagtagtcagttctttcttggcttcttccagctcatcattggttcttcgttgcttaataataagggtctggtttatagaatcaatatgatccatttcttcatctttctctttcagtgcttcatgcaacttatcgagcatttccttcgattttgcatcttcctttcccatatgcttccatacctcaagattccccctcaactgttctctttccagttcaagtttttgtttggaagccaactgcatttctaaatcatatagcatcttcctgacattttctttctcttgctgcagtttttt

SEQ ID NO: 95421 - DNA, 2099 bp, Zea Mays
attcattccaaccaaacggcaaacgcaaccctaggaagcaagcccacaggacctctctgcttctgcggtttcggcattgggatatagtccctaccagacagaatcgattccagtccaggcttccagcgcgagagggatccatctccgttgagtcgaggcggctccaactccggctcgtggcctcgcggaccaacatggccgccccttcgccctcgccggtggaggctaccctaccgcctgaggccgcggccgccgccgaggaagaccagtgggatgctgatggatatgttattcctaatttgcccactcaagataatgatgtggctgagcctagtgtccccaaagaaaaagatcctgagcctctacaggcaaacgatgagaaaatatatctgggacctcatggagctccaccatctcaagcaaagcagcaggagctgaacaccgttggccgcaagcagcggttccggaacaagctgaaggaagcagataggaaattccccggcaatgctcaggagaacaaggtggagaacctaagggagctgatgggtgctagaggtggtaccagcctgcctaagagctctcctcgtgattggctcgatccgcactgccatgaatctgaattcgacagaaaaccaactagatgaccggcaaacgatgcagcgtgcgtttacctgaaggttgattacgctgtagcactggtgcgaggtgttattcgccaataacagatacttatggttgactaatagatgaagcaaagcaaaagggtttcttgtggtgtaatttatcggagctctactgttctccatgtcgcgtaaatactcttaattctcggttgtgcgcgtgtgtcgttgcatttgctatttacattggaaaaatatatggaaacaagttgctgttgcgtaactagtatgtaatgtctgatgatatgcgatcctgagcacatgcgaaaatttctgctcatatgttttgaatcgattcataaacatgtggttttcgcctttgcacccatgtcatgttaccgtctgaaccttttgttacgctagccgcagattgatcgattcattgacagcattggctacacattaattaatgtacgaatatgccattgttatacaagacccttttttttgggggtgggggggggggggggggtgattgtagcaggacctattgtgaggtctaccaaaaaaccaagttgtggttctggctgttatgattctacaactgcagatggtacaaatcttctcttgtgcgaataactgaagattgataccagggcactgaatcggaacacagcctgaagagtgaagattgaagttgttgcgaaaaggtaaacagtttcgggttacatacaccacgcgatcatgcaattatgctcacacgcaagaactcttgtctctatatatgaaggtacaaagtcgcaggacacacgctggatgagatgcaggctgacgagtcagcatctatgatccaggctggctgatcgcgttacggtcatcgcacagggaccttgatccagccattggcgaaggcgatggcgaggatgacgaagggggtggacatgccgaagatgatgatgtagggcaggggtgtcatcatggggttctccccctccctctcccccgcggtctgccagtacctgcatgcatcccatcaccccacgcatccgagtcactcacaggctgctacgaggagaggtgagattcacactgcttgcttactgttctggctcctcttccttggtgatgaacttccgcttgcctgcaggcttcagctctccgtctcctgcgtgcgtggatcagtttatttgggccaatcttgtcttttgtttcaaaaactgaagaaacatgactggagaagacggaggaaaacccgtaccgagcttcgctgttaccctggtgcgcttgctgacgatggcgcgactgcagaacaaaccggtgccagcggcgcctttcctcgacgatggctgctgcgctgtgatggcagtgcggctgccggcggcgaggagaggaggagctgccttggccatggctgggttggtgtgcatcacagccgcatgcacgtcacatgatatggtagtactactagtacccgtgtgt

SEQ ID NO: 95422 - DNA, 862 bp, Zea Mays
attcattccaaccaaacggcaaacgcaaccctaggaagcaagcccacaggacctctctgcttctgcggtttcggcattgggatatagtccctaccagacagaatcgattccagtccaggcttccagcgcgagagggatccatctccgttgagtcgaggcggctccaactccggctcgtggcctcgcggaccaacatggccgccccttcgccctcgccggtggaggctaccctaccgcctgaggccgcggccgccgccgaggaagaccagtgggataatgatgtggctgagcctagtgtccccaaagaaaaagatcctgagcctctacaggcaaacgatgagaaaatatatctgggacctcatggagctccaccatctcaagcaaagcagcaggagctgaacaccgttggccgcaagcagcggttccggaacaagctgaaggaagcagataggaaattccccggcaatgctcaggagaacaaggtggagaacctaagggagctgatgggtgctagaggtggtaccagcctgcctaagagctctcctcgtgattggctcgatccgcactgccatgaatctgaattcgacagaaaaccaactagatgaccggcaaacgatgcagcgtgcgtttacctgaaggttgattacgctgtagcactggtgcgaggtgttattcgccaataacagatacttatggttgactaatagatgaagcaaagcaaaagggtttcttgtggtgtaatttatcggagctctactgttctccatgtcgcgtaaatactcttaattctcggttgtgcgcgtgtgtcgttgcatttgctatttacattggaaaaatatatggaaacaagttgctgttgcgt

SEQ ID NO: 95423 - DNA, 816 bp, Zea Mays
attcattccaaccaaacggcaaacgcaaccctaggaagcaagcccacaggacctctctgcttctgcggtttcggcattgggatatagtccctaccagacagaatcgattccagtccaggcttccagcgcgagagggatccatctccgttgagtcgaggcggctccaactccggctcgtggcctcgcggaccaacatggccgccccttcgccctcgccggtggaggctaccctaccgcctgaggccgcggccgccgccgaggaagaccagtggggtgagtaaacctgccgccgcgcactcgcctcttgcttaccgacacctgctagcttggggatacgagtggtttaatttaggcatgacatgggtaggggtgtttcgaggaacggatgctcctgggtactggcctcctaccgtcgcttgtgattctcttgctgttcattcaggaaatgctcatgtgcaaagcatgctcgttgtctgggtggtctgttggggaacatgtttagaacctcatgttgatagtggtccaggaagtttgggtcactgtgggggtgtagaatctgaccaaggggctgttctagcctgtatgctgtaaggaaccgtgaggatttttaggtgtaagagtaacatggtagtgacctagtacttaccaacagttttataaactgcaagaacatctgccggttttgagaaacgaaattgtgagttttaccttcaccccggattttcattcttggtcgagttagtcaagattacatgaacgcattagcagaacgcatgccttcatttgatgaaacggggtgaaggttactagctgctg

SEQ ID NO: 95424 - DNA, 111 bp, Zea Mays
accattttcaaaattcactaatcggctacaaacgttggtttattcaaatttgttaccgcccgatattcgtgtgaatcattatcattactatttacgttatattttgtaaac

SEQ ID NO: 95425 - DNA, 621 bp, Zea Mays
cctcgcctcctccctcctgcactgcgccagatccgacgataagcttcttcatctcccttctcctgactgggttcctgcggatctggtgtgccgcaatgcgttctcgccttctcgtggccaacctccgtagagtcgctcctaggcgtcgcctgggcggccaacccggacaccgcgctctgactcgtggccaacctccgcggcgtgtgtgggagcgacaagtctaaccgcgagggcttctatgcctctgcactctggctccacgcgtggcacccgcacacgctggccctcaacgttgcccccctcgccaactttggctacctcaaggacctccccgagctgctccaccgaatcatgcatggcagggtgtccaccaggaccctaggcaagaaggcacgcctaaccaccaagtgcagccggggccggggccgcgtctgcttcggcaatcgtacgcgtcgcagccgcgcgtctgtgccactcgacagagtgaggctgacagcagctaagtccagcctcgagcgacataggatgctccgcctcgcccgaccccagggttcggcccccgtcccggcctcggaagatggacttcgcctcgcccgaccccagggctcggactcagcctcg

SEQ ID NO: 95426 - DNA, 2444 bp, Zea Mays
tttcctataaacattataaaatagagcttttatgagttaaagcccataattcaaaataagtcattcttcgagctcttaacaaaatttgctgaactctttcgaccttaggccaaggctcaggctcccagcaacaatccgcgttaccagagtcacagacggaggtgagcgtccgacgcgcgccggcggcgcttccagagtctctgcgccgcgccctcctctgacttcacccgtgccttcggtggccctgcgtcatctccctcgtcctcctcccagtcatgcccctccctcaccgagtgggaggcgacagatccgagttctagttcgtgcggcaccgtgcgagtagcgcggccccggtgcttccacgcgtggaaggaacgcgggctccgatggcctgacgcgcgggggcgaggtgctggcaactccggcggcgcggtgtggaaggcgagctcgtctccgggcagaggtcaccgaaaggctgagcgtgcaggagggcagtaatctgcagcggcctgcagagctcttatctcgacacaacccaccccgcctgacgggatagaatcggtgggataagaggaccgatatcctttgcttgtctgcaaaatttaagtacacaagtgcaaatcagctggatttggaggtaaagacgggaaccaaagagctggtggattagagaggtgtggggagatgtaccgtgggggccttgaccgcttcaagaaggcacagacattggagcccttctcagtcaagtctgagtcaggcaccaagaaggcacctgcagctgcaggaacagctaaagcaccaccggctccgttgacactgccacagaattctaattttgtgctgggtcagaataaccaaagtctgcaaggtaccaacacaagggtggctgggcaagatggtgttgccccagggcatgttgggacacaggccggtggagggcaatcgacgtggcaacctccagactgggcgattgagccacgcccggggatctactatcttgacgtggtgaaagatggggaggtcattgacaggatcaatctggacaacaggaggcatctattcgggaggcaggttcctgcttgtgactttgtgttggaccatcagtctgtatcgcgtcagcatgctgccgttgttccacacaggaatggaagcatctatgttatcgacttaggatcagttcatggcacgtttgttgcgaatgagagattaacaaaagacaaccctgttgaactggaagttggacagtcacttcgctttgctgcatcaaccagaatctatatcctgcgaaagaacacagctgctctattcccaactcctagccttccatcagatgtcagtttgccatctcctccagaccccaatgatgaagatgctgttgtggcatacaatacagtacttaaccgctatggtattagtaaatctgacatattatccagttccaaagattcttcagggagtgccagctctggtgcaaatgatgataaacatgcagttgaaaggcccttgaagagaagtaaaaagcgcagagtgtcatttagagatcaggctggaggtgaacttacccaagtggttgggatttcagatggtgcagatgttgaaactgaaccgggccctataggtgtaaaggaaggcagtcttgttgggaagtatgaatctcttgttcaggttactgtcataccgaagggaaaggagcaagcatcacggaaagactttacctctacctcaccaagtggggtaacggataagctacaagaggtgcttaaaagagtaaagagcacgaccaggcctggaatttacgacgacctttatggggattctattgcgacaaaagtgggctcatcttgggcgtacaaatcagatgatctgtcagacaaagcccagcctgttgaggagaagacacttggcatggattcaaacttgaattcagccgatgacagtgatgacttgttcggtgacacgtgattcagaaattgtcagtgaatacaaacaaatgtattcttcagaatttcgtggcatagttgtttcatttgttagaggcttttcttttggcttagttatacatggttgtaccctctgcaaatcaaggtatgttcttttgcttaatgttagcaacttaaggacatgctttctcacagtaatgcctatgatgagtgtggcctcttcggaagcactaagcttttaagaaattggtttatggaaactggagtcgttacaaatgtaccagattgtctcagtttatagagactggatttccagtttcttaaaaaccaagaagttggcctcccagctaaaaccagttttgtctgtttagttacttcatgtctttgttgattttgcagaatttatctatattgccatctctttttaaaatagaggaagagtacgccagtcattatgtgcccccccccccccaaacacccccaccccccccccccaaaaaaaaa

SEQ ID NO: 95427 - DNA, 1515 bp, Zea Mays
atcgagaatgtcctggaaattaaagatacacatgtgagggaagtaatgacgcctttggtggacgtagtagcaattgatgctatcgcaacacttattgatttcaaaaacttgtgggaaactcatcagtactctagagttcctgtatttgaggagcgcatagataatattgttggaattgcttatgcaatggacatgcttgaatatgttgaagaggttgagaaattgaatgcaatcactgtgaaggaaatcgcacatatgcctacatactttgttccagattcaatgtctgtttggaacctattaagagagttccggatcaggcaggttcatatggcagtggtcctcaatgaatatggtggaactattggtatttaacattagaagacgtagtggaagaaatagttggtgaaatcttcgatgagaatgattccaaggaggaaatccagaagaaaacaggctatatagtaaggcggggggatggaacatttgatgttgatgcaaacacatcgatagatcacctatctgaagagcttggtatcaaaataccagagggacatcagtatgagacggtgtctggttttgtctgtgcatcttttggctatattccagaagaaggtgggaaaatgcttgtgattcttgaaaagaatttcagagaagaaaacggtgaatatcaggaggaaggtcctgatcgccaagatgatagagaaaaaactcaagcttatgaactcgagatagtggaagctaatgcaaggaaggtgggcaaagttctattcaagccaataagcagtgaatgtgttgatgtcgacaacaagggtgtgaaccgcctcatttccaagaagatcatcaagcggaagaagaaaggctctgatgattcctccaatgatgacgagtgtccagacgtaacagagaatggttgccctgcagagttactctcatactcggatgataacagtgccttgttggaagatgcaagcagttctagtgccaaaagatgacaagaaaggaactgcaagaccatcgtactactgctccaccgtgatggggtcgttatcgccgtggagctggaagcttttgcattcacaggccgggaataaggaggcggcagcggtgtcccgcagtggcctgcacgggtagagcagctccggatggaagaaccacttcacgggcatctccctcggggaggtggtggccacagggcgcggggcgagcacgtggagtagcctctcctcccgcttctccctgatcctctccagctccctgaacctctgctgcagcagggcgatggaggagaacatcatctggccctcgctgctctgtacccccatgatgaacaaaaactcctcgttttcagttgatgtgtgtgtgtgtgtgtatctcagccagcgtctgtctacttcgctcgctcgctgtgtggggttttgctgcttgaggtggtggtggtcttgggcatgcgcctacttataagctgcaaagttttgtcacggcgcagggcgtcgtcttgtggtcgtcttgcaa

SEQ ID NO: 95428 - DNA, 1368 bp, Zea Mays
atcgagaatgtcctggaaattaaagatacacatgtgagggaagtaatgacgcctttggtggacgtagtagcaattgatgctatcgcaacacttattgatttcaaaaacttgtgggaaactcatcagtactctagagttcctgtatttgaggagcgcatagataatattgttggaattgcttatgcaatggacatgcttgaatatgttgaagaggttgagaaattgaatgcaatcactgtgaaggaaatcgcacatatgcctacatactttgttccagatttaacattagaagacgtagtggaagaaatagttggtgaaatcttcgatgagaatgattccaaggaggaaatccagaagaaaacaggctatatagtaaggcggggggatggaacatttgatgttgatgcaaacacatcgatagatcacctatctgaagagcttggtatcaaaataccagagggacatcagtatgagacggtgtctggttttgtctgtgcatcttttggctatattccagaagaaggtgggaaaatgcttgtgattcttgaaaagaatttcagagaagaaaacggtgaatatcaggaggaaggtcctgatcgccaagatgatagagaaaaaactcaagcttatgaactcgagatagtggaagctaatgcaaggaaggtgggcaaagttctattcaagccaataagcagtgaatgtgttgatgtcgacaacaagggtgtgaaccgcctcatttccaagaagatcatcaagcggaagaagaaaggctctgatgattcctccaatgatgacgagtgtccagacgtaacagagaatggttgccctgcagagttactctcatactcggatgataacagtgccttgttggaagatgcaagcagttctagtgccaaaagatgacaagaaaggaactgcaagaccatcgtactactggccgggaataaggaggcggcagcggtgtcccgcagtggcctgcacgggtagagcagctccggatggaagaaccacttcacgggcatctccctcggggaggtggtggccacagggcgcggggcgagcacgtggagtagcctctcctcccgcttctccctgatcctctccagctccctgaacctctgctgcagcagggcgatggaggagaacatcatctggccctcgctgctctgtacccccatgatgaacaaaaactcctcgttttcagttgatgtgtgtgtgtgtgtgtatctcagccagcgtctgtctacttcgctcgctcgctgtgtggggttttgctgcttgaggtggtggtggtcttgggcatgcgcctacttataagctgcaaagttttgtcacggcgcagggcgtcgtcttgtggtcgtcttgcaa

SEQ ID NO: 95429 - DNA, 1567 bp, Zea Mays
atcgagaatgtcctggaaattaaagatacacatgtgagggaagtaatgacgcctttggtggacgtagtagcaattgatgctatcgcaacacttattgatttcaaaaacttgtgggaaactcatcagtactctagagttcctgtatttgaggagcgcatagataatattgttggaattgcttatgcaatggacatgcttgaatatgttgaagaggttgagaaattgaatgcaatcactgtgaaggaaatcgcacatatgcctacatactttgttccagatttaacattagaagacgtagtggaagaaatagttggtgaaatcttcgatgagaatgattccaaggaggaaatccagaagaaaacaggctatatagtaaggcggggggatggaacatttgatgttgatgcaaacacatcgatagatcacctatctgaagagcttggtatcaaaataccagagggacatcagtatgagacggtgtctggttttgtctgtgcatcttttggctatattccagaagaaggtgggaaaatgcttgtgattcttgaaaagaatttcagagaagaaaacggtgaatatcaggaggaaggtcctgatcgccaagatgatagagaaaaaactcaagcttatgaactcgagatagtggaagctaatgcaaggaaggtgggcaaagttctattcaagccaataagcagtgaatgtgttgatgtcgacaacaagggtgtgaaccgcctcatttccaagaagatcatcaagcggaagaagaaaggctctgatgattcctccaatgatgacgagtgtccagacgtaacagagaatggttgccctgcagagttactctcatactcggatgataacagtgccttgttggaagatgcaagcagttctagtgccaaaagatgacaagaaaggaactgcaagaccatcgtactactggtaataattacagcacaccgtcacccctcctaataccccttgttacaacagaagaagagaacatagtagtaggctaccaaaaaaaaaactgcgagagcaacaccaagtggttaacagaagtttatagggcattggaacatttttttagtagcagtagcagtctagaggtgcagcgaggtgtcgacgtcgacttcaccagagacatgtttgtagttgtaagtcttactgggccacagctccaccgtgatggggtcgttatcgccgtggagctggaagcttttgcattcacaggccgggaataaggaggcggcagcggtgtcccgcagtggcctgcacgggtagagcagctccggatggaagaaccacttcacgggcatctccctcggggaggtggtggccacagggcgcggggcgagcacgtggagtagcctctcctcccgcttctccctgatcctctccagctccctgaacctctgctgcagcagggcgatggaggagaacatcatctggccctcgctgctctgtacccccatgatgaacaaaaactcctcgttttcagttgatgtgtgtgtgtgtgtgtatctcagccagcgtctgtctacttcgctcgctcgctgtgtggggttttgct

SEQ ID NO: 95430 - DNA, 681 bp, Zea Mays
atgcccaccgcgccgtacacctccgcgacctcgctgctgctgggcagccgcaggctcccgcggttccagttccagtccctccgcacccccaccaagccccccttccgccgcccggcctcctcttcgtccacacctctccctcgatgccgcgccagcgcgaccccccgccctctggcccccgtctgcgcttccgccctcgcgctgcccgtgtcggtggcggccgctcccccaccgcaggtggacggtggctgggtgggagggacggcagcagccgtgaggagagtagctgtggcggttgcgtgcggggctctcgcggcggcgtggtgccgccgggcgatggctgtgggggctgccgcggcggcgggagccggggccggggcgccggggacggtggaggctgctgcagggattggatggatggcgctgcgcgggggctggcccagggtgctacagattctgcagctgctcagggagcacggcttgattctggccgcgctgcttagcctctctgcgttcttctccatggcagaaacttctatcacgacgctttggccttggaagaggggtgagcagcaggcatcactgagcgacaagctaacaacagcgaggggcttcagatataatgatcatgatcagtgtgccacatgtgctttagtgacatgctgtgctagtgatctgtag

SEQ ID NO: 95431 - DNA, 79 bp, Zea Mays
cgggtggggtctatccacctttttgtaagaggctgcaaaccactcggtttgcagcagtgctgcaccaaatttttttccg

SEQ ID NO: 95432 - DNA, 1010 bp, Zea Mays
gagagttcaaatgaccacatctattcaggtcaattaccaacatcagcatcagacatgctgaacagcaattcaccatagcccgctacatgaagagtctggtacaacgagcatctagcatattattcttccaaaacggtgtcaaccggcaatcgccacatatgaacaaaagcaagacgccataatggcgcccaggggtgacgaaatgcctggtctattctacaatctagagtctacacttacaacctggtaccaaaataaccacgtcaaggttgggtcggtacagcccttacgccttccatcttcccagtcagcagtgaaacaatcaaccacctacacgattgccagagcctttcaggagattgcgctgccttttaggaggcttcacatcaacagcgccagcgccatctttggacttgccgtatcccctcttccgacctctttggcggccgcccttctttctgtgcctatcgccagcagcttcatcgttggacttgcgacatgggcggccacgcttccttttaggcttctcctgttcttcagctccagccttttttttgttcttgagttgggcaaaccaactcttcgacctgatggattcaatcacacggcaagcagtgatcagaatgcctcgaatttccaacgttttctttgcaacttcagatcttccgtagcaaaatttcaacactaggctactgcaagctgctacttaccactccgaggaaggatccaagaaatttactacttggttcagagcatgaagagcaatcttcttgatctggagacaatagtccaggtggaagccgcctaaactctccagtcagtttcatgcactcgttgacgctttctggggagacaaagtccatcgcaaccttaatgcaagactgcacaaacagaaaggcttctgtttaagcaacgagatacatttgttgagaaggtgcgataaagaggagcacaaattaaggtctgtatagtcacaccttcaagttcctcacttggtgaggacatccagc

SEQ ID NO: 95433 - DNA, 1072 bp, Zea Mays
agcacttctagtaaaaggcagaaaaaagcgctcgagtatgatactgatgaggatgaatccatgaagtcagacagtgaggaaaacagagatgaagattcagatgaagctggtgacaaacaggaaggtgactatgtatctgggaaagaaaaggcagggaagttctcagaggtaaaagaatcttcaggcaaaaagaaggcaaacacagggagtggccaccaatcaggtcctccaaagaaaattatcagaagtccggtaaaaaaagtatcatccaagattcatgaggaaaaagaaagccccaataatagtgcaaaggttttttctaggaagaagaaacccacagcagaaaaggagatcaaagaaaaaaagtcatcaggcaaaaaggtgacaaagggtaaaggagaatccgttgaagcagttcttcccagcaaggatgatctgaggaagaccattactgaaatcctcaagaaagttgacttcaacacggcaactttcagtgacatccttaagaagcttgacaatcactataaaatggatctggccccaaagaaagaagccatcaaagttatgatccaagacgagttaaccaagttatcagaggaggacgaaggagagggagccggagacaccgagaagaaacagcagcagcctcaggcgaaggagatcgaggcatgaggattcgtggaaccccatagctgtagtagccgctgttaattatcctgtacttaatgtgtttgtttgcgtcgcctgtacaggcatctcgttgattatcgccgcaccaactcgagaacctcacccctgatcgtgtatgttatggggcatgatgtgtaggcagcctccacacctttttagctgactgatcggagagttactcctaggcaactcttgtttctagatttgcaaatggtgtctgaaactctgcgtttgctgcggcagaacgtgtacttaattgttcgtgataggtctgaataacacatggatggtatcagtctgtagcttattttttttacttgatccgtttcttctgtgggttgtgatttgtgaatgaccaaaagatggatgctgtattccagtt

SEQ ID NO: 95434 - DNA, 1151 bp, Zea Mays
aattctccttgtctctctcactctctctgtctgtgggaggaagttgagaaggcgaggagccagacaagcgacgcggctccactcccttctcaggcggccccctgctgctcaccgcccagctccagttattagagaaataagggtcggcttggttgcccgaggcctacccagcgcctgcgatggaggagaaggctatggcaaatggagcagcgactgctgatgttgctgctcctgataataaggataacaccaaggaagaggctagcgagagcaaggaaccagcagccaatcaggatgccgatgaccagaacaaaggcttggaaaatggcgccgagggccagtcaggtggagatgtcaatatggcagatgctgaggtcacagaggaaggcgatggtgatcctggtgttgcaaagcaggtggattctgaagatatcaaaacggatgccgatacaaaggaagatggcaatgcaaaggcagaagaagttgaggatgtcaagatgactgaggctgacacgggaagtacagaggtcaaagataaagaagagaagggagatgaagttgtggacacaactgtggataagcaggatgaatcgaaggagcaagaggaaggtgtttcggctgagcaagatgagaagcaaggagaggaagcagaagaaaaaggaaaagaaatggatgccgatgagaagcaagaagaggaagcagaagaaaaaggttctgctgatgagaaagatgaagatgaaggtgaccagaagatggaagagaataaggaggagactccgaagaataagaaagcaaggagtgccagggatagaagccagggaaatgataataaacatgatggatcaaaatctagggaagccaaaagtttgctgaacaccccaagcccatatggtaccgatcgtcctcaacgtgagaggaaaatagtggagaggttggttgaggtgattgagaaagagccaaacaggaatttcgtggttgagaagggacgagggactcctctgaaggatataccaagtgtggcacacagaatatcaaggaagaaaccttctgatcttaaatttcttcacagtattctttttgggaggaaaggcaaggctgtcgattttaaaggacatatactccagttctctggatttgtttggcatgaaagt

SEQ ID NO: 95435 - DNA, 1162 bp, Zea Mays
aattctccttgtctctctcactctctctgtctgtgggaggaagttgagaaggcgaggagccagacaagcgacgcggctccactcccttctcaggcggccccctgctgctcaccgcccagctccaggtacgcgcgagttattagagaaataagggtcggcttggttgcccgaggcctacccagcgcctgcgatggaggagaaggctatggcaaatggagcagcgactgctgatgttgctgctcctgataataaggataacaccaaggaagaggctagcgagagcaaggaaccagcagccaatcaggatgccgatgaccagaacaaaggcttggaaaatggcgccgagggccagtcaggtggagatgtcaatatggcagatgctgaggtcacagaggaaggcgatggtgatcctggtgttgcaaagcaggtggattctgaagatatcaaaacggatgccgatacaaaggaagatggcaatgcaaaggcagaagaagttgaggatgtcaagatgactgaggctgacacgggaagtacagaggtcaaagataaagaagagaagggagatgaagttgtggacacaactgtggataagcaggatgaatcgaaggagcaagaggaaggtgtttcggctgagcaagatgagaagcaaggagaggaagcagaagaaaaaggaaaagaaatggatgccgatgagaagcaagaagaggaagcagaagaaaaaggttctgctgatgagaaagatgaagatgaaggtgaccagaagatggaagagaataaggaggagactccgaagaataagaaagcaaggagtgccagggatagaagccagggaaatgataataaacatgatggatcaaaatctagggaagccaaaagtttgctgaacaccccaagcccatatggtaccgatcgtcctcaacgtgagaggaaaatagtggagaggttggttgaggtgattgagaaagagccaaacaggaatttcgtggttgagaagggacgagggactcctctgaaggatataccaagtgtggcacacagaatatcaaggaagaaaccttctgatcttaaatttcttcacagtattctttttgggaggaaaggcaaggctgtcgattttaaaggacatatactccagttctctggatttgtttggcatgaaagt

SEQ ID NO: 95436 - DNA, 1318 bp, Zea Mays
aattctccttgtctctctcactctctctgtctgtgggaggaagttgagaaggcgaggagccagacaagcgacgcggctccactcccttctcaggcggccccctgctgctcaccgcccagctccaggtacgcgcgaggtgatatgcacgaggtcaaaagtgggcgcgggaaataggtgctatgcgctcctgcgagaggattggggaagactttacctcactcaaatttacgggaacagtcaccctcgatgcgtgacgcgaaaaaatgggagaactttgcatgagctgttggagttattagagaaataagggtcggcttggttgcccgaggcctacccagcgcctgcgatggaggagaaggctatggcaaatggagcagcgactgctgatgttgctgctcctgataataaggataacaccaaggaagaggctagcgagagcaaggaaccagcagccaatcaggatgccgatgaccagaacaaaggcttggaaaatggcgccgagggccagtcaggtggagatgtcaatatggcagatgctgaggtcacagaggaaggcgatggtgatcctggtgttgcaaagcaggtggattctgaagatatcaaaacggatgccgatacaaaggaagatggcaatgcaaaggcagaagaagttgaggatgtcaagatgactgaggctgacacgggaagtacagaggtcaaagataaagaagagaagggagatgaagttgtggacacaactgtggataagcaggatgaatcgaaggagcaagaggaaggtgtttcggctgagcaagatgagaagcaaggagaggaagcagaagaaaaaggaaaagaaatggatgccgatgagaagcaagaagaggaagcagaagaaaaaggttctgctgatgagaaagatgaagatgaaggtgaccagaagatggaagagaataaggaggagactccgaagaataagaaagcaaggagtgccagggatagaagccagggaaatgataataaacatgatggatcaaaatctagggaagccaaaagtttgctgaacaccccaagcccatatggtaccgatcgtcctcaacgtgagaggaaaatagtggagaggttggttgaggtgattgagaaagagccaaacaggaatttcgtggttgagaagggacgagggactcctctgaaggatataccaagtgtggcacacagaatatcaaggaagaaaccttctgatcttaaatttcttcacagtattctttttgggaggaaaggcaaggctgtcgattttaaaggacatatactccagttctctggatttgtttggcatgaaagt

SEQ ID NO: 95437 - DNA, 1847 bp, Zea Mays
attttgaaaaccttagatcagcgatttcaagttgcaccccctcatgagctcaaaagttttagctgcttgtatgggcttgggcttcaattaaatcctagcacgctttcttgatggcgatggttgctttatcctgatagtaggtctggcggtctccggcttggcggtgagccggtgacgatgatacgacctggttggaggttggaggtggagcaggagagtttgcaggagcagttggcatgggcgctggcactcgtccactcgcgtcagccatccgacgccaccaaggtgtcggctctgacgtggcaccttgcgcttgcgcacggactccgtcgctgattcgtttgtctcttccccagtcgcgcaccgcgggccgcggttcgcctggtggctgcgacgtgagtgggcctatatcagcgcggcactcacggggagcggtggcaacccatatccatcacggcgaagagacctcgggagtgagtgggccgctgggagagcagacaacactgcaacggggtgcgcgcccgcccgtgccgttctccgtcgtcaccgttcgcccgctgccgatccatggggtgggcgctggctctgcacggcggcgccggggacgtgccgcgcacgctgccgcccgagagcagggagccgcgcctcgccacactccgccgctgcctcgacatcggcaccgccgcgctccgggagggccgcaccgcgctcgacgttgtcgagctcgtcgtgagggagctggaggactgcccgcacttcaacgccggccggggctccgtgctcacctccgccggcaccgtcgagatggaggcctgcgtcatggagggagccaccctgcactgcggcgcggtctccggactctccaccgtcgccaacgccgtctccctcgccagactcgtcatggagaagacgccgcacatctacctcgccttcgatggcgccgaggccttcgccagggaacagggggtggagactaaggatccaagccactttatcacggacaacaatatcgagcgtctgaggcaggccaaagaggccaacagggtgcagatcgactacacccagccagcagcaggccaaagccaaaaggcccaggccgtggtggacgacaactgccagacgggcacggtagggtgcgtggccgtggacgcggcgggcaacctcgcgacggcgacgtccacgggcgggctggtgaacaagatgcccggcaggatcggcgacacgcctctggtgggcgccggaacgtacgccaacgcgctgtgcgcggtgtccgccacgggcaagggcgaggagatcatccgccgcacggtggcgcgcgacgtcgcggcgctgatggagcgcggggacgcgctcccgctgcgcgacgccgcggcgcgcgtcgtggcgggggcggcccgcggcgccgtggggctggtggccgtgtcgcgccagggggaggtctgtatggcgcacaacaccaccgccatgttcagggcgtgcgccaccgaggccggccacaccgaagtcggcatctggacggacgccgccgacgcaggcacgggcgcggacggagagactgtcagcgtcgcgctctagctctaggcatttcatccccgtgtggcgtattctatcgttcgcgtcccattattgccacctgtccgatagacaacttgttctcgatccggtaatttcaccgtgcttcagctgcgtgtgtttggaaaaattgattcggtttcgggtattgttaagagatcgatgggagaagtgaaacattgttgggcgttcagtatgcttttgtaataccttttgttttcttaaataaagtcctaaggagtgttgggaaactataaaaaattacaatataaata

SEQ ID NO: 95438 - DNA, 84 bp, Zea Mays
agaatcctcaaacaacattgctctgaccaaccagatttcatcaatcagattatcttacaaatacactttatactaacataaaaa

SEQ ID NO: 95439 - DNA, 794 bp, Zea Mays
atgaagcccaagatgcgccaattgatgctgcttatttcaatgaaccagcaggtagtacctcagcccgtaaagacagcacaaagtcttcgatgccttctttatcatcatcacctcctgatgcacgctcccagcatcatcactctatccttggagtgcactctcctgataaactggttggggatttacatcttttcgacaatttagttgtgttcactactgaagagctctctcgtgcccctgctgagataattggcaggagctgccatgggacatcctacaaggctacacttgacaacgggtacatgctgacagtgaagtggctgaaggagggctttgctaagagtaagaaagaattttcccgtgaaataaagaagcttggcagtgtaaggcaccccaatcttgtccccttgcgtggctactactggggccccaaagagcatgagaggatcatgatatcagactatgcagatgccacatctctgtctacctacttgtctgaatttgatgagcagaatctcctgtccctatcagctggacaacggctgaacattgcgattgatattgcccgctgtctagattacctgcacaacgagcgggtgattccacatggcaacaacaagtcgtctaacgtcctgattcagaactccactccatctgctctagtgactgactacagccttcataggctgatgactctgatcggcatggcggagcagatttcatgtgaatacttttttaaagcatgccatttgcatgagaaatcatggcgcaagggaggtttacaagctaagtaa

SEQ ID NO: 95440 - DNA, 3274 bp, Zea Mays
atcccagagaaacatctaaaccctagcggcggaaccttccccgtcgctctgtcctcctgtccggacatggcgaagacgaagcccatggcggcggcgggcgagaagaagaagagcaaaggaaagaagaaaggcaagaatggcccggccaaggtggccatgaaggctcgtggcgcggcggcggaggagcggaacaacccgttcgaggccatctggtcgcgccgcaagttcgacgtgctcggcaagaagcgcaagggcgaggagcggcgcgtatcgcgctcacgttccgaggccatccgcaagagggagaacacgctgctcaaggagttcgttgagagcgccaagtcgtccgtgttccacgaccggcgtatcggcgagagggacgacacactgcccgagttcgacaaggccatccttcgccagcaacgcgagcgcttggccaagttgaaacgagaaagcaagtacaatctatcagatgatgatgaagacgaaatcaatattcataatgtgctgctatcggaaaatgatgattttgatgaggaagtgcctctcgatgatgggagcgacgaggaaggtaaaatggtcctctcaaagaagcgtttatctctccaaagtgatgaccatccttcaataactgatctaccacaagaaacacacgggcagaagagcaagaaggaagttatgacggagatcatttcaaagagtaaattttataaggcccaaagagccaaggagagggaagaggatgaacatcttgtcgacaagttagacagtgattttgcatcattggcccagacacgggcgttattgtccttaactgagtcagctaaggtcaaggtgaacaaaactgattcaagcactggcttgactgggaaggagttttctaacaaggcaaaggcagatacatatgaaaaactagtgaaagaaatggtgatggatcaacgtgctcggccttctgatagaactaaaactccagaggaaatagcacaagaagagaaagaacgtcttgagaagctggaggaggagcgccaaaaaagaatgcttggaactgctgatacgtctgatgaggacgatggcaacgaaaatgataaccacatgaagctaggaaactcaaaacctatatctggtgatgatcttggtgattccttctctttggatgagtcaacagtaaagaaaaagggctgggttgatgaaatttacgaaagggaaggtagaaagattggtgatgatgcagcagcatccgatgatggagaaagcgatgatgaaaatgctggtgatgatgaggctgatgatgaagattcggactccagtgacaatgactttggtaatatgtctgctagagattgggagcaaagtgatgatgatgaagttgatgtaggagacgatgaaatggaggatttcaaagagaaggggcaagagatcaatgacaaagtggtgaataaagatgcacacaatttgaaaggagaatctaatgtgaaacctcaagtaaaggatggcagtattccttttgttattgatgcaccaaatgacctgaaagatctatcttctttgttagatggtcgttcagaagccgaaataattgagattattagtcgaatacgtgcttgcaattcaataaggcttgcagctgaaaaccgaaggaaaatgcaagttttctatggtgttcttctgcagtactttgcagttttagctacccaaagtccagtgaagttcagaataattgacatacttgttaagcctttaattgagatgagtggagaaactccatattttgctgccatctgtgcaagagagcgacttattcatacacgtacccgtctatgcgaagacattaaggttccagggaagagcagctggccaaatttgaagacattacttctgctgagattatggtctcttatttttccctgctccgacttccgccatgttgttacaactccattgcttctacttatgtgcgaatatctgatgcggtgccctatacaatctggtcgagatgttgctgttggttctttcttgagttcaatggtgcttgtggttactaaagaatctaaaaagttctgccctgaagcaattggtttcctgcaatctcttttggtaacatcacttaaaggaaaagtggaaactcatctgcacaatcagattaacgatcaatttatggagctcaagactttaaaactgtggctcagtatccatgaccatgtgcatgaggtgaatccagtgaatatcctagaaatagttggcatggatcctgacgccccttatttctcatctgataactttaaggctggtgtacttttatctgtggcagaatgtttaagaggttttgttattatacatgaagggctatcttctttcccggaaatcttccttccaatatcctctttgctgcaagaaattttggatagatctgagttgcctggatcgttacaagacattttccatgaagtcattgacttgatcaaaaagagaagtgatgaacactatgcttcaagggagcccctccgaatgcggaagaagaagcccgaaccaattaagcaattgaatccaaaatttgaagagaactacatcaagggtcttgattatgatcctgatcgagaaagggcacaaatgaagaagctgcggaagcgtgtcaagagtgagatgaagggggcgaagcgtgagctgcaaaaggataattatttcctgtctgctgtgaaggagaaagagaggaggaagcgagatgaagagagagctgagatgtatggaaaagccatggcgttccttcaagaacaggaaagtgctttcaaatctggacagctggggaaaggaaagggtaggaaaaggatgcggtgatactctattgcaggggggcagctcggccagtgtaaatatacgggattgtgtttgctcaccctcttcccgcggtactggagggtggatccagctgattactgtatcgtgagctgctcagagtttgtcgtgcctacaagagcagggtgggcctagtcttatggaacatctccacctgcttactcctaaagctttgcctataaaattgtaacgccacaaacactttacaaggcttctccttggtgaactaccacacctgggaaatgctttatttcttttgtaccgtggagtggcttgcatctatgttatatactggtgccatagtaattttcagaagcacagtgaagagtttttattattttcatttttgttgtactctgacatgtgagccctataagtatggcaattttggcacggttttgcagtagaaaaataaatactatta

SEQ ID NO: 95441 - DNA, 1328 bp, Zea Mays
tgctgggcaccggcgggacaacgacgatgggcaggaggctgccagcgggcggcggcgctgtgcggtagcgcccgggcggcggcgacgcgggtgaggaagaagcgggtgcagcggcgggcgccgccgtcgtcgtcctccaagctccctgcggcaccgcccagcggcggcggcaaggccgggagcgcagggaggaggcgcgtgctacgtcaacggcaacggcaacggcgagctgatggtgggaggtcgtcgtcggcagcggaaagggcggcggcggtgggcggcgggtcatggtgctgggccgacggccgcgccgaggccgccggcgcgctccagtgggcgctgtcgcaggccgtccggagcgacgacaccgtcgtcctcctcgccgtcgccaagccgccggtcgcccgagacgccgtcagtgattcctgtgtcaggatgctggggaccaagagccagcaacacctcgccgccctcaggaccgtctgtgaatcaacaaggccagaggtgaaggtggagacgtgcgccgtggaggcggaggagcgggcggcggcggtggtggaggcggcgaggcggcacggcgcgtcactgctcgtgctgggccagcgcccgcggcggcacgccgtggcgcgctggctgcaggcgctgtggcgttgccggcgcagggctggcggcggcgtggtggagcactgcatcgagcacgcgccgtgcgtggcgctggccgtgcgccgcaggagctccggcggctacctcgtctccagcaagcatcgcagggacttctggctcctcgcgtagcagtcccacgctggttatcttcgatcagtgtcccctcctctatctctctccctcatttttgtccaccagttcgaaactattgtctgctgtaagttaatcacagcgagtttgcctctgctgctgcaaagctagctatatgaatccaaacggtgagcaatcaaaacttcagcttgtttcagaaaactgttcggtgtggaagaagatggccaaatatacgattctttgcgcgaagctagaatgacaactgatacgaaacacccttgtcaaattaattatgtattacttttatgacagactgtttttcgatattattaggacttctttttgtgaagtttactcagtttattttgaattatgtaaagcgatttaatttgagtattgaactacccaagccatgatcatgaggctaatcgtctgacaattaagtaaacagaatacctggatgattcagatagtaaatcgtaacactattcacacaaactactgcttgctgggatttatacaaagataaggtaaacagtttcgctgaaaagttg

SEQ ID NO: 95442 - DNA, 1299 bp, Zea Mays
accaacgcctaccgaccaaattcggcgactgcttctccatccttccacgaattacacgaggaaagaacgctgataaacaaatggcgtaaatctctatcgacgaagctgtggaggaaaacgaaggatctccccgtgcttgtgcatgccagatcgcctgctctacgtccgcatcccgtccctcgcgaaactcggcactcccagggttcgtttctttgtttcacctactctcgttgtttatgctaatttgttaggcgcctttgcttcaggaaatggtgattgtatcgtactattctggggggaaagcgcaattatttgagggcaagttgattcatcatggaggggtgtgcaaaattcatggcttcagacaccggcaagaagctcattcagatcgatgtgagctcggatacagtgtgcccttggtgcttcgtcggtaaaaagaaccttgagaaagcaatggagcaaagcatgggcaagtttgatttcgaggtccgttggcatccattctttctgaaccccgacgcgcctaaggagggcgtcaagaaatctgacttcttcaagatgaagttcggtcctgtccaatatgagggtgcgatgtctcgcatgactgagatatttcgaggactcgggcttgaatatgacatgtcaggattgacagggaacacgatggatagtcataggctcataacacatgctggacaccaaggctatgacaagcaaaatgctcttgttgaagaattgttcctcaattaccattgccaaggaaagtacattggtgacaagcaggttttgctggatgctgcaagaaaggtgggcatagaaggggccgaggaactgcttgaagatcctaccaaaggagtccatgaggttcaggaagagctcaagaagtactcatcggacatctccggggtcccacattttgtgatcaataataaatatcaactcagtgggggccagccaccaaatgaattcatgagggcgtttgagatggctgcaaaagatggagcttaatggcgcttatttgcgagaaaaaactgtggaaccagttgtgtttcgtagttttgatgtggtgatattagtgacgaagatggtgtggatgttcacttttgaatagagttctaggtgattggatatggaacatgggttatgtcctgtaaatagaggccagtctgtatatttgatttgatttcaaccgaaagctgtggttttcagaacctgagatttcagcatgaaaacctattgtaagcacccctgcggacattaacatcaagaaaaaatctataaaaataaattttcgcaatg

SEQ ID NO: 95443 - DNA, 1160 bp, Zea Mays
accaacgcctaccgaccaaattcggcgactgcttctccatccttccacgaattacacgaggaaagaacgctgataaacaaatggcgtaaatctctatcgacgaagctgtggaggaaaacgaaggatctccccgtgcttgtgcatgccagatcgcctgctctacgtccgcatcccgtccctcgcgaaactcggcactcccagggtgtgcaaaattcatggcttcagacaccggcaagaagctcattcagatcgatgtgagctcggatacagtgtgcccttggtgcttcgtcggtaaaaagaaccttgagaaagcaatggagcaaagcatgggcaagtttgatttcgaggtccgttggcatccattctttctgaaccccgacgcgcctaaggagggcgtcaagaaatctgacttcttcaagatgaagttcggtcctgtccaatatgagggtgcgatgtctcgcatgactgagatatttcgaggactcgggcttgaatatgacatgtcaggattgacagggaacacgatggatagtcataggctcataacacatgctggacaccaaggctatgacaagcaaaatgctcttgttgaagaattgttcctcaattaccattgccaaggaaagtacattggtgacaagcaggttttgctggatgctgcaagaaaggtgggcatagaaggggccgaggaactgcttgaagatcctaccaaaggagtccatgaggttcaggaagagctcaagaagtactcatcggacatctccggggtcccacattttgtgatcaataataaatatcaactcagtgggggccagccaccaaatgaattcatgagggcgtttgagatggctgcaaaagatggagcttaatggcgcttatttgcgagaaaaaactgtggaaccagttgtgtttcgtagttttgatgtggtgatattagtgacgaagatggtgtggatgttcacttttgaatagagttctaggtgattggatatggaacatgggttatgtcctgtaaatagaggccagtctgtatatttgatttgatttcaaccgaaagctgtggttttcagaacctgagatttcagcatgaaaacctattgtaagcacccctgcggacattaacatcaagaaaaaatctataaaaataaattttcgcaatg

SEQ ID NO: 95444 - DNA, 1781 bp, Zea Mays
actgcacctcaacaggtagcttccaacgcaccgacatgtctacacccagatccaagcctgttttggatccattagaaaattcaacaagcatatattacgtagaaaaaaagaaaactcacaaagctagcagacgaaaactatcaatatcgaagaccagagagggcgagagagtggaaaaaattagcagagggggaggatccatccgcggcctcctatataacgaccacctcctcccaccgcttcgacccacgcctcccaacctcctctgctctcccccacctcccggtccggcagcagagagcgggggtgcagagagatcgagatccggaggccgcgagtgggagcgccaccaccagcgactgcggcaatggcgggcacggtgacggtcccggggtcgtcgaccccctccacgccgctgctcaaggacgagctcgacatcgtgatcccgacgatccgcaacctcgacttcctggagatgtggcggcccttcttccagccctaccacctcatcatcgtgcaggacggcgacccgaccaagaccatcaaggtgcccgagggcttcgactacgagctctacaaccgcaacgacatcaaccgcatcctcgggcccaaggcctcctgcatctccttcaaggactccgcctgccgctgcttcggctacatggtctccaagaagaagtacatctacaccatcgacgacgactgcttcgttgccaaggacccatctggcaaggatatcaatgctcttgagcagcacatcaagaacctcctcagcccatccaccccgttcttcttcaacaccctgtacgacccctaccgtgagggtgctgactttgtgcgtggataccccttcagcctcagggagggtgctcacaccgccgtctcccacggcctgtggctgaacatccctgactatgatgctcccacacagctggtcaagcccaaggagaggaatgagaggtatgttgatgctgtcatgacaatccccaagggaaccttgttccccatgtgtggcatgaaccttgccttcgacagggatctcattggccctgctatgtactttggtctcatgggtgatggccagcccatcggtcgctacgacgacatgtgggcaggatggtgtgtgaaggtcatctgcgaccacctgagcctgggagtcaagactggcctgccatacatctggcacagcaaggctagcaaccccttcgttaacttgaagaaggaatacaagggcatcttctggcaggaggacatcatccccttcttccagaacgtgaccatccccaaggactgcgacaccgtccaaaagtgctacatctacctctctggacaagtgaaggagaagctgggcacgattgacccctactttgtcaagctcggtgacgccatggtcacctggatcgaggcctgggatgagctgaacccgtcgacccctgccgccgcaaatggcaaggccaagtagatgtgccatcacttcggcactggagtgaaaaagaaagtatgattgggtcctgcctaggccccatagatatagctcttttttgagaaggaagagagattaattcagcagcagcttttataaattctttgttgtcatgaagcaggtggttcttttgtagttgatgaaagggatttgtcgtcgctatcgtttacataattcagacaataattttatattgtgtaattctgagaatcaaagcactgtttgtgttatagcatatctaagaatgagcattgctgttgtttttgtctactgttgccaaggcgatagttgacatctc

SEQ ID NO: 95445 - DNA, 425 bp, Zea Mays
ggggcggagacccggagtcttgagagttgaggaggcggcgccggctggtcggcgagtcgacggtgggtcggagctggagcttcgtcctgttaacagaatcggcagagtagaaaaccaacaaacagagcacatttacgtgagaaacccttcgatacgaaggaaaaccacaggcgcctcggcggccgtggacaggggcgacggagctcagtccgctcggcggcgctcggcagtagagcagacacgggaggaggcgggagggattgggaatttttttttactgtggatctttgttgggctaggcgtatatcctaaacaataatgagctatattgggccctcctttcctagctcaccgttaagctatccaggcttcgatcaatgacaagggttagaatctagtgggatggaagctaggatgagtcatat

SEQ ID NO: 95446 - DNA, 330 bp, Zea Mays
gctaaagaagataaagaaccaattggtgaactagtcacaagggcatcagatagtgcagctgctaatgaagatgaagaaccatttggtgaactagtgacaagggcgccagatcttgcagctgctatttatgcccagtttctgcccatttcccaaattctacctggttggattgccgctgctaggctcgaagagattgctggcaagcttcaggttgctcggcagctcatccagcgtggttgtgaggagtgccccaagaacgaagatgtttggcttgaggcatgccgtttggccagtccagatgaggcaaaggctcgaagatgtttggcttga

SEQ ID NO: 95447 - DNA, 1246 bp, Zea Mays
atggatgctttagccccggacaacaacgaagccgaggtagacaacaaggtaagatgtgacggcaacaaggactatgagaatgtacaagataaatctttgtttgattgggattctgtggttcttggtgctactctcctctactctctagacatcctgacggctcaacttcgttttcttttctgtctctcactcgttttcttttctgtctcctcctctctgctcctcctctctgcctcgctctctggacggccgacggcgcacagcgcccgcctccctacggcgagctccaccggcgttggtcggctccccacgacgaggtccaccggcgttggtcggctccctacggtcgcggaggtgcttgccatcctcgactcccagggcttcggccgcctctccgacgccgcggacgattcaggctcagagtacgaggccgacacgggcgatcccaatgccggcgagagggacggaggcggcgggaatgcagcggaggacgcgctgtcgaggtcagagctgggagccccggcggcggcggctgctgctgcctctgctgctcaggccgggggcttgtcatggaggggccgcgccgcgagcccggaatgcgagaggcggcggccgcagcaccaacagcacaagggtaggcagctaaggcagaggcacggccacgaccacaggaggggttacttttactgtcgcgtcgcggattcgtcgcccaagtaccacccagggcagtcttgccggaagatcaagaggaaggagctgagatctcagacagaagaagaggagggcaacgacaatgcagtggagagcacggaggacgggcatgagagatcagattgtactgtttgcactgatcagacggctaatgttgatggcgaggtgaaccaagatgggcatggctcttctagtaatggaagagtggagggtcgtgatgatcttgccatggtatatcagaaggatggggagatggagagggtactcgagaagcaggctgagctaattggacagttcgaggctcaagaaaatgcttagagggagtgggaggagaaattcagcctgagccaggattcaattatggtacacactttcctttttcagatatgaatcattttttacttaatacgaagttattgcatttgactgtataaaaaataaaatgagctaatattttcatattgcccactcatttctgctctccaacttccaagataatgttaacttattaaacaacaagctaaatcaggctgaa

SEQ ID NO: 95448 - DNA, 297 bp, Zea Mays
aggggttgtggacacatatttatagccctaggggctgcactaccacactttctcacacacactacacaacaggattgtcctctagatgctaaagagactacagaggacagtcaaaagcgactgttgtcctctagatgctaaaacgactacagagggcagtcaaaaagcgactgttgtcctctagatgctaaagagactacagaggacagtcaagctgtcctctagatgctaaaggactacagaggacagtcaaaagcaggttgtcctctagatgctcaagacttattccatcaatgt

SEQ ID NO: 95449 - DNA, 219 bp, Zea Mays
atggagccaaggaaagagatgggtacaagctcgggacgacgccattccttcgctgctgtgaagccccatgctggagccgctgtccatggccagcagcatgttccagaattgtcatcgccaagtttgccctcgccgccggagtcgcagcaaactcctacaatgccacacatgccggagtcgcaaaatcgctctccaaatctggcatggtctgatttttag

SEQ ID NO: 95450 - DNA, 1566 bp, Zea Mays
ctgtttttttccttctctttcttatctttctaccccctcagagcccaggagtcagaaggatcgcacagcatcaagaaacaacagaggcagcaaaagcgaaagaagaaagagccaagatcgagggcagcatcaagattgcatatctgtgtgtataccacatacctccttggtcatctcctggatgtcgacgcggcgtccggcccagccgtggaggtgggcgcgcatgaaggcgtcgatcttggggaggagcgcggcgcggatcatgtgtggccgcgtgagcgcgagcatggcgccccgcatggcgcggtggagcgggccgtgcacggcggcgatgttgttgggccccaggatgtcgagcatggactgcgggtagcccgggacgaagccggcgccctcgctggccagcgcccgccggttcagctccggctccatgcacaccaccgtggggcagcccaggatgtgcgtccggaacaggctcccgtacctgccatgcccaccaccaggatgctgatgatggcacggtactatgataatcagccagcagagggctggaacaggaacagtgctgtgctgcgagcttttggggaacacgacactgatgctccgcctctgcctctgctcctcctccggatcgccacttttctttctttctttctgctactactacacttcctttctaacaaatgattgatgcgggcggggagtgacagacagacacacacatactgcagacggcaaggcgaaggcaaagcaagcagggctcgcgctcgcgggcgcgctactctgctcgactagtgctctgctcttgcctcttggaaagacgagaagggagaagaggcagagcatgggacgggcgagagagcgagcggaatgcagcgcagacggggcgggcggggcacggtacctgagcctcctctgcttcatgaagctaggcccctgcttgaggaactcggtggtctcgccgaagagcggccaccccattgtgcccggcggcaggccccggcggcggctgtaccgcagctcgttccaccgcagcagcaggctgctcgccagcaccacgccgagcacggccagcaggagcaacagcagcgccatctcttgtgtctctctttctctctcgtgcgtgtgctgcttccaacaggacgagcgaggagaggggaagagtggtggtggtggtgctccaactccccaactccgagcaccgcagagcaaggaggaggggtgtgctttggttgctgttgtactgggtgccgagcatccctttatataggccacaggcacacacacaccaggtcaccttggcgagaccaagagcttttttttctcagtttattatttgtcactcggtgcctttccatttttctttttcttcaattttctcaaactctaatacagaggaggagctagggtccacattccaaggcggagcggattgaggcttgaccgtggggtcacgacaagcgtcaaagctccttgtgtgtgccgtgcgtgtgcgtgtgtgaaatgtgagaatcatggtgcttgctaggctgctgctgctacggagatggaatcacgcaagaagag

SEQ ID NO: 95451 - DNA, 1607 bp, Zea Mays
cctccccagtcggcgcatggcgcagcgctctcctctgtgcctgcgccgcctcaaatcaaatgaaatcgggcctcctccgcacttccccagtccaatttttttcgctcgggagtaccgagcttgttgggtccttaacaagggcgggcgtgcatttcccgaggcaccattcatctgtggaatcctatgtctttgcaagctcccaagggcaagagattgtcgttgctttagggagcaacgtggatgatacacaatcagtacagcacctgatcaaccactgttcatatattctgttgtaagatggacaaccaagcttggacgacatgattacgatttatgccaaactgatgaagatatagtcccagaccagttgatctggatgtgatattttatgataagcatcaaacgaacggaaatatgagagagcatttttttttctagctccttttgatggatcttctaggatctcttgatccttggatcaatgcaaagttggcattctctcaatatgctgaaatgtgcactttaaactgtggaagaaccttcatggagagcctttgtttgatcataaaagaaggcctaataatagtgttgcctgtgggtcatggcctcatagacataatctgaagccagatatctttagtgacaggtggaaattcttgagtggatgctgtttttctgaggtcaaattgctaacatctgaacatgcagatacagttggcattggcactcgatccacgtgccattttgcaacaaggctctcagaggaggaagagcttcaaaggttgattcctgtgctgggtgcagtcgttaaagatacttgagatagaaagaagcttatccatgaatacaattatatgcagaagtgcaggtgaaactgtaaatcgaggagcatatatagtgaatgatgtatctcgcaggtgccttaacctctgtttctcacattgtgtgtacatggcaggggatctattcacattgcataggctacaatctgggtttatatagcctctgagcaatactcaagtgtcttacatggaactggcagagaactttttgaacagaacagttggagatctcttctattaacagagaagaataagaacccaaaaaaaactgtacaggaaaaaaggaatcaagcagagctaaacaagaacatcacactaagcttgaagggaagatttaactcaattttatggcttaatggaactggcagagattccttcgttgagaatattgttgacccttctaaatattcttaacagaaccctcagcttctttctggtgtgtcatccatcagaagggagaattgtcaagggagcattattgcttcacatgtactagtatgttacttgaaccatccaggaaaaaggatttcaaggtgggatgtgtgtgagtgtgtcaatcccacatgcaatggtagatttgatgttgatatacaaaggtttgtgatgcattgttgaagcaaataaaagatggggatgtttttttgaaccaaagccttaagcttttgcccttgtttttttctctctttcagagacttttgcacttgtccattagtatgatattgctatttcatttttcaaataaactatctcttgttagtgaataag

SEQ ID NO: 95452 - DNA, 1906 bp, Zea Mays
ttccctgttcctcgtacgtagtgtagcaccaaggagccaaaggtttgcacctcgatcgatctataaaatcttctctttttactctgatgaagattaccgtgttgttgctagtactagcagcagccagcggggcagctgagcgagcatggtgaagatctgctgcatcggcgcggggtacgtgggcgggccgacgatggcggtgatcgcgctcaagtgcccggccatcgaggtggtggtggtggacatctcggagccgcgcatcgccgggtggaacagcgagcgcctccccatctacgagcccggcctggacgatgtcgtgaggcagtgccgcggccgcaacctcttcttcagcaccgaggtgcaccgccacgtgggcgacgccgacatcgtcttcgtctccgtcaacaccccgaccaagacctgcggcctgggcgccggcaaggccgccgacctcacctactgggagagcgcggcgcgcatgatcgccgacgtctcccgctccgacaagatcgtggtggagaagtccacggtgcccgtcaagaccgcggaggccatcgagaagatcctggtgcacaacagccgcggcgtgcgctaccagatcctgtccaaccctgagttcctggcggagggcaccgccgtgcaggacctgttcgcgcccgaccgcgtgctcatcggcggccgcgagacccccgagggccgcgccgccgtcgccaggctcagggacgtgtacgcgcagtgggtgcccggggaccgcatcatcaccaccaacctctggtccgccgagctgtccaagctcgccgccaacgccttcctggcgcagcgcatctcctccgtcaacgccatctccgcgctctgcgaggccacgggcgccgacgtcaccgaggtggcgcactccgtcggcagggacgcgcgcatcggcccgcgcttcctctccgccagcgtcggcttcggcggctcctgcttccagaaggacatcctcaacctcgtctacatttgcgagtgctacggcctccccgaggtggccgcctactggcgggaggtcatccggatcaacgaccaccagaagagccgcttcgtcaaccgcgtcgtctcctccatgttcaacaccgtcgccggcaagaagatcgccgtgctcggctttgccttcaagaaggacacgggggacacccgcgagacgcccgccatcgacgtctgcaacggcctgctcggggacaaggctgtcatcagcatctacgacccgcaggtgacgggggagcaggtgtcgcgggacctcgccatgaacaagttcgactgggaccacccgcgccacctgcagccgctcagcgccaccgacctggccaagcaggtcgccgtcgcgcccgacgcctacgaggccgcgcgcgacgcgcacgccgtctgcatcctcaccgagtgggacgaattcaggacgctcgactacaagcgcatgttcgacgccatgcacaagccagccttcatcttcgacggccgcaacgtcgtcgaccccgccaagctccgggagatcggcttcgtcgtctacgctatcggcaagccgctcgacgattggctcaaggacatgccagccgtcgcgtgatccatcgatccatctgtagggcgcattccttgacatgcggccccatgcatccatctttcttcatcctccctctcatccgattcggctattcatcagtatattaattaggtttccctgttaatttcattgtggtctttaattcacagtttttttacaagttagctcgatcgatatgccgacatgttttatacttaggtagtatatagaatctttttgcatacatgcacggagtactaatgatatataaattttgaattgtttgtagctttatttatatacattggcaaagcattgatgctgtttcttgtcatgaaa

SEQ ID NO: 95453 - DNA, 1104 bp, Zea Mays
atagcagccatctgttgactgctgccttaagttgagcaacctacctgctccctgctcggtgtctgtctccgagaggcgagactcacccgactgtcgttcaatcagagcgcggagcattcaagaatcactccctccaccatcaggagggaccacagcggccgaagcgatggggcggccgaggcccaagagaggagaacggcggatcgacgccgccattgaccacctctcccagtacggcttcgccaagccccaaatccgcaagattatcaacaacctcttgcagctgtacgggaaagatgggtggttgttcctggaggaggcgtcgtaccgtgttgtgcttgacaaactcctggaagaacaggcgcaggatgatcagaaacaagaagcagtggctgcagaagaggcatcaccaccacaaaatggtatggaagtcgcactagtgcatgacgaggcaccaaatggatctcaatcagcccttgaactgcaagcttctccaaacagttcacctcccttggaatgtgtactgccactggctccagccaaaggacctcctcgtgcaaggccaccctgctatggatggattagtgaagagtccgggagtgacagtgaaccagaggatagagaaatgctttctgatgtagcaaggcctgtgattttcccaaaaaaggatataccaaatcctgtggaaacattgccttctaagaggaagcggccaagtagatgggatgtctgagattaggactgaccaaatttgcaagatggtggccttcaaggatcaactttcacctataacaagtacatacatagtgtgtctagctgggatcaaggcaggatgagacaaatgtagcgctgattggttgcagactgacagtagaacagactgctgctgtttgtgttccagagacgacaaaaattctgctgtttgaaattgtgcactttaaacttagtagaattgtctctggtcatctatccgaaccttggtgtcattttcttttagaacctaatggaccgatctttttacttattaaattcggctgtgcaagttgatgctacttctcgtggataatttgtttggcattccatgagattaaatgatataagaaa

SEQ ID NO: 95454 - DNA, 1507 bp, Zea Mays
atagcagccatctgttgactgctgccttaagttgagcaacctacctgctccctgctcggtgtctgtctccgagaggcgagactcacccgactgtcgttcaatcagagcgcggagcattcaagaatcactccctccaccatcaggagggaccacagcggccgaagcgatggggcggccgaggcccaagagaggagaacggcggatcgacgccgccattgaccacctctcccagtacggcttcgccaagccccaaatccgcaagattatcaacaacctcttgcagctgtacgggaaagatgggtggttgttcctggaggaggcgtcgtaccgtgttgtgcttgacaaactcctggaagaacaggcgcaggatgatcagaaacaagaagcagtggctgcagaagaggcatcaccaccacaaaatggtatggaagtcgcactagtgcatgacgaggcaccaaatggatctcaatcagcccttgaactgcaagcttctccaaacagttcacctcccttggaatgtgtactgccactggctccagccaaaggacctcctcgtgcaaggccaccctgctatggatggattagtgaagagtccgggagtgacagtgaaccagaggatagagaaatgctttctgatgtagcaaggcctgtgattttcccaaaaaaggatataccaaatcctgtggaaacattgccttctaagaggaagcggccaagtagatgggatgtctggtttttaaccggcactagcatatccacttaacatgacgatccatgttctttttatttctgtacgaacaacagttgagctttgaagcttcatttgaatggaaagttccaaacccttcataaaataagtgtagttggttagttgtatataccttttctggttttgcaagtctttaggttggtacgactcatgtttgaccatacaccctagggtgtcacagatgaagctccacaagtagttcatccaaatcaaatctgaaggctataagatattaagatgtcatgatagcacataacagtaactgggttgctattgctattgtttgaagaattaatgtatatagaattagtgagggaagactttacaattgctcctatacctctgttaatctaaatccatattaggtccaccttaaatcaaaaccagtaccttgttttcctgttctatttgctcatatcaactgtacgtttgtcttgtgaacctcagagattaggactgaccaaatttgcaagatggtggccttcaaggatcaactttcacctataacaagtacatacatagtgtgtctagctgggatcaaggcaggatgagacaaatgtagcgctgattggttgcagactgacagtagaacagactgctgctgtttgtgttccagagacgacaaaaattctgctgtttgaaattgtgcactttaaacttagtagaattgtctctggtcatctatccgaaccttggtgtcattttcttttagaacctaatggaccgatctttttactt

SEQ ID NO: 95455 - DNA, 885 bp, Zea Mays
acgccaccgcctttttactcatctgttgagcacttcgcctgcttccctccttgccgtgcgatccgcctccagagactcctttgactctggattcaatcgtggagcttggagcattcaaggttcactccctccgccatcactggaagatgggaccgcagaaggtcgagacgatgcggcggccgaggcccgagagaggagaacggcggatcgacgccgccattgaccacctcgcccagtacggcttcgcaaagccccaaatccgcaaggtcatcaacgacctccttcagctgtacgggagagatggatgggtgttcctggaggagggatcatacagtatcgtgcttaaagtcctggaagaacaggcgcagcaggatcagacacaagaagcagctgctgcagaagaggcattaccacaaaacggtatggaagtctcacgagtgaatggtgaggcaccgaatgagcctccatcaacccttgaactgcaagcttcccccagcagttcacctttactgctagtgccaccagccaagggacctccttgtgcaaggactccctgctatggatggattagtgaagagtccgagtctgagagcgaatcagaggatggagaaatgctttccgatgtaactgggcctgtaattttcgccaaaaaagatataccaaatcctgtgggaacattgccttctaggaggaagtgacctagtagatgggatgtgcacaccctagctggtaatgattctgactcaccctcgctcttctctatgtaatttcgtattgctgacacaattgtcgtgagtcgtgacaagtccgtatttcttttaggtgccgttcggttgtttgggattggtgggttctctaatttatataaactttgattagctggaa

SEQ ID NO: 95456 - DNA, 3019 bp, Zea Mays
cagcctccacctcctcctctcccaccgcaccatggccgccgcctctccccccacctcctcatctccccctcctcccagagcagccgacggtgacggggacggggttgggtgcggtgccgcccgctgctcctcgcccacgcccgcgcaacgcaggaggacctcccccaaccacagcggcgggagctcccgtaagagttcaggatcaagagattttgcaggaggttcacttttgaaatatgtgaataaatcaacattgcacttcaagaaatctaagaatcgaagaagtggttcccctgtcaactggacccctcggaagaagactgaatcatacatgaagagaaaaataaagcatcttcaggaaactgatggaatgaccgcatccctccatgagactctaggaaatgcaaatcctcactatactaggatggcaagggagaagatagcagcgagagaggcagctagaaaggcaacagatgctcgcaaagctgctatggttgaagcttcatggtgccgaattcttcgagcagccaggatccaaaataaaaatgccgaagaagttatggagaaggcagtgctacaagcaactgaagcattcgaggaagctcgggcattgggtgtgatgatgtatgacagacctgactgtccacataagcagtatgaggtggaatcatcgttgcatacaggagcacaatcaacccataaagttatcgcatcgtttcagacagcttttcaggttgatatggaggtttctgctgcagtaaaaaaagcatttgttcaactcgcaaactctccggattcagcaaagagagaagagtttaaggaactattatggaaaatcagccaaaatcctgatttggcagaacatgaagataaacaacaactggttgactgtagcaatgaagatgcaattgtgttgaaactcaataaagaacacctcagcggcagctgtgttgcttctgatttcaataccacaaaagttcaagaatccatagatgttgttagcattatgcttgaacggctaaaagctctccatgaagaagaacttgcctccttagcagtcattgtagctacatctggccttaatgctgaactacaaaatgaaagaagcaaatatcatgaaacaggcgctgtgaataacactagtgctgggtcactcagatcacaagcaaggaggtattccactgcagcgagttttattggtgtccaaggaccaaagaaagaagtcacttctgagttaccgagtctggataagttcttggtgaagcatctttcaaaacttgaaagagaagttcaggaagcaagagaagcaagcagaaaatccacattagtaaagtctgtcacacaaggtgcccacatccaatttacaggcagcaatgcaaagacaccagaatcaacttcagacctcagcagcattctggtgaagcatgtgtctaagcttgagaaggaaatcctggaagcaaagaagatcaaccaaagaattcaccaggtggaaggaaattgtgaggatgtcaaatcaaatgtgcagtcaagaaacaaagaactggaatttaacaagattcagccagaagttgaaagtaactgtgattcaaagggaagctgtgagtccaaggaatcctgtatagacaacaatgacataaaagataatgatgattgtgtacaagaagacaaagagaacaaaaactgctattcacatcagttaccaccatctggtgcaaagggcaaacatggtggcaagaggttaactcgacttgaagctgctaggctggaagcacttaaatccttttgtactatagatggcaatgcattggatgctggcctggataagatcttcgtcaagccaatccatagattggagaaggaaaagagggaagcacgtgaaggacaaatcaatgtgcagaaacatccccagaagcttggtcaaagcgcaactgtgacagagggcttagatgatatcttagtgaagcatgtatcaaggctggaaagagaaaagattgattaccaaaagaggaatgaactgggagtgggagaaagatggagcaatgtgccacatgatcagcggagtaatggtaacaatgtaaaatcatctgatagtttagatcaagttttagtgaagcgtattagtcgactggaaagggagaagttggaatatgaaaagaggaatgcactagaaggaggttccgatgtggaaccaaagagggaaccacactgtaacaatgctgcagcttctgatagtttagatcaaaacttaattaaacatgtctccagacttgacaaggagaagatagagcatgagaagaacggtggtatgataattgtaaagaagggtcagacgcaatgtacaaatggagccgaaggaggcctggctgacgtctttgtgaagcgtccaacgaagctcgagcaggcgaaactggcttctgctgccgaggagaaaccagctagtggctttaaccctgtcgaagagcgtagaagagcaagacagaaggagcttctcgatgcgtggggaggaatgggtttggggaactcgatgaagccccatgtatcaaggattgagagggataaggtcgcttggaggatagccgaggatgaacagaagcagatggctgctgcaagggaggcgtgacttcactgaaacctggacaaattatctgatgcgttgcgctccagcttggaggaaaatgcatcctctgaagtctgatcctccttccttttgacaaccgacagttgttttgggggaggatcagatgtccagggcgtcatgccatgtaccagtgccgcaaacaaagcgtgaaactgtcgacaggttacttggttcgaatcctccttttgtatttgttgttgcctctggtacattctcctttggttgttccttccatgtaattacgtatcgttgtccaattgtctagcatataattgcgagcaagttcaagtgaaattaactcctttggagatgacgaatgaaaaggcccagtgcagtttcctagatgccagttactaactgctggagtgctgtggcttatat

SEQ ID NO: 95457 - DNA, 748 bp, Zea Mays
gcacctcacttcctctccctccctcactcagccaaagctgactggagcctataagcgaagcgccagaagagctcttcccgatagccatggccaagcccccgcttcaaacggccgcgatcatcctcctcgtgctcctcgcggccgcatcgtgcctccacaccgtcgatgccgccgctttagggttctgctggggcaagtgcagcgttcggtgcgcgggggcgaccgcgcggcaggcgcgagccgcgtgcatgatctcttgcggcctctgctgcgaggcatgcaactgcgtgccacgcgacatccatgactgcccctgctaccgcaacatgctcaccgccggccccaagaagaggcccaagtgcccctgagactgagactgcgaggctgactcacatggcggcatcaatgggactgcgactgttgcctgcaactgcgattcaatccatgctgagccagacaacctgttatgttatggatccagatatctatatggttgttagattttttttgttattttgttgttagatttttggttttctttgttcggtagtgaataagtagaatgcaggatctactatgcatatttgtattttgtttttagcattgagctagttaagattttaaaaaaaatcgaatttgttctatattttttaaatggtagaaataaaatttgaacattgattcagaattgaatgttttttcaccatttttgttgtaagaagcaaataatacataaaaaacaaaacaa

SEQ ID NO: 95458 - DNA, 472 bp, Zea Mays
tcactgcctctccctccctcactcagccaaacctgacatcagcctattacaagcgtcagtagagatcttccagatggccatggccaagcccccacttcagacggccgcgatcatccttttcgtgctcctcgcgaccgtgtcgtgcctccacaccgtcgacaccgccgctttaggagagagaaggggaccggctggtagggaccctgcagagggcagcgctgcgggcgtggagcgccccctgcaggcgccatgcaaggggagagggctggctggcgacaacagttgcagccagcctaatgctcgccacgctcagaacctgactcgtggcggcgctgttggtctgggatggagggcgaggagagaagcaagactttcgcagcgtgatccgagagaacgggacgaggcagcagaggtgaggggaaccagagatagggttctacgagagagcaaggctaccaaggcatatcgatag

SEQ ID NO: 95459 - DNA, 618 bp, Zea Mays
tcactgcctctccctccctcactcagccaaacctgacatcagcctattacaagcgtcagtagagatcttccagatggccatggccaagcccccacttcagacggccgcgatcatccttttcgtgctcctcgcgaccgtgtcgtgcctccacaccgtcgacaccgccgctttagggttttgctggggcaagtgcagcgctcggtgcgcgcgggcaagcgcgcggcgggcgtgggccgcgtgcatgagctcatgcggcctctgctgcgaggagtgcaactgcgtgccgcgcgacatccatgactgcccctgctacagcaacatgttcaccaccggccccaagaagatgcccaagtgcccctgagactgagactgtgaggccggctcacactgcgactgctgcctacaactacgatctgatccatgctggaccagacaaccagttatgcatgttatggatccggatacttatttggttttgttagattttttgttttctttgttcgcttgtgaataagtagaatgctgaatctactatgaatatttgtattttgtttttagcattaagctagttaagattaataaaaattaaatatcaaatttgttctatatttattcaaa

SEQ ID NO: 95460 - DNA, 1427 bp, Zea Mays
cttcttccgcggcagatttttcccaggcgccgcgggggatatttcctggccgatggccttatctcctggaggccgcacccttcttcttcacagcgaccaagctgcatctccggcgctcctccagctcggtgcccagtcgctctgctcgccgcgttctctctgcccggccgtcgtcaagctccctgcgcgcgccccatctcgccgcgctcagctccagctcgccagccgcggcatctcctagctccctgtgcgagggcctgcttcctggccgcgtcctctgctccgtcgtccccagcgccggccgagtccctccatcgcggcgcccctgctcggttttctccatggcgccggatcccctgcaagctcgctcaagtcgccgcgctcggtgcttcctgcgcacgctggtcctagctcggccgaccgcgcaggcttcctactccctgtccgccgcgcccctcagctgcctgctctgctcgccgcgcacgctcctctctggtgccgcatctccggcccagctcggactccagctcccacgcgcgtcgccggtcttccctgcgcctggccttcagctcgcccaaggcggcttcctctgccggccgtgcgttcgcccagacctgcgccgtccctgttcctcgcctctgcacccagccgcgccctgcgcacttctctgtttggccatgtcgctcctccctgctagtcgcaagctgtcgagctcctatctcctgtgcgcgcctctgttcctggccgtgctcggatccagcccagctcgcccttgtgctggccgtgtgctcctcgtccagctcggtcgcgactccttgccgtcgttccgtgcaccggccatcgcaacatccccagtctatcgccccatgcttcggtcgtcgtctacatcgtcgcctggccggtagtggtcgccactagctcgctttcgtccaaatcgccaccgcgaatgcttgagtctctggtcgtgtgtcttctatctcgcactaatctcgtccgctgcctcgtcaacgccgtggtcgtcctccctcgcggcgttgttgtttaccccgctaatgtagttgtgtctcatgtgctgctcgtctgaaatgcccaagccaagtgaacattcggcgcgactcaagttcgattcgtcaaaattattcagtcgaggagaagatcttcagcaattgattactgaagaaaagaaggcccctgggtgacgtctacctagaactcgacgaaaagtctgaagtagaatttatcgccgtgggaagtggagtgacttaatattggtaagcgaacgcgttacttcgaatagttggtataataatttaattggctagatttattaattgtgatggtcttcgtgtttagcacaggcacgttgtgattaggggtgaaaacggtcggaaacgatcggaaaacactaaaatcgttaccgtttccat

SEQ ID NO: 95461 - DNA, 701 bp, Zea Mays
acctcactccctctccctctctcctcagccaaagttgacagcagcctacaagcgccagcagagctcttcccggtggccatggccaagcccccgcttcagacagcaacgatcatcctgctcgtgctcctcgtggccgcgtcgtgcctccacaccgtcgacgccgccgctttagggttctcctggggcaagtgttgcgttcggtgcgcgaggacgaccacgcggcgggcacgggaggcgtgcatgagctcctgcggcctaaaatgcgagttttgcaaatgcgggcctgcgatgccgccgcgcgacatccatgactgcccctgctaccgcaacatgctcaccgccagccccaagaagaggcccaagtacccttgagactgagactgcgaggccggctcacacgacggcatccatgggactgcgactgctgcttgcaactgcgattcgatccatgctgggccgtacaacctgttatgcatgttatggatccagatacttatttggtcgttagattttttgttgttatttcgttgttagatttttggttttctttgtttggttgtgaatatgtagaatgcaggatctactatgcatatttgtattttgtttttagcattgagctacttaagattttaaaaaataaatatcgaatttgtcctatatttttttaaatgatagaaataaaatccgaacattgattcata

SEQ ID NO: 95462 - DNA, 720 bp, Zea Mays
ttttgaagcaaactcaaatcaaacccagtgacttgtaccatatcaccttatatgagttcaaatcatggcttcaagtcaccttactgatgcatcaacatgttataactcttcatagctgattagttcatcgacttagtgcaagtactctcttcttcaccttagccatggtacctcggtctacaagccgtcgcttgaccttcaccttcgcttagttcctcgaagccctttccttgctatcttcaccctatcaagccattcttgagtcacatcaaattgagcatccattgagagaatcatttcttcaatattgtgaaccttgcttgaatgtcttctagatataattgtcaagatcaatcaagctctagtttgattctcatagaagcatatatggactgacagtaatatggtcaagccaattcacgattcctcatatcttattctcttaggcttgaccaatcctctaaatcactttgtcctctattctggtcatatgtatgtagtgatttcttaggtcttgtccatatattcaaaccaatatagagatcatattatatccatttgcattgtctcattggttatttaacctcgtgttgaacctttgttcactgatcattatacactattcaagtatgttcatcatactgaatttcctgttcaacacttagcaaactcgttagacctttaaatgtgttgttatccaaatcaccaaaactcacaaaa

SEQ ID NO: 95463 - DNA, 456 bp, Zea Mays
atgagcctcgacaccacctccgcgatcgcggtcgccgcggcggccgccctcgcggcgctcatcgtggccatcgtcgccgcggcgtccgcgggcgcatgcggcggaccgccgggcggcgcagccgcggtgcacgacgtcgagcgcgcgctcggggacgccacgctcatgacgtacgagcaggcgcgggcggccgcccggaagagcgcggccgcggacgaggaggccccgcgctgcgcgctctgcctgtcggagttcgccggcggcagggcgggcgagctcgtgcgggtggtctcggcgtgcggccacttcttccacgcggagtgcggcgtcgacgcctggctcagggcgcgcgggacgtgcccgctctgccgggccgaggtgtgggcgacactgccgcgccccgagtgcccgccgttgccggcgcgatccggcggcgccactgtgggctcgcgttag

SEQ ID NO: 95464 - DNA, 2146 bp, Zea Mays
ctgcagcgttggcgtacaggccggactacattagccaacgcgtatcggcagtggcaaaccctcttcgcttctaactccgctgggccaccagctttgaccgccgcctcccttcccctccgctactgctcctccccaccccactcccccgcaggagcggcggcggcggcggcgaggtcgtaccccacatcggcgagcggcggcggcaccgccggaggcaaaggcaagatgttcgggcgcgcgccgaagaagagcgacaacaccaagtactacgagatcctcggggtgcccaagtcggcgtcccaggacgatctcaagaaggcctaccgcaaggctgctatcaagaaccaccccgacaagggcggtgaccccgagaagttcaaggagctcgcacaagcctatgaggttttgagtgatccagagaaacgtgagatttatgatcagtatggtgaagatgcccttaaggaaggaatgggcggtggaggatcccatgttgatccatttgacatcttctcatcattttttggaccctcttttggaggaggtggtggaagcagcaggggaagaaggcaaaggaggggagaagatgtagttcacccacttaaagtttctctggaagatctttacaatggcacctcaaagaagctctctctttcgcgcaatgtcatctgctccaagtgcaagggcaagggctcgaagtctggtgcctcaatgaggtgccctggttgccagggctcaggcatgaaagtcactattcgtcagctgggcccttccatgatacagcagatgcagcagccttgcaatgagtgcaaggggactggagagagcatcaatgagaaggaccgctgtccagggtgcaagggtgagaaggtcattcaagagaagaaggttcttgaggttcatgttgagaaggggatgcaacacaaccagaagatcaccttccctggtgaagctgatgaagcgcctgatactgtcactggagacattgtattcgtcctccagcagaaggatcactccaaattcaaaagaaagggtgaagatctcttctatgagcacaccttgtctctgaccgaagcactatgtgggttccaatttgttcttacacatctggacaacaggcagcttctcatcaaatcagaccctggtgaagttgttaaacctgaccaattcaaggcgattaatgatgaggggatgccaatttaccagaggcctttcatgaaggggaagctgtacatccatttcacggtggagttccctgactcgttggcaccagagcagtgcaaggctctcgagacagtacttccaccaaggccttcatccaagctgacagacatggagatagatgaatgcgaggagacgactatgcatgatgtgaacaacatcgaggaagagatgcgcaggaagcaagctcacgctgcccaggaggcgtacgaggaggacgacgagatgccgggcggagcccagagagtgcagtgcgcgcaacagtaagcagactatcatcaaggcaattgggaggggtggtgcccttaaagcatgggagtgatctctggttttgctgtcgccgagctgggaaataggaagctgaatcgacctcgcaagcggggaatgtatccttttttgctgcaacataaaaaatgctacccaggcatagctgggtaccttttaacttctgtttgtgggatttgctagagtgatggtttcgatatatagggggacttgaatgtctggaatgctacggtataacgcacatttgggtgcaatgtctgttgcattgctgtctgaatgacatcgttggtacatttattttcatgtaacgcctgtagtttgctaatcaacaagcttggaatggcctgattgatgatgcctgataatttgtcctttacaggttataaaggtgctgctaagaaacaatagtcatttgtggagcgtaacataacggtgagcagtctagccttgttggatcgtgacatggaacttgaggccaagtttgcagtagttgccgacgctgcagacgtagtagcgcacgcctttatagtcgagcgggacgacggcgggcgggacgcggaagttgttgtaggggtcgtcggtggtgcagtcctcgtactccctcctggacacctgcaccacgtcgtagaacccaatctggaac

SEQ ID NO: 95465 - DNA, 2275 bp, Zea Mays
gcagcaccctcttcccaggaaaagagagagaacggcttaaaaaaaatggagacaagaagaggatatgttgttgagttgttcggttgttcctcgaggaggttctagactagaaggcagagatgaaactacacgtttgtccatctgatcacagtggaagcaaaagtagcactgcagtctaacattccttctatgcctgaaacaatgagagaaagttatgcagaaccataaaagcattgacagcgtattactatgcgtaagaaaaaaaaggcgagtaaagtttcaaaagaatgatgaggtacagagtatttacatggaaaatgttcattggacctaacaaagaatgatacagtgagagtcacaggttcagcagggatagcattgttacattgatccgatgaatgcagcaatagaatcccacaagaatttctttgactacctaaggaagcttcaagcttgtctgctttaactttcaagatgacttaccagcactaataaaaggaccatataggttaatgtttctatgataaatgcacaatccatctaacaggagcaaaagacttgcagtgcctaaggaatcaaactaatgtaacaagcattcaattgatgacacaataacaatctaacgcagtatgctgctttattactgaaaatgttaagcatacagattactgaacaacctactactcttgcattccgtactatgtacactccatttggagacacttctcttaacacaacacctaaatagaagaagattaaattctttcagagaggctgcagcaagtgcatacttccatccctcattcatttcagtgtacaaactccgaccgtcaaatggtgtctgcttcagactagtcacgtaggatgactgagtctgcaatctccatcaaaggctcaaggcactcaggagaaaacttgcgggcgaacatgtaagagtgtgtcatgttcgacttcctcagctccctgatcaagctcgcagatacctctccaggcccatacaagtgtgggtggcctgcaaccgaatccgtccaatttacccttgttagggtatacttagtacacccctcagaatcctgcatatccagtagtgtggggaagtaatgctcctcggggtagcatgaatccctgcgctcgatcagacagggcaacttgaacttcttccaaagcctcatatccctcacgaccatgatggcatgccttctcgtgagcacaaagaactgtgagccagcccggaactgatcatatggaacctcagggagcatggcatcgtcacctcgagcatagtacctgtcatgcagcagcttggtgtcgttgtccatgttgtccattatctctatgaaactgcggtggcggctatgagggccagcattgtcagagaggagtgcattgtagagggttgggaactggtggagcgggatgcaggactgcgacaggagcgcgaagaactggttgttggggtcgtcaaggagcgcggtggctaggaggcggcgcgcggcggatatgagggtaggggaggcgcgctgcgtggccttggcggggacgaagcggccgcggaaggatggcgtgggcggcatctcgaggacggagtaggggtcggcgtggacgtagaggttgaagaggtgggtgtgcccgcggaagaacttctcccagagcggggagaagacgaggtccgagttggtgaggaagaggaaggcgatcttgggcgccgggcggcgccagaaaaagtaggagcccgcggaggtgggcgtgggagtggctgacgaggaggagaggatggctcggcggaagagggcaaggtcgtcggactcgtcggcgtccgggatggccgggagcgtcttgggcgggagcaggcgcggcgcgaggaggaagacgaccgggatggagatgagcagcagcagggagagcaggaacggcgaggcgtacggcgacgtcatctccggccagcggctgctgccgcgcctgcgggctcttggatcaggattcgcagaatacgcgcaggccgcggccaatgcagcggaggatcttgggtgcgtgaggaaccgggcaagcaattgctccaaaatggtgtggcaatggcgcggcaccgctaggctgggaaccgacgacaccccatgcggggcaggatctggctcgagatccgcgaacggcaggccaggagaacccgggccaagagcggggacgggacagccaggaacaacgcagccggagcaggaaacccggcgcgggaccgggaatggcggatccgggacagcgtgcgactgacctcgcgcggagg

SEQ ID NO: 95466 - DNA, 849 bp, Zea Mays
acagtctcgcagccgccgcgatctgctagcccccgaaccctagctcaatgggaaccgccgcttctccttctccctcgctttccctagacacagccgcctcccgtcctgatcctccttccccggaggccaccgctacaccagccaaagaagatcaccagcactccgcctccgacgccgcgaccgccgcagctggcggcggcgcagacgatgcggcggcggctccttctgttggaggcggcgcggaagaggccgctgagacggtggtcatcgatgcctccgcggtggccagcggagcaggggagggggaggaggaggaggaggagcaaggggagtgcgggttctgtctcttcatgaagggcggcggctgcaaggacgagttcgtcgcgtgggagaagtgcgtggaggagacggatgccgcggatgccagcattgacgtcgtggagcggtgccaagacgtcacggccgcgctgcggaagtgcatggacgcgcacgccgcctactacgagcctatcctccgggccgagcgcgccatggctgcggacctcgaggcctttcaggcccaagaagccgcctccgactccgcggcgtcggaggaaggccagaaggaggcggcggcggccgaggcagcgccgcgtccgtcagacttaggccagaataagcaggtggctgaggcggcagttgcggaggagagcagagatcctgcagcctgattgggcgaaaaaaggcagcggcgtcttcaattttttgtgagggatttgaggatatgaattccgtttgtaccttaggagagcatcaattaacattttgtgaaggggatagatttctgtccttttctctttacatgaaaca

SEQ ID NO: 95467 - DNA, 1699 bp, Zea Mays
agagatgaggaaaagaagatgggtacacttgtcaaagaggaatttggtcgtccaaatagggaaaatactatgggaatgcgccatggttcatatgataaactagatgatgatggccttgcaccacctggaacaagggtctcgggtgaagatgtcattattgggaagacatctcctattccacaggatgacgctcaagggcaagcttctaggtactcgaagcgtgatcatagtacttctctgcgtcacagtgaaagtggcatggtggatcaggttctgttgacaacaaatgcggatggtctaagatttgtcaaggttaggatgcgatctgttcgaataccacaaattggagacaagtttagcagtaggcatggacaaaaaggaactgttgggatgacttacactcaagaggatatgccatggacaatcgaaggcatcacacctgatattattgtgaatccacatgctattccatcccgtatgactattgggcagctgattgagtgtatcatgggtaaagttgcggctcagatggggaaggaaggagatgccactccattcacggatgtgactgtggataacattagcaaagctcttcataaatgtaattatcaaatgcgtggatttgagaccatgtacaatggtcacaccggaagaaaactgacagcaatgattttcctgggacccacgtattaccaaagactcaagcacatggtggatgacaagatacattccagaggacgtggtcctgttcagatactcacccgacaaccagcagaggggcgatctcgtgatggtggtctccgctttggagaaatggaaagggattgtatgattgcacatggagcagctttcttcctgaaggaaaggctgtttgaccagagtgacgcatacagagtccatgtatgtgagaaatgtggtctcatcgcaattgctaatctaaagaaaaactcgtttgaatgtaggggctgcaagaacaagactgacattgtccaagtacacataccctatgcttgtaagcttctgttccaggagcttatggcaatggccattgctcccagaatgcttacccatgatatgaagacagggaaggatcagaagaagcgctgaacttgtatcacatgagatgtaactggaactttgctccattgctatatttctcgcgtgcacacggtagtacgctgttaaggaacattgtggtcacttgttttccgacttcgactctggtttgtcgtgaacgatggacaggccattatcgtatcttgatgggctatcagcccaatctgtgttagtgctgttagatgatctgtgctagcagatcgttgagttaattttgtacattataggaatgtgctgcaatgtattaatctacgaatacaaagactttggcgcgctaaggtgccttgtagaattaaatgccattacaatttcagttttatttagaactacatggggttatagtgccatgtctccaacccatgacaattctaatggcatggttccagttaatctttcttcttactagtaggaagcacgcaccctcgcgctcgtttgtaaatacaggtcgtgtgatataggtaggtgttttttatttatttatgggttcaaaagtatttaggagtggtacagaaatgtatacgcggttttatataggcattactgatggtgtatgtcatatggatgtctttttgtgctatgtagg

SEQ ID NO: 95468 - DNA, 2394 bp, Zea Mays
cccgcccctactccctacaccttcaccgctgtcgggggaggcggctcgccgtgacatcgacctcaccccacccccagcgtagcatcccgccactccatcgcactgtccatggaggatgacgagtacgaggaggggatggagatgggctacggcgggcatcaccagcacggcggcggccacgcggggtacggcgcggaggaggacgacgaggtggggtacggcggcgggggcggggaagagatggatgaggatgcggacggggacgctgagcagcaggaggatatcactcaggacgacgcctgggccgtcatatccgcctacttcgaggagaagggcctcgtgcgccagcagctcgattccttcgacgagttcatccagaacaccatgcaggagattgttgatgagtccgccgacatcgagatccgccccgagtcgcagcacaaccctggccgccaggccgaatttgccgagactctgcacaggatcagctttggtcaaatctatctcagcaagccaatgatgactgaagccgatggagagacagctactttatttccaaaatcagcaaggctcaggaacttgacatactctgcaccactgtatgttgatgtgtcatacagagtaatgaagaaaggacatgactgtgaggaagttacagagactgcagagtatccaaaagtgtttattgggaaggttccaatcatgttgcgctctagttactgcacactgtatcaacaatctgagaaggatctcactgaacttggggagtgtccttatgaccaaggtggttatttcattatcaatggaagcgaaaaggttcttattgcccaggagaagatgagcactaaccatgtctatgtttttaagaagaggcagcctaataaatttgcatatgtggctgaagtccgttccatggctgagaaccagaacagaccagccagtggcatgtttgtacggatgctttcacgagcaggagcaaaagggggatcatctggtcaatatatccgtgctactctaccttatattcgtgcggacattcccattatcattgtatttcgagcattaggatttgttgctgacaaggatatactggagcatatatgttatgacttttctgatacacaaatgatggaattgctacgcccatccctggaggaagcttttgtcattcaaaatcaacaggttgctctagactacattggaaaacgtggcgcaacagttggtgtcactcgagaaaagagaattaaatatgcaaaagaaatacttcaaaaggaaatgttgcctcatgttggtgttggggaattctgtgaaactaagaaggcatactattttgggtatattattcaccgcctactgatgtgtgctcttagtcgaagagctgaggatgaccgagatcattatggaaacaaaagactagatcttgctggtccactgcttggagggctgtttagaatgcttttcaggaagttaacaagggatgtgagatcttacgtgcaaaagtgtgtagataatggaaaggaagttaatttgcaatttgctatcaaagcaaaaactgttaccagtggcttgaagtactcacttgctactggaaactggggacaggctaaccaagctggaaccagagcaggggtttctcaggtgcttaatcgcctgacctatgcttctaccctttcacatctccggaggctgaactctcccattgggcgtgaaggaaaattggcaaaaccccgccagttgcataattcacattggggaatgatgtgtcctgctgaaacaccagaaggacaagcttgtggcttggtgaaaaatcttgccttgatggtatatatcacggttggttctgctgcaaatccaattttggagtttttggaggagtggggcacagaaaattttgaggagatatcaccagctgtcattccacaagctgctaaaatttttgtcaatggttgttgggttggaattcatagaaaccctgacctgttggttaagactcttaggcgtttaagaagacagattgatgtcaacactgaagttggtgtggttcgtgatatccgtcttaaagaacttcgactttacacggattatggacgctgcagtcgtccattatttattgttgagggccagaggctgctcatcaagaaggcgcacatccgagccttgcaacaaagggagactcctgatgaaggctggcatgaattggtctcaaaaggatatatagagtatatagatactgaagaagaggagactaccatgatctccatgaccataaatgaccttcaaaatgcaaggcacaacccagaagaggcttactctgaaacttacacacattgtgagattcatccttcattgatacttggtgtttgtgcgtcgattattccgtttcctgaccacaac

SEQ ID NO: 95469 - DNA, 983 bp, Zea Mays
caaaccaatcaggcaatcgtgcccagttccgcttcccctcgccatttcgccccgcctcccgcccctactccctacaccttcaccgctgtcgggggaggcggctcgccgtgacatcgacctcaccccacccccagcgtagcatcccgccactccatcgcactgtccatggaggatgacgagtacgaggaggggatggagatgggctacggcgggcatcaccagcacggcggcggccacgcggggtacggcgcggaggaggacgacgaggtggggtacggcggcgggggcggggaagagatggatgaggatgcggacggggacgctgagcagcaggaggatatcactcaggacgacgcctgggccgtcatatccgcctacttcgaggagaagggcctcgtgcgccagcagctcgattccttcgacgagttcatccagaacaccatgcaggagattgttgatgagtccgccgacatcgagatccgccccgagtcgcagcacaaccctggccgccaggccgaatttgccgaggttgttgccccactctgatcgactgttgcaagtgatgcctgaatggttcactatttgctgctgctagactgggcgattagcctggggtgctgggggagcttggtatgacatggtgtctcggtagcatttgccggctcatcactttgccatctgtgcacctgcttgattagatgtccacctacggttttgggtctagtgcggaaacaggtgcccaattttatggctgaggatgaattttgcaccgacttaggtggacaggggattgtggaattgttcagttctactagtgtctagaatagcttctgctgaagttccctctgtgcgatatatggtagggaattcttgagtttgacaaggatagcataaaagattccagagtgagttttgtattgatcaggacatttgtagtgatcttcagttggtactagtaatatatggagttgatcttatgatga

SEQ ID NO: 95470 - DNA, 684 bp, Zea Mays
ggtgatttggcgcggtggctctgcgcctccacacctgatcgccggcctcctcacctccacaagcccacaccatcgccatctcctctccgccatcgccccactcgcctcctctgccaatggcccgaccaacctcggctcctcgctctgcccctccctcccaactcctgccatcaaagtgcacaacttcaccggccccaatgtggctctgtcgaccctccgtcggcacccacgcataccacctcaactgcgcgtagcctctgcggcaccgccgccagggccgcctcttccgcgatggtgcagagaggaagatgccaactgtgacaacacacagacagttgtgcaacagcagccctctgacgacagacagacagttgagcatgctcctcttcaggaaactgatccaggcaaagagacacatgtttcagaggctaaaacgctcacagcagatgctgatggaaatttgagctcaagccagcaaaccggggagtacaatgaattgctgagacaatactattaaattgttgcttaattttaaattgttcattgtaaactagaacttattgtgactgatcatctctggagcttttgtgaatgatctagctagctatctgtaaatgatatagttgtgaatgatattataattgtgatgcttttgtgaatatataattgtggtgcttttgtgtt

SEQ ID NO: 95471 - DNA, 1673 bp, Zea Mays
ggtatgaaattttagtactagttaattgagtaaataatttcacctctgcaataaaaccaaactatattactgattattataccaaactgccaactgcataatgcagtagagatggcaattgttgtcaacccttagatgaataacttaggtgaagccaccatgatacaacaatagaggatacgcttgagtgtcactaagtacttcactgtgtgttaaacaaaacatgctctatcttctaatagggtttctacctgtcaccaggattgattgtacatctgtatttctgtgttccctgcacattcatgcagtccaacaaagagatgtacgagcaccaccacttgaagtgtggttgacacttcccaactcaaaaaatcaatgagaaatttgttcctttatatcctcatcaacatcgtcgtcactgtcctgatcctcagaagcaacacccacttccatgtcatcttcagccacgtcgtcttcatcatcatactcctcattttcatcatcatccactgtggcaccaaactcctccccgatgatttgttcactgcgactactccttcgatctttgcccttgccctttccaacttcctccttccccatatgcatcaaatgcatatactgataccttatccccatcatggggtgcttgtccacaagcatatgcctccggtatgattccctgagaactaccgtctgtgtcctcagcttgtgcgatatgtagaaaatcccagggtgcttagccaccaccttcctgaatcctggtggcaaccgcagcgcctccccaagcttgaccaacacctccttctccatcttcttcccaaccgtgagactcaggacctcgtgcagcaccgccacggtcctcttctccgttatgtcactccttggcgttaggtgcgacccatcctcatagggcgaaatgtacggcagcctctgccactcgtctaaccatttgcgcaccttcttgtcaagctcgaatcctctggggaacgagagtgggaaggcgaccacgtcgccgaccttgtagccgccggtgcgctgcgcgtaggactgcatcgacgacacggcgagatccttcctgtagcagacgagctcgaggaggctgccgtccggggagagcgcgaagtagtccgggtagttggggagcagcgagcgttggaagtcggacgcgaggccgaggtcgagccggaggcgcgcgacgaggcggagcgggagcgcgcgagagggggcgagcatgagcagccgaagcaggcggtcagccgcgtcggggacggtggcgtcgacgacctgcgcctcggcggcgtggagcgccgagagccggggcgtcggggagacctcgatggggtgcggcgagagcgcgaacgccgaggggtagagccgcaggaagcgcagcgggcggaacgggaaagggattgtggagggcagcgagtgcagcggcacggcgtgcggcggcggcgtggcgctcccgctccacgacgtggtcgagggcccgttctcgcacccacggcacgcgcgcctcgaggaggccgcgcgccggcactagcagcgccgccggtacacgccgcagcggcggcagatgcatctcttcgtggggttttgggaggcgagcgtccgaatgcggcggcgtgtggggaggcctcaagtgaggggagaacagagacggtggtcgattgtgt

SEQ ID NO: 95472 - DNA, 115 bp, Zea Mays
ttttttttttggcacactctaaacataacagctgggtccgccactgttacgcccgtgtatactctatagacacttttgactacaagcaaacctgtatttatgtgtgtgtttacac

SEQ ID NO: 95473 - DNA, 2676 bp, Zea Mays
tcactctcccccacccgcgccctctcatctcccccttttccttccccctcacgtcctcacccaccacagctttgagttcgagctccccttccccccccttctctgctcccgcgactcgaccctctctctataaatacaaccgccggctcccaccgccaaaccatccatcacagaccaccacaccaacaacagactacggaggaccgccgccgcccacgcaaaaacccacccgatccccgcaaaaacccccgcacgcgatccacgccaattccagtcaccgcgatgcagggtctcgccccgcccacctctgtttccatacaccggcacctgccggcccggtccagggcccgggcctccaattccgtcaggttctcgccgcgcgccgtcagctccgtgccgcccgccgagtgcctccaagcgccgttccacaagcccgtcgccgacctgccggcgccgtccaggaagcccgccgccattgccgtcccagggcactccgcggcgccgaggaaagcggacggcggcaagaagcagctcaacttgttccagcgcgccgcggcggccgcgctcgacgcgttcgaggaagggttcgtggccaacgtcctggagcggccccacgggctgcccagcacggccgacccggccgtgcagatcgccggcaacttcgcgcccgtcggggagagcccgcccgtgcacgagctccccgtctccggccgcatcccgcccttcatcgacggggtctacgcgcgcaacggcgccaacccctgcttcgaccccgtcgccgggcaccacctcttcgacggcgacggcatggtgcacgcgctgcggatacgcaacggcgccgccgagtcctacgcctgccgcttcacggagaccgcgcgcctgcgccaggagcgcgcgatcggccgccccgtcttccccaaggccattggcgagctgcacgggcactccgggatcgcgcgcctcgccctgttctacgcgcgcgccgcgtgcggcctcgtggacccctcggccggcaccggcgtggccaacgccggcctcgtctacttcaacggccgcctgctcgccatgtccgaggacgacctcccctaccacgtccgcgtggcggacgacggcgacctcgagaccgtcggccgctacgacttcgacgggcagctcggctgcgccatgatcgcgcaccccaagctggacccggccaccggggagctccacgcgctcagctacgacgtcatcaagaggccgtacctcaagtacttctacttcaggcccgacggcaccaagtccgacgacgtggagatcccgctggagcagcctacgatgatccacgacttcgccatcaccgagaacttcgtggttgtgcccgaccaccaggtggtgttcaagctccaggagatgctgcgcggcgggtcgcccgtggtgctggacaaggagaagacgtcgcggttcggcgtgctccccaagcacgccgcggacgcgtcggagatggcgtgggtggacgtgccggactgcttctgcttccacctgtggaacgcgtgggaggacgaggcgacgggcgaggtggtggtgatcggctcctgcatgacccccgccgactccatcttcaacgagtccgacgagcgcctggagagcgtgctgacggagatccgcctggacgcgcgcacgggccggtccacgcgccgcgccgtcctgccgccgtcgcagcaggtgaacctggaggtgggcatggtgaaccgcaacctgctgggccgcgagacccggtacgcgtacctcgcggtggcggagccgtggcccaaggtgtcgggcttcgccaaggtggacctgtccacgggcgagctcaccaagttcgagtacggcgagggccggttcggcggcgagccatgcttcgtgcccatggacccggccgcggcccacccgcgcggcgaggacgacgggtacgtgctcaccttcgtccacgacgagcgcgccggcacgtcggagctacttgtggtcaatgccgccgacatgcggctggaggccacggtccagctgccgtcccgcgtgcccttcggcttccacggcaccttcatcacgggccaggagctcgaggcccaggcggcctgaccgagctccacgtttctcggaggaggaacagaggagccagccatggatcaggggagaagtcaccagagggagcccagatcagttccccggggtcttcctgtccccccacgcacaccagagttacagttggtagttgctttgctttgccttttttttttcattatttcatttgacactagtgtaagtaaattgggatagtggcagcttagagagagagagagagattagtagaaaggcgcccagctcgtagcttttcagctggtggtgcctctggctagtatagagtacatattttttcttcttcttctttgctttatccctttttttttctccctttggatgacatggatgtgcatccagctccagttgttgtcacccagtccagtggactggggtgtctgggatcttggttgctgctacttgctcgccattgccacccagttgctgccgctgctgctgaggtgttgctggcttggcttatatactctgtgttccctgtggctatcggtgcgtgtacatttgttcacagtatatgactgatggtatgaaaacaagaaccggtgacggtttctgtctcga

SEQ ID NO: 95474 - DNA, 2593 bp, Zea Mays
ctagaagattactatagtgagaagcatacatatcttaccattccatagtctgttatgaccatcgacacataatcaggtggggtggcatcatacctattagatgtgcattattatttacaccgagaagaatagtaccagaaggaatgactggtatatagaattcagaaagatacgttaaatttagcaattggagatttgcattgtctgtccagttcttaagatggtcctctgcctttccaggaattttcaaaatgacatctggatcgcctgactcattagcacatatagaatcaagttgcactctctcatgaaacttgtatgcctcacaacaaaccagaactagaactccaaatgcatgtgccaccatggcaaccgatgcagtcccaagttcccaactcgagaataaactgtcccatttgataatattgaagaggcacccaacaagactcgagttacttcatgcatgatgtatgagatggcatttatgtgtgtgtatgtgcagctgatgccctttcccactaagctctgcagcaatccctgtccctcaagctttgggcgagaatctactactacaactcgaaagttcctcccaagttcatgagcataatccaaaatcatttcaacaattgatgatgatccatatgtcagtaagacatcattgtctctgacctttgtgatggcatggctgacaataactttatctgcaagaactatcttctcatttataaaacgatcaatatcagactgaagactagttttggcttcagactctgacaatgcatgtgccagctttgcaatcctgctctttagaaacctaatagcattgcccatgctgattgaaagaggcctacactcaataagaaatgacacataactactgatttttgcagaaagatctctgccgagagttttatttggaggcgtagtgtaatcttttattgcctctctgaatgcaagaagcattgctatgcaacgaccattaccaccagatacttcaccagataaatattggagcccaaccttgtatacagaaggatgcattggttctagttgaaagaattttgattcgaggtcaggaagctgagtgccatgcgattactgaggaagatgcctgaacagttcaactctatttcgagcttctgattggttgactaccgcacgtttttttgctttctccaccttatgcacatcatcaaactgcatgcggggatgaggagcatctaactttctttctctttctggaggacgttcagtagccttcttctcagaaacaactgtacttgcagcttggggcacatctttcttctgaacagtttttactggcttggcttgcttggagattgcagcaccagcagattttcctgatttatctgttattgcaagctaatgtgaaaaatatgattcgaagctctgcttgcattacactcatgcaagatcatcataacaaagttgaacatattcataggaacattttctaccaccaaacctacgccaagaaacaaaaattaaacagtcggacatgctgagactttctgtgattcaagcattgctccacaaaaccctgtcatgaatgataattacctgcctccttcgttgccgctttagcagcacgttgagcctcctgaattgcacgtctctctgcctttgaggttttctgcttttgtggaatggaggctggagcaccatcattctgtatttcagccaaaccaacgcttgttttcttctgtaacaaacttatgtgcacatatataaataaaattgtcaaataattttctcaacaaatttaatagatattaaccattaagccaaaattaacatacaaaaaaacagcaaaactacagctttctggttttcattcatacatccctaaacaatctttatgctataaattttcagctagatagagtcctattaggtatccaactcagatgaaaaattgagtcagcaaattttaaaaaaacaaacatttttcttcacatgctccctcctcaccacacttgagaggcacaagcacaaccgacagcaagttgttgcttcccgcaagcccaagcacctggcagtacgaagattcatggaaaaaagcggtagagaatacaagagaagtaggtatccctcatcgtgtcatcatgaatgtttcttttcatttggctcaatatgtcatagagggcagatccagtgtcgaaggctccctcccacatgagtggtatcaagtagagggtttttaagtctaacatcctttaaggtaacagtggacatggtctaatatactctccatgcacaaacagctccaggtaaaccaacaaaacagaggttatattcaaatttggcagcaacaatgtgagactgtacgggcctatctaaaaaaaacagtccacccccaccatgggttgggttattgggtaagtctcccgaagcatggctgttataccaattatgtgtgtgtaagtcctaaatctcccttcttaattttgttttacaaaagcatttcaggtactaacatttcactaataagactacatctagatattacagattatttatgttcgagtatgttcacactaacagcagtctgttaagagtctaggctgttccc

SEQ ID NO: 95475 - DNA, 1689 bp, Zea Mays
taccattccatagtctgttatgaccatcgacacataatcaggtggggtggcatcatacctattagatgtgcattattatttacaccgagaagaatagtaccagaaggaatgactggtatatagaattcagaaagatacgttaaatttagcaattggagatttgcattgtctgtccagttcttaagatggtcctctgcctttccaggaattttcaaaatgacatctggatcgcctgactcattagcacatatagaatcaagttgcactctctcatgaaacttgtatgcctcacaacaaaccagaactagaactccaaatgcatgtgccaccatggcaaccgatgcagtcccaagttcccaactcgagaataaactgtcccatttgataatattgaagaggcacccaacaagactcgagttacttcatgcatgatgtatgagatggcatttatgtgtgtgtatgtgcagctgatgccctttcccactaagctctgcagcaatccctgtccctcaagctttgggcgagaatctactactacaactcgaaagttcctcccaagttcatgagcataatccaaaatcatttcaacaattgatgatgatccatatgtcagtaagacatcattgtctctgacctttgtgatggcatggctgacaataactttatctgcaagaactatcttctcatttataaaacgatcaatatcagactgaagactagttttggcttcagactctgacaatgcatgtgccagctttgcaatcctgctctttagaaacctaatagcattgcccatgctgattgaaagaggcctacactcaataagaaatgacacataactactgatttttgcagaaagatctctgccgagagttttatttggaggcgtagtgtaatcttttattgcctctctgaatgcaagaagcattgctatgcaacgaccattaccaccagatacttcaccagataaatattggagcccaaccttgtatacagaaggatgcattggttctagttgaaagaattttgattcgaggtcaggaagctgagtgccatgcgattactgaggaagatgcctgaacagttcaactctatttcgagcttctgattggttgactaccgcacgtttttttgctttctccaccttatgcacatcatcaaactgcatgcggggatgaggagcatctaactttctttctctttctggaggacgttcagtagccttcttctcagaaacaactgtacttgcagcttggggcacatctttcttctgaacagtttttactggcttggcttgcttggagattgcagcaccagcagattttcctgatttatctgttattgcaagctaatgtgaaaaatatgattcgaagctctgcttgcattacactcatgcaagatcatcataacaaagttgaacatattcataggaacattttctaccaccaaacctacgccaagaaacaaaaattaaacagtcggacatgctgagactttctgtgattcaagcattgctccacaaaaccctgtcatgaatgataattacctgcctccttcgttgccgctttagcagcacgttgagcctcctgaattgcacgtctctctgcctttgaggttttctgcttttgtggaatggaggctggagcaccatcattctgtatttcagccaaaccaacgcttgttttcttc

SEQ ID NO: 95476 - DNA, 1753 bp, Zea Mays
cctcccgcctcgttctctccgccatcgtcgccgccgcctccattcctccaccagtccaccatcgccacctacgcccaaccaaacccaactccatctcttccgactataaacgcaacccaccaccgctgccgcgaacctctgcgctccgaataccccagacccccgatcctcccaatggccaccgcattttcgctgcgcgctgcggccccggccaccgctccccgcgccgtctcccgatccacctccgcggcgagggtcgtgcccatggcatcggcactggcgggacgcggaaggctggtggcgcgtgcagcagttacagttgcgtgacattgctcttctgatttttgtcagtcctttttttggtcgcaacacacattggctgtcctgaattattttctccttgtgtgttctcttgcgcaggcaaaggcggatgtgccatcgagcacgtccgacggccatgaggtcttgctgtttgaagctcttcgtgaggccttgatggaagagatggaattagatccaacagtgtgtgtgtttggtgaagatgttggccattacggtggttcttacaaggtgacaaaaggtttggctgatacgtttggtgaccttcgagttctggacacccctattgcggagaactcgtttactggcatgggagttggagcgggaatgaaagggctgaggcccgtcgttgaaggcatgaacatgggattcctgctccttgcttacaaccagatctcaaataactgtggcatgcttcattacacttccggcggccagttcaaaatcccacttgtgatccgtggccccggtggtgtgggtcgtcagcttggagcagagcactcgcagcgcctggaatcgtatttccagtccatcccaggcctgcagatggtcgcctgctcgactccttacaacgctaagggcctgatgaaagctgccatcaggagcgagaaccctgtggtgctgtttgagcacgtccttctgtacaacctgaaggagaaaatcccggacgaggagtacgtgctctgcttggaggaggccgagatggtgcggcctggggagcacgtgactatactcacatactcgcgcatgaggtaccacgtgatgcaggcagcgaagacgctggtgaacaaagggtacgatcccgaggtcatcgacatcaggtcgttgaagccgtttgatctgcacactattggcaactccatcaagaagacccaccgcgtgctgatcgtggaggagtgcatgcgcacgggtgggatcggcgccagccttaggtcggccatcgtcgacaatttctgggactaccttgacgcccccatcatgtgcctgtcatctcaggatgtgcctacgccatatgctgcgactctggaggatgcaaccgttgtgcagcctgcccagatcgtggctgcggtggaacaactatgtgcatagattgtggcctgggacgtttgggagactgttgttgccatgaaaaagccttccgtttgttagttttgtgctgtaacaagcattctttggagacttaaggtgtaggcttatagtcgttttgttcttgttttaagaagtataatccagcttcgtagctgcacggactcgatcttcttgttcctaaatctgcgctatgcaatgccgaatttgatggttcgaacatttcattgttgacagaaataatcattgtactccgatgccatgaacctgtagcctccagctgcactggtcagtgaaacacccatgaacaaagtatttgcactaagtg

SEQ ID NO: 95477 - DNA, 1666 bp, Zea Mays
ctctcccagtccgcccctcccgcctcgttctctccgccatcgtcgccgccgcctccattcctccaccagtccaccatcgccacctacgcccaaccaaacccaactccatctcttccgactataaacgcaacccaccaccgctgccgcgaacctctgcgctccgaataccccagacccccgatcctcccaatggccaccgcattttcgctgcgcgctgcggccccggccaccgctccccgcgccgtctcccgatccacctccgcggcgagggtcgtgcccatggcatcggcactggcgggacgcggaaggctggtggcgcgtgcagcagttacagcaaaggcggatgtgccatcgagcacgtccgacggccatgaggtcttgctgtttgaagctcttcgtgaggccttgatggaagagatggaattagatccaacagtgtgtgtgtttggtgaagatgttggccattacggtggttcttacaaggtgacaaaaggtttggctgatacgtttggtgaccttcgagttctggacacccctattgcggagaactcgtttactggcatgggagttggagcgggaatgaaagggctgaggcccgtcgttgaaggcatgaacatgggattcctgctccttgcttacaaccagatctcaaataactgtggcatgcttcattacacttccggcggccagttcaaaatcccacttgtgatccgtggccccggtggtgtgggtcgtcagcttggagcagagcactcgcagcgcctggaatcgtatttccagtccatcccaggcctgcagatggtcgcctgctcgactccttacaacgctaagggcctgatgaaagctgccatcaggagcgagaaccctgtggtgctgtttgagcacgtccttctgtacaacctgaaggagaaaatcccggacgaggagtacgtgctctgcttggaggaggccgagatggtgcggcctggggagcacgtgactatactcacatactcgcgcatgaggtaccacgtgatgcaggcagcgaagacgctggtgaacaaagggtacgatcccgaggtcatcgacatcaggtcgttgaagccgtttgatctgcacactattggcaactccatcaagaagacccaccgcgtgctgatcgtggaggagtgcatgcgcacgggtgggatcggcgccagccttaggtcggccatcgtcgacaatttctgggactaccttgacgcccccatcatgtgcctgtcatctcaggatgtgcctacgccatatgctgcgactctggaggatgcaaccgttgtgcagcctgcccagatcgtggctgcggtggaacaactatgtgcatagattgtggcctgggacgtttgggagactgttgttgccatgaaaaagccttccgtttgttagttttgtgctgtaacaagcattctttggagacttaaggtgtaggcttatagtcgttttgttcttgttttaagaagtataatccagcttcgtagctgcacggactcgatcttcttgttcctaaatctgcgctatgcaatgccgaatttgatggttcgaacatttcattgttgacagaaataatcattgtactccgatgccatgaacctgtagcctccagctgcactggtcagtgaaacacccatgaacaaagtatttgcactaagtg

SEQ ID NO: 95478 - DNA, 446 bp, Zea Mays
aaggatgtcaaccttttcatgtcacaaggaggtctcatcattctagcacagacggtggactgttcctgcggcgtcacgttcgacgacggcgagatggtcagctgcgacgagtgcagcgtgtgggtgcacacacggtgcgcacgctatgtccgtggcgtccacacatccttctcctgccacaaatgtcggaggtccaagcgcgtgcattccttcgctgacgaggccgaggttgctgagctccttgccgagctgccaacccaccgcccgcctccgctgtacttcaacgccacttgaaagggaattaggcttacacctagttcctaaataattttggtggttgaattgcccaacacaaataattggactaactagtttgccctagtgtataagttatacaggtataaaaggttcacacttagccaataaaaatatcaaatattggattc

SEQ ID NO: 95479 - DNA, 378 bp, Zea Mays
atggctgccacagatgtggcagcacgtggtcttgaacaaggcgatggcccaattgtattaattcccgctcccacaagagaattggctgttcaaatacaggaagaatctacaaaatttggatcatattcaagaactagaagcacatgtgtctatggtggtgcacctaagggtccacaaatacggggccttagaagaggagttgaaattgtcattgcaactcctggccggttgattgatatgctggaagctggtcacacaaacctacgtagagtgacgtaccttgtgttggatgaggcggaccagatgctagatatggggaatctcaagaagcttgcggcccagagccaaacggatgatgaagatgtttggtgggagtag

SEQ ID NO: 95480 - DNA, 368 bp, Zea Mays
ttgtgaaattcatcttcaaattctgtgccccagattgattgtccaccagtgccatcccccaaaggatctccagtctgaatcatgaataaccattccaacaatgggtagtgaagttttcaacagtttttggacactcttatggatatagtctcaagtgaatgtcacccatagaagtatgtagcacataaaataagatgatggatttgttaagaaatttgagcccctcacaagttaaatgaccagagattttgaagaaacaactcagctgtctaggtatataatattcaaggactaacataccaaattatcaggcaatgatgttgtagcagtttttttcctaggtctgatgcagacaaaagctcttctgg

SEQ ID NO: 95481 - DNA, 810 bp, Zea Mays
gctaaatgcagagaacccattccatttccaggtggcatttgttcctcacttgggcacaaggtcaaccagactccctacattcaggcagaaccttcagaaaataagcacattgcttaatcgtgctatctgtttcgtccttatcctttccacgtcaaaactaggctttgattgttctgtattaaacaaaatccgatacaagagttgctgttgaccatgaacgctgatgagacccagccgctagagccgtctctgccgccgtccaggccgtcgagctggagcagcagcgggagcaacggcggtgtcgagtacacgagcctccgggatatgctcgccgaggccggtgccggtcccgggagcggcggcggcagtttctgggacacggccggccccacgatcgacttcgacgcgtccaacatcaacatccgcaaccaactgctgaagcacgccgcgtcggcgtacctccagtcggcgatcgtcgtcccgccgcgggaccgtgggtgcctcagcagattgtggacgtggctgctgcaccgccggcggtgccgcatcctgctgcgcccgtgtccggaatgctgcagcgccggggacccagcgcgcctctgcgccgcgtccgtcgccggctcggcgcgccggctcggcgccttcctctccggctgcgtcgctcgcgtgtggacatagaaacatgcgtcaccgactcgccatcgattggaggtgaggtgaatgctagatttgtaatagctgaaaacatacgatgcgattgaacagatagattgacggcggaggccgaaggaaggagatggtgagatgttc

SEQ ID NO: 95482 - DNA, 1596 bp, Zea Mays
ccttctggaatttgtcccataccatttgggttaacgtattttcactaactactgtattttttgttcatctggtttggattatttcttcatactttgctagctgttgtggactggtggtaaagtaaaccaggaacaatttgatttcaaatatatagttttggtttgattttatggcacttctccttggtgttttgtttcagttaccattaatggttaatgtttttttagtttcacatttttgaatttgatcttcatattcatgttatgcatgtaggtagtaatcccaccagatggctatttgaaaggtgccagagacttgtgttctaaacacaacgttttgatgattgctgatgagatccaaactggcatagctagaactggtaaaatgctggcatgtgactgggaaaacatacggcctgacatggtggtaagattcttttctgctacactcttgtttattaactatactcactacataagtatctgctggtcacttccccattttgtttcagagtatgcaactacacttactgtttcaagttgtctttgctctacagattctaggcaaagcactcggtgctggagttgttccagtcagtgcagttcttgcagacaaggatgtcatgctgtgtatcagaccaggggaacatggaagtacattcggtgggaatccgttagctagcgctgtggcagttgcatcactgaaagtggtcagagacgaaggtcttgttgaaagggctgcaaagttaggacaggagtttagggaccagttacagaaggtccagcagaaattccctcaaatcctaagagaagtgcgcgggaggggtttgctgaacgcagtggatctaaacaacgacgcgctatctcctgcttctgcatatgacatctgcatcaagttgaaggagagaggcattttagcgaaacccacacatgacactataatccgacttgctcctcccctcacaatcagtcctgaggagcttgcagaagcatccaaggcgcttagtgacgtgctggagcatgacttgccacagctgcagctgcagaagcagataaaaaagccagaatctgaggcagagaagccagtctgtgacagatgcggccgggacttgtacggatgaatgaagcctccgaacagagataacttcattttcgtaggcacccatctcgccccagaagaaataataacagagcagaggatgccagctgcctagctacttgggttaccgtaatgttatgcgacttgttgcatcgtataccaagtatatgagctattgcaaccttggtgaatatgtcaaataaatggcagcattcacatgctcaaatatgggcagcattcacatgcactgtgacttctttgcaacgttttatcaagtatccgaaagttccaacaggaagttggtcaacaatcgataatcagagcaaagaaaaaaaatggatgatatgttcgatcacggtactgatgacatagtattcccttcaaaaaaacagaaacgataaaaacaagggagtattaatcggtcgagtaatatcgtatatcctctttccttggaaaccgtgatgccttgtttttttttccggttcttttcagaattt

SEQ ID NO: 95483 - DNA, 2100 bp, Zea Mays
agagatccagaaccgtttcgtggctccaatccgtgaaaaaacgaacgggccgccggctcggacccggaggctgcagcggcaccgggatctgggaatctgcacggcctggagcctccagcgactggccccaccaccatctgcgcgcgcgcgcgagggaccggccggcgaacagaggcgccactgagctctgagcgggtgcggccggcatggcgacggcgctggcgcggcggggcgccgcggccctggcgcggtggcgcgggatgtgctcgagctcggcgtcggcgccgcggagcgccgcggcgctgtcctcagaggagctcatgcggatggaacaagactgcagcgcgcataattaccatccaatccccatggtgttttccaaaggagaaggttcacacatagtggaccccgaaggcaacaaatacattgattttctctctgcttattctgcagtcaatcagggtcattgccatccaaaagtcctgagagctttgatagaacaggcagaaaggcttacgctcagttctagagctttctacaatgataagttcccaatctttgcggaatatctgacaagcatgtttggatatgacatgatgttgccgatgaatactggtgctgaaggagttgaaactgctatcaagctggctaggaaatggggttatgagaagaaacatataccaaagaatgaggctttgcttgtctcttgctgtgggtgtttccatggtcgaactcttggtgtcatttccatgagctgtgacaacgatgcaactcgtggttttggtcctttggttcctggccatcttaaagttgattttggagatattgatgggttaaagaaaatcttcgaagagcttggagatcggatttgtggttttttatttgaacctatccaaggtgaagctggggtagtaatcccaccagatggctatttgaaaggtgccagagacttgtgttctaaacacaacgttttgatgattgctgatgagatccaaactggcatagctagaactggtaaaatgctggcatgtgactgggaaaacatacggcctgacatggtgattctaggcaaagcactcggtgctggagttgttccagtcagtgcagttcttgcagacaaggatgtcatgctgtgtatcagaccaggggaacatggaagtacattcggtgggaatccgttagctagcgctgtggcagttgcatcactgaaagtggtcagagacgaaggtcttgttgaaagggctgcaaagttaggacaggagtttagggaccagttacagaaggtccagcagaaattccctcaaatcctaagagaagtgcgcgggaggggtttgctgaacgcagtggatctaaacaacgacgcgctatctcctgcttctgcatatgacatctgcatcaagttgaaggagagaggcattttagcgaaacccacacatgacactataatccgacttgctcctcccctcacaatcagtcctgaggagcttgcagaagcatccaaggcgcttagtgacgtgctggagcatgacttgccacagctgcagctgcagaagcagataaaaaagccagaatctgaggcagagaagccagtctgtgacagatgcggccgggacttgtacggatgaatgaagcctccgaacagagataacttcattttcgtaggcacccatctcgccccagaagaaataataacagagcagaggatgccagctgcctagctacttgggttaccgtaatgttatgcgacttgttgcatcgtataccaagtatatgagctattgcaaccttggtgaatatgtcaaataaatggcagcattcacatgctcaaatatgggcagcattcacatgcactgtgacttctttgcaacgttttatcaagtatccgaaagttccaacaggaagttggtcaacaatcgataatcagagcaaagaaaaaaaatggatgatatgttcgatcacggtactgatgacatagtattcccttcaaaaaaacagaaacgataaaaacaagggagtattaatcggtcgagtaatatcgtatatcctctttccttggaaaccgtgatgccttgtttttttttccggttcttttcagaattt

SEQ ID NO: 95484 - DNA, 1270 bp, Zea Mays
atggccccctttgccccacccttggatccgcctctgcactcgggagtgcaacaggatcgtcagagcacccaccacccagcagagcccgcccagaggccgagccattgccacacagatcgtggtctcgtggcactagctagtaccaaagtgcgcgcgatgcttggtgtggtgggcacgctgccgcggcgccaccggcaggccatcgccagggtctccgtctccgcgctggtggcctcgctgccgctgctgtacgtgtcgctgctgcggccgccgccggccgccctggcgggggacaccgccttctggttcctcatgtccaactgcgtcatcgctgccatcgtcgccaccgccgacgacgccggcacgctcttcttcggctcctccaacgacgacgatgacgatcctcctcgtgacgaggagcgcgacgacgggcacgtctcttctccggttcctttcgcggcggtcaacgatgaagcagccgtggtggtgacgactatgaaaggccgaagcgtccaagaagaggtggtggccgacagcaaccccgtggaccttcttgacctgcagccgaaccatcatatgcttgtttcggcgcttgtgcggcagcgaggtgagcgacacgaggcggcgatggagcgaaacaccgacgacaagaacaacaccgccgtgatgatggtggtggaaggccaaggagaagaagaagtagtagaagtaggaggaggagaaatagctagcccggtcctgcaggcttccgacgacagagtgttagctgaaccgccagagacagagacagaaccatgggcgccaaagctcgtgacaagcaagagcctccccgaccaggaggaagcagccaatcaggagtggccgcgtgcaccggacgagctgccacgacacggcaagggcggcggcgggagactccggcggtcagccacggatgcgagcaagtcggcggcagaggagagggagagcgactactactggcaactgagcgacgaggagctgaacaggagggtggaggatttcatcgcgcggttcaacaggcagatgaggctgcagatcgagcaggaggcggcaatctgatgtctgaccttcacttctaagcacttagtattatattatactgtactccgtatatttataatgttccttcctacccgtagctaggatgtagacagtcctgtagctcgtacaaaattaaatacagacatatacatctggcatggttattcatatgtgcacacacgttgatacatagtatacatgcacgcgcggt

SEQ ID NO: 95485 - DNA, 978 bp, Zea Mays
tcaacgtgacgaaccagtataatacctcaacgccacacccatgggttcggtccgggtccaacaacaacaacaacaacagagaggaagagtcgtagagagcgaagatcgaagccaaacaaagatggcgcggaggaccaccagagagcccgccgccgccgtcgtcttgatgctgctcctggcggcggccacggcggcagcggcggcggaggaggaagcgttgccgatggaggcgtacttctcggcggcggagctcgcgcgcattgccgggtacggcgaggagccggtgtcgtcggtgtccgtgtccgggcaactcacctgcgagctctgcctccgccccggctcccccctcctcgccttggagatggcaggtgctaaggtagcagtgacctgcgactgcgagagccagcatcccattcccagcgacgaaccggacagcctcgcgctggtggccgcgacgacggacgagtccggcaacttcaccatcgacctccccgcgcggctccacgccacgccggacctggagaaggcctgcgccgtcaaggtgctccggctgccggcgggctccggctcctgccgcctccgccaccgcgccggcgacgcctaccgcctcaggctggcgtccgcggaggacggcgcccgggcctacactgccggggtgatacggcttcgggacggcgacacgccgtccgaccgttgcgtgggtgcgcgcggaggaccacgtgtctctgggagaaggtgaacgcctgaacggttggaactggtacgccgtgaggaggtgggaatggataccggggtggtggtactggtagcagtaatacgccggacgaacgaagagttcgcgcgcgcttgtgtagttttgattttgaagggcctctcgtatagcaggaatgaatcaggcatgcatgtgtaaacaaatgtaggccagaagtatgtgtatagttctttgtaacgataaatgtcaatgcaccaaacaatttt

SEQ ID NO: 95486 - DNA, 1705 bp, Zea Mays
caaaccagagatctaccaatccaacgcagagaagcaaccgcatcgctatataatggccgctccggcctcctcgtccaccgccgcacccgcgtcatcgccaccgcacaagcctccaaacaacgccggcagcaccatgctagagccacagtcaccgtcgccctaccccgacgccgcggcgcccgtggcttccagcgtcagctccgcgagctgctgcagcagcagcagcagcgggggcagcagccaagcggaccggtcgtcgacgttctccgtggactcgtcttcggccgcgacgccgtcgtcctcccccccgcgcccgcaccgcgcgagcgacgtggcgtgggcgcccatccggggccgggcgctcggcccgcgggacttcacgctcctccgccgcgtcggggccggggacatcggcaccgtctacctgtgccgtctcgagagccagagccaggcccccgaggggtccgcgtgcgagtacgccatgaaggtggtggaccggcgcgcgctcgccaagaaggggaagctggcgcgcgccgcggccgagaagcgcgtcctgcggcggctggaccacccgttcctgcccaccatgttcgcggacttcgacgccggcacggacctgtcgtgcatcgtgatggagttctgccggggcggcgacctccactccctccgccaccgcatgccgggccgccgcttcccgctcgcgtccgcgcggttctacggcgccgaggtgctcctggcgctggagtacctgcacatgatgggcatcgtgtaccgcgacctcaagccagagaacgtgctcatacgcggcgacggccacatcatgctcacggacttcgacctgtcgctggagtcgacggcgtcgccggctctggaggacgcgaggagcgtcgtgggcgacaaggacgacgacgtgccggagccggcaccgacctgcctcccgatcccggagctgcagctccttcggctgcggcggtggaagcgccgggccgcgccgcggccgcggttcgtggcggagcccgtggacgcgcggtccagctcgttcgtgggcacgcacgagtacgtggcgcccgaggtggcccgcgggggcgggcacggcgcggccgtggactggtgggcctacggcgtgttcctgtacgagctcatctacgggcgcaccccgttcgtcggggagagcaacgaggccacgctccgcaacatcgtgcggcggccgctggagttcccggccgccgcgaccgcgcacggggactccgccgcggcgcgggacctgatcgcgcggctcctggacaaggacccgcgcaccaggctcgggtcgaagcgcggcgccgccgacgtgaaggcgcacggcttcttcaagggcctgaacttcgcgctgctgcggtcgacgccgccgcccgtggtgccgccccccgccgccccgcaccggtgcgacaaggccgccgacgtgcagcagctgttcgatcacttctgagtcccgaactcccgaagtcccgatggacgtccgtttcgttcaaatgatgcaagcattttttttttctcttcttttgtcgttgatcgatcgatcggtagccagccaagagttgtgtgccggagtgactaaccagctttggtagccagatcgaggcatgcctggtgttgactagctgaatactctactccattagcactgctgtacaacgctgttaattactactaatgaagcgattaa

SEQ ID NO: 95487 - DNA, 841 bp, Zea Mays
cggactgtccgatactcgcttagatcacaaggtgctcatataccaacctttgagcatgttcctgagtcaagtgtctcgatagcggcgtatctgtgggcatctggtccaccatatcttttttcctggcttaatcctcaaatatcagctcaggacatgatgcatccggagttgctggctaagcttgtttcaaacaacttttgtacaatgcctgcaaaggttgttctgcaacttacaaccgctttcagggaaggtgggctgtgcaaccgaaatggaaccttctcatacaaggatcatttgcgagagtgtcagactcatgtccttgcattggctggagataaagacctaatctgccctccagatgctgtttatgaaactgtgaaactcattccgaatcacaaggtggactatagagtgtttggaaagccacaaggcccacattatgcacattatgacttggttggaggccgactggaacacgcatgtgctgatctgatctgatctaacaacttacgtctcaccatcctgaaggaacacgcctgtgctgatcgatgccctgagctcagacggttctgcctacaagaagctggagtcatccacgacagccccgttcgcaggtctggttcgtcatcggactctgactctctctactctcttaacaaatagcaaatggttcatcattgtaatctacacaatattcgagtgtcctctttcatacatgctttggtacagaccgttgtaccatacgatgaggtttctcttcaatctattccaagtttcgatcattattgaacaacagttcatggatatgcaaattttgaatttgattctctgatgcccacag

SEQ ID NO: 95488 - DNA, 1389 bp, Zea Mays
gggtctgtaaatggagctaactgcaaagaacttgcagctcaaccagatgttgatggattccttgtttgtggagcctcattgaaggtgaacagagatagatataatgatggtagcatcaaacattcactcttgaagcagtcatcattggatctattgacgattgagactcctggtttgaagaaaaatgacagcttttcaagatggatgagtaaagaacttgaagagctggatgcttatgtagtgacccttcactttctcaagaccaactattcagcattctcgatgtttcaccaagttgtgcatatattggtacaaatacaaaggtgcaggaatagctgaagcagactcttgcgcctcaagtgcaggaatatccttagagcctagatcttcctagaattgatcggactgtccgatactcgcttagatcacaaggtgctcatataccaacctttgagcatgttcctgagtcaagtgtctcgatagcggcgtatctgtgggcatctggtccaccatatcttttttcctggcttaatcctcaaatatcagctcaggacatgatgcatccggagttgctggctaagcttgtttcaaacaacttttgtacaatgcctgcaaaggttgttctgcaacttacaaccgctttcagggaaggtgggctgtgcaaccgaaatggaaccttctcatacaaggatcatttgcgagagtgtcagactcatgtccttgcattggctggagataaagacctaatctgccctccagatgctgtttatgaaactgtgaaactcattccgaatcacaaggtggactatagagtgtttggaaagccacaaggcccacattatgcacattatgacttggttggaggccgactggtatgtactatgtacgatgattcctagcatgaggagttcatattgaatttgacactagcggacagctcggcaacagtgaaatagttgacaggtggttcttaccccgcgtgcgagctcagtgtctatgtctttccccgccccttgtaggaacacgcatgtgctgatctgatctgatctaacaacttacgtctcaccatcctgaaggaacacgcctgtgctgatcgatgccctgagctcagacggttctgcctacaagaagctggagtcatccacgacagccccgttcgcaggtctggttcgtcatcggactctgactctctctactctcttaacaaatagcaaatggttcatcattgtaatctacacaatattcgagtgtcctctttcatacatgctttggtacagaccgttgtaccatacgatgaggtttctcttcaatctattccaagtttcgatcattattgaacaacagttcatggatatgcaaattttgaatttgattctctgatgcccacag

SEQ ID NO: 95489 - DNA, 1352 bp, Zea Mays
gggtctgtaaatggagctaactgcaaagaacttgcagctcaaccagatgttgatggattccttgtttgtggagcctcattgaaggtgaacagagatagatataatgatggtagcatcaaacattcactcttgaagcagtcatcattggatctattgacgattgagactcctggtttgaagaaaaatgacagcttttcaagatggatgagtaaagaacttgaagagctggatgcttatgtagtgacccttcactttctcaagaccaactattcagcattctcgatgtttcaccaagttgtgcatatattggtacaaatacaaaggtgcaggaatagctgaagcagactcttgcgcctcaagtgcaggaatatccttagagcctagatcttcctagaattgatcggactgtccgatactcgcttagatcacaaggtgctcatataccaacctttgagcatgttcctgagtcaagtgtctcgatagcggcgtatctgtgggcatctggtccaccatatcttttttcctggcttaatcctcaaatatcagctcaggacatgatgcatccggagttgctggctaagcttgtttcaaacaacttttgtaagtagtctctcataaggtcttgtcttgtcttctctgcatttgtataacctccagatccatataattactcatgcgctacttctaatagttatgatcactgtgatttatttgcctacagagggtatatatgttcatggaagctgatataattgtaaggtttgcaggtacaatgcctgcaaaggttgttctgcaacttacaaccgctttcagggaaggtgggctgtgcaaccgaaatggaaccttctcatacaaggatcatttgcgagagtgtcagactcatgtccttgcattggctggagataaagacctaatctgccctccagatgctgtttatgaaactgtgaaactcattccgaatcacaaggtggactatagagtgtttggaaagccacaaggcccacattatgcacattatgacttggttggaggccgactggaacacgcctgtgctgatcgatgccctgagctcagacggttctgcctacaagaagctggagtcatccacgacagccccgttcgcaggtctggttcgtcatcggactctgactctctctactctcttaacaaatagcaaatggttcatcattgtaatctacacaatattcgagtgtcctctttcatacatgctttggtacagaccgttgtaccatacgatgaggtttctcttcaatctattccaagtttcgatcattattgaacaacagttcatggatatgcaaattttgaatttgattctctgatgcccacag

SEQ ID NO: 95490 - DNA, 425 bp, Zea Mays
gaccgccatcctcccccgcgacagatctctatgtttgagatctccgtgcttgagggaagccccgccattcatgcctccgagcgccaccattctcgccaccgagctcgcgccctgcacgcccgcgccttcccctccccctgagacagccaccccactcgcgggcacacccaccaccgcgacagccaccgccccctgctcgcgttcttctcctccaagttagccgccgcgagttctccgtgtttgttgatcttcgtccccctgctcgcgtgtttgttgatctccgtcccccctgctcgcgtccttcctccctgagaccctgacctgctcaccaccgctgctcacccctctcctagcccccctcctgctagaaagtggatctcgtccttgctcacctgctagaaagctattcgcctagctccaccggt

SEQ ID NO: 95491 - DNA, 227 bp, Zea Mays
ggtttcaggctttaattttagtgtaatataaataaagaaaatcgtttccagagacgccgaacaaatgtcgcgggggaatagtaacaggaagctcatggtcgaagagcagcccgtgtcgcaaagaacccgcccatcactgtctgccactcttacgagacgcgaggccactgaaacgagaccaggcatcagataccacatggcatttcatttcattccaaacaagcagt

SEQ ID NO: 95492 - DNA, 1079 bp, Zea Mays
cttatctcctgtgcgctcactcaactggatgagtctcctgcgtaccggtctttgatttttctctggaatgtgcttgagcttgtacaggctgtggccttatccatcgctcgattcatctccctgtctttatcttctccaagccgtggagcttcttccccagcgcgcccctctccctggctcttccctgcgcgccgcggtgctccagcttggccctgctcaactcgcctctacacagcgttcctctgctcggccctttttcccctgcacgcgagctctgcgtcttcctgcgcgccggctcctgctgagccgtgcgccctggtggctatcgcgactgatctgtggccgccaccttcagctcgccggcatttcttctctgcgcgcagctcacgccctgctagcccctgctgcgggttgtcgagctctctgcgcatgctcagctcactctttctttgtttgccgcgcgcacgaattttatctgcttgccacagcgtgtcgagctcccgcactatcatcgcttctatcgcaagctcgttagccacagttatcttgaccgcgtcagctcgccagacctgcaactctatatacgccacccttccgtatcattgtcgagcccgtcgaacctcgttcttctctgctcgctctcgtcgaactccaaatcccggatattagataaaaataagcgaggcccctgtgtatcgcttatcaagtactcggttgaagacatcaatcgaagatcgtcgtcgtttggtgtgtcgtcaagaaatcccaagacgaagctagcagcgcgatatttcccaagcactcgacaaattgcttggatcagaaaatcgctaccgatctcgcggattcgtgtcagctgtggaaacggtacgttaaataatcgcgcgatgcggaagacaagccaagtcgaccccaagcgcgggcaaatccgcaggataatgctgatggacgaacctacccgatccagtgctaggacaaggatgatcgccaagtggacgtcgtctaacaacactaacctagtgttactcaggagttgcttgaaaccctttgatgcattgctttccttgatatccatacct

SEQ ID NO: 95493 - DNA, 283 bp, Zea Mays
agagagagagagagagagagagagagagagagagagagagagagagagagagagagagagagagaagtggcggcggtgcgggggtgtgttgtgctgttgcttgcttggctgccgagccgcgcggcccgcggggagggtgaggaggaggacggaggggaggagcagcagggggaaagggaaagctagcggcgagacggggatggggagagaggtggtgagagacgagttggggtcggtttaatagtagcgagcgggatagcggcaaacgctcagctctgtgctc

SEQ ID NO: 95494 - DNA, 2048 bp, Zea Mays
atgaagacggcggcggctatctgccttcactggagctgtgagaaggctatggtgcaaattgttcagcagataaatcatgatggagaggtcaatcgagctcgctatatgccccaaaattcatttgtaattgctactaagacagttagcgcagaagtatatgttttcgactatagcaagcacccatctaagcctccactagatggtgcatgcaaccctgatttacggctgaagggacataattctgaaggatatggcttatcatggagtatttttaaagagggacatttgttaagtgggtctgacgatgctcaaatttgcttgtgggacattaaagcaaatagtagaaacaaaagtcttgacgccttgcagatttttaagcatcatgatggtgttgttgaagatgttgcttggcacttgaggcatgagtacttatttgggtcagttggtgacgattatcatcttttgatttgggacctgcggtctccagcccctactaaacctgttcagtcagtggtggcgcaccagggtgaggaaacgttgcacaacgaagaggagggcgcgagctggaaccacagaggtaaagacacagcagccttcggaggcgggcccgtggaggccgacgttggtgttacctgcagcaactggatctcgtgtagtgcaacccctcatggtctcgcggccaccagtgcgtatagggtggtgtggctggagctgatggtggcgaggccaacagccccccttgtacgaaggagagtagtcgtggtagttgtccggtcgtcgcatatgagggctagcgccggactgagcgttgcagagggacgtaatgtcttgcagcctcttgtacgcggaggtaaacaaccaccacgttgctcggccgcgctggtgcagctacgactctctcgcaatggagcacccccatcatctgcttcactcgtcgacgcgctaggaaatcgtgtgctgcagtctgcaggtggacgatcgctgtcgtctggggcggagcaaccaccctctcctggatgtctctcttggggtcaggggggctggtacaccggtcctggtatggttgcccctagcgtcgtcagccatgcaactggtgatgaagatggccctgagggcgcaacggaactggtaggcatcgccgcccatgaagatgtaggtgttggagcgggcgatgacgaccaagccgctggtgcttgtgtgctgctggagagcgccatgctgattgcgttgagcctcgccaaacagatcttcgaagtatgcctggtcgggaacccaaggacccatgagaggcagaggcgcggccgcgggacgctcgtgctgcgtgacgttggtgtcggggttccagtagtagaggtgaactgcctggcttttcacccgttcaacgaatgggttgttgcaactggttctactgacaagactgtcaaattatttgatcttaggaagattgatacttctctgcacacctttgactgtcacaaagaggaagtttttcaagttggatggagtccaaagaatgaaactatacttgcatcctgttgtctgggcagaaggctcatggtctgggatctaagcaggatcggccaagaacaaacaccagaggatgctgaagatggtcctccagagctcatgttcatccacggaggccataccagcaagatctctgatttctcctggaacccctgcgaggactgggtggttgctagcgtcgctgaagacaacatcctccagatatggcagatggctgagaacatctaccatgacgaagatgatctgccaattagcgatgagccggcaaaaacttcttgaagcaacacagcacaaaaggaatcttaacttctatcgactgttgggtgttcctagatcggaaccctgctcgccggagaatcttcatcgagtgagagttggctgtaggttgcttccgtggtcgtaactttatgcttgacgggttcgtcgtttcttcgaccgtctgtatgtgtattcggcgaacctttagcaatatacatatcccgattgactagatctgtacgtcgcagttgtgttttgtagta

SEQ ID NO: 95495 - DNA, 1595 bp, Zea Mays
attatttcacctaaaaccctctgctctcaaacctagctcgctcccggcggaccgacgatgccgaaggcagtcggcggggcggcggacgaagaggagttccgcgccgaggtggaggagcgcctcatcaacgaggagtacaagatctggaagaagaacacacccttcctctacgacctcgtcatcacccacgcgctcgaatggccctcccttaccgtgcagtggctccccgaccgcaccgagccgccggggaaggaccactccgtccagaagatgatcctcggcacgcacacctctgacaacgagcccaactacctcatgctcgcgcaggtccagctgcccctcgatgacgccgaggccgacgcccgccactacgacgatgaccacgccgacatcggtgggtttggcgccgcctccggcaaggtgcaaattgttcagcagataaatcatgatggagaggtcaatcgagctcgctatatgccccaaaattcatttgtaattgctactaagacagttagcgcagaagtatatgttttcgactatagcaagcacccatctaagcctccactagatggtgcatgcaaccctgatttacggctgaagggacataattctgaaggatatggcttatcatggagtatttttaaagagggacatttgttaagtgggtctgacgatgctcaaatttgcttgtgggacattaaagcaaatagtagaaacaaaagtcttgacgccttgcagatttttaagcatcatgatggtgttgttgaagatgttgcttggcacttgaggcatgagtacttatttgggtcagttggtgacgattatcatcttttgatttgggacctgcggtctccagcccctactaaacctgttcagtcagtggtggcgcaccagggtgaggtgaactgcctggcttttcacccgttcaacgaatgggttgttgcaactggttctactgacaagactgtcaaattatttgatcttaggaagattgatacttctctgcacacctttgactgtcacaaagaggaagtttttcaagttggatggagtccaaagaatgaaactatacttgcatcctgttgtctgggcagaaggctcatggtctgggatctaagcaggatcggccaagaacaaacaccagaggatgctgaagatggtcctccagagctcatgttcatccacggaggccataccagcaagatctctgatttctcctggaacccctgcgaggactgggtggttgctagcgtcgctgaagacaacatcctccagatatggcagatggctgagaacatctaccatgacgaagatgatctgccaattagcgatgagccggcaaaaacttcttgaagcaacacagcacaaaaggaatcttaacttctatcgactgttgggtgttcctagatcggaaccctgctcgccggagaatcttcatcgagtgagagttggctgtaggttgcttccgtggtcgtaactttatgcttgacgggttcgtcgtttcttcgaccgtctgtatgtgtattcggcgaacctttagcaatatacatatcccgattgactagatctgtacgtcgcagttgtgttttgtagta

SEQ ID NO: 95496 - DNA, 143 bp, Zea Mays
cccgtttcgttgttttcggttctcctttgcatttgtttcccttttctgttctttgggggttgagctctgaggttttcatacggggtttcatctctagcctaccccaacgtgcttgggacaaaaaggctttgttgttgttgttg

SEQ ID NO: 95497 - DNA, 79 bp, Zea Mays
aaagaacacacaggtcactgttgtaccatcgttttagtggcatgcatttgaaaacaaaaactcgtcatcgcgtcacggc

SEQ ID NO: 95498 - DNA, 1769 bp, Zea Mays
tagtgcagcagactgggacgcatcggcattcacgactcacgagctccaatcagttatcagtctctagctatcctgtctgcttgcttctggaccatcgatggaggcctacgcggcaacggcgtcgccacccacgacgacagccatgtgtgtggacaagctcagccaccagctcttctccctgctcgagaccagactcctgggcgggtggtgcccgtccgtccccgggacgccggcgcgggcgctcctcgacggcggccgcgtgcgggtgctcgccatcgacggctgcggcgcgggcgcagaggacgcgctcctggccgccgcggcgcttgcgaggctcgaggccaggctgcgcgaccgcacgggggaccccgacgcgcgcgtcgcggacttcttcgacgtggccgcgggcgccggcgcgggaggcgtcctcgccgcgatgctgctcctgaggggcgccgacggccggccgcggtactcggcgcaggaggctctggcgttcgtcgccgggagcgtcgggaccaaaggctggtgcggccggcgcgggcggtgggcgaagctcttccgccgcggttcccgaggcggcgaccgcacgctccgccgcgtgttcggggacgccacgctgagggacaccgtcgcgccgctgctcgtgccgtgctacgacctcgccacggccgcgcccttcgtgttctcgcgcgccgacgccgtcgagagcgacaccttcgacttccgcctgcgcgacgtctgcgccgccgcctgcgccgcgggcggcgcggtcgcgccagtcaggtcggtggacggcctcacggccgtcgccgcggcgtccgggggcgtggcggccatgtgcaacccggccgggaccgccatcacgcacgcgctccacaacaagcaggagttccccctcgccaccggcgtcgacgacctcctcgtgctctccatcggcgccggcgcctccgccgccaacggttcgagcacgccgatgcccgcacgctctccgtcgccgcgggagctggcgcgcgtaaccgccgagggcgtcgcggacatggtggacgaatcattgggcatggcgttcgggcgcgcgcgcggaagcaactacgtgcgcatccaggccggtaaggcgctggtcccgatccgcaccgacgaagcgtccgtggccgccgaagcgatgctagcgcagcggaacgtggagtcggtgctgttccgcgagcggaggctgtcggagcggacgaacgccgagaaggtggacgcgctggccgcggagctggtcaaggagcaggagcggcggaggcgcagcccgcttccgaacgtggctatcaaacaggtcggcacaccggcgcggctgtcgtccgcgaccactgcttcgtcgggcactgggacggccaggacggcgtcgacgatgccgtcgccggcgtcatgggagtcacgcaggtagtagttgggttgattttaggccgtaattgacgtgtgtacatgcatatatggaatgcaaagctaggagtggggtgtgtaagtgtgttgtttttcttcttggaacggacgctcacacgtgcggttcggaaatggaatttcggatggctcactcaaccctgcgtgcaactcttcacgtttctagcaaaacgcataaaaaagcgctggctgtcatcctaccttaaatccacggaatctcttttctttcatctctatttgcgtgttcgcacacacactgctggaagggacatctcattactacatgttcgcaacgttctatcaagcaaatcagaaaaacaacaaca

SEQ ID NO: 95499 - DNA, 1797 bp, Zea Mays
cacgaatctcgaggcgagctgttcgatcaccactatctgacgtagcttcttcgctcggctcttcttcaccccacccctctcccactcggccactccccccgcggggacaccgagcgctcgccgccgccttcgagttcggagcggagccacagccacgcatgccaatggccgtctccgctgttaccgcctcccatctcgctctctcttttccagcacgtagtcgccggagacgcgctgcgccccgcgccgcggcaggcggcctaacggctcgcgcacggcggctgcgctgcgagttcgtcgccggtggtgggaacggggcgctctccggagaggacgaccctcgcctcgtcgaccgccaaaaagttcttgatgccgctatgaatgacataaacaactcttttggaaaaggaagtgttacaagattaggcagtgctggtggtgcttttgttgagacattcccaagtggttgtctaacactagattttgctctgggtggcggtcttccaaaaggaagagtagtggaggtatatggtccagaaagcagtggaaagactaccctagctttgcatgcaattgctgaaatacagaagcttggaggaaatgccatgcttgtcgatgcagagcatgcttttgatccagcttattcaaaagctcttggggtagatattgaaaatctgattgtctgccagcctgacaacggagagatggcactagaaattgcggaccgtatgtgcagatctggagcaatagatcttatctgtattgattcggtgtcagcgctcaccccacgtgcagaaattgaaggtgagataggaatgcagcagatgggtctacaagctcgtctgatgagtcaagcattgagaaaaatgtcaggcaatgcctcaaaggctggctgtactcttatgttcttgaatcaaataagatacaagattggagtgttctatgggaatcctgaagtcactagtggagggatagccttgaaattctttgcatctgtccgtcttgagatacggctcattgggaagataaaatctgccaagggagatgaagatgttggtgtgaaggttcgtgtcagagtgcagaagagtaaagtatctaggccctacaagcaagctgaatttgaaatcatttttggggagggtgttagtaaattggggtgcgttcttgattgtgctgagctgatggatgtagttgcaaagaagggttcgtggtacagctacaaagatataagattgggccaaggcagagagaaggcactgcagtatctccgagagagcccaaccacctgcgatgagatagaaaaggtggttcgagctatgataccagaaggatccagacatatgagcctactagctttcgggcagtcatcatcaactgaagatgaacaggcgtatgatgaacaataatggtacatgaggttccgaagatggaacacttgtgaaaccgtcaagctctggcttgtgtcccttgcggataacagaaaagatcagaggtaaccaaccaatatggcagttgtgtgagcgctggagtggagttgactaagaccttgttcgtttctgccggattggtgggtcctaacgattcctgaccggattgtttctctaatttatataaactttgattagctggaacgattccgggtgcaatccgacggaaatgaacaaggcctaatgttgtacgtgtactgtggcatggcagaaccgtccggtttaacccaatttcgggcacacctgccagctatttatcactaagtgcaccagagattatatcaaatccgatagtctgttaagcccatcc

SEQ ID NO: 95500 - DNA, 1640 bp, Zea Mays
cacgaatctcgaggcgagctgttcgatcaccactatctgacgtagcttcttcgctcggctcttcttcaccccacccctctcccactcggccactccccccgcggggacaccgagcgctcgccgccgccttcgagttcggagcggagccacagccacgcatgccaatggccgtctccgctgttaccgcctcccatctcgctctctcttttccagcacgtagtcgccggagacgcgctgcgccccgcgccgcggcaggcggcctaacggctcgcgcacggcggctgcgctgcgagttcgtcgccggtggtgggaacggggcgctctccggagaggacgaccctcgcctcgtcgaccgccaaaaagttcttgatgccgctatgaatgacataaacaactcttttggaaaaggaagtgttacaagattaggcagtgctggtggtgcttttgttgagacattcccaagtggttgtctaacactagattttgctctgggtggcggtcttccaaaaggaagagtagtggaggtatatggtccagaaagcagtggaaagactaccctagctttgcatgcaattgctgaaatacagaagcttggaggaaatgccatgcttgtcgatgcagagcatgcttttgatccagcttattcaaaagctcttggggtagatattgaaaatctgattgtctgccagcctgacaacggagagatggcactagaaattgcggaccgtatgtgcagatctggagcaatagatcttatctgtattgattcggtgtcagcgctcaccccacgtgcagaaattgaaggtgagataggaatgcagcagatgggtctacaagctcgtctgatgagtcaagcattgagaaaaatgtcaggcaatgcctcaaaggctggctgtactcttatgttcttgaatcaaataagatacaagattggagtgttctatgggaatcctgaagtcactagtggagggatagccttgaaattctttgcatctgtccgtcttgagatacggctcattgggaagataaaatctgccaagggagatgaagatgttggtgtgaaggttcgtgtcagagtgcagaagagtaaagtatctaggccctacaagcaagctgaatttgaaatcatttttggggagggtgttagtaaattggggtgcgttcttgattgtgctgagctgatggatgtagttgcaaagaagggttcgtggtacagctacaaagatataagattgggccaaggcagagagaaggcactgcagtatctccgagagagcccaaccacctgcgatgagatagaaaaggtggttcgagctatgataccagaaggatccagacatatgagcctactagctttcgggcagtcatcatcaactgaagatgaacaggcgtatgatgaacaataatggtacatgaggttccgaagatggaacacttgtgaaaccgtcaagctctggcttgtgtcccttgcggataacagaaaagatcagagctggaacgattccgggtgcaatccgacggaaatgaacaaggcctaatgttgtacgtgtactgtggcatggcagaaccgtccggtttaacccaatttcgggcacacctgccagctatttatcactaagtgcaccagagattatatcaaa

SEQ ID NO: 95501 - DNA, 96 bp, Zea Mays
aaaaggaagagctgtgaaattgaacaaggaacgtcgtctagcccaggtaaggaagaatgttgtcaagttggacgactaacaaggtcacaagggtgg

SEQ ID NO: 95502 - DNA, 1143 bp, Zea Mays
tttccgtgctgccccaccgcagcgtctcgactggtcccctccttcctcttctcttcctcttcctctcacatcccggacaaatccaatccgaaatcatctccccctcgcctcgcctagaagaggaaggaagaacagagataagcgacaacgcgtccctcctcgccttcctcccgcctcgagctcttcccggagcaaccggagccacagacgtcaggacagcctagcgcgttccacgccggtatgcagaaccagatcatgtgccatgcttgccggacccttctgctctacccgcgtggcgcgtccagcgtctgctgcgcggtttgccaggccatcaccaccgtgccgccaccaggattggagatggctcagcttatatgtggtggctgtcgaactttgctgatgtatactcgcagtgcagacaccgtaaggtgttcatgttgcaacacagtgaaccttgttagaccagtgaataatatagctcatgtgaactgcggccagtgccggacaactttgatgtatccatacggcgcaccttcagtaaaatgtgccgtgtgcaattatgtcacagctactggagtaaatactgtggcacccaccccatctgcgaggccaacatcagatgggtcttcatatagtggctcatctacttctgctcctaaatctcaatctcagaatgtaactgttgttgttgagaaccctatgacagttgatgacaagggaaaacttgtcagcagcgttgtagttggagtcacagctgggaaagagtgattttattgacacttcgtacatcattgttgtgttttctatacacgaagttggaaaataccatgtagcatccaatgatgggttgcttggacttccttgaagaacagagatacaccacgaaatatttgtaggaccttcctaatgaaaccatggtcggacgttgtgtattgattcttttgtgtgtataatatgagctccgttagacttgtgtaatcagatatttgggggaaatacagcatagtttcgctgtacgtgcattgttacacaatttgtttgtttgttagtttgtgctgtcttggttgttcatagctcgttactgctttacttgtataccgtattcatgtgaaacgagtaagctgcaatttttgttaacgactt

SEQ ID NO: 95503 - DNA, 1089 bp, Zea Mays
tttccgtgctgccccaccgcagcgtctcgactggtcccctccttcctcttctcttcctcttcctctcacatcccggacaaatccaatccgaaatcatctccccctcgcctcgcctagaagaggaaggaagaacagagataagcgacaacgcgtccctcctcgccttcctcccgcctcgagctcttcccggagcaaccggagccacagacgtcaggacagcctagtatgcagaaccagatcatgtgccatgcttgccggacccttctgctctacccgcgtggcgcgtccagcgtctgctgcgcggtttgccaggccatcaccaccgtgccgccaccaggattggagatggctcagcttatatgtggtggctgtcgaactttgctgatgtatactcgcagtgcagacaccgtaaggtgttcatgttgcaacacagtgaaccttgttagaccagtgaataatatagctcatgtgaactgcggccagtgccggacaactttgatgtatccatacggcgcaccttcagtaaaatgtgccgtgtgcaattatgtcacagctactggagtaaatactgtggcacccaccccatctgcgaggccaacatcagatgggtcttcatatagtggctcatctacttctgctcctaaatctcaatctcagaatgtaactgttgttgttgagaaccctatgacagttgatgacaagggaaaacttgtcagcagcgttgtagttggagtcacagctgggaaagagtgattttattgacacttcgtacatcattgttgtgttttctatacacgaagttggaaaataccatgtagcatccaatgatgggttgcttggacttccttgaagaacagagatacaccacgaaatatttgtaggaccttcctaatgaaaccatggtcggacgttgtgtattgattcttttgtgtgtataatatgagctccgttagacttgtgtaatcagatatttgggggaaatacagcatagtttcgctgtacgtgcattgttacacaatttgtttgtttgttagtttgtgctgtcttggttgttcatagctcgttactgctttacttgtataccgtatt

SEQ ID NO: 95504 - DNA, 876 bp, Zea Mays
tttccgtgctgccccaccgcagcgtctcgactggtcccctccttcctcttctcttcctcttcctctcacatcccggacaaatccaatccgaaatcatctccccctcgcctcgcctagaagaggaaggaagaacagagataagcgacaacgcgtccctcctcgccttcctcccgcctcgagctcttcccggagcaaccggagccacagacgtcaggacagcctagcgcgttccacgccggtatgcagaaccagatcatgtgccatgcttgccggacccttctgctctacccgcgtggcgcgtccagcgtctgctgcgcggtttgccaggccatcaccaccgtgccgccaccaggattggagatggctcagcttatatgtggtggctgtcgaactttgctgatgtatactcgcagtgcagacaccgtaaggtgttcatgttgcaacacagtgaaccttgttagaccaggtactattgacccccgccccctcctcctctgtctctgaggtttttacatgactactctaagacattcaccctctcttgaggtagaagggtcaacaaggaccattgtcagtcacaatgaacatgtggcacacatctttctttctggtaacttgttttagcatgacctataaaccgggcataatttgatgctttatttagggtgtgtttggttgaggagcggagggaaatggaacgactctattcttattttttttatatttggttaccatggaggagagcggagcggctcctgaagtctataaacaacaaatatttgggatgctctcgctccaccaaaatgaccggatacgagcgctctcatccctctcctcaactcaacagtcatatggctctccaaccaaaaaataaac

SEQ ID NO: 95505 - DNA, 500 bp, Zea Mays
gttgtagcgtttccggacactccgacacttaggcgatgggggcctctgggtgactaacgaccaaaaaggacgtatcacatggctgggccgatgtttaatctgacaagtatggaagaaaagaaaagaaaatggactgcacagaaggcaaagacgatgaaataacagggggagcatttttctttagcagccccatttattagggatgtgcaaagatttagcaagggattgatctcttaacagattgtacttagcaattagcatgaccttttttagttggaaacatgctagctatagtttttaaggaatgtttagatccaccctactaaagttttagtccctgtcacatcgaatgtttgaatgataatttaattacgagtattaattatagtctaggcagctactactattgtccaggtatcacacgcttctcccaacctcagaaaggactccaagcagagctactgagtgtttcttcaaagtacagtcacatggatggtgac

SEQ ID NO: 95506 - DNA, 3148 bp, Zea Mays
gtcgcgctgtctacctctctctctctctcatcacagcacagctccagctctaggctgtagagggtggaagaagcgaggtcgagtcacagaggcctgcagcaaccgtctgcgctgagcatcgaggccgcgctctgcagtctgctgtctgctctccctcgataagccgggttccaagctagctctgcagagtgtgagctctgactgaacacgaagtgattggcggcttctcatcgatcgatggttgtgttgtgctggccatctgagcgatgaaccagttcgtccctgattggagcaacatgggagacacctccaggccgctcggcgaagaagacgacctcatcgagctgctatggtgcaacggccatgtcgtcatgcagagccagagccaccggaaggtgccgccgaggccggagaaggcggcggcagtggcggctccaccagcccccgcgtccgtgccgcaggaagacgagggcggcctgtggttccccttcgcgctggccgactcgctggacaaggacatcttctcggagttcttctgcgaggcaccgacgccggcaccggcggcggcggatgcggcgccggcggcctctggtggtggaaccggcaccgaagccggcggcaagtcgtgcggcggggacgtcccagtcccagcagaggacgacaggcgcggcggcggcggggcgtgcgcggtgtcggcgggggacccgtgcgacctgatgccgcctcccaagtcgacgcccgcgtcctgctccaggcagcagacgacgatgagcctggccaacggcggcgacaatgccggaggggacctgccgggcctcgtccgtgcgggggcggaggccggcgcgtcgtcgatgctgagcgcgatcgggtccagcatctgcgggagcaaccaggtcctggtgcagcgcgcggcgtgcgcgccggggcgcgcgtccgcgtccggctccggaaccgcccgcggcgacgggtccgggtccgccgcgctgccgtcggcggtgggcagcgcgaacgcgaacgccgtgggcggcggcaggggccacgaggcgtcctcgtcggggcggtccaactactgctgcttcggcgccgccaccaccacaaccacaaccaccaccacggagcccgcgagcaccagcaaccggagcagcaagcgcaagcggctcgacaccgaggactcggagagtcccagcgaggacgcggagtcggggtccgccgcgatgttggcgcgcaagccgccgcagaagatgacgacggcgcggaggagccgcgccgccgaagtgcacaacctgtcggagcggaggagacgagacaggataaacgagaagatgagagccctgcaagagctcatacctcactgcaacaagacggacaaggcgtcaatgcttgacgaggcgatcgagtacctcaagtcgctgcagctgcaagtgcagatgatgtggatgggcagcgccggcatcgcggcgccgccggcggtgatgttccccggcgtacaccagtacctgcctcggatgggcgtcgggatgggcgcggcagcggcggcggcgctgccgtccatgccgcggctgccgttcatggccccgcaaccggtggtgcccagcgcgccggtgagcgtgggcccggtgccggcctaccggggccacatgcccgcggtgggcatcacggagccgtacgggcactacatcggcgtcaaccacctgcagccggcgccgccgccaccgcaggtccagggcgtgagctactacccgccgccgctgggggcgacggcgaaggccgtgcagcaggctgcagagcttcaccacgtgccggggcccggcggcagcatcatgcccgccggcgccgcacccggagtgctgctcccggagagcgcgcaaggcagagggccaggtacggtgccatgcgctccgcccttctcatcctccgcttcagtttttgggctacaaatgggagcactacgatgagatgacaactgcggccctgtacaagaatctactgttcgcttcagtttctacgggtttgcatctcgatcgacgagttcggttcttgccgaataaagttgggtagcgtgtaaagcgaggggacaagtacgatacggtttgactgtttcaagccttccatcacttaccatcggcatctctgctgtcaacgaaatcggaggagttagagctggattacgtgcctcaaggtttgccacatgggccacatttagtgctagatcgttttgggggacccatgcgctagtaaagaatccttttatttttgtgcctcctcacggtctaaacgatcttataaaccaggggaaatattcaaaacttataaatttttatcaataattagtgaaattgttagagcatagaacttatatcaataggtttgtgttaaaaataactctaaaatggtattgattttttatcctctggctttatattataaaataaaataatgattaaaaaatagtttacatgacttttctttctctagtttaatatcattactatttttagatggagggtagatgggagtggctttttgtttgtagctcaagctccttagctctatgatacactaacttttgtgaggaacacatggaaattgataagagtgattatgactggaattgaatagaaagcagtgagaaacatatttttagctcctatatcttccagtttatatggtgaagtacttcttgactaatccacactaacatatatgtgcaattgctgtttggctagccggaaatgatttttaatcgataatccgctccatggagcgctaccaagtggcctctaattcttagctcctgctccttaatctctgatggagtgattctagttagagagagattaataaggtgggacagtacgtgtggaaagcgatttaggtgacatttgtaactggagtagtgaaaaggagttatttctcctaggttctagtgtaaataaagaagtattttattttgtcaattccttgaaaaaatatgtgaatttgttcctctttatttttattgagcagcggtaatttgcataaataaacctcttccacacaccacgtcaaattccaatgccgatttcttattaatctgacaaacaataaaaacatagacacactcactcataaatgcatggatataatatccccatgtgcgcctctaaaa

SEQ ID NO: 95507 - DNA, 2099 bp, Zea Mays
gtcgcgctgtctacctctctctctctctcatcacagcacagctccagctctaggctgtagagggtggaagaagcgaggtcgagtcacagaggcctgcagcaaccgtctgcgctgagcatcgaggccgcgctctgcagtctgctgtctgctctccctcgataagccgggttccaagctagctctgcagagtgtgagctctgactgaacacgaagtgattggcggcttctcatcgatcgatggttgtgttgtgctggccatctgagcgatgaaccagttcgtccctgattggagcaacatgggagacacctccaggccgctcggcgaagaagacgacctcatcgagctgctatggtgcaacggccatgtcgtcatgcagagccagagccaccggaaggtgccgccgaggccggagaaggcggcggcagtggcggctccaccagcccccgcgtccgtgccgcaggaagacgagggcggcctgtggttccccttcgcgctggccgactcgctggacaaggacatcttctcggagttcttctgcgaggcaccgacgccggcaccggcggcggcggatgcggcgccggcggcctctggtggtggaaccggcaccgaagccggcggcaagtcgtgcggcggggacgtcccagtcccagcagaggacgacaggcgcggcggcggcggggcgtgcgcggtgtcggcgggggacccgtgcgacctgatgccgcctcccaagtcgacgcccgcgtcctgctccaggcagcagacgacgatgagcctggccaacggcggcgacaatgccggaggggacctgccgggcctcgtccgtgcgggggcggaggccggcgcgtcgtcgatgctgagcgcgatcgggtccagcatctgcgggagcaaccaggtcctggtgcagcgcgcggcgtgcgcgccggggcgcgcgtccgcgtccggctccggaaccgcccgcggcgacgggtccgggtccgccgcgctgccgtcggcggtgggcagcgcgaacgcgaacgccgtgggcggcggcaggggccacgaggcgtcctcgtcggggcggtccaactactgctgcttcggcgccgccaccaccacaaccacaaccaccaccacggagcccgcgagcaccagcaaccggagcagcaagcgcaagcggctcgacaccgaggactcggagagtcccagcgaggacgcggagtcggggtccgccgcgatgttggcgcgcaagccgccgcagaagatgacgacggcgcggaggagccgcgccgccgaagtgcacaacctgtcggagcggaggagacgagacaggataaacgagaagatgagagccctgcaagagctcatacctcactgcaacaagacggacaaggcgtcaatgcttgacgaggcgatcgagtacctcaagtcgctgcagctgcaagtgcagatgatgtggatgggcagcgccggcatcgcggcgccgccggcggtgatgttccccggcgtacaccagtacctgcctcggatgggcgtcgggatgggcgcggcagcggcggcggcgctgccgtccatgccgcggctgccgttcatggccccgcaaccggtggtgcccagcgcgccggtgagcgtgggcccggtgccggcctaccggggccacatgcccgcggtgggcatcacggagccgtacgggcactacatcggcgtcaaccacctgcagccggcgccgccgccaccgcaggtccagggcgtgagctactacccgccgccgctgggggcgacggcgaaggccgtgcagcaggctgcagagcttcaccacgtgccggggcccggcggcagcatcatgcccgccggcgccgcacccggagtgctgctcccggagagcgcgcaaggcagagggccaggtacggtgccatgcgctccgcccttctcatcctccgcttcagtttttgggctacaaatgggagcactacgatgagatgacaactgcggccctgtacaagaatctactgttcgcttcagtttctacgggtttgcatctcgatcgacgagttcggttcttgccgaataaagttgggtagcgtgtaaagcgaggggacaagtacgatacggtttgactgtt

SEQ ID NO: 95508 - DNA, 2474 bp, Zea Mays
aggagaggagactgcaggcaccggcggcgcgggtgatctctcacggcatcgccggagcagatggacgcttcagatagccccccatccgggcgaccgtcatcctccgccgtcgcgctctacggggactctcctatcttcgatttcgttgatagtctatctcccatagcaccaccgaagcctttaggttcaacacaaagtgtccagctattcaagtcatcaaacttagcacctgtttcttcaattttcacctcgccccaagttaatccacgaaaggaatctaaatccacaatcaggtaaatcttctattattgtttctgatatatgtgtttttgtcatttaaacttaatacagtctttacatgatggggatttctagctgcattgaactgtctggatccgcagcacttgctccagaaacttgtactccttttgaggatgcaacaaattcaccaagcaaatggcttcagtccaccttatttggtagtgaaactttaggagatgccaataaacaagatattgatggcaaaccaaatcatactgcagatgtggaacatgtaaagccatcaagcacatgctctgatcagaatggctttgaccaaatggactcatcgacttctggaagaaatgttcaggagaatgagctggccaaacaggatagcaatgatctagcaccatgcagtttaaatcacttgatcacacattgtggtactggtaatagtgtcatatcaatatcagatctggccttagaagcacagcaacagagttggaaggtaaaaggtgatagtatcatatctagcacatccttggcagtggatcaagaaaatttggaggattcacgaagagaagattttgttgagcaatttggttcttatatccagagtgctgctgatggcactcatgtttactatgctgatgctgcagcaggtgttacaataaatcatgaccaagaaatgctccctgctattattcgaaaccagttggattcaaatgactatattttggacacatccaaagtttccattgatggcacggccttatcacagcatcaatatggtacgcataggtgcagcctttttaatgacaagtcagggacatctaataagagtatgcaaaatatctcagatattaatcctgcgagtatatgtggcaacaactatctgaatcctgtagatcctgctctgtgtgcattgcctggtattggtttgcatctgaataccgttgccttgaatttatcagacatgccactcacaattaatcatccactgttatctgaacaaactagtccagcaacagtaattcctggcagtgagaccgttctttatggcagtgaggtgttcactcatgttgacaattactcttctcagaaaaccatgcctaatgctgacaagtctggccaacaaattcacaagaagaaaaggcgcaaattacaaaaagatgatggtgaatcttgcagacattgtaactgtagaaggtcaaaatgcttaaaactttattgtccatgtttcgctgcaaaagtctattgttcaagcttgtgctcatgtcaaggctgttccaataatcatgcacatgaggaactagtttcttgtactcgcaagcggactgaatctcataatcctctagcatttgctccaacagtcactcatacatatgggactgttttagaatttggggatgattctaacaaaactcctgcttctgctcgacataaaagaggatgcaattgcaggaagtcttcttgtcttaaaaaatactgcgagtgctttcagagtggtgtagggtgctgcataagttgccgatgcatgagttgtaagaactcttttggaaaaagagagggtgtgctgttgttaactactgaaaaactggagaaagggggcaaagcaaaaggcactcatggggaggaagacaaacttgcgtttggcaaacaccatgtggttagccaatctggtgatattccagcgtatgagaatccactcgtgacacctctgcttgagacttacagatctcccttcctgcttccatctacatgctccaaactgccaccgccaactgctgggtgctcttatggactgcacaaccctcggcctcccatgaaatcggatgttttgttctcacctctcgaagatgttttgcacaaccctgctgagatggttctcgggaatggtttttcagatacccaggaagtgggttcatcttgcaccaccagcgtcaaggttgtttcaccgaacaagaagagggttgcctccctgcagattggtacggcattgtccccaatcggcagcagcagcagaaaactggttttgaagtccttcccttccctaactggtgatgctgatagtgagccccactaaacagagttcatcagcatatgacaactgagtcgacagctgatcccttctggtacccctggaccctggttttgacaaagagttgaaagaacttgtttcagcacctctaccatttagaaatatagttgcg

SEQ ID NO: 95509 - DNA, 485 bp, Zea Mays
ctactggagaataatctctgcggctctgcctggccgagcgatcgatggaccgtctgtctgcgtctgcgtccggcggggccgatgagccgtcgccattgggggcagaccgaccaaccaaccaactcacacgtcttgcccgtccggtgatagatcccctgctgttgctgcgccaccgctctctccggccgcttccacgagctagagtcgatctgcacgcggtcggctccatggcatgggagggtgagtgttgagctgtgcaggtgagagagagcgaggtgtcattcgtcgtgtcatctacgagcagcccagtgggcgcgcgctaggtgggcttgcagggctctggtctatttctatttcacgttctttcttaagcctacgatagctttattttacattccgttttcttattagttttatctgcactactgttttatttagaacaatctctgcatattaaatcaatgctgcacatattttaggatata

SEQ ID NO: 95510 - DNA, 2004 bp, Zea Mays
tcccctccgctgcactcatagtcatccacagccactgcttccgcacgcagctgccacatgccggacctcgccgtgccgtgagcgtcaggccaaccagtaccttcatccgctctctatactctcttcctctgcaagccgcctccgatgcggccgctcagtgacgccttctgattctgcgccgccggcgccgccactcgtccgcagatgggcaaggcgggcaagtggctcagaagcttcctcccgggcagcaggaggggcagggacaacaaggccggggcgctcgcgccggcggcggagcccgacctggcgctggcgctgccgctgccgggagtcgccacgacgccggggtccacgcccggcgccaaggagaagcggaggtggagcttccgccgcccggccgcggcggcgtcgcccgggcccgggtcggcggcggcggccaaggacgtcgcgcggggccacctcgcgccctacggcttccttgagccgcgggtggacccggaccagcacgccatcgccgtcgccatcgccaccgccgccgcggccgaggcggccatggcggctaagcaggccgccgccgtcgccgccaggctctccatgtccgcgccggggtccaagcgcaccgtcatcggaatcgaggaggccgccgcgataaagatccaggccgtcttcagatcctacctggcgaggaaggcgctgtgcgcgctgcgcgggctcgtcaagctgcaggcgctggtgcgcggccacctggtgcggcgccaggccagccacaccctgcgctgcatgcaggcgctcgtcgcggcgcagaacagggcgcgcgtcgagcgcctccggatgctcgaggacgagaagcccgtccggacaccgcggacgacgccgggccggcgcagctcgccgcaccacccccggttccgccaccaccaccaggacacggcggaggacaacgtcaagatcgtggaggtggacaccggcgccggcggacccgaggcgcacggcacgccgcgcacgtcccggcgcagcagctgctacgcgacgccgctgtgccgcacgccgtccaagaacgacctgtaccagaagatctcgccgacgccgtccgcgctcaccgacgccagcgcgcgcacgtacagcggccggtacgacgacttctccttcgccaccgcgcgggccagcccgtaccgctacgcgccgtcgaggcagcagcagcagcagcaacagcacgacgacaagccctcggcggagtacgcgctgctcgtgcccagctacatggcgaacacggagtcgtcgcgagccaaggcgcggtcccagagcgcgccaaggcagcggctgtcagtgtcgtcggccgccgccgaggcggcctggcagcccagcgggcggcgcagggcgtctctagaggcgcaggcgcaggcgacgccggccccgcgcgggcaggcgccccgttacggtcccgcgcgcgtgcagcggtgcccgtcgcaggccagcgcgcccgcggcgtgcccctggggcgccaggctcgaccgctggagcgcgtcggtgcacgacagcgagtgcgggtccacaagcacggtgatgaccgccgccactaccacgtactgctggtcgttggccaccgacaccgccggcatggcttagagccttgtagacgacgacaatggcagtcgcaggcggggtctcactctgtcactcacatggtttctgcagcgggaagatgaaaagctgccgggcctttagcttgtagggatgggacgtcgggaggctgctgagtactggattctctctagtttaacagtagaagaagctcaagctgggcttcaagtctgcgagtttctgcaaaatctgtatgtgtgagtgtgatgttcctagggtttggataatttgatgagactggtgtttttgagtgccaagaatcaagcattgtgtattgctgccggggtagagaagaagacgtttcagtgtcttgttgttacagactacagaagtacagagtgagcagcgtgctgtccttgaacg

SEQ ID NO: 95511 - DNA, 909 bp, Zea Mays
tcccctccgctgcactcatagtcatccacagccactgcttccgcacgcagctgccacatgccggacctcgccgtgccgtgagcgtcaggccaaccagtaccttcatccgctctctatactctcttcctctgcaagccgcctccgatgcggccgctcagtgacgccttctgattctgcgccgccggcgccgccactcgtccgcagatgggcaaggcgggcaagtggctcagaagcttcctcccgggcagcaggaggggcagggacaacaaggccggggcgctcgcgccggcggcggagcccgacctggcgctggcgctgccgctgccgggagtcgccacgacgccggggtccacgcccggcgccaaggagaagcggaggtggagcttccgccgcccggccgcggcggcgtcgcccgggcccgggtcggcggcggcggccaaggacgtcgcgcggggccacctcgcgccctacggcttccttgagccgcgggtggacccggaccagcacgccatcgccgtcgccatcgccaccgccgccgcggccgaggcggccatggcggctaagcaggccgccgccgtcgccgccaggctctccatgtccgcgccggggtccaagcgcaccgtcatcggaatcgaggaggccgccgcgataaagatccaggccgtcttcagatcctacctggtaagtactaggctggctatcagttgacttgacctcgctcgttagtcgtatcggtatcgcatcgtcgtatccactgctgagtgctgacttcacctcaatcgtatcacttcgatccttgggctgcgtgacgtgccgtgacgtctctttctgtgtgtctgccacactctggctgcaggcgaggaaggcgctgtgcgcgctgcgcgggctcgtcaagctgcaggcgctggt

SEQ ID NO: 95512 - DNA, 1785 bp, Zea Mays
gttttaatgctgcaatcagttcaagttaagctcattctttgaacagtttcctctggtatatccttgcaacattcttgtcactagcttggtagctagtacacttgaacaacaatcacgcgaggtacctagtaaggtctttagtatacgtactaatttgacaaataatcccaaacatcacacatttgattgaaactaccagtctagttaatccccaacatcacacgctgctgttcgtcctaaccaactaatttcacgtacacgagatgagatgcgcacttgctatacggctatacatgctacactgatacacctgcgaaatcgttctcgcatttcctcttgcgaatttttaaccttcttcactcacgtgccatgctgttaccacgtcccccagctcaacccggagctcctcccacccgaacgcctcgtcctcgtcgccgtggccgccctccagcctcagctccaccagcatcagctccggcgacacctccgacatctccatcgacatggccacgaggcccggcaggacgcccagcggcaggcgctcggcccccttcttccccacaatgaagtagccgagcctcgcgccggcctgcgcgagccgctccaccgcccgctccggggacgccgtcgtcatgaaccgcttctcgcggcggcgcctgccctcgccgaacaggcccgacaggtccagcccgggggacatggagatgatgtcgaaggcgttcaacgccggcggggcctggaacgccagctcgcgctccgcctggccgtccaggaggccgccgagctgggagtccacgctgagcgagcgcttgaaccaggggtggccggcgagctccgcgacggcgaggcgcgtcgccgggttcgggtccagcaggcgcgccacgaggcggcgcgccggctgcgacacccaccgcgggaccgtgtactcccggcggtgcgccctgcggcacatgtcggcgatgttggcgtcgtcgaaggggaggtggcccgcgaggaggacgaagaggatgaccccgcaggaccacgcgtccgccttggcgccgtcgtaggccctgcgccggagcacctcgggcgccgcgaacgccggggtgccgcacgccgtgtgcaggcgcccgtcgtcgcggaccgagtccgggagcgccgcgaggccgaagtcggacaccttgaggttgccctcggcgtccagcagcacgttctgcggcttcacgtcgcggtggaacaccccgcgcgcgtggctgtagatgagcgccgacgccagctggaggaacacgcgccgcgccgcgtgctcggggagcctgcgcgacggcagcgacgccagccgggtcaggaggtccccgcccggggccagctccatcacgaggtacaccttggagcgcgtcgccagcacctcgtggaggcggagcacgttggggtggctcaggcggcgcatggcggacacctcgcgcaggagacgcgacgccatgcccgtggcggccaacccggccttgtccagcaccttcacggccacggggtcgcctccgccgagacagcgcgcgtggtataccttggcgaagttgccccggccgaggaggtggccgagctcgtacttgccgaggagcggggggccggccttggcggacgacttgctcttggccatggcgcgcgcggcaccaaggcgacgggcagggcaagccgccttcttcggctttggtagttagtttacagggtgctgccttggtggtgccaaggtatataaacaaacaaggagggagtggttgagtcttgtacgctgtttgtgtatgtatg

SEQ ID NO: 95513 - DNA, 474 bp, Zea Mays
atgggcggaggtggctcgacagtggggggaagcgtggcggtgagcacaaaggcgtggctcggcggcgttccggcagcagcgaagggatgtgcagagccggggacagcggggaaatgggccgcagggggcgcagtgagggccgagggcgcgctggccgcagagggaaaggccgcgacgggcgctgcgagtcccggcggcgcgccggacgcaggggagagggccgccgcggagggtgtgccggccgcaggggagagggagaaggccgccgcgggggcggcattgagaaatcaaagctcatttgtttatcatcatagtacaaccatggtttcaaaggtgactaagcatccaagtgagagcggacactgttcccggaggcaagctgggtacacctggaagcctaataacgcctttgaaacagagagtacaacagaaataggtaaggtagcaaatagcctaagggaatatactggttaa

SEQ ID NO: 95514 - DNA, 77 bp, Zea Mays
aatatacaaatgtcaagtttgatttgcccttgcaattaggttctgttgggagtaacactgaacttggcaagccaatg

SEQ ID NO: 95515 - DNA, 1187 bp, Zea Mays
gaccagctcatcatcacattcgcatacatctcttctagcacgcaaagatcgagctatagctagctctgcaacaagagagaaggaggactacccttcgccggccggcctaaggaggagtacgtacagaacttgggacatggaaaccgtcgtgggcgacctcatggcgaccgagctgaggcttggcctgccgggcaccgtcgacgactgcagccagccccaactggtgaaggccacgccgccgtcgacgccaaggggcaagaggcgcgccaccgccgatgccgtggaggaagccgccggcgccgaggaggcaagcaagcgtgacgccgagacggcgcccccggcagccaaggcgcccgtggtgggttggccgccggtgaggtcgtaccggaagagctgcttccagcaggccagcagcaagcaggcggcagcggccaaacaggaggcggcggcggcggcgcccggctgcacggcatcgtcagcagccgccacaaacaccaccagcagcagcagcgccgccgtcgtcgttggctccttcgtcaaagtgagcatggacggcgccccgtacctgaggaaggtggacctgaggatgtacaggggctacagggagctccgggaggccctggaggccttgttcgtctcctccagcagcgccaacaacctgtcggagttcgccgtcacctacgaggacaaggacggcgacctcatgctcgtcggagacgtgccgttcgagatgttcgctagcacctgcaagaagctgaggatcatgaagagatctgaagccacaggcctggggtcgtcgtcagcgaggcaacaatgaagatctcatctgatctatcgagaggacctgcatgcccggcaacaacacgtcgatcgatcgtcatggccttattaattgtttctttctttcttttcttttctgtttaattatttttgttgttctggttggcgccgccgtggatcggagggatccccaagccgaaggatgagcttggctggcgcatcgaagcgcatgcaacggatgtgtgcggctttggttctgtaataagacaaccaggggtccttttttcgatctgttattagcggcacaaaaggagctagatgcatgctgaggttgtttcagttcactctccatgtgtgtctgtacaaacgaaacaatacagttatattttgatcgttgatcccttatt

SEQ ID NO: 95516 - DNA, 1336 bp, Zea Mays
gaccagctcatcatcacattcgcatacatctcttctagcacgcaaagatcgagctatagctagctctgcaacaagagagaaggaggactacccttcgccggccggcctaaggaggagtacgtacagaacttgggacatggaaaccgtcgtgggcgacctcatggcgaccgagctgaggcttggcctgccgggcaccgtcgacgactgcagccagccccaactggtgaaggccacgccgccgtcgacgccaaggggcaagaggcgcgccaccgccgatgccgtggaggaagccgccggcgccgaggaggcaagcaagcgtgacgccgagacggcgcccccggcagccaagtgagtagagattatagatagagcgttattccaaaactgttcagaagaaccgtagtgtcccttcttcgatcgtagcaggcgcagctagctccgctctgctgcatcaggtcctgactcctgagtcctgacgctacgtacgtatgtcactcaactctcgcagggcgcccgtggtgggttggccgccggtgaggtcgtaccggaagagctgcttccagcaggccagcagcaagcaggcggcagcggccaaacaggaggcggcggcggcggcgcccggctgcacggcatcgtcagcagccgccacaaacaccaccagcagcagcagcgccgccgtcgtcgttggctccttcgtcaaagtgagcatggacggcgccccgtacctgaggaaggtggacctgaggatgtacaggggctacagggagctccgggaggccctggaggccttgttcgtctcctccagcagcgccaacaacctgtcggagttcgccgtcacctacgaggacaaggacggcgacctcatgctcgtcggagacgtgccgttcgagatgttcgctagcacctgcaagaagctgaggatcatgaagagatctgaagccacaggcctggggtcgtcgtcagcgaggcaacaatgaagatctcatctgatctatcgagaggacctgcatgcccggcaacaacacgtcgatcgatcgtcatggccttattaattgtttctttctttcttttcttttctgtttaattatttttgttgttctggttggcgccgccgtggatcggagggatccccaagccgaaggatgagcttggctggcgcatcgaagcgcatgcaacggatgtgtgcggctttggttctgtaataagacaaccaggggtccttttttcgatctgttattagcggcacaaaaggagctagatgcatgctgaggttgtttcagttcactctccatgtgtgtctgtacaaacgaaacaatacagttatattttgatcgtt

SEQ ID NO: 95517 - DNA, 1742 bp, Zea Mays
acagtatagatccagatcacgccacgccgtcgggcaagaccagctcctctcgcctcccggcacttccgcttgccctcggtcaaggtcaaccaatcgccatggacgccgcgtcctcgtccgcggcgccgctgcgccttgtgatcttcccgtggctcgggttcggccacctgctcccgtacctggagctcgcggagcggctggcgctgcggggccaccgcgtgtccttcgtctccacgccgggcaacgtcgcccgcctcccgccgctgcgccccgccgccgcgccgcgcgtcgacatcgtggcgctcccgctcccgcgcgtcgacggcctccccgacggcgccgagtccaccaacagcgtcccccacgacaagttcgagctgctgttcaaggccttcgacggcctcgccgcgcccttcgcggagttcttgggcgggtgctgcgccgacgagggcaggaggcctgactgggtcgtcctcgactccttccactactgggccgccaccgccgccgtcgagcacaaggtgccatgcgcgatgctgctcccgagcgccgcgtgcctggccgtgggcagggaacggcagtcctcgagcggcaagccggccgctgcaccccgttacgagtcggagcagaacaaacagtattccgccaaggatggcgcatccggtgtgtccatcgccgagcgctacttcttgacacgcgagaggtgcacgatcatggccatacgaagcagccacgagtgggaaccggagttcctgccgctggtggcgccgctcgtcggcaagccggttctgcccctcggcctgcttccgccgtcacccgacggagggcgtggcgccagcgccaacgcgaacggggagcacgccaccgtacggtggctggacgcgcaaccgccgagctcggtgctgtacgtggcgctggggagcgaggtgccgctgcgcgcggagcaggtgcacgagctggcgctggggctggagctcgccgggacgggcttcctctgggctttgcggaaccctagcggcgtccccgacgcggacgtccttccggccgggttccaagaacgcacccgcggccgtgggctggtgaccacggggtgggttcctcagcccagcgtactggcgcacgccgccgtgggcgggttcttgacgcactgcggacggaactcgctcatcgaagggctcctgtacggccgccctctcgtcatgctgcccatcttcggggaccagggcccgaacgcgcgcctcatggagggaaagaaggtggggttgcaggtgcccagggatgagcacgacggctctttcgaccgccatggcgtggccggcgcggcccgggccgtcatgctagaggaggaaaccaggggtgtctttgtcgcaaatgctctcaaggtgcaagcgattgtagctgataaggaacttcaagacaggtacgtggatgaatttatacagcaactactaataagagggaggccatgccctgcctccagctgagactgccgtgcagggtttgtaactttcccactggggtttgttcggttagctctcaatccatgtggattgagtgagattagatgagtttgaatcccaaacaagtaaaacttctttttaattttttcaatctcatccaattcatgtgtattggaaataaccgaacaaggccttaataaaacatctagctttcaaactatgttatcggaggcgacaatggattgggataatttgccacaataagagagcatgtattgttat

SEQ ID NO: 95518 - DNA, 1141 bp, Zea Mays
ctaaaatccaaaaaagttggtagccctagctatactaggcttagttctcctgtttgctttgtgcttgatgccttcctaccgtgacaggtgcttcctattttttgtgacctgtctatcacctaggcattgacatctttcaaactgatgtgcgtgtggtcatgtgtcacatctggacaagctacacttgtggtggggtggctttgccatccattgatgtgcccattgtcgcttgtattcactttgtcgtacttaaaaggtttgaactgagcagtcataggttgagaagccttttgttgtaagctgaaatggaaatggtagaagttgttagcctgcactactcttcaagagtgtaatgttgctgttagacagtttctatgtttacaatctgtgctgctgcttatgtaacaggagcacgaatttgaatcaggttgacatttggttcattgtttcagaactgaaacaaagaattgaaccactaaacttagtagtaacaaatgagtcctaaagaaaggtgttactaatatcatccaccaaattaactgaaatgatggagaaacttgtccaaatttattacgttaaggaaatggaaagggcattatcccttggtattctgtttttccaatgtattgccaaaattttgccaggttctgaatgagttcgctgcagttgaaccatctcttccatgcaagcggctagcggatggctccaaacgggttcaactccctcagttcctaaagcagcagccgtcgaaggacaacaaattaattgaattgagccagacccagtgcactgtgcatcttggttcataataacaccaccagagccagttaacggagcattgtacacaccgaattatgtgaatcatgcaccacataacattatcaattcgttgtatacttctgtattgcatcagaacctgtagtgattgttgtataagctgctaattgctgcatggacatgtctgaatccatcatggatttcttgcgaccgttagtctgttctaggaaacattatataggaataattcgtaaccatgacccgtattctctagggaaaaaaaataatgatcctaggtcactcattttggttggtgttattctgttattcttccgcatgagctatctatggactttggttcttc

SEQ ID NO: 95519 - DNA, 1721 bp, Zea Mays
atccatccatcctcctcgcggctcgcgccccgaaaaatggcgccaacccctccccagtctcccgcgcggcgctgccccagctatttccccctcccctgaattgaccccagccgcgcctcccaaaccctaacctaacccccgccccctgggccccggccatggcgtcactgcccaagccgccgccgccgccacgccccaagacgcggggcaactacaactgcggccgctgcggccagcccaagaagggccacgtctgcgtcggccccggccccggccccggcggcgctgcgtcgccctcctcctcgtccggggccggaggggagcacgggctgcgccgcgccctctccttcgacgaggccggcacgccgtcctcgccggagaagaagcccaaggtggaggacgtcgacgaggcggagctggacgaggaggccacggtggacgtgggcgcccgcgcggtgtccagggaggtcatggcggaggttctgcaccgcctcggtccccgcggggtcatggccgccgccggggtcagccgaggctggcgggactgcgcgggccgggtctggcgcgcggccgaggagctccgccttcgcgtcctcgcctcctctggcgccggcctcctcgccgcgctgctcccccgctgccccgcgctctcccgcctccacctccggatggaaagtgatgttgatggcactaccctggcttgtattgcattttcctgcccaagtttaagaactctcgagattaccatggctgctgatgctgtcaacaggatgactggggaggatctaagtcgttttgtttcggagaagtcttctctctcagccctcaaaattggtggttgctctaatttggatattcttaatctgtgctcttcaagcctttcaattctttggttgtcagatctttgttccctttcgaaatcggttatgaactgtcctaatatgagcgagctatcactgtgcttcacagaacatagtagtgattgtaccaatctgattactttgatggatggcctaggtcgtacatgtcctaacttggaaaaaatgcacatatcatcaaaacaattatctaatgaagctgtatgtgctctagagaatgctaatctcaggggactgttcatgctatccctgattctaggttcaaaaataactgatgcagctgttgcatctattgttcggtcatgtgcaagcttggagttacttgatttaagtggatctagcattagtgacaatggtgttgggatgatatgtaaagcataccctcgtactttatcaaggctgctccttgctctttgcccaaatgtgaccacacgtgggatccagctagccacagcacagttgccatgtcttcaactcatggactgtggaatgagcctatgtgctaatgtgaagaatgaaaaagagggtccatattttggtgaaatcaatggaggtattagaattattcgaaaactgtccatcttaaagaggcaacctattcaccaaaagcttattataaagcatgggaatttgaagaagctcagcctgtggggctgttctgcattagatgctctatatctaaattgtccagagttaaatgatctcaatcttaactcttgcacaaatctacatccagaacgtctgcttcttcagtgcccaaatttaaagaatgtctatgcatccggatgccaagatatgttgattggagcaatcagaaatcaggtattcccaaagttttgctag

SEQ ID NO: 95520 - DNA, 542 bp, Zea Mays
agattttgaacataacaataggtcagcgccaggttatacatcagctcgacaatctgaccaatctgcttcatgagcatttggtcttaacacgccaggctaataataccgccagcaggaaccgggtgctagatagcgacacgctcatctgtccacttatttgtttgactgttgccagtattggttacttcatgtttaaaggtctcagtaggggctaaccaaagtgagttggcccaaacatgtgctccgaggctcaccctcaagttttggcagaactggagctaaaggaagacagttctcgaaccgtttacatcaggaagatcatatctaatagcttacggtcttattaagacaggtaaacccatataccagcacatggaacaaagctttcccttttcagggagttattactcccaaacgcagaaaatggtgtaccagaagcatacacttctgtaacaggcactggcagttcccagtgccaataaattttggaggttaaaataatgctcagataatgtcgaagaaattatgagagatctataagt

SEQ ID NO: 95521 - DNA, 306 bp, Zea Mays
atgctgctcccaccgctccggtcgcggcgtggccgacgcgcggcctccgcttgcgaggtgagggcgggcctgcacgggctcgactccgtcggtgggccccaccttcaggccgcgctggagcacgccgaggcggcgctatacacactcgctgacgccgcggacgccgccgtgggcgcgggggccgacgcaggccaggctgtggcggtccaaaagaacagcggctggttcggcttcatctccgaggccctcgaggtcatgctcaagaaatctgaatgtgacaagactcctgaagctgtcaatctttaa

SEQ ID NO: 95522 - DNA, 2346 bp, Zea Mays
gcgagccaggggagagaggcagcatcggtcccgcgccaactggccagtctggctggccgcagccctagtggctagtgcagtaccgcctccgggaccgcgacccgggggaattggttccacttccacccatccccgtgtgtttccgattccccccgttcgggagcagagcatccgcgcgcgatggccaaagatggtggcttcgccaaggcgctgctgctccacgtcgccgcgctgtcgacggccggcgccttcgcggccgccgctgccgccctggcgcggcgccggctgtggggaggagacaggcggaagaagcagctgccggcgccggccatggccgagatgccccggctccagctggcggagtccggccgcctggagtacctcgagaagttctcgcactacgtggctaggcagctgggtttccaggacgtgagcgagtgcccacagctctgcaggctggcgaacaactacctcagcagcagcaagacatgcatggaggacatctacgggttcttcgccggcgccaaggacgacgccgccgagtgcctgctttatgtcaagctcatagaggagctggacagatgcatcctcggatattttgcgttccactgggaccatgccacctacctcatcacctcggccttgaccgcggacaccggcagcaaaaggaagctcaggaacatggtcttggaagcaacaaggaagcagcgtttcgagcgcgtgacgcgtgacctgaaggtgacgcgggtgttctcgacgctggtggaggagatgaaggcgatcggcatcatagcggcgggcggcgaggcgtcgcagtgcacggacgtgatggcccccgtggcgcactcggagcgcagcccggtgctgctgctgatgggcggcgggatgggcgccggcaagagcacggtgctcaaggagctgaagcaggaggcgttctggaccaacgcggaggccaacgccgtggtggtggaggcggacgcgttcaaggaggcggacgtcatctaccgcgccatcagctccatgggccaccacaacgacatgctccagacggcagagctggtccaccagtcgtcgacggacgcggcgtcgtcgctgctggtgacggcgctgaacgaggggcgggacgtcatcctggacggcacgctgtcctgggagcccttcgtggagcagaccatcgccatggcgcgcgccgtgcaccgccagcgctaccgcatgggcgtcggctacaaggtggccgacgacggcaccgtcaccgagaactactgggagcccgcgagcgacgacgccaccgagcaacccccgcggaggccctaccgcatcgaggtggtcggggtcgtctgcgacgcctacctcgccgtggcgaggggcatccggagggccatcatcacccggcgggccgtcagggtcaggtcccagctgcagtcgcacaagcgcttcgccgccgcgttccagcggtacagccgcctcgtggacggcgccaggctctacagcaccaactccatgggctccgccaagctcatcgcgtggaaggacgggatcggaaacagcctgctggtggagccccgggagttcgactgcctggagaaggtgagcgggctcaacgagcacgccacctccgtccacgacctctaccccgacggcaccaccacctgcggatcgcgctccatctgggaggacatgatcgtctccacggcccgtgccgacacccagcgcgagctcagggaggccatccgctccgtcgagtccggcggcgggcagccggacacaccaccaacaacgccccagcgcgagctcctgggcttcatccgctccctggaggccgccaacgccgagccagctgcagttgacaatggtctctaaattttaaaccataagatttaagaatcgaatcagataatcggaccatatttctatttatttttgaaaccaacatttaattgagactattttattttgtgaaaaagtatttggatcgtgatccattaccacccttagctgcagcaggtcagacaccgacaactacctcttagctagtgctggaaaaatacgggacatgctttttggtcagcacaaacacaacccaaaaacaataggttaaagcacggaccgacacgaaataatatggaccgagttagtacggtccgaaggcgggcctaaaccgagcctcaaattctggcccgtcgagccccggcacagcccacacagataggttgggcttgagccggcacggtctgatgaaactcatgtgtttaattttatttaatttagtaagtgatagactttatattgttatggtatttagagtttatgtggtcaaataatgatgtgattgtttaacatctttaa

SEQ ID NO: 95523 - DNA, 965 bp, Zea Mays
gcgagccaggggagagaggcagcatcggtcccgcgccaactggccagtctggctggccgcagccctagtggctagtgcagtaccgcctccgggaccgcgacccgggggaattggttccacttccacccatccccgtgtgtttccgattccccccgttcgggagcagagcatccgcgcgcgatggccaaagatggtggcttcgccaaggcgctgctgctccacgtcgccgcgctgtcgacggccggcgccttcgcggccgccgctgccgccctggcgcggcgccggctgtggggaggagacaggcggaagaagcagctgccggcgccggccatggccgagatgccccggctccagctggcggagtccggccgcctggagtacctcgagaagttctcgcactacgtggctaggcagctgggtttccaggacgtgagcgagtgcccacagctctgcaggctggcgaacaactacctcagcagcagcaagacatgcatggaggacatctacgggttcttcgccggcgccaaggacgacgccgccgagtgcctgctttatgtcaagctcatagaggagctggacagatgcatcctcggatattttgcgttccactgggaccatgccacctacctcatcacctcggccttgaccgcggacaccggcagcaaaaggaagctcaggaacatggtcttggaagcaacaaggtgaggccagcatgaatgcagctccattcctatatttttttgtttatttctcttctctatatatttttctctttatctgagagcacagctatgcacgcgcgcggtacaagcagaggataattgcaacaaaaaaaaagtattctttacaaataattggacaaaggcgtattagttatgtcatagtattcatctacgtacgtggagtgtttgtacgtgtaaaccaaaatttgttaagtattaggcaaccaaattgtcattgttcca

SEQ ID NO: 95524 - DNA, 411 bp, Zea Mays
aactgaagttgcactttgaggagagacgagatcatgaggaagcaatactcccctgtgctctccttgtgcctgatggcccttgtcgtagctgctatggtctgtgtcatgtacaccacctcggcacaagcaggaaggagtggatacaactctgttccaataaacggcggtggcagcccctagccaggcggtggagcctgtatcagaaatcaaaaaaatataaaggctcatcggatgaaaactgtgtgtgtattctgtcatgtcatgtgtgttggtatatgatggcttggtcgtcgtaattaatgtaatgtgtggacaataaatatgcggggttgcacctcaacgtaactctagtacttgctattgcgatatatatgtactttattattattattattatatgtgttagaagtc

SEQ ID NO: 95525 - DNA, 444 bp, Zea Mays
aactgaagttgcactttgaggagagacgagatcatgaggaagcaatactcccctgtgctctccttgtgcctgatggcccttgtcgtagctgctatggtctgtgtcatgtacaccacctcggcacaagcaggaaggagtggctacaactcgtacgaacctgatggaaggagtggatacaactctgttccaataaacggcggtggcagcccctagccaggcggtggagcctgtatcagaaatcaaaaaaatataaaggctcatcggatgaaaactgtgtgtgtattctgtcatgtcatgtgtgttggtatatgatggcttggtcgtcgtaattaatgtaatgtgtggacaataaatatgcggggttgcacctcaacgtaactctagtacttgctattgcgatatatatgtactttattattattattattatatgtgttagaagtc

SEQ ID NO: 95526 - DNA, 833 bp, Zea Mays
aactgaagttgcactttgaggagagacgagatcatgaggaagcaatactcccctgtgctctccttgtgcctgatggcccttgtcgtagctgctatggtctgtgtcatgtacaccacctcggcacaagcaggtaaggtcgtgtttggaagtgtagttacagttttgaaacaatattatggtatttagtgatactatagtattgtaactcaaaagatgtttgttttgtacaggtaaaacatagttttaaatactatggtttacctaaaaccattatatttttggaattttcgaaactccactcatcattttaatgttcttttcttctctttacaaatactttgtttttctaatagaaccaaacagatctcggttttgagtaatactgtagttttatatatgcatgcgtgtttcatacgtacgtggtagctacagtttacgtctaattacccaatcgtctttaccttcttcaccacaggaaggagtggctacaactcgtacgaacctgatggtaagtaagaagacccttgtcatgtaattaacctcgctcgtgatgaggatcagtttaaccgcgtacatatttatacgctgattaatatttgtgcgttacgtattcaggaaggagtggatacaactctgttccaataaacggcggtggcagcccctagccaggcggtggagcctgtatcagaaatcaaaaaaatataaaggctcatcggatgaaaactgtgtgtgtattctgtcatgtcatgtgtgttggtatatgatggcttggtcgtcgtaattaatgtaatgtgtggacaataaatatgcggggttgcacctcaacgtaactc

SEQ ID NO: 95527 - DNA, 1696 bp, Zea Mays
cagcccacagggaggaggcctgcaactgcaacggtccagccgcacccgcgctcggcatacggcgcctctcggcctacgttctccgtgggccgtggcggcgtgccgcccatccgccctctgccctcgccccacccggccacccgtcgacgacggtcctccgccctcgccccacccgtcgacgacctcgtctcctccgtgcgcgggcctcggctagctcctgcttggcgctgggtagcgggctcgtcggtgctgggtagcgggctcgtcggtgctgtgcagatccacccgcgccccgccttgttctgtgctgccgcttggcgctgcgtcactgaccaagtgcgtgcctgccagccgaccgacggccagcaccacatttcgcagagccgttggtgctctctcttggctgtcagcaccagaagcacagcgcagagtcgccccagccccctgcgcctgctgcatagtctgccactgcccctcagttgttgtggtggccaagggacgaatcactctctcattctcaatgtggcacagtttcttttcgatgcaccggatagcctctcgctcgggtttgcttggtaggagatgttacagctatgccatgaaagggggcacttcgatcgccggagtaggcgacatcattgctgtcgcatcagggaaaggaggcgtaggcaaatccaccactgcagttaacattgctgtagcacttgccaaggagtttaagcttcaggttggtttgctagatgctgacatatatgggccatccattcctacaatgatgaacctccatgctaagcctgaagtaaatgaagacatgaagatgattccagttgagaaccatggtgtgcgatgcatgtccattggttttcttgtagacaatgatgcaccaattgtttggagaggtcctatggtaatgagtgctcttgagaagatgacaaggggagttgcttggggggaccttgatattcttgttgttgatatgcccccaggcactggcgatgctcaactatcgatgtcccaaaggcttcggttatctggtgctttaattgtttcaactcctcaagatattgctcttattgatgctagaagaggagccaacatgttccgcaaagttcaagttcctattctgggattggtagagaatatgagttgttttaagtgcccaaaatgtggtgagaaatcttacatcttcggggaaggtggagcgcagagaactgcagaggaaatggacatgaaattacttggtgatgtacctcttgaaatcagcatcagaacaggttcagatgaaggcagccctatcgttatatcatcacccaactctgcatcagcacaagcgtacgtaaatgttgctgagaaggtgactcaaaggctcaatgagctagcagaggagcggcgtatgggcccagaaatcttactttgagacattcaagccacttttctacacaccttctcctgtttgacggtacggcgcaacaaaaaaaaaatgcactgataaatagtgttgttggaagtaaacttcaagttttatcagttgggttggaaattttactcgaataaaacctctgctgccaaccttgtctttgtcacgcatgtccattatctagtattctagtctctgcattttttcatgactcattgagtgataattatatactagtgattggcatggctctgctccatcccagagcagttctactct

SEQ ID NO: 95528 - DNA, 2095 bp, Zea Mays
cagcccacagggaggaggcctgcaactgcaacggtccagccgcacccgcgctcggcatacggcgcctctcggcctacgttctccgtgggccgtggcggcgtgccgcccatccgccctctgccctcgccccacccggccacccgtcgacgacggtcctccgccctcgccccacccgtcgacgacctcgtctcctccgtgcgcgggcctcggctagctcctgcttggcgctgggtagcgggctcgtcggtgctgggtagcgggctcgtcggtgctgtgcagatccacccgcgccccgccttgttctgtgctgccgcttggcgctgcgtcactgaccaagtgcgtgcctgccagccgaccgacggccagcaccacatttcgcagagccgttggtgctctctcttggctgtcagcaccagaagcacagcgcagagtcgccccagccccctgcgcctgctgcatagtctgccactgcccctcagttgttgtggtggccaagggacgaatcactctctcattctcaatgtggcacagtttcttttcgatgcaccggatagcctctcgctcgggtttgcttggtaggagatgttacagctatgccatgaaagggggcacttcgatcgccggagtaggcgacatcattgctgtcgcatcagggaaaggaggcgtaggcaaatccaccactgcagttaacattgctgtagcacttgccaaggagtttaagcttcaggttggtttgctagatgctgacatatatgggccatccattcctacaatgatgaacctccatgctaagcctgaagtaaatgaagacatgaagatgattccagttgagaaccatggtgtgcgatgcatgtccattggttttcttgtagacaatgatgcaccaattgtttggagaggtcctatggtaatgagtgctcttgagaagatgacaaggggagttgcttggggggaccttgatattcttgttgttgatatgcccccaggcactggcgatgctcaactatcgatgtcccaaaggcttcggttatctggtgctttaattgtttcaactcctcaagatattgctcttattgatgctagaagaggagccaacatgttccgcaaagttcaagttcctgtacagtctgtttaacttattctatcttttttctctccatagctgtttatctgcatcacattttaaatttctatttcaagttatagttcttcaggttattctcttaaatttgttttgttcttctagacttcttcagttactgttttgtaatcggttgcatgtcaaccctgaaataagggtatcacttatccaccttaagaatatgcgcatttcattttactgatgcaaaattcttcatgatgcctttcccatgctccagtaatatatctagttttcacatcacagctgagtattttggtttcacagattctgggattggtagagaatatgagttgttttaagtgcccaaaatgtggtgagaaatcttacatcttcggggaaggtggagcgcagagaactgcagaggaaatggacatgaaattacttggtgatgtgagtgaatcttgtgattgcaattggcaccaattcttaagttatgatgaatatgctcgaatgttttatatctgagaaaaggttgaatctttttcgagcattagacttcaatttctagatatcatgaatgtgagacgtagagaacactctgtcagtaatgaacaccccaaatttggttttactgcagatggatgattgacatatcggttttctatgtttatacatgtccttatgatcttatgctacacagcggttgtttttcttcaataggtacctcttgaaatcagcatcagaacaggttcagatgaaggcagccctatcgttatatcatcacccaactctgcatcagcacaagcgtacgtaaatgttgctgagaaggtgactcaaaggctcaatgagctagcagaggagcggcgtatgggcccagaaatcttactttgagacattcaagccacttttctacacaccttctcctgtttgacggtacggcgcaacaaaaaaaaaatgcactgataaatagtgttgttggaagtaaacttcaag

SEQ ID NO: 95529 - DNA, 991 bp, Zea Mays
ttggttagcagaagagacggcggcggtaccatgttgcagtgcctggatggagtgaagcagctccttgccgtgctcctcaagtgctgccacatcgacctcaagcagcccaacggcctagatgatccggaggtgctcgctagggagaccgtgtttagcgtgagcgaggtcgaggcattgtatgaactgttcaagaagatcagcagtgctgtgattgatgatgggctgatcaacaaggaggagtttcagctggcgctgttcaagactaataagaaggaaagtttgtttgctgatcgggtatttgacttatttgatacaaaacacaatgggattcttggatttgaagaatttgctcgggcgctctcagtatttcatcccaatgctcccttggatgagaagatcgagttttcattccaactttatgacctcaagcaacaaggcttcattgaaagacaggagacttttgaggaggcagacacaaagcatgatgggaaaattgacaaagaagaatggcgcaatttagtagtgaggcatccctctttattgaagaacatgacactacaatatctcaaggacatcaccactacatttccgagctttgtcttccattctcaggtcgatgatacctgaatttctgaaaactaatgaatgtcagaaggtggactgcttgctttgctaagcaaactttcagtgcctgtttgatggttcaaaaatctcatcgtcctgaaggcatcaaatcatcgtttgttgttaataatctttttccttgttttttatttggaattcttgctggatcctgtgtgaatcctcttctattttccctctcaattgttcctttattctatttcggttttgatggccagtacttgagtcagttaatgtgtacaaagttgcgtctgatgctgcccgtcattgaattgtatggcatgtgaggaagatttaaattgtatattcaacttttgtggtcatgatagttgcacatatttttaccatc

SEQ ID NO: 95530 - DNA, 1072 bp, Zea Mays
ttggttagcagaagagacggcggcggtaccatgttgcagtgcctggatggagtgaagcagctccttgccgtgctcctcaagtgctgccacatcgacctcaagcagcccaacggcctagatgatccggaggtgctcgctagggagaccgtgtttagcgtgagcgaggtcgaggcattgtatgaactgttcaagaagatcagcagtgctgtgattgatgatgggctgatcaacaaggaggagtttcagctggcgctgttcaagactaataagaaggaaagtttgtttgctgatcgggtatttgacttatttgatacaaaacacaatgggattcttggatttgaagaatttgctcgggcgctctcagtatttcatcccaatgctcccttggatgagaagatcgagttttcattccaactttatgacctcaagcaacaaggcttcattgaaagacaggaggtaaagcaaatggttgttgctacacttgcggagtcaggaatgaatcttttagatgaggtcatagagagcatcattgataagacttttgaggaggcagacacaaagcatgatgggaaaattgacaaagaagaatggcgcaatttagtagtgaggcatccctctttattgaagaacatgacactacaatatctcaaggacatcaccactacatttccgagctttgtcttccattctcaggtcgatgatacctgaatttctgaaaactaatgaatgtcagaaggtggactgcttgctttgctaagcaaactttcagtgcctgtttgatggttcaaaaatctcatcgtcctgaaggcatcaaatcatcgtttgttgttaataatctttttccttgttttttatttggaattcttgctggatcctgtgtgaatcctcttctattttccctctcaattgttcctttattctatttcggttttgatggccagtacttgagtcagttaatgtgtacaaagttgcgtctgatgctgcccgtcattgaattgtatggcatgtgaggaagatttaaattgtatattcaacttttgtggtcatgatagttgcacatatttttaccatc

SEQ ID NO: 95531 - DNA, 2355 bp, Zea Mays
gctgaatccgtaggctccgaattggagctggaagtgtagtgatttcctgattggggacataaggtggggtttgtccctactccccagtgagctccacgcggtccctgctgttcttccagtcaaaattctgtacccttcggtgctggggtcaaggaactaggcgtgttgtcctgcgcaggaagaaggatattgtccctctccaaaactataaacatgggttggttgagtaaaatatttaaaggtccagtaaatagagtttcaagaggacactacaacgggaactcccatgaaggctattcagctcagcacactaaatcatatggtgtgcatggcaatgaggacgaagacatggatcatgctattgcattatccttatcagaggaagatcaaaggaagggaaagaccattgataccgggcatcatttagatgaagatgaacagattgcacaggctctgcaagaaagtatgaatgatggtcctcttcgaatattcattcagataattgttcattaatttcacgttatgactgcaaagtcaaataagcaaccaaaatttcatttcatctcttattgccaactaaataatgcttatgcatgccttgaccgcatatgcaaattcagggactaaatatggagttctcaagttcagggccaaacatagcacaactttattagacagggtgttcctgtaatattaaatttgattctttaatacttaccaaagaattgtaaataacagttcttgtctaacaaatgagtactgctagtcagaaccatgaactttaatgctttgtcttataataatgaaccagatattggtcataacctagctgaagacgaacagcttgcacgggctctgcaagaaagtatgaatgatggacctcctcgtcagcacattccagttgaagatgttaactcagaaagtactccagcaagcatcttgccctcaaatattttccgcacaagtggcttgagggtttgtgctggatgcagaagtccaattggccgcggtcggtttctcagttgtatggactctgtttggcatcccgagtgcttcaggtgttatgcttgtgatagaccaatatcagagtatgagtttgctgttcatgaaaaccatgcctaccacaggccctgctacaaggagcgtttccatcctaaatgtgatgtttgcagtagctttattcccacagataaaaatggcctcattgaataccgggcccatcctttttggatgcagaagtattgtccttcccatgaaaatgatggtacacctaggtgctgcagttgtgaacgaatggagccaaaggacagtcaatacataacattagatgatggccggagactctgcttggagtgtctgcatactgctattatggagaccaatgaatgccagccactgtacattgatattcaagaattttatgagggtatgaacatgaaagtagagcaacaagttcccttgcttttggttgagcgacaagctttaaatgaagccatggaagcagagaaatctgtgcaccaccttcctgaaacaagaggcctctgcctatctgaggagcagattgtcagaactatattgaaaggaccaattggaccaggcaacagaatcatagatatggtcacaggaccatacaaactcattagacggtgtgaagtgactgcaattcttatactgtacgggctgccaaggctgctaactggctcgattctggctcatgagatgatgcatgcttacctccgacttaaaggataccgaaccctgagtccagaggttgaagaaggcatctgtcaggttctagctcatctttggcttgagtcagaaatcacatcaggttctggtagcatgtcaaccacctcagatgcgtcatcgtcatcttcaacatcttcatcatcgaaaaagggcgcaaagacggaatttgaaaaaagactcggggagttcttcaagtaccaaattgaaacagattcttctgtcgcttatggagatgggtttcgagcaggcatgcgagccattgagcggtacggcttgagaagcacccttgatcatatcaagatgacggggtcttttccatgctgaagctggtttttttttacctcggcttggatatgggtatacatattttttttggagaacttttggttcaggttatacatacgaaaagccgaacttctgtgtcgagaagaggcataaggatttagctatactgtccattgcaggaaaaaaaactgtttcccttttcaattataaaatttcacagtgcagacatgaaggtatgtggtctttagcttggccaaccttgtggaatgctgtcacttgatgcaaaagaaatttcgaatacatatgctttgctgtgcttga

SEQ ID NO: 95532 - DNA, 1629 bp, Zea Mays
aacaatcaaaaatccagctggccccaaatggctggttcttggctactccacctgtcgccgtttcgtagcgctttgaaaattttcccttctcaagagcacatgggaaacagtacacatgaacgctcaaaagccgcagagaaatttcggaggccagtagtattcgtatcgaaatccgataggtcctctctgtggctgaaacctggaagtaaccctcgaccgttcgaacacaacacagctgtataaaaaaaaagggctcctttgctatctcctccacgctagatcgatgatcaggaacgtacaaagggttcagttcagttttcagtgagtcggcatatgggcaactgcagcagcagcagcggcttcttctctcttccgaaacggggaagcaagctactcaaactcaacaatggcatggtctcggtcgacgatgagggtgggactcacgaagggataaagaccattccggtgcagagagcctgcgagttcaccacgaactccgtgctctgcgtctgcatcgtcacttggaacatgaacagcaagatgtccgcggaagatgtggcgaagctggtgagctccgacaggaagttcgatctgctggtcgtcgggctgcaggaggcgccgaagccagacgtttcaagggtcctgcaggaggcgttggcggggacacacgtgctgttgggtcagaagagcatgcagtctctccggatgcttcttttcggttcaaggagctcggagaagtacatcagagagatgaaggtggacaaacacgcggttgggggttgcgggggtatcatcgggaggaagaaaggagcggtggccatgtacatcaacttcagcgggatccggatggtcttcgtgtcctgccatcttgcagctcacgagcacaaggtggagaagaggaacgcggagttccagcacatctcgcagtcgctcttcgccaggtacggcgcgccgacgccgtacgcgcagtctgccgacataacggtgtggctgggcgacctcaactacaggctccaagggataagctcgacaccggcgaggaagatgatcgaggagaaccgccagagcaagctaagaggcagagaccagctgctgcaagaggccgagaagggccaggtgttcagcggctactgcgaggggacgctgtcgtttaagcccacgtacaagtacgacgtcgggggcagcgtctacgacaccagctacaaggtacgagtgccttcgtggacggacaggatactgttcaaggttggccagtcttcaggcctggatgcagtgctgagctcgtacgaatcactcgactgtgtccggagctccgaccacaagcctgtgaaggcgcatctctgtctcaaagtacgcagtgatggtgatgctgactgatatccagtactggcggttacttctgccgattaacatgacatgctacgatgaaaatgttctagtttggaatggtgattatactctagtatattttataacatggcgctcgatcttagcttgtgggccaattgtttcagaacgtgccattctttcttattctattttctccccttttgtttctccttgtacaactatggctatctatactacttattaaggctctaagggtagcctgccttttttcgttctgcc

SEQ ID NO: 95533 - DNA, 1611 bp, Zea Mays
aacaatcaaaaatccagctggccccaaatggctggttcttggctactccacctgtcgccgtttcgtagcgctttgaaaattttcccttctcaagagcacatgggaaacagtacacatgaacgctcaaaagccgcagagaaatttcggaggccagtagtattcgtatcgaaatccgataggtcctctctgtggctgaaacctggaagtaaccctcgaccgttcgaacacaacacagctgtataaaaaaaaagggctcctttgctatctcctccacgctagatcgatgatcaggaacgtacaaagggttcagttcagttttcagtgagtcggcatatgggcaactgcagcagcagcagcggcttcttctctcttccgaaacggggaagcaagctactcaaactcaacaatggcatggtctcggtcgacgatgagggtgggactcacgaagggataaagaccattccggtgcagagagcctgcgagttcaccacgaactccgtgctctgcgtctgcatcgtcacttggaacatgaacagcaagatgtccgcggaagatgtggcgaagctggtgagctccgacaggaagttcgatctgctggtcgtcgggctgcaggaggcgccgaagccagacgtttcaagggtcctgcaggaggcgttggcggggacacacgtgctgttgggtcagaagagcatgcagtctctccggatgcttcttttcggttcaaggagctcggagaagtacatcagagagatgaaggtggacaaacacgcggttgggggttgcgggggtatcatcgggaggaagaaaggagcggtggccatgtacatcaacttcagcgggatccggatggtcttcgtgtcctgccatcttgcagctcacgagcacaaggtggagaagaggaacgcggagttccagcacatctcgcagtcgctcttcgccaggtacggcgcgccgacgccgtacgcgcagtctgccgacataacggtgtggctgggcgacctcaactacaggctccaagggataagctcgacaccggcgaggaagatgatcgaggagaaccgccagagcctaagaggcagagaccagctgctgcaagaggccgagaagggccaggtgttcagcggctactgcgaggggacgctgtcgtttaagcccacgtacaagtacgacgtcgggggcagcgtctacgacaccagctacaaggtacgagtgccttcgtggacggacaggatactgttcaaggttggccagtcttcaggcctggatgcagtgctgagctcgtacgaatcactcgactgtgtccggagctccgaccacaagcctgtgaaggcgcatctctgtctcaaagtacgcagtgatggtgatgctgactgatatccagtactggcggttacttctgccgattaacatgacatgctacgatgaaaatgttctagtttggaatggtgattatactctagtatattttataacatggcgctcgatcttagcttgtgggccaattgtttcagaacgtgccattctttcttattctattttctccccttttgtttctccttgtacaactatggctatctatactacttattaaggctctaagggtagcctgcc

SEQ ID NO: 95534 - DNA, 711 bp, Zea Mays
caacccatttgggtcggaggcccattcgtctccgaaatccagagtgggacctgagcgtaaatagaacccgagcccctctccgcctccctccccgccgcacagcctccacagcccgaaaccctcgccgccgatcggtttcggagaagagaagcaaatcaagatgtttctcggctcgctcccgcggcgcccgagcaaggaggctgcgtacaagcagctgcggtcgcacatcatcatcatggcctcctgcgccgccgtcatccgcgccaccccttacatcctccatttcctcgcccgcgacggcgacatccaggaactcaagctcgatctgtaggcccgtccgttgcttccccacctccagaggtgctacaaaggcaaccgttagttcgaggccactgcaaggtactatggagttagtggctacagtgcctgcttaagtttctttgttgttccaagtttagtgacaaaactgacaatggtgtagcaactgggttgtgctgcgaccagtatttcgtttttgcctacctgtatggtctagtctttgtttgcactggtggatttgcagagatgttatcattcaacaatgttctgtggtcagttgcaattgtccttatgctctgtgaataatgcttggactgccgactgtgtatgatttggtttcggcttgaactttgttgtgtgtcaagctattcctaggcgatgcttgattatatc

SEQ ID NO: 95535 - DNA, 983 bp, Zea Mays
gctaatcagaatgtggaaacagatgctggaatgtcaccacaaacagttcatcacgatcacattagcataccacgtgaaagactcgacctcggcgcgtcaaggtgagcaccaccatcaccgccaggcagcgatgcatctgtggaatgagatggacaacttctcctccagcttcagaaactgggtcaccgctcacaaatcgtacgtcgaggctctcaacgcgtggctccagaagtgcgtcctgcagccgccccaggaccagtgcaggcgcacacgcaaggtctccttccctcctcggcaggtcgtctcccctcccatattcatccttttgcggggactggcttgccaggacaaaacctctccctgctaacgagctatgcagatccctcaaagacgtgatgcagctcctccgcggctcgttcgagcactgcggcaagcaaaacaggcccagaagcggtgagtagcgagagtgcgggatgctggagaacagtagcgagcaggaggcggcagctgagtgggagttgtgcagcatcagctgaagggctgcagtcgagactgtcggcggttcttgaccgcctgacaaagttcttggaggcatcactgaagtgctacgaggagctcaagcagaactacgagatggcctatgctgattataggagagttggaccaaatgctcggcttgcttaggattgatgttggttgtggtgtgtgacttcttgatatctctgttctggatgacaaattctctagtgttttggtatatattttgtgaacaatcaggtgatagcacaatctttggccgaatattactgatcgaagggaactactccagtgactgcagggggaagctatattgagcaaaattacgtagaacagtaacctggtcgttaatgatggacgacagagagtaatctggaggcatgcagtggtggaattcatgaaattcattgaatgattgacctgtctgctatactaaccgcatcact

SEQ ID NO: 95536 - DNA, 2105 bp, Zea Mays
ctccaacctcgcaagctagctagctactaccactcatgcccgcctcctacgctctgctccctactcctcccctccctttcggctcccgatcccttcccgcgcgcgcacgtcgtccttcccgattcgctccgacgacccaccgccgtgccgtcggctggatatagctgcccgacccagagcgcgcgccattaaaacacctctttcctcctcgatcgcggccgtgccaagcgcatagaccagcacgtaccacacgtttacgtgaacgaccgaccggcgcattccatcgtccatgggcaaccgcaagaagctggtccacttcctccgcgtcgacccggcggcggcggcagcggcctccgccctctcctcccctacgtccttctcctccttctccgacgacgacggctacagctcctcctccttctcctcctcctcgccgtcgcggtacagcccgcccaagtcgccgtgggcgcgcctcccgggcctcggcggcgccgacgacgctgccgcgacaggcctcatcgcgtcgctcgtcaaggaggacggcaaggtctactcgctggcggcggccggggacgtgctgtacaccggcacggactcggagaacgtgcgtgtgtggcgggaccggcgcgagctcgcggggttccggaccggcagcggcctcgtcaaggccatcgtggtcgccgccgacggccgcatcttcacgggccaccaggacggcaaggtccgggtgtggcgcgccgacgccgccgaccccgccgtgcaccgccgcgtggggtcgctcccgccgctcggggacctcctggtcagctccgtcaacccgtccagctacgtgcgctcgccgcgcggcgggaggggccggggccggcgccgcgtcgccgtctggctccgccactcggacgccgtgtcgtccctcagcctcgacgagggcgccggcctgctctactcggcctcctgggaccgcaccttcaaggcgtggcgcgtgtcagactaccggtgcctcgagtccgtgcccgcgcacgacgacgccgtcaacacggtcgccgcggccgggttcggcggcctcgtgctcaccggctccgccgacgggaccgtcaaggtgtggcggcggcgggaggcggcggccgaccggacgagccacgtcctgcagagggtgctccgggagggcgacggcgcggtgaccgccatcgcggcgtgccccgaggcccgcgccgtgtacgtgggctcctccgacgggctggtcacgtgctggcggtgggggctggacgtggacgcccagccgacgcacgcgggcgtgctggccggacacgggatgggcgtgctgtgcctcgccgtgtccgggcgcgtcgtcgtcagcggctcggccgacgggacgctctgcgtgtggcgccgcgacgacgacgacgacgagcaaaagggacacgcccgcctcgccgtgctcgtggggcacacggggcccgtcaagtgcgtcgcagtggccgcggacgaggactgctacgacgcggacggcgagcggcggttcgtggtgtacagcggcagcctggacggatcggtcaaggtgtggcgtctgtcggaggagcgcgcgctggagccgcccgcggtagagacaacaacgcctccgttgatggcggcggcactgaggcagtcggagacatggatgccccgcccccgaacagcacagcttccgtcaccggtgcaaacgtgggcgccggagctgaagggcgtggcagctgcatgagcacgattgcacgaagaagctaccggtcgattagctgcacctgcactgcatgaggtcgtgcgcgtgtgcgtgcaagaatgtgccgccaacacgtgtgctgtaggagagtgtgtacatatacctagaacatacggataccgtatggtaactacgcctagctagtatgaattttgaggaggattaaatcaagtgtggagtgccggggttttttttcaaaaactaaaagaaaaaaatcaagtgtgtggtgatctgatacggccgggtggtttgatgaggataaaaacgagcggttggtctgatttgaaaacgagaggtgtcttctacaatgtcaaaatcaaattaatggacaaggaaaacgatttcgtgtttg

SEQ ID NO: 95537 - DNA, 107 bp, Zea Mays
ctaagataaagtgcaatatttgttcttatcattttaatattgtatcacttcgtccacttccggaccggcggtacttactcctggcaaccctctcggatcatgtatca

SEQ ID NO: 95538 - DNA, 2119 bp, Zea Mays
cttgcaagcaaattacccgccttctgccatctgacgttctagggtttggcggctcctctatcctttctccatccgctagcaggcgcgaggcgccccctccgaccgacactgaatcccgcctccaacctccgctcgaaacccataccttcggtctcctccgtctgtccgtcgcccatccggccgcctcttctcccaccagccgccgctgccgcacgttagctcctcctgcatcgtcgccggacctccgctacgcccccgtgcatccctgccttggcaggcaggatctggccacctttcgccggcaacagttgggcgccgcataggtaaccgcctacccccgaggcaaggcagtaccccgtcgcccagcgtataagcgcggaaggagggcgcggaatagcgccttttctaacactaatggcaacggcggcggcggatggcccccctgtggaaccgcagtctctgaagaagctgagcctccggtcgctcaagcggtccctggacctcttcgccccggcgcacgccctcctcttcacgcccgacgccgagagcaagcggattcgtactgggtgcaaggtgagtgcggagtacggtgcggtgaaggacctcacgccggagcaggggcgcggtgggcagggcaagggtcctgcgccgccatcttcaacagctttggcattgccaggaacacaagatacaaaagatgctcacggagaaggctctaggaatgccattgtccctgcaccacttatgctgccaaaagcacctgaatctaccatacctggcaaaaatacaactctgtcaattcctggatcatctgacagattttctacatccgcactgatggaaaggatacctagtagatggccacggcctacatggcatgctccttggaagaactatcgggtcatcagtggtcacttgggatgggttcgatctattgcatttgatccagcgaatgaatggttctgcactggttctgccgataggacaataaagatatgggatcttgcatcaggaaccctgaagcttacactgactggtcatattgagcaaattcgtggacttgctgtcagccaacgtcacacttatttattttctgctggtgatgacaaacaagtaaaatgttgggatcttgaacaaaacaaggttattaggtcctaccatgggcatctgagtggtgtttactgcctagctctccatccaacaattgatatcttactgactggtggccgggattcagtttgcagggtgtgggacatcagaacaaaagcacatgtttctgctttaacagggcatgacaacactgtctgttcagtgtttgctcgtcctacggatcctcaagttgttactggttcacatgatacaactattaaattctgggatcttgtagctgggaggactatgtgtacccttactcaccataaaaagtctgtccgagctatggcgcttcatccaaaggagaaagcatttgcatcagcatcagcagacaacgtaaagaagtttaaccttcccaaaggcgaatttctgcacaacatgctgtcgcagcagaaaacaataatcaattcaatggctgtaaatgaggatggtgtcttggcaactggaggggataatggaagcctgtggttttgggactggaagagtggtcataactttcaacaagatcagactatagtccagcctggatcactggagagtgaggcatgcatatatgccctctcatatgacgtgagcggatcaaggcttgtgagctgtgaggcggataagactataaagatgtggaaagaggacttgacagcgacgccagagactcatcccatcaatttcaagcccccaaaggacatccgaagatattgatgctcaaatcccacaagtagcaagctagtggatggttggagcctccacaattgtgtgacccaaactcgcttcttccctgagcccaattgaaattttgctagggtttgctctattgtgtaatctgatgcatgtactccaccagtctgatgccttggtccaacgctttgaaacccttagactgtttctttgtgatctttgcgttcgatttgattatatcctaccttagtaccttggactcttgcactaataggtctttaacatgtcttct

SEQ ID NO: 95539 - DNA, 2159 bp, Zea Mays
cttgcaagcaaattacccgccttctgccatctgacgttctagggtttggcggctcctctatcctttctccatccgctagcaggcgcgaggcgccccctccgaccgacactgaatcccgcctccaacctccgctcgaaacccataccttcggtctcctccgtctgtccgtcgcccatccggccgcctcttctcccaccagccgccgctgccgcacgttagctcctcctgcatcgtcgccggacctccgctacgcccccgtgcatccctgccttggcaggcaggatctggccacctttcgccggcaacagttgggcgccgcataggtaaccgcctacccccgaggcaaggcagtaccccgtcgcccagcgtataagcgcggaaggagggcgcggaatagcgccttttctaacactaatggcaacggcggcggcggatggcccccctgtggaaccgcagtctctgaagaagctgagcctccggtcgctcaagcggtccctggacctcttcgccccggcgcacgccctcctcttcacgcccgacgccgagagcaagcggattcgtactgggtgcaaggtgagtgcggagtacggtgcggtgaaggacctcacgccggagcaggggcgcggtgggcagggcaagggtcctgcgccgccatcttcaacagctttggcattgccaggaacacaagatacaaaagatgctcacggagaaggctctaggaatgccattgtccctgcaccacttatgctgccaaaagcacctgaatctaccatacctggcaaaaatacaactctgtcaattcctggatcatctgacagattttctacatccgcactgatggaaaggatacctagtagatggccacggcctacatggcatgctccttggaagaactatcgggtcatcagtggtcacttgggatgggttcgatctattgcatttgatccagcgaatgaatggttctgcactggttctgccgataggacaataaagatatgggatcttgcatcaggaaccctgaagcttacactgactggtcatattgagcaaattcgtggacttgctgtcagccaacgtcacacttatttattttctgctggtgatgacaaacaagtaaaatgttgggatcttgaacaaaacaaggttattaggtcctaccatgggcatctgagtggtgtttactgcctagctctccatccaacaattgatatcttactgactggtggccgggattcagtttgcagggtgtgggacatcagaacaaaagcacatgtttctgctttaacagggcatgacaacactgtctgttcagtgtttgctcgtcctacggatcctcaagttgttactggttcacatgatacaactattaaattctgggatcttgtagctgggaggactatgtgtacccttactcaccataaaaagtctgtccgagctatggcgcttcatccaaaggagtaattttttattcatgatttgattttcaatattgactacaatgttatggacccttatatagcaacccttttttcaggaaagcatttgcatcagcatcagcagacaacgtaaagaagtttaaccttcccaaaggcgaatttctgcacaacatgctgtcgcagcagaaaacaataatcaattcaatggctgtaaatgaggatggtgtcttggcaactggaggggataatggaagcctgtggttttgggactggaagagtggtcataactttcaacaagatcagactatagtccagcctggatcactggagagtgaggcatgcatatatgccctctcatatgacgtgagcggatcaaggcttgtgagctgtgaggcggataagactataaagatgtggaaagaggacttgacagcgacgccagagactcatcccatcaatttcaagcccccaaaggacatccgaagatattgatgctcaaatcccacaagtagcaagctagtggatggttggagcctccacaattgtgtgacccaaactcgcttcttccctgagcccaattgaaattttgctagggtttgctctattgtgtaatctgatgcatgtactccaccagtctgatgccttggtccaacgctttgaaacccttagactgtttctttgtgatctttgcgttcgatttgattatatcctaccttagtacct

SEQ ID NO: 95540 - DNA, 1692 bp, Zea Mays
caccaagatccattccctccccctcgagcaagaacaggcggcaagggctccatctgctgccaattcacaagtgcagcaggccagcagcagaagcttgttgttgcaatggctactactactgccgcagcccccgacctctcgctgcatatcagccctccctcgccgcccgatgatgctaggagcagtgacgtgctcttctccaagcagacgttgtgcctcggactcgttcagacgacgacggcggcggcgcatgatcaggatggccaatgcgacgacgtccagcagcagcagcggcagcgactgcaccagcagcctagccagatccagaggttcaagaaaacctcgtcatcgtcggcggcgttgttatctgccggaggaggcacgacgagatctgggaacggcaacagcgggggcgggaagaggagctccagagcgccgaggatgaggtggaccacggctcttcatgcacacttcgtccatgccgtagagctccttggcggccatgagagagcaacgccaaagtcagtgctggagctgatgaacgttaaggatctcacattggctcatgttaagagccacttgcagatgtatcgaacagtgaagggaacgacggcagacagatcatgtgctgcaggccatgtccagatgagagacatgggctttctgcacaggggttgtgaactgaatggcttcgaagcgtttagcaacggtacttctaatgctaccgccaataatagaatgcaggcagctgccgggtcgccggcagggaagcatgctgaggtagcctggttcttgcggccacccttggcacaccagagtagtggtggtggtggtggtggtggggcggtgccgcttccgctgccgctgccctgcccctacctcatgtctgcccaccacaaccgctacttgctctcacagaatcagggatggaggaccagaggcgcgcatcagcaagacgctgccgcccccccgccgctcgtcctaggccagcaggacagtgcgcggcgtctgcatccaggcttccccgacacggccatcagcagcagcagaccgtcatcctggagcgcaggcgtggcaagccgctggtcgtcgtcgacggcggcggcgccttcgccgtcaagtggcaggagtagcatcagcagcggcacggaacagccagcagcatgcagctggacgatgatgacgacgaacaagcagcagcagcagccgccgccgtcgacgtcatcatcatcaagggtcgtcgcggtaccgaacctggagatgagcctggggaggcaggggtggcaacacgacctgcaggatcatcatccgcagcagcagcagcagcagcgcagcggggagtccacggcgccaaaagagctgacccccggcctcctcaagtgcttgtgaaataataatgatagctaatacttgatcggctaataatcacttatataattccaccgtcgagatgagcttgcgagaggtgttcaaggcttggaagcaaattatcgaccgcgacgttagctagagacgacgttgtactcgtttggtgctaccggcttcacgtacgtagttgttttctactcctcccatctatatccattattagctatatatttagcttcattttctggtatatgcatgtaatttgagctgatgtggagacgacgactgttagaaataaacgagctacctttctcaatatatata

SEQ ID NO: 95541 - DNA, 1048 bp, Zea Mays
ctaaaaccctaaaccgcacaaaaccgcctacgccattccgctgtccgcaatccactccctcctcccacgaaactcttggccatggcttggcgcggcgccgcctcccgctcaatcttcgccgccgtccgtgcccgcgccgcatcctcctcctcctcctcagcggccacgcgcctccgctcggcggctccaattgccgccaccccgcgccgcaccgtccccgcctttgctttcgcggccgcgaggccgttggcggcgatggcggggtaccccgcggcggtcgcggtgaggctcaccgggcactcggcgacgagcgtgcgggcgtgctgtgagctctcccagggcacttgaatgcacacttttgtcttccaatgcaagggtaggatctctcgtcgggcttgcggcctttttcctgcattttgcagagtgcctcgtgtgtcggcaaacggacagtacacttgctgcaactaaaatataaacaagcctatgttagcctgctacgcagtacgcactgtgttcgtgcatgttttcatttgaccttgtttccatgatgcttcgacgtgttacgcgtgctcgtgcttcttgctgtgtcatcactggtccacattttcttgcggaaagtgttcctttgtacgagcttatgaaaccagtgtgcacaagcgacggacggatttgtaccatccagaacgatagtgatccgttttaccaactcctgaaaccagctgtgtaaagtgttccttcgtcgatgctgtgggcgctgacgaactccttccagcctactccgtcactgtctattgcctactccgacgctccatgcttcgccacttgggggcttcagactgatgacctttcgatgcggccgttgaaattgttggcaaatcttgcaggtatgctgtgcatcaaaagcattttttttgttcttctgtgacatgtttctccctttctttttacccgataataatcatgcttaagttcgtacaatgcgaatgcatgaggctagagaagtcgattcctgtaacacattcagtcgccattgtttcagtgaagtccc

SEQ ID NO: 95542 - DNA, 496 bp, Zea Mays
gcattagctcaatataattagttttataataaggttgatatgaggatttttgtggtctggatctattaggaaatgacgatgatgcatgatgcttgggaagcagttttaaagcatggaaaaggcacttgaatgcacacttttgtcttccaatgcaagggtaggatctctcgtcgggcttgcggcctttttcctgcattttgcagagtgcctcgtgtgtcggcaaacggacagtacacttgctgcaactaaaatataaacaagcctatgttagcctgctacgcagtacgcactgtgttcgtgcatgttttcatttgaccttgtttccatgatgcttcgacgtgttacgcgtgctcgtgcttcttgctgtgtcatcactggtccacattttcttgcggaaagtgttcctttgtacgagcttatgaaaccagtgtgcacaagcgacggacggatttgtaccatccagaacgatagtgatccgttttaccaactcctgaaa

SEQ ID NO: 95543 - DNA, 971 bp, Zea Mays
ctaaaaccctaaaccgcacaaaaccgcctacgccattccgctgtccgcaatccactccctcctcccacgaaactcttggccatggcttggcgcggcgccgcctcccgctcaatcttcgccgccgtccgtgcccgcgccgcatcctcctcctcctcctcagcggccacgcgcctccgctcggcggctccaattgccgccaccccgcgccgcaccgtccccgcctttgctttcgcggccgcgaggccgttggcggcgatggcggggtaccccgcggcggtcgcggtgaggctcaccgggcactcggcgacgagcgtgcgggcgtgctgtgagctctcccagggtaccctcttctgccgcacttgtcaggatcgttagcaagttagtgatcatgcatcatgatatgtcatcatcgtatgtactgtatatccgtgggcacctatggttgctcattttgtccaagatttgtaatccttatatttgttcaattcgtgttatgcaatgatcctatgcatgtgccttggtagcattgctcctgtttcatgggcagcagcctaagaattttgcagagttgaaccaggaatgggttgttgcttgaggcacttgaatgcacacttttgtcttccaatgcaagggtaggatctctcgtcgggcttgcggcctttttcctgcattttgcagagtgcctcgtgtgtcggcaaacggacagtacacttgctgcaactaaaatataaacaagcctatgttagcctgctacgcagtacgcactgtgttcgtgcatgttttcatttgaccttgtttccatgatgcttcgacgtgttacgcgtgctcgtgcttcttgctgtgtcatcactggtccacattttcttgcggaaagtgttcctttgtacgagcttatgaaaccagtgtgcacaagcgacggacggatttgtaccatccagaacgatagtgatccgttttaccaactcctgaaa

SEQ ID NO: 95544 - DNA, 784 bp, Zea Mays
ctaaaaccctaaaccgcacaaaaccgcctacgccattccgctgtccgcaatccactccctcctcccacgaaactcttggccatggcttggcgcggcgccgcctcccgctcaatcttcgccgccgtccgtgcccgcgccgcatcctcctcctcctcctcagcggccacgcgcctccgctcggcggctccaattgccgccaccccgcgccgcaccgtccccgcctttgctttcgcggccgcgaggccgttggcggcgatggcggggtaccccgcggcggtcgcggtgaggctcaccgggcactcggcgacgagcgtgcgggcgtgctgtgagctctcccagggccaaaatgggaaggatcggtgatgaagagattagacagaatgatttgtatcctattgtataaaatgatgcacttgaatgcacacttttgtcttccaatgcaagggtaggatctctcgtcgggcttgcggcctttttcctgcattttgcagagtgcctcgtgtgtcggcaaacggacagtacacttgctgcaactaaaatataaacaagcctatgttagcctgctacgcagtacgcactgtgttcgtgcatgttttcatttgaccttgtttccatgatgcttcgacgtgttacgcgtgctcgtgcttcttgctgtgtcatcactggtccacattttcttgcggaaagtgttcctttgtacgagcttatgaaaccagtgtgcacaagcgacggacggatttgtaccatccagaacgatagtgatccgttttaccaactcctgaaa

SEQ ID NO: 95545 - DNA, 767 bp, Zea Mays
ctaaaaccctaaaccgcacaaaaccgcctacgccattccgctgtccgcaatccactccctcctcccacgaaactcttggccatggcttggcgcggcgccgcctcccgctcaatcttcgccgccgtccgtgcccgcgccgcatcctcctcctcctcctcagcggccacgcgcctccgctcggcggctccaattgccgccaccccgcgccgcaccgtccccgcctttgctttcgcggccgcgaggccgttggcggcgatggcggggtaccccgcggcggtcgcggtgaggctcaccgggcactcggcgacgagcgtgcgggcgtgctgtgagctctcccagggaaatgacgatgatgcatgatgcttgggaagcagttttaaagcatggaaaaggcacttgaatgcacacttttgtcttccaatgcaagggtaggatctctcgtcgggcttgcggcctttttcctgcattttgcagagtgcctcgtgtgtcggcaaacggacagtacacttgctgcaactaaaatataaacaagcctatgttagcctgctacgcagtacgcactgtgttcgtgcatgttttcatttgaccttgtttccatgatgcttcgacgtgttacgcgtgctcgtgcttcttgctgtgtcatcactggtccacattttcttgcggaaagtgttcctttgtacgagcttatgaaaccagtgtgcacaagcgacggacggatttgtaccatccagaacgatagtgatccgttttaccaactcctgaaa

SEQ ID NO: 95546 - DNA, 753 bp, Zea Mays
ctaaaaccctaaaccgcacaaaaccgcctacgccattccgctgtccgcaatccactccctcctcccacgaaactcttggccatggcttggcgcggcgccgcctcccgctcaatcttcgccgccgtccgtgcccgcgccgcatcctcctcctcctcctcagcggccacgcgcctccgctcggcggctccaattgccgccaccccgcgccgcaccgtccccgcctttgctttcgcggccgcgaggccgttggcggcgatggcggggtaccccgcggcggtcgcggtgaggctcaccgggcactcggcgacgagcgtgcgggcgtgctgtgagctctcccagggtaccctcttctgccgcacttgtcaggatcgttagcaagcacttgaatgcacacttttgtcttccaatgcaagggtaggatctctcgtcgggcttgcggcctttttcctgcattttgcagagtgcctcgtgtgtcggcaaacggacagtacacttgctgcaactaaaatataaacaagcctatgttagcctgctacgcagtacgcactgtgttcgtgcatgttttcatttgaccttgtttccatgatgcttcgacgtgttacgcgtgctcgtgcttcttgctgtgtcatcactggtccacattttcttgcggaaagtgttcctttgtacgagcttatgaaaccagtgtgcacaagcgacggacggatttgtaccatccagaacgatagtgatccgttttaccaactcctgaaa

SEQ ID NO: 95547 - DNA, 1124 bp, Zea Mays
ttaaactaaactatgtattttcttgcatgcttatgtcatgtttctgattcagactgattggtgaaatgttttttatgataataattagaattagttcactgagtgttcaagtatctttcctggtgggtggtattgggtggaaatgggttggtgtggcacctgtgtaccaaaaatgtgcattattagtttattacctacctgtactaggagtcagttgattgtaagagaatttcagcatcatgacaatttggggaaatgggaaatctttctgcaagaaatgtatggggactatttttgctctcacatccatttgcagccatgaaaaaatcttcccttttttagttttctgagcaggccacactcagcagatggttaagcacacaatgtttctgttacagtgatttagataatgcttattagttctttacttatttttaattattattttgcccttctagactgttaaccttttgaccatttttaataatgtaactggtcaagtttgttgctcttgttcatgtttggtttcagctctagtgtaccccaactttcttggcagttggcactaaaaggctgtgttgttgattgtaacatctggatatatgctgacttccctacctgttgtttcttcattgactactaaccatagcagtttgttgtttgtcctttgtaaagttttttgagaactaatacaagaaaaaaattgggatttgataggccaaaatgggaaggatcggtgatgaagagattagacagaatgatttgtatcctattgtataaaatgatgtaggtccttttattttcctgtgtgttatctatcttaagaaattagaaggatataatatgcattatttgcgagtttgatagatttttgtttcattggattagtgtattctgagattttggcgtatatttgttttacttcttaacagtattcaatctttcgagataaaccgcttcaattgttttctaaacgacattagacaaaatatgctattttttagcgaaactgcaacatatatgctgcactgctgattttgatgatgtttgaagttttcccaaacgtgctattattttcaacaaatatgtacgcaactctaactataagttagcttcatagtctt

SEQ ID NO: 95548 - DNA, 1078 bp, Zea Mays
ctctcctctagcgctatgtctgcgttttcacctatcccgatccaccatgctgtcaccattaggctcaacaagaacaactacacgttgtggcgcgcccagctgctcccgtaccttcggagtaccaagctcatgggctttatcgatggatccatgccgccgccgcccaggcaggttccttcctccactgctgcgggcgtcgagctcgtgcctaacccgcctatggcgcgtggtatgatcaagatcagcagcttctcagtggtcttctttcctccatgaccgaagacattctccaagatgttgtggaggccaccacctctcaagaggcttgggatatcctcaagcggatgttctcctctgctatccgcgcacgtgctgtccaagtgcgcgttgatttggccaccacaaagaagcgcgatctctctgctgccgactattttcgcaagatcaaaagtctcgctgccgaattggctgccgctgatgcgcctcttcgtactgacgagatcattgcatacctcctgtcctggctggcttgccttcgtattacgatccgtttgttacttcaatcaccatgaagaccgagtccctcacgctcgatgatttctacgcccatctcctggcatttgaggcgcgtcagcagcagtctcaggcggagacgcgtctcaacattggcgcgcaagccaacttcgctggccgtggtggtccacagcgtggtcgcggccgggggactccacctgctggtcgtggtgcgcgtggccgaggtgggccgccgttccagggccgtggccgtggtccttcttcctcgacatccaatcgcccacagtgtcagatatgcggacgtacgggccacactgccatcaagtgttggtaccgtatggatgagtcataccaggaggaacatccatctgctgcagtggctacaacttcataccaggttgatcccaattggtatactgacacaggggctaccgatcacataacaagtgatctggatcgcctagctctccgtgaacagtatcatggtggagaaacagtacaagtcggcaatgggacaggacaaggtcacgcagcaagttcttct

SEQ ID NO: 95549 - DNA, 1445 bp, Zea Mays
gcgggtgggtcgtccaaagtagaatccaacggcgcgccgcagctcctccgcccctccgctcccgccgcctatattccttacttgcgttcgttcgtcaagcccttgcacaagcgcgggcggccctccgaccggctgaaaccccggcggcctcctgaagattacggtaccgggatcggtctgagccgccgaggcccgcgcaggcgcttccttatatatcgtttcttggcgtggctaaggtggtggtgaccatccggtgaatatgaacattgtgtgtgaagtatgtggagatattggttacagacaacttctgctatgttgcggagactgtaagcgttatgctgtgcaccagtactgtttggacaaagttgttttcgatgcaacgttgctagaatggttctgttatgaatgcctacaaaggcgtggtgaagttacttgcgtcgcatctctagaacaggtgtcaagtgaaagcccactaagtcatgctcattttggtcctctagtacatcagcgtactactaagagggtggagtcagtaacagggccatattcacccagtgatgactgtgaggaattattttcctaccctggcatagaaagcatcccaagtgttcaagaaataagtgtagatcccattaagacttcaagtatttctgaacatgataccatagaagcagctgcaagcagtgaaagattcacggagtgtcaaaaggctagctcctgtcgcgaggggataactgtgaagatggctatggcgccctcatcatatgagaactcaggagaagacattttctctgaaaatgtatttttggaatatgttttggcatataaatgttatctatctaaagcacaaaagaagagagtaatggagcttattcaggaaattcaacctgaattcacagtttttatatcaataatgcggaggggcaatgtgcgacctccgggtccttttctgataaaagcacaaatgtcactcttgagatgcctgacaagagcaagaagtggcatcccaaattctacagaagagatgtaagcagaacctgcatgcttacgggacagtggctagactttgtctgcgacaatcatgtgcaggagggagatatatgcctccttttaccgacaaaagatgagataagatgcacgtttatggtctatgttcttcatgaaacaactcattcttctagaggtgaggctggctttcaaatgggtggcccatgccctggtgcatctggtgtggcttcagaaatccatgttgaggaggaaccaaccactggtattagtgcaaaacattaaaaaactattgagtatctatattatttcttttcttgttgtctaaaaccgtctgcaggggaacatgtttcttcagaaagtgatatgcgagaaattcctcatgaatctctctcgagaggagactctgatgatcaatttgagcctccatactttgtacc

SEQ ID NO: 95550 - DNA, 1839 bp, Zea Mays
aaaccccggcggcctcctggaggttccggggttgagttcggtctgagctgctgctgccggcggaggcattcccttgtcgtttcttggagtgtcctggtggtggtgaccggtggatatgaacactgtgtgtgaagtttgtggggatattggttacagacaacttctgctttgttgcagagactgcaagcgttgtgctgtgcaccaatactgtttggacaaagttgtctacgaggcatcattaataaaatggttctgttatgaatgcctacaaaggcgtggtgaagttactcgcatcagttctctagagaagttgtcaagtgaaagaccactaagtcaggtccattctcgttctccagtacagcagctaattaccaagagtgtagagtcagtaagggatgcagggccttattcacccaatggtggttgtgaggaatcattttcctgccctggcataaaaaacaccccaagtgttcgagaaagaagtgtagatcccattaatatttcaagtgattctcatgataccatagaagcatccgaaagcagtgaaagattcatggaatgccaaaaagctagcttgtgtcgtcgcaggaaaactgtgaagatggctatggtgtcctcatcatctgaggagtcaggagaagacactatctctgaaaacgtatctttggggtatgttttggcatgtagaagttctctatctaaagcacaaaagaagagagtaacgaagcttattcaggaaattcaacctgaattcacagtttttatatcaataatgcggatgagcaatgtgaaactcccaggtcctcttctgggaattaccaaggaatatgcaattgcacatttcccagataaaaccacaaatgtcactcttgagacgcctggcaagagcaagaagtggcatcccaaattctacaaaagagatgaaagtagaaagaacttgcttatgggacaatggctagactttgtccgtgacaatcatgtgcaggagggagatatctgcctctttttaccgacaaaagatgagataagacacacatttatggtctatattcttcatgaaacaacccattctagatgtggggctggctttcaaagggttggcccatgccttggtggtgcatccagtgcaaagatggcttcagaagttcatattgaggatgaaccaaccgctggagaacatgtttcgtcggacagtgatatgccagaaaattctcatgaacctctggagagcggagactcggatgatccatttgaacctccatactttgtaccatgcaggagtcctctatctaaatcccaaaagagaatggttgagcagcgagtgcgagctatccgatctgaagttcccatttgtgtggcagtaatgaagaacaataacgttggcattgctcagcgttggatgctagaattatgttcacgatatgcttcggtatatctcccaactaaagggcaaaacatattgctccagtgcaaggggaagacgtgggaagccaaaatgatgtttcataatggcagaaggtggtttcttaatggaggttggcccgattttgctcgtggcaatggcctgcgcgtcggtgacatgtgtctattcgaactgaagaagaaaaagagtacgcttaccatggcagtccatatcattcgcaaggagcagttttaggttgggctggcatgtagttaatccatggttgtggctgatctctggatggattagagaccaatctcaatctgtaacgtttgttggtaggctggtagctatctgctgacaacatgttttagcatgatgtatatataacatcctttattatgccgaaatgtcgccttgcttttacttatgtgtac

SEQ ID NO: 95551 - DNA, 2512 bp, Zea Mays
aaaccccggcggcctcctggaggttccggggttgagttcggtctgagctgctgctgccggcggaggcattcccttgtcgtttcttggagtgtcctggtggtggtgaccggtggatatgaacactgtgtgtgaagtttgtggggatattggttacagacaacttctgctttgttgcagagactgcaagcgttgtgctgtgcaccaatactgtttggacaaagttgtctacgaggcatcattaataaaatggttctgttatgaatgcctacaaaggcgtggtgaagttactcgcatcagttctctagagaagttgtcaagtgaaagaccactaagtcaggtccattctcgttctccagtacagcagctaattaccaagagtgtagagtcagtaagggatgcagggccttggagagatcggaaaaatgaatcaattgcgactaaatatccatctctcaacagaacatatccttcaattaagaagcacactaaaaagaagccgattgtgaaaccaatgggtaactgcacaaatagaaaagtgcgaatggctaaagttaccacccatacaagtgccgaagcgtcacgttcttgtgaaaccattgggacagaatcatctaagagcaaccatgggaagaaccagcaggtggaccatgcaaaccctgtcgcattgaacactgagcagtctttccctttgattgtgaatagcttgggtacattgggagataatcaccagtatcacctcttagaaacaacagaagggttggcttgcaaattcaagaaagttccacaatcactcgcagcaccattgaaaagattagagaagagagacaatgtggttttgggatcaaataatttagggtcatcttgtttcacagctgaccttggaagctcggttcttggaaaaagtggagacaaatcgaatagaatgaaggatattggtgcaaacttgtcttccaaacacaatgatcatggcaatcaggcaaatcaacacactttagttggctcgaagaacatggaaggcaagtctgtaaaggctaaacatactgtggttgatgcacataaaaacacgtcttggacagtggactcactgataaacgtcaaggacaagtctgaagtatatggtgatagtaatagggatatcttaaatgatgtcacagtccagctggatcatagggctagcaatgagttgctgccgagaagcacggccaccaatataccacagctagccactctggaaaacgatgttgtggacacagtcatgccatattcacccaatggtggttgtgaggaatcattttcctgccctggcataaaaaacaccccaagtgttcgagaaagaagtgtagatcccattaatatttcaagtgattctcatgataccatagaagcatccgaaagcagtgaaagattcatggaatgccaaaaagctagcttgtgtcgtcgcaggaaaactgtgaagatggctatggtgtcctcatcatctgaggagtcaggagaagacactatctctgaaaacgtatctttggggtatgttttggcatgtagaagttctctatctaaagcacaaaagaagagagtaacgaagcttattcaggaaattcaacctgaattcacagtttttatatcaataatgcggatgagcaatgtgaaactcccaggtcctcttctgggaattaccaaggaatatgcaattgcacatttcccagataaaaccacaaatgtcactcttgagacgcctggcaagagcaagaagtggcatcccaaattctacaaaagagatgaaagtagaaagaacttgcttatgggacaatggctagactttgtccgtgacaatcatgtgcaggagggagatatctgcctctttttaccgacaaaagatgagataagacacacatttatggtctatattcttcatgaaacaacccattctagatgtggggctggctttcaaagggttggcccatgccttggtggtgcatccagtgcaaagatggcttcagaagttcatattgaggatgaaccaaccgctggagaacatgtttcgtcggacagtgatatgccagaaaattctcatgaacctctggagagcggagactcggatgatccatttgaacctccatactttgtaccatgcaggagtcctctatctaaatcccaaaagagaatggttgagcagcgagtgcgagctatccgatctgaagttcccatttgtgtggcagtaatgaagaacaataacgttggcattgctcagcgttggatgctagaattatgttcacgatatgcttcggtatatctcccaactaaagggcaaaacatattgctccagtgcaaggggaagacgtgggaagccaaaatgatgtttcataatggcagaaggtggtttcttaatggaggttggcccgattttgctcgtggcaatggcctgcgcgtcggtgacatgtgtctattcgaactgaagaagaaaaagagtacgcttaccatggcagtccatatcattcgcaaggagcagttttag

SEQ ID NO: 95552 - DNA, 871 bp, Zea Mays
ttttctaggtacacactttacaagattacattttcattacaagatgcttgattgcagccaatattttcatttctttggtgcttgtgtagaagtatcgccttgcaaagtatataccagactctcatgctaaaggttttaaggacgacaagaaagtttgagtgattccctctcgaacatggattatgtaccatattctgaaatgtgtttagaggattgcaaatcaatgaggcactaaagatgcaactggaagttcagaagcggctacacgagcaactggaggtatttgaaggtgtttgagataaataatgatgctaaaatgaaaaggacaatgcgacgtcccctaccatctggtcgtgttagttctacacatgctgccatgtgggctacaagtgcaggaattgcaggaacaactttgctggcctctcgaaggttagcgctatgtcgtggtgctccactttaaagatgtgcatgccacgtctacacttcccgtctctgattatagattaggtctttactccctgatgtttagccagtgcgtgctgttacccactaggtctagccgtagtcagtgactgcacaaccacaacccgctcttgtgtattttgcgtttgcggatcgcatcgcatgttattttggtccttctatattcatgctacaaggctgcaaactgtggtgctcatacatttatgtaaccagtaacctataacgactttgatgtatattatattttgtaacagtgaacttgactatcgtagatatgtagcttgctggaacgattttttagtgtacgactgtgctacaatgactgtagcgcccggtagggcgctgccctattctagtagaaataaaggaggaagtcccttgatatata

SEQ ID NO: 95553 - DNA, 1980 bp, Zea Mays
ctccctacctcgagcccaaatcgatgtccagacgccaacccgtccccgccgccgctgcgaagctggaggaaggggagcatgagctgagcatcgtcgacgcgctcctcgaggtgttgtcgggccgctgcgagctgcgacggacctccttcggctctcggcgcctgtaccggcgctttagcttcacctccatgggggcgccgccacagggaagacgcgtgcgctcctcctcgctctccgccaagtgataaattttctcaaatttgttttcaaatgtatctatagatttgttttttccctgatcgttagagtattctaggttgtgaatatggtggaatttcttgattaatgtcttggcgtggggattcagttgcctgggtaccagatatagcgatgagcgaaatttaaggtgtgaatcccaggtagcagattcacaggaaacttttggggccttgatattgattccctaatgtttgttgggattgctttcatcggttttttctttgttggatcggtcactaccttggcgtatttaggccccagagaattgatttttcaggttatatctgatttgactcaaggtagggtatgtgtccacttctttttcccctgaactaaaattcatgtttacatttaggttttagttacaaataatgatggatatttgttgctcggaatttctataaaagaattagaaacagtgcatgtttttttatctagatcacatacatgcttacagcttatatacccattgtttgcattgtaaaacaagaatatgtaagccatatagactcgtgatgagattcactcgctattgtctgttcttcagatttcttcatggcttttcagtcctagacacagcaacccctatacttttcttgaactaagtttggaaggtattctacaaaagtagtaagaggattaggttccttaataccttcagattcatgcaccgcactcatatttcatgttcgaaagtggaaactgctcctttggctggtcttgtaacatattctgacaaagaaatgttcctacattgtatgaggttatatatgctaggctgctagcaacctttatgttaaccctttcatacttctgttatagtattcattaggacaacagtcactcaaaatcattacttcattttcatttatcatttgttactctgatctcatatgggctaccttttttggaaataatgctggtgagtttcaaacctcattggaatctattcagaattcactagcagatgggttgctaaaactgacagaacaagtaacttctgacaatcggagtattgcatctttatctatatgtatgcacatttggttgaaattctatgcagtgtcaacagaagtatcgccttgcaaagtatataccagactctcatgctaaaggttttaaggacgacaagaaagtttgagtgattccctctcgaacatggattatgtaccatattctgaaatgtgtttagaggattgcaaatcaatgaggcactaaagatgcaactggaagttcagaagcggctacacgagcaactggaggtatttgaaggtgtttgagataaataatgatgctaaaatgaaaaggacaatgcgacgtcccctaccatctggtcgtgttagttctacacatgctgccatgtgggctacaagtgcaggaattgcaggaacaactttgctggcctctcgaaggttagcgctatgtcgtggtgctccactttaaagatgtgcatgccacgtctacacttcccgtctctgattatagattaggtctttactccctgatgtttagccagtgcgtgctgttacccactaggtctagccgtagtcagtgactgcacaaccacaacccgctcttgtgtattttgcgtttgcggatcgcatcgcatgttattttggtccttctatattcatgctacaaggctgcaaactgtggtgctcatacatttatgtaaccagtaacctataacgactttgatgt

SEQ ID NO: 95554 - DNA, 3877 bp, Zea Mays
ggggcccgccagcaggcgcgcgcgcacgcagagagctgcggagaggagagagaaagtgtggaaatggggagcgcagggacacggcgtccattttgcggagagggatgcggagcctgctggagcgcgcaatagtgcctcaaaccgtgcaaaatgcggatgcggagtgggatacggagtcttgctggagttggtcttattcgtgacgatgagtcgatgagactaatatgtaaatagcacctcaaaccttagatactagctgtgaagacagtgctacctgtcactctgtcagtcagacacctcgcccgcttcatttcgttcctccgcgtggtcagaaaaaactcagcaagcattggagagcaagagtaggaattaactcaaaggggaggaaggggaagacggcaattatgcacaacggcgtcgacgctcggccggggcccctcctccacctccccggcgcatcaccagctccctgctccggccgccgggtcccatggccgcggtcggggttaggggccgcgctgcggcagccaaatagcccccacggccgcctccgcttcgggcccctcccggccggcgaactctgcaagcggacccaccgtgagaagctacgtgtcgctgtgcttgtatcgaagtccacactgcagagcgaccatggtgcctcacttcagagtgagcgtgttgttcctcaaggtgtcaaagctgctgctgggtttcagatctctgccgacgacctagcatcacttgttgaaaatcgtgacaccgggaagttgactctgctcggccagctggatggaatcgcagacaagttggcgacgtcgttggctgatgggatcaccacggatgagctcagcctgaatcaaaggcagggcatgtatggagtgaacaagttcacggagagtgaggcccgcagcttatgggagttcgtgtgggaggcactgcaagacactactcttgtaattcttatagcatgtgcccttgtatctttcgttgttggcatcgccacggaagggtggccgagtggtgcccatgatggcattggaatctttacaagtatcctcctggttgtctctgttactgcgacgagcaattatcagcagtctttgcaattcagggatctggacagagagaagaggaaaatttctgttcaggttactagagatggattcagacaaaggatactgatagatgatcttcttcctggtgatgttgtccacctaggtgttggagatcaggttcctgcagatggcctctttgtttctgggtattctgtattggtcaacgagtccagcctaactggtgagagtgaacctgttgtcataagtgaagataaccctttccttttgtcagggactaaagtcctagatgggtcatgcataatgctggttacagcagtagggatgcgaacacagtggggtaaactaatggctgccatcactgaaagtggggatgatgaaactccgctgcagggtaaattaaacggtgttgcaaatactattggaaatatcggtctgttttttgcccttttaacttttgttatcctctcgcaagggttagtgggccagaaatactctgatgggcttcttttaagctggactggagaagatgtactggagatactggaacattttgccattgcagtcacaattgttgttgttgctgttcctgagggattgcctttagcagtgacattgagccttgcatttgcaatgaagaagatgatgagtgagaaggcactggtgcgacagttatctgcctgtgaaactatgggctcagccactgttatatgtagtgataagacaggaacacttacaactaatcgcatgtctgtcacgaaggcctgcatatgtggaaacaccatggaagtgaacaattcatcagtgctttcaagtttttcttccaaagtcccagaatttgctttgcaaattcttatggaatccatttttaacaacactgctggtgaagtggtgattaaccaagatgggaagtgtcagatactagggaccccaactgaggctgctttgttggactttgcattgacaataggtggagacttcaaagaaaaacggcaggaaactaagattgttaaagtcgagccttttaattcaacaaaaaaaaggatgggcatcattctcgagcttcctggtggaggataccgtgcacattgtaaaggtgcttcagaagtagtcttagctgcctgtgataatttcatagatgccagaggtactattgttgcactcgataaaacagctacaaagaaactcagtgatgtcattgaaaccttttctaaagaagcactcaggacactctgccttgcttatcgggaaatggatgatagtttttctgttgacgagcaaataccgctacaaggatacacatgcattggcattgttgggatcaaagatcctgttcgtccaggtgtcaggcagtccgtggcaacttgtcggtctgctggcattgcggttcgaatggttacaggagacaacataaatacagctaaggcaattgctcgtgaatgtggtatacttactgaggatggtattgccattgaaggcgctgagttcagagagaaaaatcctgaagaactcctcgagttgattccaaagatgcaggtcctggcccgatcatcaccacttgataagcatgcacttgtgaaatacttgcgtaccacgtttaatgaggtcgttgctgtgactggggatggtacaaatgatgcaccggcactacgtgaggcagatattggacttgccatgggaattgcagggactgaggttgctaaggagagcgctgatgttgttattcttgatgacaatttctccaccattgtaacagttgcgaaatggggacgctctgtttatgtcaacatccaaaagtttgtgcagttccagctgactgttaatgttgtcgcacttctggttaacttctcttcagcgtgctttacaggagatgctccactgaccgctgttcaacttctttgggttaacatgatcatggataccctaggagcgcttgctcttgcaactgaaccacctgatgacaacttaatgaagaaatcaccagtcggaaggacagggaggttcatcacgaacgtgatgtggaggaatattgtggggcagtcaatattccagtttgtggtcatttggtatctacaaacacaaggggaatacttgtttgggcttgaaagctctgaagctaatactgttctaaatacaatcatattcaacactttcgtattctgccaggttttcaatgagataagctcgagagacatggaggagatcaatgttttgaagggtttgccacagaactccattttcatgagcatcctcggtggcaccatcattttccagttcatcctggtccagttcctaggagattttgccaacaccacgcctctcacccatctccaatggctcgtcagcattctctttggcctcctcgggatgcccattgctgctgccatcaaactgattcctgtggaacctcgcgaagatgatggccggataccataatcatgtacattaagagcaatagatcagcttcaccagctgctaactactgtaaccttacctaatccacaagaataggagcagagcaccaatttgtgaagaaacggtttgtttgactgggacattaatatacccgtattactaaactgtatattgagtcgtccatttagttttattttttccttacaaatagtaccttgtggcttgtatacaccagcgtccatttgctattatgaaatgggatgtggtggattacaataacgtgggattgttacacagtttgtacctgtgtcagttgtaagtagactgcaaatttgaatgcaacacagttataactctagcttgattgttgattcaaacagttcatttct

SEQ ID NO: 95555 - DNA, 302 bp, Zea Mays
aaaaaaatttcccaaatttcccttgtatagccccacattcgttatcctagtcgtcgcccccatcgatccgcctcgtcgccgctgccccatccagcctcctcttcgattcgctcctcattgcctggtcgtgatcaagatgccccatggaaggatggctggagcaaggacacgcacagatcttggtggtgacagctcactcccctccacctatccactatggtcccttctcagttgagccgcagatgatggtggaacaaaactgcactctgcttctgtgaacaattcatgtagtggttaaggac

SEQ ID NO: 95556 - DNA, 636 bp, Zea Mays
aagccagactatagctggattcttatcaaggttccacatgatcagttgcctttcttcctcaagagttagagccaaataaatgctggacagaaagagtggtaggaaatggcctggggacagatactcatcatatggatcagtgtaacacagagaaattaatggtgggaaggtggaggtagacagaaacagcagagagaagcatgcatggtgtgcttcagcgcaggaggggagcagtaaatggtgaagtaagataggaaacaagatgcatgcaagtagcttgcaatttgcaggagggagcagcagcaggcatgaataaagaaatcaacacgaacatgataagcaactcatataatatactgactccgttctcgaatatttgttggccattagtttatttttaaactaaaacatgacataaaaaagaacggagggagtatcttagttcacttgtgcatttggtgttgaacatatgtttttttttcaccgcttaattttattattattctttcatcttttcccctccttttctgtttctcattggtaaattctttctgtcgtcttgcattgtgtgtataaagaaatagaatcctttcatttatttgaacataaatggatggaggcaagagctagttagtc

SEQ ID NO: 95557 - DNA, 1087 bp, Zea Mays
ccagaccccaaccaacggacgacgactccgtccagaattccagatcacgcatatctctctccctccctctctctcctcggcctcgccgcccctgtcccctcctacactgccgcgcgcgcatcgtggaatggagatccctccggccatgaagtgatctatttcttcgtcgcccctagctcgcgcacaggagaaggagaaggagaaagagaaagcaggagcccgctcgcggcgaggcagcaggatgtcttcgtctaactcgccctgtgccgcgtgtaagctgctgcgccgcaagtgcacgcagggatgcgtgttcgcgccctacttcccgcccgacaatccgggcaagttcgcgagcgtgcaccgcgtcttcggcgccagcaacgtctcgaagctcctcaacgacctggaccagctgcagcgggaggacgccgtaaactccctggcgtacgaggccgacgcgcgcatccgcgaccccgtctatggctgcgtggcctacatctccgtgctgcagatgaagatcaaacgggtccgcgacgagatcgccaacgcgcgcaaggagctggcggcttacattgggaccgcggcctttgcgccttacgtcgccacgccgcagtaccaccaccatcagtacgcggcaggcgccgtgcctctcgccgtcggcgtcgggccgcagcacggtcacccgcaccaccagcagcaacagatcatggtgcaccagcacctccaccaccagcagcagatggcagcggctgccgaggtgcagcagcagctcgctgtggccgtggaggtcgcgcgagagcaggatctcatgatgcggcaggccgcggtatacgcgcacgccgtgcccagcggcggccccacggtcgccgttgtgccgcccgacgcgctgccgtacgagggcggcttcctcttccagcagcagccgcccccttcgcaggcgcagaccgccgtggcgctcacgtaccagatggagcagtccccgccgtcgtcgtcctcgggccagtctcaccccgaggtgtcgcagcagcacaatacggatggcagcgacgagggcagcggtggcggtggtgtcgtgccgccggcctga

SEQ ID NO: 95558 - DNA, 1916 bp, Zea Mays
ccgacttcatcttttgcgttccccgtggcgggttggcaggccacttcatccgcctcgtcggcttcattcatcaccaggaatttccatcgccgcgcccggcgtctcctccactcgcctcccctactctatagcattccatttctgagctcgctaactgcgtttcttcggctcgccggtgagccacggattgggttcggcgggaggccgggaaacgggaatttatttcaccagtatgcaacagatggccatgccatcgttcgccgtaacctcacctccgtcgcatggcactaccttatgggcgcctcatgctcgtcgtcctcaaagactgcacaagagacacgtgcgcagccaagtccgggcagtggcacaagcacagctgcagtaccagaagctgggggactcagacctcctcatcagtgaggtcactcttggaacgatgacttttggcgagcaaaacacggagaaggaagcacatgacattatcgcttattctttcgatcaaggtgtcaatatcctagacacagcggaaattgtcagtacaagattccttccttacttttattaactatccctctctctgtattttcaagtgatcggatatacttctccattttcccttttggcctttagtacccagttccaatgaacaaggaaactcaagggagaactgatctttatattggcaggtggatgcaatcaaaaccacgagacaagataattttggccaccaaagttgccggttattcagagcggtctacatttcttcgagacaatgcaaaagtggttcgtgttgatgctgccaatatcaaagaaagtattgaaaagagtcttaaacgcttgtctacagattacattgatttgcttcagatacactggccagataggtatgtggcactatttggtgagtttagttataatccgaccaaatggaggccaagcatcccttttgaagaacaattgaaggctttacaggagttagttgacgaaggaaaggttcgctatatcggtgtttcaaacgagacctcatacggagtaatggagtttgtacatgctgcaaaggctcaaggccttccaaagatcgtgagcatccagaacagttacagtctacttgtgagatgccgctttgaagttgatcttgttgaagtttgccacccgaataactgcaacgttggactgcttgcatactccccgttggctggtggggttctcactgggaagtatcttgacgctaacgctgacatctcaaagagcaggctaaatctcttccctggatacatggcacgctacaatgactctttggctaaagaagcgacattagagtacgttaagcttgccaagaagcacgggctaactccagtccagcttgcccttggcttcgtgcgtgatcgtccattcaccgctagctccatcattggagcgaccaccatggagcaggtgaaggagaacatcgacgcgtttaccagcactccacggcctctaccacaggaagttcttgacggcattgaggatcttttcaagagatacaaagatccagcaatcctctagtttttcattcaccttttttggcgaaaagtagcaatcctcggacaatacaaagcccagaaaacatattacaacctatgatcgtatggtcataccattttgttcatgctgatacaattattgctttgttcttgtattggctctacaggcaataccagcagagcagaattatgttttctttccttcactgtgtaagtagaatgcaggttttcactgtgtaagcgttcttttatactctgctagtaactgtatgatgtcttcgacattgacaggtctcaagtggacaggtttaaccactactctctgcatggtaacagtagtaaaagatcgttaaactacaagatgcatttttttaatgataaatccaatgatac

SEQ ID NO: 95559 - DNA, 1883 bp, Zea Mays
cacgagcgttggccgttgggctcttcgcatatccaccacccacccataaggcatcagcgccgctgccgacttcatcttttgcgttccccgtggcgggttggcaggccacttcatccgcctcgtcggcttcattcatcaccaggaatttccatcgccgcgcccggcgtctcctccactcgcctcccctactctatagcattccatttctgagctcgctaactgcgtttcttcggctcgccggtgagccacggattgggttcggcgggaggccgggaaacgggaatttatttcaccagtatgcaacagatggccatgccatcgttcgccgtaacctcacctccgtcgcatggcactaccttatgggcgcctcatgctcgtcgtcctcaaagactgcacaagagacacgtgcgcagccaagtccgggcagtggcacaagcacagctgcagtaccagaagctgggggactcagacctcctcatcagtgaggtcactcttggaacgatgacttttggcgagcaaaacacggagaaggaagcacatgacattatcgcttattctttcgatcaaggtgtcaatatcctagacacagcggaaatttacccagttccaatgaacaaggaaactcaagggagaactgatctttatattggcaggtggatgcaatcaaaaccacgagacaagataattttggccaccaaagttgccggttattcagagcggtctacatttcttcgagacaatgcaaaagtggttcgtgttgatgctgccaatatcaaagaaagtattgaaaagagtcttaaacgcttgtctacagattacattgatttgcttcagatacactggccagataggtatgtggcactatttggtgagtttagttataatccgaccaaatggaggccaagcatcccttttgaagaacaattgaaggctttacaggagttagttgacgaaggaaaggttcgctatatcggtgtttcaaacgagacctcatacggagtaatggagtttgtacatgctgcaaaggctcaaggccttccaaagatcgtgagcatccagaacagttacagtctacttgtgagatgccgctttgaagttgatcttgttgaagtttgccacccgaataactgcaacgttggactgcttgcatactccccgttggctggtggggttctcactgggaagtatcttgacgctaacgctgacatctcaaagagcaggctaaatctcttccctggatacatggcacgctacaatgactctttggctaaagaagcgacattagagtacgttaagcttgccaagaagcacgggctaactccagtccagcttgcccttggcttcgtgcgtgatcgtccattcaccgctagctccatcattggagcgaccaccatggagcaggtgaaggagaacatcgacgcgtttaccagcactccacggcctctaccacaggaagttcttgacggcattgaggatcttttcaagagatacaaagatccagcaatcctctagtttttcattcaccttttttggcgaaaagtagcaatcctcggacaatacaaagcccagaaaacatattacaacctatgatcgtatggtcataccattttgttcatgctgatacaattattgctttgttcttgtattggctctacaggcaataccagcagagcagaattatgttttctttccttcactgtgtaagtagaatgcaggttttcactgtgtaagcgttcttttatactctgctagtaactgtatgatgtcttcgacattgacaggtctcaagtggacaggtttaaccactactctctgcatggtaacagtagtaaaagatcgttaaactacaagatgcatttttttaatgataaatccaatgatac

SEQ ID NO: 95560 - DNA, 484 bp, Zea Mays
aaccagaatgtaatggcaagaaattaccctttgcacagtgtggcatgtgcggatgtgccatggcacatcaggtgcatttagaaagactgtagatgggaagtgggttcatgctttctgtgctgagtggttgttggacaccaagtatgtaaggggacaagataaacctgtagaaggaacggaaacccttgtagagggaaaggacacttgtgtctgcctccacaatgttggcgggtgcttaaggtgtagcagtggggattgcaacattactttccatcctacttgcgctagaagttgtggtttttacatgaacacaaaagggtttggtactacaccacaacacaaagcatactgtggcaaacacagcgtacaacagaaagaggctgatgcacaacaatatggacctgaggagctcacgagcatgaaacgaatgaggattagcatgccagatttacattattttgtttccctgtgtttggtagcataa

SEQ ID NO: 95561 - DNA, 309 bp, Zea Mays
tccgacatcaacgccaacggcggcttcctgtcgtacgggaacatggagagctacgcgatgtgggtggcgaccggtgtggcgtcggccttcttcgcgtccctcgagcgctgctcctgcatccaccttcacaccgtggaggacgacggcgacgaggaggaggaggacctcgaggaggcccgccgctccttctcccgcccgatctctgagtactactacgaccgccaagaagatgaagaacaacaccccgtgtcccgtgtaacagttgatgagatatgtgactccccgtgtcccaaggaaattcctgcttga

SEQ ID NO: 95562 - DNA, 295 bp, Zea Mays
gcatgggcttctcaaattacaattggccgacaaatcctgttgctatctgcataccaacttatgtggagatcttttatacacataccaaatattctgaaactcatttatttctgcagctaatatgtaatgttttactgttgtttattcagatgtgtgttcttatctatgtttggaccaacggtgagacattcttcaacacaaccgcacttgttacatgcattcaaaacttccccaagagcagaggtcagacagtgactcgaaatatgaccattgcataccaggttcggttaggaaa

SEQ ID NO: 95563 - DNA, 249 bp, Zea Mays
ccggcggcggaagctagctaagagccaaccatcaacgtaaccatggccgccgccgccacctcgtcgaggagcctcgccacggcctgcgtcctcgcggcgcttctcgtcggctgtctgctgcaggcggccgccgccgacgcgcgccgtctgcttggtgatgatggcacgacggcgatgcctccgtcgtcgtccgccatgcagggtgacggcgacgacacgtccccggcgctgctggggcccgcgccctag

SEQ ID NO: 95564 - DNA, 2419 bp, Zea Mays
gtgattagtttgtacatttgtcctaggactcatttacctgtaaagcaacggcacacaaaaacagagagggaaacgcgtgcgcgcacacacaaaaaaaattgaaaaagagaaataaagccctggtgccagcttgccaggtcagccacgaggcgccggcgtccggcgacgtgacgagccagaacagaaaccgaacgccagcgccacgcacgcagcagccactgaaatctcaaatacaaaaaatcaactcacggcccccgaaaactcccgcgctctccgcaggcgggtggacgccgcggcgcgtttgcggcctcgcgccaacactcccaatttttttaaaaagaaaaattttttccccaatctttccctcgctccctccccctccacggagtgtcgctgccaaaactcgaacgaatttccaaatcgaggccgccgcgatcgaaaccgggaacccaaagcacccgaggctcttccctccaaccggagctctcccaaatccttcgaatccaaaaataatggcggcctcctctccctcccattccccccgcccccgtccgctacttaaccgcgcgcccgccaccgcagccccaatcccctcctccgccctccgcctcctcagtgctccggcgcctagcgacctgctcctgcccccgccgccgccgtgcacgcacagccggagcaggagcagcgctgcccgcctttaccgttgcccatggagaactctgccgccgccgccgccgaacggccgcgcctcacccgcgcagccgccaagcgctcagccgtcgtcacggctgtggccgtcgccgccaagcgcaagcgcgtcgcgctcagccagctgcccacgctccccaacgccgtgctcggcgcgcacgacgacgacgacgacaagcccgtcaggaagcagcgcctcctccccgccgccaagcccaagcccaagcccaaggcagcgcccgcgcctgccgcgcccgccgccgcggatgacacggatgacgacattcagctctgcaagccctacgcttccgacatctactcctacctccgctccatggagtcgcaggccaagcgccgcctcgctgttgactacatcgcggcggtgcagatcgacgtcacgcccaacatgcgtggcatcctcatcgactggctcgtcgaggtcgccgaggagtacaagctcgtctccgacacgctctacctcaccgtctcctacatcgaccgcttcctctctgccaaagttctcaacaggcagaagctgcagctcctcggcgtctccgccatgctcatcgcatccaagtatgaggagatcagcccgcccaacgtggaggatttctgctacatcaccgataacacctacaccaagcaggaggtagttaagatggagagtgatatactgaatgtcctcaagtttgaggtgggcagtcctaccgccaagacgttcctgaggatgttcatcagatctgcccaagaagacaacaagaagtatcctagcctccagttggagttcctggggagctacctttctgagctgagcttgctggattatggcttgattcgctccttgccgtcacttgttgcagcctcagccgtctttgttgcaaggctgaccctggatccacacacccatccctgggtataatctcgatctgtttgatctctatacattcctgtctcatcaaatacaaaccaccaactcattttgttatgaacgggttgcagagcaagaaggtgcaaacgctaacaggctataagccatctgagttgaaggactgtgttgctgccatacataatttgcagctcaaccggacatgtcaatccatggtggcgatccgggagaaatacaggcaacaccgagtaagcttgggctttgacagctgtacatggttgttagattgtttgcataactctagtgtactaactgtggaaaaatctttgaacagttcaagggtgtatcagctttgctacctcctgttgagatccctgcatcatacttcaatacactgaaggagtaggtgttccttgataatctaggagagccaagcacacagctttcctcaagcaagatgtgcaatgctaaggttgttagggtactgaggttcttggatgctgcatctaggctcggcttggagcattcagagttgatttgtttgaagttcaagctcaatagaaagttcggtgtatcaaatcttgtacttgtgtatcataattatacattacaaccaggtgcctttatttattgggggcacaattccaaagttttcattcattgcctcttactacatattctccttttttattcatgtagttctagtacagaacacagtatttagtgttcagttatatcagagggtagcttagggatgtattagaccttgctaccttgtcttggtaaacacatgcagaaagccagaaagtgatatgttcttgacac

SEQ ID NO: 95565 - DNA, 2247 bp, Zea Mays
gtgattagtttgtacatttgtcctaggactcatttacctgtaaagcaacggcacacaaaaacagagagggaaacgcgtgcgcgcacacacaaaaaaaattgaaaaagagaaataaagccctggtgccagcttgccaggtcagccacgaggcgccggcgtccggcgacgtgacgagccagaacagaaaccgaacgccagcgccacgcacgcagcagccactgaaatctcaaatacaaaaaatcaactcacggcccccgaaaactcccgcgctctccgcaggcgggtggacgccgcggcgcgtttgcggcctcgcgccaacactcccaatttttttaaaaagaaaaattttttccccaatctttccctcgctccctccccctccacggagtgtcgctgccaaaactcgaacgaatttccaaatcgaggccgccgcgatcgaaaccgggaacccaaagcacccgaggctcttccctccaaccggagctctcccaaatccttcgaatccaaaaataatggcggcctcctctccctcccattccccccgcccccgtccgctacttaaccgcgcgcccgccaccgcagccccaatcccctcctccgccctccgcctcctcagtgctccggcgcctagcgacctgctcctgcccccgccgccgccgtgcacgcacagccggagcaggagcagcgctgcccgcctttaccgttgcccatggagaactctgccgccgccgccgccgaacggccgcgcctcacccgcgcagccgccaagcgctcagccgtcgtcacggctgtggccgtcgccgccaagcgcaagcgcgtcgcgctcagccagctgcccacgctccccaacgccgtgctcggcgcgcacgacgacgacgacgacaagcccgtcaggaagcagcgcctcctccccgccgccaagcccaagcccaagcccaaggcagcgcccgcgcctgccgcgcccgccgccgcggatgacacggatgacgacattcagctctgcaagccctacgcttccgacatctactcctacctccgctccatggagtcgcaggccaagcgccgcctcgctgttgactacatcgcggcggtgcagatcgacgtcacgcccaacatgcgtggcatcctcatcgactggctcgtcgaggtcgccgaggagtacaagctcgtctccgacacgctctacctcaccgtctcctacatcgaccgcttcctctctgccaaagttctcaacaggcagaagctgcagctcctcggcgtctccgccatgctcatcgcatccaagtatgaggagatcagcccgcccaacgtggaggatttctgctacatcaccgataacacctacaccaagcaggaggtagttaagatggagagtgatatactgaatgtcctcaagtttgaggtgggcagtcctaccgccaagacgttcctgaggatgttcatcagatctgcccaagaagacaacaagaagtatcctagcctccagttggagttcctggggagctacctttctgagctgagcttgctggattatggcttgattcgctccttgccgtcacttgttgcagcctcagccgtctttgttgcaaggctgaccctggatccacacacccatccctggagcaagaaggtgcaaacgctaacaggctataagccatctgagttgaaggactgtgttgctgccatacataatttgcagctcaaccggacatgtcaatccatggtggcgatccgggagaaatacaggcaacaccgattcaagggtgtatcagctttgctacctcctgttgagatccctgcatcatacttcaatacactgaaggagtaggtgttccttgataatctaggagagccaagcacacagctttcctcaagcaagatgtgcaatgctaaggttgttagggtactgaggttcttggatgctgcatctaggctcggcttggagcattcagagttgatttgtttgaagttcaagctcaatagaaagttcggtgtatcaaatcttgtacttgtgtatcataattatacattacaaccaggtgcctttatttattgggggcacaattccaaagttttcattcattgcctcttactacatattctccttttttattcatgtagttctagtacagaacacagtatttagtgttcagttatatcagagggtagcttagggatgtattagaccttgctaccttgtcttggtaaacacatgcagaaagccagaaagtgatatgttcttgacac

SEQ ID NO: 95566 - DNA, 1814 bp, Zea Mays
cacgggcgcgtgggtcgcaagcagacgcggggcgaagaatcgcaccgcgggagaccgagacaggcagccagcgcggggcagctgaagcctatcttgtaggagtatcttctatcaccacctcggtaccccgagggaaagaagaagcggaggggaggcaggaatcgcctgcccgcgcctccatcgccctgccggcgacggcccacatgccgaccgcctacagcctccgcgcgccgccctccgcctcgcagcagcgcctcaggctgcccctaccgccgcccccgccgccgctgccgttttgcccgggtggaggggccgcccgccggaggaggggtgtcggggtggcgtctgcgtccgcgtcgcccttcgacgagctgcacgcgcgggggaggcccgtacatggaccctccaagaaatccatgctctggaacttgatccaggatatagagcccttggacctaagtgtcatccagaaagatgttgctcctgaaacagtagatgcaatgaagaggactatttctggcatgttgggtcttcttccatctgatcagttccgtgtcattgtagaagccctttggaatcccttcttcaagttattggtatcttcaattatgactgggtatactctgcgaaatgctgaatacaggctttcttttgaaagaaatctagaactgcctgaagaaggtgtagaatgcctaaaaagtgatgtcactgaagataatcatcataacatcaatttgggaagacctgtcactatttttagattatccgaagaagacatgcctcaggaccctggaaaaaccgatgaagcatcatcttatgaaaatatgggagaagagcttggtgacttaacaccacaggcagaggagtatattattcagatgcaatctcatttgaatgccatgaaaaaggagttacatgatctcaggagaaagaattctgccttacagatgcagcagtttgttggggaggaaaaaaacgacttgctggactatttgaggtcattaacaccagagaaggttgctgaactatcagaatcgacgtctcccggtgtgcaagaaactattcattctgtggttcatggtttgcttgctactctttcccccaaggtacattcaaaggcccctccaccgctagataacatttctggtggtgttctaaaccttgggggcgaggatgatgatcgtgcagaacttgtggagaatgcttccctcccatttcagcccctaatatctgttccccgtgattatcttgcacgtttgctgttctggtgcatgctgctgggtcactacattcggggtctggagtaccggttagagcttgctcggcttctgcgaatatccagcgtgggttctttctctggtggagatgatcatgttgtttgagggtaccacgtctactgatattcctcaccgggaagaatggaaaggaaagccctggtcaagaaatgggccatatggcagagctgcagaggtgtccgttacactgctgagctatatagttgtagttcctgtatattcagaaaacagtcactcggttgtaaagctagtgttacatatgcacgtgaaccattttctttttcttcctttgatgttgtgccgtataaaaagaatttggtggttcgttggtgtttatctcgtggtagcataataggcatccttgtattctagttgtatgtttctggtggttgtgactgctgtccagtgtccatttagcttttttgtctattcttgattcgagtaaagcttaacttctcattttggaggtcgcaagctcatactttcattgaattatgggtccttttgattgggctttgg

SEQ ID NO: 95567 - DNA, 951 bp, Zea Mays
gttggacatgtaaaaaagcatttatcattttgaatctgacaacttgtgttgcgtcgcatattgaactggccaggcttattgcttttatttgtattgcaggagttacatgatctcaggagaaagaattctgccttacagatgcagcagtttgttggggaggaaaaaaacgacttgctggactatttgaggtcattaacaccagagaaggttgctgaactatcagaatcgacgtctcccggtgtgcaagaaactattcattctgtggttcatggtttgcttgctactctttcccccaaggtacattcaaaggcccctccaccgctagataacatttctggtggtgttctaaaccttgggggcgaggatgatgatcgtgcagaacttgtggagaatgcttccctcccatttcagcccctaatatctgttccccgtgattatcttgcacgtttgctgttctggtgcatgctgctgggtcactacattcggggtctggagtaccggttagagcttgctcggcttctgcgaatatccagcgtgggttctttctctggtggagatgatcatgttgtttgagggtaccacgtctactgatattcctcaccgggaagaatggaaaggaaagccctggtcaagaaatgggccatatggcagagctgcagaggtgtccgttacactgctgagctatatagttgtagttcctgtatattcagaaaacagtcactcggttgtaaagctagtgttacatatgcacgtgaaccattttctttttcttcctttgatgttgtgccgtataaaaagaatttggtggttcgttggtgtttatctcgtggtagcataataggcatccttgtattctagttgtatgtttctggtggttgtgactgctgtccagtgtccatttagcttttttgtctattcttgattcgagtaaagcttaacttctcattttgg

SEQ ID NO: 95568 - DNA, 1168 bp, Zea Mays
ggggcatgtatgacatcggtttttttttctaccgacgtccggagaatttcattagcaatcggtggccacagagagttaactaaaaataattcagcgacagatatcttcgactcctcgttcgtggttccccatcgtcatcgccatggatttctcttaggctcacccgtccgctcggctcgcttccttccccactctctctgatcccgtcgcacttccctcctcgctgcagcccctctactattgcgattaccgtttcctcgctgccctttcctttttcggtcggcagcaatcaccggggcaagcgaaccctcgatttgcgtccccgctctctgctagcgcccctaaaagaggagcgaagcgatgtctatgtcgaagacgggtcaggccgcggagaaggatgagcagcagcagtcccgagggatagcactgatgcagggcatctgcgccgtggtgtaccgcaaggccgataacacgccctgccccatcaagcagggtctctacttgggatctgttggagcagcattcaataaggacgctctcaagagtttgaacatcacccatatcttgatcgttgcaaagtcactggatccagtatttccagctgaatttaattacaagaagatcgaagtacttgatatcccagacactgatctgttaaagcattctgatgaatgctttggtttcatagatgaagctataagctctggaggcaatgttttggtccattgctttgctgggcggtcaaggagtgtgacaatcgttgttgcatatctcatgaagaagcatcaaatgagcctcgaaagtgccttgtcactagttagaagtaaacgacctcaagtggctcctaatggggggtttatttcccagctggagaagtttcagaaatccttgcaagtggagcaggaatggagaatgcaacctgtgcagcactgataattatactagtgttataataggtgcagaaggcctcatatgtagtgaaggcgtatgcgttgtaagagcgtcttgaccgcgtattatgacatctggataacaagcgaggccttggcaaactttatgatgtaaacagcaagcaacgttgttcatccattgggatgcagtttacatgttgaataatattcactgcaatttctcttcaaatgaaccaaagaggggtaatagttggtgc

SEQ ID NO: 95569 - DNA, 1155 bp, Zea Mays
ggggcatgtatgacatcggtttttttttctaccgacgtccggagaatttcattagcaatcggtggccacagagagttaactaaaaataattcagcgacagatatcttcgactcctcgttcgtggttccccatcgtcatcgccatggatttctcttaggctcacccgtccgctcggctcgcttccttccccactctctctgatcccgtcgcacttccctcctcgctgcagcccctctactattgcgattaccgtttcctcgctgccctttcctttttcggtcggcagcaatcaccggggcaagcgaaccctcgatttgcgtccccgctctctgctagcgcccctaaaagaggagcgaagcgatgtctatgtcgaagacgggtcaggccgcggagaaggatgagcagcagcagtcccgagggatagcactgatgcagggcatctgcgccgtggtgtaccgcaaggccgataacacgccctgccccatcaagcagggtctctacttgggatctgttggagcagcattcaataaggacgctctcaagagtttgaacatcacccatatcttgatcgttgcaaagtcactggatccagtatttccagctgaatttaattacaagaagatcgaagtacttgatatcccagacactgatctgttaaagcattctgatgaatgctttggtttcatagatgaagctataagctctggaggcaatgttttggtccattgctttgctgggcggtcaaggagcctcacaagcctgcggttaggggggcataaccccaaccggagaggacggccgacggctacgagctacgtagccgtggtccggcaagtcggggattccaggtccttgacaagaagtttcagaaatccttgcaagtggagcaggaatggagaatgcaacctgtgcagcactgataattatactagtgttataataggtgcagaaggcctcatatgtagtgaaggcgtatgcgttgtaagagcgtcttgaccgcgtattatgacatctggataacaagcgaggccttggcaaactttatgatgtaaacagcaagcaacgttgttcatccattgggatgcagtttacatgttgaataatattcactgcaatttctcttcaaatgaaccaaagaggggtaatagttggtgc

SEQ ID NO: 95570 - DNA, 1108 bp, Zea Mays
ggggcatgtatgacatcggtttttttttctaccgacgtccggagaatttcattagcaatcggtggccacagagagttaactaaaaataattcagcgacagatatcttcgactcctcgttcgtggttccccatcgtcatcgccatggatttctcttaggctcacccgtccgctcggctcgcttccttccccactctctctgatcccgtcgcacttccctcctcgctgcagcccctctactattgcgattaccgtttcctcgctgccctttcctttttcggtcggcagcaatcaccggggcaagcgaaccctcgatttgcgtccccgctctctgctagcgcccctaaaagaggagcgaagcgatgtctatgtcgaagacgggtcaggccgcggagaaggatgagcagcagcagtcccgagggatagcactgatgcagggcatctgcgccgtggtgtaccgcaaggccgataacacgccctgccccatcaagcagggtctctacttgggatctgttggagcagcattcaataaggacgctctcaagagtttgaacatcacccatatcttgatcgttgcaaagtcactggatccagtatttccagctgaatttaattacaagaagatcgaagatgaagctataagctctggaggcaatgttttggtccattgctttgctgggcggtcaaggagtgtgacaatcgttgttgcatatctcatgaagaagcatcaaatgagcctcgaaagtgccttgtcactagttagaagtaaacgacctcaagtggctcctaatggggggtttatttcccagctggagaagtttcagaaatccttgcaagtggagcaggaatggagaatgcaacctgtgcagcactgataattatactagtgttataataggtgcagaaggcctcatatgtagtgaaggcgtatgcgttgtaagagcgtcttgaccgcgtattatgacatctggataacaagcgaggccttggcaaactttatgatgtaaacagcaagcaacgttgttcatccattgggatgcagtttacatgttgaataatattcactgcaatttctcttcaaatgaaccaaagaggggtaatagttggtgc

SEQ ID NO: 95571 - DNA, 1022 bp, Zea Mays
ggggcatgtatgacatcggtttttttttctaccgacgtccggagaatttcattagcaatcggtggccacagagagttaactaaaaataattcagcgacagatatcttcgactcctcgttcgtggttccccatcgtcatcgccatggatttctcttaggctcacccgtccgctcggctcgcttccttccccactctctctgatcccgtcgcacttccctcctcgctgcagcccctctactattgcgattaccgtttcctcgctgccctttcctttttcggtcggcagcaatcaccggggcaagcgaaccctcgatttgcgtccccgctctctgctagcgcccctaaaagaggagcgaagcgatgtctatgtcgaagacgggtcaggccgcggagaaggatgagcagcagcagtcccgagggatagcactgatgcagggcatctgcgccgtggtgtaccgcaaggccgataacacgccctgccccatcaagcagggtctctacttgggatctgttggagcagcattcaataaggacgctctcaagagtttgaacatcacccatatcttgatcgttgcaaagtcactggatccagtatttccagctgaatttaattacaagaagatcgaagtacttgatatcccagacactgatctgttaaagcattctgatgaatgctttggtttcatagatgaagctataagctctggaggcaatgttttggtccattgctttgctgggcggtcaaggagtggagcaggaatggagaatgcaacctgtgcagcactgataattatactagtgttataataggtgcagaaggcctcatatgtagtgaaggcgtatgcgttgtaagagcgtcttgaccgcgtattatgacatctggataacaagcgaggccttggcaaactttatgatgtaaacagcaagcaacgttgttcatccattgggatgcagtttacatgttgaataatattcactgcaatttctcttcaaatgaaccaaagaggggtaatagttggtgc

SEQ ID NO: 95572 - DNA, 962 bp, Zea Mays
ggggcatgtatgacatcggtttttttttctaccgacgtccggagaatttcattagcaatcggtggccacagagagttaactaaaaataattcagcgacagatatcttcgactcctcgttcgtggttccccatcgtcatcgccatggatttctcttaggctcacccgtccgctcggctcgcttccttccccactctctctgatcccgtcgcacttccctcctcgctgcagcccctctactattgcgattaccgtttcctcgctgccctttcctttttcggtcggcagcaatcaccggggcaagcgaaccctcgatttgcgtccccgctctctgctagcgcccctaaaagaggagcgaagcgatgtctatgtcgaagacgggtcaggccgcggagaaggatgagcagcagcagtcccgagggatagcactgatgcagggcatctgcgccgtggtgtaccgcaaggccgataacacgccctgccccatcaagcagggtctctacttgggatctgttggagcagcattcaataaggacgctctcaagagtttgaacatcacccatatcttgatcgttgcaaagtcactggatccagtatttccagctgaatttaattacaagaagatcgaagatgaagctataagctctggaggcaatgttttggtccattgctttgctgggcggtcaaggagtggagcaggaatggagaatgcaacctgtgcagcactgataattatactagtgttataataggtgcagaaggcctcatatgtagtgaaggcgtatgcgttgtaagagcgtcttgaccgcgtattatgacatctggataacaagcgaggccttggcaaactttatgatgtaaacagcaagcaacgttgttcatccattgggatgcagtttacatgttgaataatattcactgcaatttctcttcaaatgaaccaaagaggggtaatagttggtgc

SEQ ID NO: 95573 - DNA, 873 bp, Zea Mays
ggggcatgtatgacatcggtttttttttctaccgacgtccggagaatttcattagcaatcggtggccacagagagttaactaaaaataattcagcgacagatatcttcgactcctcgttcgtggttccccatcgtcatcgccatggatttctcttaggctcacccgtccgctcggctcgcttccttccccactctctctgatcccgtcgcacttccctcctcgctgcagcccctctactattgcgattaccgtttcctcgctgccctttcctttttcggtcggcagcaatcaccggggcaagcgaaccctcgatttgcgtccccgctctctgctagcgcccctaaaagaggagcgaagcgatgtctatgtcgaagacgggtcaggccgcggagaaggatgagcagcagcagtcccgagggatagcactgatgcagggcatctgcgccgtggtgtaccgcaaggccgataacacgccctgccccatcaagcagcattcaataaggacgctctcaagagtttgaacatcacccatatcttgatcgttgcaaagtcactggatccagtatttccagctgaatttaattacaagaagatcgaagtggagcaggaatggagaatgcaacctgtgcagcactgataattatactagtgttataataggtgcagaaggcctcatatgtagtgaaggcgtatgcgttgtaagagcgtcttgaccgcgtattatgacatctggataacaagcgaggccttggcaaactttatgatgtaaacagcaagcaacgttgttcatccattgggatgcagtttacatgttgaataatattcactgcaatttctcttcaaatgaaccaaagaggggtaatagttggtgc

SEQ ID NO: 95574 - DNA, 298 bp, Zea Mays
gcggcaaaatgactaggaaccagtgttctgttatccattacattacaacaaccaacagaaaactgcatttatccggttaccttcccgtggagcggaggttgcagcgacagtggaccaaaattgccgaaccaaacggctctgaaaggtgctctttggttaacaagcgtgaggttgtttcattgacttctgattagttaggtttatccgtagtggatcatgctttgaatcaatacggtcgtgtacaacaagcataccgctccccttgagtattatccgacggctccctcgtagtcacagc

SEQ ID NO: 95575 - DNA, 411 bp, Zea Mays
atggaggcggacctgacggtgtgctcctcgtggggagcatggcaagacggcagggattgctgtccccagacccgagccgacggccagtcagccttgggaggagaagagggtgagaggggagaagaagagaagagaggagaaagaaaacccaagcccccttccctcccgctcggtctggatgggatggagctctgctcggacttggctcgttttttgtctctagattatacagtccaaatagatggttttaatcaaaagcgacctgagcggcgcacggaaacggaactcgttgccagcctgaataattggagtcctcttctgttcgcccccaacgtcttcgcacgcgctcggacgctcggtgaccgtctgaccgacgctgcagaaagaagaaaagaaaaacagtttttttag

SEQ ID NO: 95576 - DNA, 673 bp, Zea Mays
gccccatgtgtgttagcaccttacaggagatttgagggcgtcgcgtgcgatgcccgttgcgccgccgccaacatctcgctgcaggggaagtatctcgccggcacgctccacctgccctcccatgggtccgcccctggccggcctctacctcagctacaacaccctctggcggcatccagtaggagctggctgcggatcccgcagatggcgccaagaccgtgcgcaagccggtcttcaccaccgtcgaccagctacaaccccagatgcacagccacactcttaccatccgcgtcatctttgcctgcaccatcctcgacaaatcctccatgcacattggtcgcacccgcatcccccagtgcctcgtcggatacaacaccgacatcgtcctcgtcacgctcgcaacaatctggagcctgacggaggctgaggagaggaatcagtagagcaaatgagcaagacgagacagatgtgtagctgctggtgtttctccactatcgcgacctcactgctcaagcatggcatatatagagtgacgagaacaccatggaatggagttgtgctgttgtggtgcggagtaggagcgtccaagcgaggagagaatcacatgcgatttctctcattgttgttgttctcgcgtcgtttctgattctacgttgaaacaaagtgtttgtcc

SEQ ID NO: 95577 - DNA, 3730 bp, Zea Mays
caatttctatttttgattattccgtactcgatttcattttagatgataaaatatggatacatgagagattttccgtccgttttgatcctgcaaagatctgaggccgtcgtggtgtggcctggccactggccacccgtgccctatcctcttccgcacggcgtcctatatatataaggaaaggaaaaatctgccactccacacgcgttcctctctcgccgtcgccaaccatcgccgcctcgcgtccggacccgccgttcctccgaggaaatggctgcactgcaaccctcattttcaccagcaatgactttgaagagtagctgcagcgccctgaagttcccaaaaactgcactgttatctggttttggtggcattccacgccttcaagatgcgcaagacaggaacactagcgtcgcttatttgatccccaaggctgcttcagtgactgaccagtcaatagcagagccaccaaaaaccaagcaaaataggcacacagtcgacccaacagctccagaatttctgccactcccatcttttgaagaatgctttccaaggagtaccaaagaatcaagtgaaatcatccacgaggaatcaggtcatgtcctcaaggttccattccggagagtccatttgactggagatcagaagcactttgatacatatgacaccagtggtcctcaaaatataagcccaaggattggactcccaaagataaggaaggaatggattgataggagggaaaagctgggtagtcctcggtacacacaaatgtattatgctaaacagggaattgtaacagaggagatgttatactgtgccagccgtgagaaccttagtcctgaatttgttcggacagaagttgcccgtggacgagccataattccttccaacaagaggcacctggaattggaacccatgattgttggaagaaacttccttgtaaaggtgaatgcaaatattgggaattcagctgttgtgagctccattgaggaggaagttcacaagctccagtgggccacgatgtggggagctgatactgtcatggacctttcaacagggcgacatatccatgagacgcgggaatggattattcgcaactctccggttcctattgggactgttcctatttaccaagcacttgagaaagtaaatggtattgctgaaaatctgagctgggaaatttttagggataccttgattgaacaagctgagcagggcgttgattacttcacaatccatgctggtgtcctgcttcgttacattcctcttacagcaaagagaatgacgggcatagtttcacgtggtggctcaatccatgcaaaatggtgcttaacttatcacaaggagaactttgcatatgaacattgggatgacattcttgacatatgcaatcagtatgatgtggcattatcaattggtgatggtttgaggcctggttccatttatgatgcaaatgatagtgcacagtttgcagaactgctgactcaaggtgaactaacacgtcgagcatgggcgaaagatgtgcaggtgatgaatgaaggcccgggtcacatcccaatgcataaaattcctgaaaacatggagaaacagttggagtggtgtaatgaagcgcctttctatacattgggtcctttgacaactgatattgcacctggttatgatcacatcacttcagccattggtgctgccaacattggagctcttggcactgcacttctttgctatgtaacaccaaaggagcaccttgggttgcccaatcgtgatgatgtcaagactggtgtaatatcctacaaaatttctgctcatgctgctgatttggcgaagggtcatccctatgcacaagcttgggatgatgcacttagcaaggcaaggtttgagtttagatggcttgaccaatttgctttatctctggatccagtaactgctatggctttccatgatgaaacattgccctctgagggtgccaaagtggcacatttctgctcaatgtgtgggcccaagttttgttcaatgaaaatcacggaggatatcaggaagtatgctgatgaaaatggttatggaacagtagaggaagctgtgatacaaggaatgaatgctatgagtgctgaatttttggctgcaaggaaaacaattagtggggaacaacatggtgaagcaggaggggagatctatgtaccagaaagctatgcagctcagaaataaggtttcctcggagacatccattccaaatgaggctaaggcatcagcagctgttctggctagtggctaaggcatcagcagctgttctaccatcttatctaatgagatgtctgagagcctcttagcctggactgttgtgagatgggctgagaaagtccctttgaacctgaacaggataatgcctgcgaagggagtgtgcaattctattttcctgttttccaggaacctatcaaccttttggtggaaattgaggtattgtccatgattgcatggagctcagcaacaaggtacctgttctctacttgtttgcatttctcaaggggaagattcttaacaggtatcagcttcgtcatgacatctaacaattttatttataatgttcaagttatttagttaaatctacacgaccatgaaatttgtcaaagcatttcctagtcctatattatctagttttacttctacgtctatctgttctttgattgtgcgctccatctattctttgatgaagcttgcgagttctactttctagacctattgagataggaccttttggcacggtacaatatcaatactgttttggtgaagggagtatatttacagtagtacaaaaggagatggctaaacctgctacaattttttttagatggacgatgtttgtcaattgagggtgggaagtaccgaccagattgcatttgacttcatccggccatccggtctattaataaataaccaaggaagtggttcttggcaactaccttttcccgttcttgtggtttttttttcaaataggcgtgcttaaatatttcggtcttttaaattaatattataaaattctcgtctgaatatttttcaagtctagtattatgcatgataatttacatatgcatgttgtctgaaagcagaagcagattctcaaggcacctgctaattcaaaaccaaaaataggttgtaacttcgaagttgctgcattggtgaagaataatatattttagttttactctcagctgattgcttgtttgtcatgtttcactccatgcttcactctcggctgtattctgcattataccttgtttatatccaactgccatggccgatgtgagatgttaaatgtgtcggtgaagtaaataattctgctgtggcttttccgctttctgtggttccaatgggctattcccatttgcaaatattgtgtccataaggcggatttccaaatcctgcggagttgaggtgggcacctaatttcttgacgtttctgatcaatttctcatgttatcacaatgtcccttataagtgcttcccgagcagaattgagatgttaattattataaacttccattttggtttatctgaaaccaggaattctatatgaatgtctccttgagtatagtttcattattgtttaaaaggtgcgtctggttctgctacttatgttacgagctgtgaaaaaagttgttgtgaaccgtttgcagtgaaaaaaattaatatcctatttagataaagatattggacaacggaattgagaattgaaatcagc

SEQ ID NO: 95578 - DNA, 2669 bp, Zea Mays
gcgttcctctctcgccgtcgccaaccatcgccgcctcgcgtccggacccgccgttcctccgaggaaatggctgcactgcaaccctcattttcaccagcaatgactttgaagagtagctgcagcgccctgaagttcccaaaaactgcactgttatctggttttggtggcattccacgccttcaagatgcgcaagacaggaacactagcgtcgcttatttgatccccaaggctgcttcagtgactgaccagtcaatagcagagccaccaaaaaccaagcaaaataggcacacagtcgacccaacagctccagaatttctgccactcccatcttttgaagaatgctttccaaggagtaccaaagaatcaagtgaaatcatccacgaggaatcaggtcatgtcctcaaggttccattccggagagtccatttgactggagatcagaagcactttgatacatatgacaccagtggtcctcaaaatataagcccaaggattggactcccaaagataaggaaggaatggattgataggagggaaaagctgggtagtcctcggtacacacaaatgtattatgctaaacagggaattgtaacagaggagatgttatactgtgccagccgtgagaaccttagtcctgaatttgttcggacagaagttgcccgtggacgagccataattccttccaacaagaggcacctggaattggaacccatgattgttggaagaaacttccttgtaaaggtgaatgcaaatattgggaattcagctgttgtgagctccattgaggaggaagttcacaagctccagtgggccacgatgtggggagctgatactgtcatggacctttcaacagggcgacatatccatgagacgcgggaatggattattcgcaactctccggttcctattgggactgttcctatttaccaagcacttgagaaagtaaatggtattgctgaaaatctgagctgggaaatttttagggataccttgattgaacaagctgagcagggcgttgattacttcacaatccatgctggtgtcctgcttcgttacattcctcttacagcaaagagaatgacgggcatagtttcacgtggtggctcaatccatgcaaaatggtgcttaacttatcacaaggagaactttgcatatgaacattgggatgacattcttgacatatgcaatcagtatgatgtggcattatcaattggtgatggtttgaggcctggttccatttatgatgcaaatgatagtgcacagtttgcagaactgctgactcaaggtgaactaacacgtcgagcatgggcgaaagatgtgcaggtgatgaatgaaggcccgggtcacatcccaatgcataaaattcctgaaaacatggagaaacagttggagtggtgtaatgaagcgcctttctatacattgggtcctttgacaactgatattgcacctggttatgatcacatcacttcagccattggtgctgccaacattggagctcttggcactgcacttctttgctatgtaacaccaaaggagcaccttgggttgcccaatcgtgatgatgtcaagactggtgtaatatcctacaaaatttctgctcatgctgctgatttggcgaagggtcatccctatgcacaagcttgggatgatgcacttagcaaggcaaggtttgagtttagatggcttgaccaatttgctttatctctggatccagtaactgctatggctttccatgatgaaacattgccctctgagggtgccaaagtggcacatttctgctcaatgtgtgggcccaagttttgttcaatgaaaatcacggaggatatcaggaagtatgctgatgaaaatggttatggaacagtagaggaagctgtgatacaaggaatgaatgctatgagtgctgaatttttggctgcaaggaaaacaattagtggggaacaacatggtgaagcaggaggggagatctatgtaccagaaagctatgcagctcagaaataaggtttcctcggagacatccattccaaatgaggctaaggcatcagcagctgttctggctagtggctaaggcatcagcagctgttctaccatcttatctaatgagatgtctgagagcctcttagcctggactgttgtgagatgggctgagaaagtccctttgaacctgaacaggataatgcctgcgaagggagtgtgcaattctattttcctgttttccaggaacctatcaaccttttggtggaaattgaggtattgtccatgattgcatggagctcagcaacaaggtacctgttctctacttgtttgcatttctcaaggggaagattcttaacaggtatcagcttcgtcatgacatctaacaattttatttataatgttcaagttatttagttaaatctacacgaccatgaaatttgtcaaagcatttcctagtcctatattatctagttttacttctacgtctatctgttctttgattgtgcgctccatctattctttgatgaagcttgcgagttctactttctagacctattgagataggaccttttggcacggtacaatatcaatactgttttggtgaagggagtatatttacagtagtacaaaaggagatggctaaacctgctacaattttttttagatggacgatgtttgtcaattgagggtgggaa

SEQ ID NO: 95579 - DNA, 1181 bp, Zea Mays
ggtatgtaactcactttagaccaatctccctgatatttatcgacttttaggtgatgaatgaaggcccgggtcacatcccaatgcataaaattcctgaaaacatggagaaacagttggagtggtgtaatgaagcgcctttctatacattgggtcctttgacaactgatattgcacctggttatgatcacatcacttcagccattggtgctgccaacattggagctcttggcactgcacttctttgctatgtaacaccaaaggagcaccttgggttgcccaatcgtgatgatgtcaagactggtgtaatatcctacaaaatttctgctcatgctgctgatttggcgaagggtcatccctatgcacaagcttgggatgatgcacttagcaaggcaaggtttgagtttagatggcttgaccaatttgctttatctctggatccagtaactgctatggctttccatgatgaaacattgccctctgagggtgccaaagtggcacatttctgctcaatgtgtgggcccaagttttgttcaatgaaaatcacggaggatatcaggaagtatgctgatgaaaatggttatggaacagtagaggaagctgtgatacaaggaatgaatgctatgagtgctgaatttttggctgcaaggaaaacaattagtggggaacaacatggtgaagcaggaggggagatctatgtaccagaaagctatgcagctcagaaataaggtttcctcggagacatccattccaaatgaggctaaggcatcagcagctgttctggctagtggctaaggcatcagcagctgttctaccatcttatctaatgagatggtaagcagtatgtgaataaagctggtgttgcttaccttcagtttgtgaatgccattatgtactgtaataaaaaactctgtattgtactccctagcattatcattatgcttttgtcttctttgtatcacaatgggattgttagtgatgaaaattgcaccaggggtgcctgtgttctcaacagtctgagagcctcttagcctggactgttgtgagatgggctgagaaagtccctttgaacctgaacaggataatgcctgcgaagggagtgtgcaattctattttcctgttttccaggaacctatcaaccttttggtggaaattgaggtattgtccatgattgcatggagctc

SEQ ID NO: 95580 - DNA, 2485 bp, Zea Mays
caatttctatttttgattattccgtactcgatttcattttagatgataaaatatggatacatgagagattttccgtccgttttgatcctgcaaagatctgaggccgtcgtggtgtggcctggccactggccacccgtgccctatcctcttccgcacggcgtcctatatatataaggaaaggaaaaatctgccactccacacgcgttcctctctcgccgtcgccaaccatcgccgcctcgcgtccggacccgccgttcctccgaggaaatggctgcactgcaaccctcattttcaccagcaatgactttgaagagtagctgcagcgccctgaagttcccaaaaactgcactgttatctggttttggtggcattccacgccttcaagatgcgcaagacaggaacactagcgtcgcttatttgatccccaaggctgcttcagtgactgaccagtcaatagcagagccaccaaaaaccaagcaaaataggcacacagtcgacccaacagctccagaatttctgccactcccatcttttgaagaatgctttccaaggagtaccaaagaatcaagtgaaatcatccacgaggaatcaggtcatgtcctcaaggttccattccggagagtccatttgactggagatcagaagcactttgatacatatgacaccagtggtcctcaaaatataagcccaaggattggactcccaaagataaggaaggaatggattgataggagggaaaagctgggtagtcctcggtacacacaaatgtattatgctaaacagggaattgtaacagaggagatgttatactgtgccagccgtgagaaccttagtcctgaatttgttcggacagaagttgcccgtggacgagccataattccttccaacaagaggcacctggaattggaacccatgattgttggaagaaacttccttgtaaaggtgaatgcaaatattgggaattcagctgttgtgagctccattgaggaggaagttcacaagctccagtgggccacgatgtggggagctgatactgtcatggacctttcaacagggcgacatatccatgagacgcgggaatggattattcgcaactctccggttcctattgggactgttcctatttaccaagcacttgagaaagtaaatggtattgctgaaaatctgagctgggaaatttttagggataccttgattgaacaagctgagcagggcgttgattacttcacaatccatgctggtgtcctgcttcgttacattcctcttacagcaaagagaatgacgggcatagtttcacgtggtggctcaatccatgcaaaatggtgcttaacttatcacaaggagaactttgcatatgaacattgggatgacattcttgacatatgcaatcagtatgatgtggcattatcaattggtgatggtttgaggcctggttccatttatgatgcaaatgatagtgcacagtttgcagaactgctgactcaaggtgaactaacacgtcgagcatgggcgaaagatgtgcaggtgatgaatgaaggcccgggtcacatcccaatgcataaaattcctgaaaacatggagaaacagttggagtggtgtaatgaagcgcctttctatacattgggtcctttgacaactgatattgcacctggttatgatcacatcacttcagccattggtgctgccaacattggagctcttggcactgcacttctttgctatgtaacaccaaaggagcaccttgggttgcccaatcgtgatgatgtcaagactggtgtaatatcctacaaaatttctgctcatgctgctgatttggcgaagggtcatccctatgcacaagcttgggatgatgcacttagcaaggcaaggtttgagtttagatggcttgaccaatttgctttatctctggatccagtaactgctatggctttccatgatgaaacattgccctctgagggtgccaaagtggcacatttctgctcaatgtgtgggcccaagttttgttcaatgaaaatcacggaggatatcaggaagtatgctgatgaaaatggttatggaacagtagaggaagctgtgatacaaggaatgaatgctatgagtgctgaatttttggctgcaaggaaaacaattagtggggaacaacatggtgaagcaggaggggagatctatgtaccagaaagctatgcagctcagaaataaggtttcctcggagacatccattccaaatgaggctaaggcatcagcagctgttctggctagtggctaaggcatcagcagctgttctaccatcttatctaatgagatggtaagcagtatgtgaataaagctggtgttgcttaccttcagtttgtgaatgccattatgtactgtaataaaaaactctgtattgtactccctagcattatcattatgcttttgtcttctttgtatcacaatgggattgttagtgatgaaaattgcaccaggggtgcctgtgttctcaaca

SEQ ID NO: 95581 - DNA, 2371 bp, Zea Mays
cacgagcaccgaccggctacgcagcacggaggacgggaggtgcgccgtcgctcgccggcgatgatcctccacccctgacacgcccgcgattaggttccgtcctctgccgccgcgcaaacgatgtctgccgtcgaccgcggtcgttcccgcgcccgcgacacgagtcagcagcgaactcaacgggaatccggcgacccccagaaatggctgcactgcaaccctcattttcaccagcaatgactttgaagagtagctgcagcgccctgaagttcccaaaaactgcactgttatctggttttggtggcattccacgccttcaagatgcgcaagacaggaacactagcgtcgcttatttgatccccaaggctgcttcagtgactgaccagtcaatagcagagccaccaaaaaccaagcaaaataggcacacagtcgacccaacagctccagaatttctgccactcccatcttttgaagaatgctttccaaggagtaccaaagaatcaagtgaaatcatccacgaggaatcaggtcatgtcctcaaggttccattccggagagtccatttgactggagatcagaagcactttgatacatatgacaccagtggtcctcaaaatataagcccaaggattggactcccaaagataaggaaggaatggattgataggagggaaaagctgggtagtcctcggtacacacaaatgtattatgctaaacagggaattgtaacagaggagatgttatactgtgccagccgtgagaaccttagtcctgaatttgttcggacagaagttgcccgtggacgagccataattccttccaacaagaggcacctggaattggaacccatgattgttggaagaaacttccttgtaaaggtgaatgcaaatattgggaattcagctgttgtgagctccattgaggaggaagttcacaagctccagtgggccacgatgtggggagctgatactgtcatggacctttcaacagggcgacatatccatgagacgcgggaatggattattcgcaactctccggttcctattgggactgttcctatttaccaagcacttgagaaagtaaatggtattgctgaaaatctgagctgggaaatttttagggataccttgattgaacaagctgagcagggcgttgattacttcacaatccatgctggtgtcctgcttcgttacattcctcttacagcaaagagaatgacgggcatagtttcacgtggtggctcaatccatgcaaaatggtgcttaacttatcacaaggagaactttgcatatgaacattgggatgacattcttgacatatgcaatcagtatgatgtggcattatcaattggtgatggtttgaggcctggttccatttatgatgcaaatgatagtgcacagtttgcagaactgctgactcaaggtgaactaacacgtcgagcatgggcgaaagatgtgcaggtgatgaatgaaggcccgggtcacatcccaatgcataaaattcctgaaaacatggagaaacagttggagtggtgtaatgaagcgcctttctatacattgggtcctttgacaactgatattgcacctggttatgatcacatcacttcagccattggtgctgccaacattggagctcttggcactgcacttctttgctatgtaacaccaaaggagcaccttgggttgcccaatcgtgatgatgtcaagactggtgtaatatcctacaaaatttctgctcatgctgctgatttggcgaagggtcatccctatgcacaagcttgggatgatgcacttagcaaggcaaggtttgagtttagatggcttgaccaatttgctttatctctggatccagtaactgctatggctttccatgatgaaacattgccctctgagggtgccaaagtggcacatttctgctcaatgtgtgggcccaagttttgttcaatgaaaatcacggaggatatcaggaagtatgctgatgaaaatggttatggaacagtagaggaagctgtgatacaaggaatgaatgctatgagtgctgaatttttggctgcaaggaaaacaattagtggggaacaacatggtgaagcaggaggggagatctatgtaccagaaagctatgcagctcagaaataaggtttcctcggagacatccattccaaatgaggctaaggcatcagcagctgttctggctagtggctaaggcatcagcagctgttctaccatcttatctaatgagatggtaagcagtatgtgaataaagctggtgttgcttaccttcagtttgtgaatgccattatgtactgtaataaaaaactctgtattgtactccctagcattatcattatgcttttgtcttctttgtatcacaa

SEQ ID NO: 95582 - DNA, 342 bp, Zea Mays
ctgatagctgttattataagaaaactctgccaaagagagacacttgtcccaatccttttcgtagtgcagtacacatgcccttaacatgtcttccaaaatctggtttaccctttctgtctggccatctgtttgaggatgcactactacaaatcgtgttatatgagacggttaatttttagttattaagacgcttatgatgtgtccaaatttgatggagtcacaaaagatgatccgtttttaagatggttataaaccgtcttaaaagatattaaataagacattttttaatttataaccgtctaaaaaaagaatttgttacgtcattttgtccaataaaccgtc

SEQ ID NO: 95583 - DNA, 1742 bp, Zea Mays
acaccgaacgcgttctggcttctcagtctatcactccacccgtatatataacagacacggtacacgcgctctccatccaatccaaccacgcgaacaaccaagatgacgcgctctcctctggctctggccctactgctcctctgcgccgccggcgccgcggcggccgtgccgcggtaccgcgaggcgccgcacttcaccaactcggcggcggcgcagtgcccgccgctgctgcagccgtcggacgcggacgcggcgtgctcgccgcacgcggcggtgcacgtcgccatgacgctggacgcgtcgtacctgcgcggcaccatggcggccgtgctctccgtgctgcgccacgcgtcgtgcccggagtccatccacttccacttcatcgcctccgcctcctccgggtccagtgcgacggcggaggcgctcagggccacggtgcgcgcgtcgttcccgtcgctggcgttccgggtgtacccgttcgccgacgaggcccgcgtggcggggctcatctccacctccatccggggcgcgctggaccgcccgctcaactacgcgcgctcctacctcgcgtccacgctgcccgcctgcgtgcgccgcgtcgtgtacctcgactccgacgtcgtgctcaccgacgacatcgccgccctcgccgccaccccgctcccgggggagggcacggccgtggcggcgccccagtactgcggcgccaacttcaccgcctacttcacgccgggcttctgggcgtcccccgcgctctcctccgccttcgccggccgccgcgcctgctacttcaacacgggcgtcatggtgctcgacctcgcgcgctggcgccgcgcgggatacacggcgcagatcgaggagtggatggagctgcagaagcgggtgcgcatctacgagctgggctcgctgccgcccttcctgctcgtcttcgccggcaggatcgcgtccgtggaccacagatggaaccagcacggcctcggcggggacaactaccgcggcctctgccgcggcctgcacgccggcgccgtcagcctgctgcactggagcggcaaggggaagccctgggaccgcctcgacgccggaaggccgtgcccgctcgacgccgtctgggccaagtacgacctgctccggccggcagccggcatcgagacctcgtgaacacaacgacggcgttcgatcgaccgctcgtttcactttttgttcggtttagaagcacgtgctcttcgttgttttgttgatctaggctagatattggtagatcgatcatcagggtgttcatgtgaactgtacatattgttgctaactttctcggaaaagtttagaccgcttgcacaaattctagattcagaaaaaaaatagtactactcaaaagttggccaaatggtattgctccaagaaatctagatataacaaattggtggatctaaggtcagaatcaaggtgaagctctcaagtggcgcttcgctagcacaaaattagtggacttggtgaaaattgtacgaagaaaaaagatggtcaagaatagaagagactattagcaccaaaattgtcctccactagatctaaacaaaaaacatagtcattgcctcattggtagaagggactattagccaaaaagttttttttttcccattgaatcttagatccggtagtgcatctgttctaaacaagctcttgagttttcagtttcgctctattaccttcgataagaaattcagaagcatcgtttaaaaaaaacagaa

SEQ ID NO: 95584 - DNA, 1302 bp, Zea Mays
ccagagagagaattaaacccggtccatgcaaatttattcccggtcagcatctctgtctttttcttacctccaggctccagcgtgcgcgctctctccccctctccgtcggcgacgactacgccgggtcttcttcggacccaggtcgttgccgcctacgccaggtgcccaaatcttcttagggcccttcgccggcgacgagcacacaagcttggttgacccccaacaaattgcaaaatgtcagccaatgtcggtgaatcaaccagcggtggcagcagcaacgatgcagctggggggagctttgaatgtaacatatgctttgagctgcctcaagagccaatagtgactctttgtggccacctcttctgctggccatgcctttaccggtggctgcacatccatgcacattcgccagagtgcccagtgtgcaaggctcttgtggaggaagacaagcttgttcccctttatggacgcggcaaggatcgtgttgacccaaggtcaaagaacatgcccgagggtgagattcctcaccgcccaactggtcagaggcctgccccagccccccaggccgatgctaacaacaactttgccaatgccaatccaaatgcgaatccatggttcatgggcacaggagtccctttggctaatgcgcgctgggggaactacgcattctcagctgctttcgggggactattccctatgcttagcttccaagttcatgggtttccagatgctgctgcttatgcgcagcctgctgggttccactatgggtatggccatgggcatggattccatggcggccatatgggacacgcccatggcgtccaccgacaagcaccattggggcaacagcagcaggcagatatctacttgaaggccctgctcttcatgattggaattctagtgattgcaagcctcattgcgttttaaaatttgttggcaacgtctaccaggaggcctgctcgtcacggctgggacgtggaattctgggaatgcaatcctcctgacatgtcagagtccgttgatagcttgacatttgtgatggcatattggcccatgaaccgccagaatttcagtgtgtttgtactatagcttggcgctgaatgttgcataagttattattctgtttgcatgaagtgttcatagaatatgtattaatgtctagataagtacctacgtttcgtaacaccttatatagagtaccaggaggaacatggtgaaatcattactgtctagtcttgattttttttaaaaaacattttggaggttaatgttatgtgcaattaaaaaggtaagagtgacaca

SEQ ID NO: 95585 - DNA, 3170 bp, Zea Mays
tttttttggttttttgtgtctaaactctaaacccgttaagtttgtaaccgcctccctccttcaactgtctcagcagattgtgcagcaccgtgttctccctcccttcccaatcccctatcccgttactttccccggctccaccccaaaccctaatacgtcatggcgctcactacacggggcggcgccggcggcggggatcccgcgaaggcgccgtccgcctccgaccccagcctcggcttcctcaccaagcgcgataccgaggtcaagctaccccgcgcaacgcgggtcaagaacaagacccccgcgccgatccagattacggccgagcagatcctccgggaggccagggagaggcaggagcctgagatccgcccgcccaaacagaagatcacagacccccacgagctctccgattaccgcctccgtaagcggaaggagttcgaggacgtcatccgccgcgtgcgctggagcgtctcggcatgggtcaagtacgcgcggtgggaggagcagcagcgagacttcgcgcgcgcgcgctccgtctacgagcgcgcgctcgacgtcgcccaccgcgaccacacgctctggctcaaatatgctgaattcgagatgcggaaccggtttgtcaaccatgcccggaatgtctgggaccgcgcggtgtcgctcctcccccgggtggatcagctctggtacaagtacatccacatggaggagctgcttggtgcagttgccaatgcgcgccaggtgttcgagcgctggatgtcttggcgacccgacacagccggctggaattcttacatcaagtttgagctgcggtacggggaggtcgagcgtgccagggctatctatgagcggtttgtagctgagcacccaaggccagataccttcatccgctatgctaagtttgagatgaagctcggcgaggtcgagcgggcacggcgggtgtatgagcgtgcagcagacctgcttgctgatgatgaggatgctgaagtgttatttgtggcatttgcagagtttgaggagaggtgccgcgaggtcgagcgagcacgtgcaatatacaagtatgctctagacagggtgcccaagggtcgtgctgaggaactgtataggaagtttcttgcatttgagaaacagtttggtgaccgtgagggaatagaagatgccattgtgggcaagaggagatttcagtacgaggatgaggttaggaagaatccactaaactacgactcatggtttgattatatcaggctggaggagagtgttgggaataaggacaggatcagggaggtgtacgagagggccattgccaacgtgccccctgcagaggagaagcgatactggcagaggtacatatacctctggattaactatgcactctatgaggagctagacgcacaagacagagaacggacaagagaggtttacaaggaatgcctgaggttgattcctcacaagaaattcacgtttgcaaagatgtggctcatggcggcccagtttgagatacggcagagaaatctaaaggctgcaagacaaattcttggaaatgcaattggaatggccccaaagggcaagatattcaagaaatatattgaaattgagctttatctgggcaactttgaccgttgtaggactctttatgagaaatatattgaatggtccccagcaaactgttatgcctggaggaagtatgccgaattggagaagaaccttagtgagactgatcgtgctcgatcaatatatgaacttgctattgcacaaccagcccttgatacaccagaggttctgtggaagcctaaatttaactcatctcttggtatcggtagtattctaattgagcatgaaagcattgaatctgacaatgtattgttcagacatgaaaagctctccttactgttatgggcggcagatgactgcgagggtttgagggtgacagctagggagtacttgcagtttgaaattgatgaaaatgaatttgagaggacaaggcaactatatgagagactgcttgataggacaaaacatttgaaggtatggatcagttatgctgagtttgaggcctctgctggcttgggcggtgaagacggtgaagacaaggagaaaaagaatgaagttagttatcaggagcagcagatggagcgggttcaaaaatgtagagctgtctttgaaagggcatttgattacttcagaaccagtgccccagagttgaaggaggaaagagctatgcttcttgaagaatggcttaataaggaggtgaactttggtgatcttggagatgtcagcttagtgcaaaagaaggcaccaagaaaagtcaagcggaagagaccaatccctacagaagatggctccactatagcatatgaggagtatatagattacattttccctgatgaagttgctctagcaccaaacctgaagatcctagaagctgcttacaaatggaagaagcaaaaaactggagatggcgatgagtgatcctggcatcttagtatggcattgtcgtggttcgtgagcattttgccacagccaaaatcagatgccctgcaacactctggccagagctatcggaatgagaatagtcattttttcatgtcacaaaggatgttgttgctgttgaaaagaatcctgcgaattacatttaacttgtaactgtatgggctgtagtttggtggccatgagttgcttccatgcgtcggaacaatgagggctacacaagtcgagatggtgtatgggagtttgtcttgcaattgcaaaggtatctctccagtctatgctttttatgaagtcagtaaactgggcgtcttcgacttcaatcgctggccatgccggtcacgctggtgtccagggttcagttggagggcttgcagttgcagaagatcctaccagcaaaacgtcatcttcagtgcctagcagctctgtttattagccagtgaggcttttggttcctaatagtctgttgccaagtttggttcttggcagagctaatttattagaaagaaaaacaagaaaagtacaagacaaccaaaaaaagcaaaaggaaagggaagggggacagctatagtaaagcgaagaaatcatgttcttttatgtgtgtcttgtgattttggcaagcctagacttgccatgaattgtcttattaggccattctcagttgtagttttatcacatcattttta

SEQ ID NO: 95586 - DNA, 766 bp, Zea Mays
aagcgaaaggagcgcagagtttccacattgtagtaccatggaccgcggcatcaagaggagcgtcgcggcagcgggcggcggcccgccaccgcccaaggtgtaccgcgtggagcccagggacttccgggagctcgtgcagaggctcacgggcgccggtacgcccgccgccgccgccgctccggggccggcgcaccggagggcgacgctgaagccggccatggccgcggagagcaggcgcgcacaggccgctgcggccgtgcccgtggcggccggggcagagcagttcgactacgcggcgtcatggttctccgcgccgctgctgagccccgggtacggcgcgccgggcttcggaggcggccaccagcaccaggggaacactggctctctgttttagggccctaggtagaaacagagtccctgtatagctccgtcgtcacttgttcgtgcttctctggctctttttgtcttgcgtttcgggcatgactatacatacacaaccttcttgcgccgcgtataaaattcgaccaagaagttatacgggtagtgttcatttctgtattttctgatagaacgataaataaatctgtttttttatcctctttgttgcctctgttaagtatgcatcttcactttttttggtagagcatgtaatcgttccatcgtttctggctccatccagcggttgccaagcatttgttgatcagtgcggttaggaaccgctcatataggcccgaatattttgtattttagttattttttaaaaaaa

SEQ ID NO: 95587 - DNA, 1259 bp, Zea Mays
gccttatccccaaatcgcttcttctctgctgattccataccgcctcctctccctggccgatccatggtgctcgtctctagctcatgtcttgccgccggccgagcccctccccagcgcccttggagccggcgtcctctgccctcatctcattccccgacgccgccctctccccctcagtgctctgctggtcggcgtcttctccctgcccgacgtttctagcgccatggccgccgcgccttgggtcgcctgctccactgcgccgatccgcccatctccctgctgccgctctcccatggcgcgtccctgcatcttgcttcagctcgctctgccatctcccttggcgccctagccccaacgctgagctccctacccggccgcgcccctggtggttgagctcgccgagcttccttttctatcgctcgtcctcgcccattcggcgccctcatctcaagccagtccagcctctctaatcgccactctcccctatccccttgctgttagcacatggcgagctaaccccatgtgccagtagagttcgtcattccctaagcagcacctccctccatggatgcctcgttgtcgacttgtgcagttcatatttatcggtgaggtcccttttgtcttgtgttacttatctctttaaattgatacatgtgtgcttatgtgtgagatgtgaaggggaaaatcccaggattttggtggagaagaaagcacagttcaaatttgacgcccgccaggtgttcgacgaaaatgttcgaattgggtttcgtcgttgattttgacgcctgccaggtgttcatctcaaactacaatcaccgttgaaaatccgaggcgacgggaaagttaggtggcatcaccagtgatggcgttcgatccttgaaatgtacattatgtgataagagtaagcgtcactagagaatgggaattccaaggcgcaacaaatgatggtcctctccatcatgtcaacatgatcatatccgatgaaccgaaaaacaagaatcgtgagtgcaatggcaaatggaaggtgaaggcccttttgattgacaacttaggaaaagatggaatggaactcaaattttggtggtcggtcaagtgtgtagagttgaaatcatatatacttagttaggctcaaatttagcgcaattcagttagtattttagtttggatttagagtacacttatgtatgagttatttagcaatgcttatttgtgagatattgaatgatacttatctacattatattaactatagtgttgtt

SEQ ID NO: 95588 - DNA, 480 bp, Zea Mays
cgagcgcgagcccagccatacgacctcggcaggacacctcacagcatcgtatccagcaactccagactcagctagatgatgagaggaggcaacatgaggagctagagaagaggatggcggagatgttcgcgtacatgcagagccttggcgccgcacagggtcatgctccaccacctccgttgttccctgcagctgaccctacagagttcactactcctggtcaatcggcggcgttgaacaaccctcatgcttcgtccagcccttcgccgaaccagtccagatgcccacctcgttgattatttgttttgtgatgatccagacttacctttatgagtgttggtgatgttagttacactttatcttgtgagatacttggtgatgttagtgatgatgcatacttgtatctgttttgtgatgatcctgactttagtgtgatctgttttgtgagactttgtgatatatatggtgttgatgataaat

SEQ ID NO: 95589 - DNA, 1457 bp, Zea Mays
tagggatttggcccaacaccacccgccgctctcctctccttccctccctccccggccaagaaggctgcctgttgtaaaacatttcgtctgctttttcacctttattacgcctagacttcggaggaggcccgagcgagcaggctttcctgctgtccaggaccaagcggccgttcactccgtcgcagtggatggagctggagcaccaggctctcatatacaagtatctcaatgccaaggcccccataccttccagcctgctcgtttccatcagcaagagcttcaggtcatccaacagagtgagctggaggcctctttaccaaggctacgcaaacgcagactccgacccagaacctgggaggtgccggcggacagacggaaagaagtggcggtgctccaaggaggcgatgcctgatcacaagtactgcgagcgccacatcaataggaaccgccaccgttcaagaaagcctgtggaaaaccaacctagaaaggccaccaaggaggtgactaccgctgctgctggctcgttgccgtgtgccgggccacaaggtagcttgaagaaggcaaaagttaatgactccaagccaggcactggcagctattggacagatagcttaaacaggacaatgctgagcagagagaaggcaaacaaaccgacggacgacgagtctttgctgcttagttcgacgaagaacagtcagcccaccttgtccctgctcactcaactgaagcagcagaacaaaccagataagttaggtcccacaccggaaaatgagccgaactcggacacgatgttgaaagcctggggtggcagccaccacaagagcatttcctccacacagcgccatgacgctgaatccctccaatcagtcctccaaaatttcagcctagcccagaatgacaggttggagtcagaaaagaacagatattctgattccgtgctagtctcatcggctttctattctgcagacggtccacaaactacctgccttacacctaacatgacacaagtgcagcaggactgcatatcaagctcctgggagatgcctcaaggtggacctctaggcgagatcttaacgaactccaagattagtgaggacttaagcaagtgtggatctaggtcatatggttggctattgaatcttgaccatgcaccatgattcctcaatccatggagagcttgacatagatatctcaccacggatgcaaacaatgagtcaggaaaaaagaaggtccaaatgaccgtactgtttaccccatgcatgctcgttatctacatttgtacttctatttttgtagtattcagctgttgaattatcagttcttctgaatctggctgtatcttaaacaaattctagtttccgtcaaatgatatcttgcttgctagatgcttaatgtttccttttcagcagaaacttcagtggtccattttaatcaaaagaaaactgtttcaagatcaa

SEQ ID NO: 95590 - DNA, 1747 bp, Zea Mays
ccaccacacaaacggacaaacccctgcctcccaccagaaaagcaagcagaccacacccacccgcctctaaaccaaccagcctgtccccattccccgtccccggcgatgcacgccagcatccactccctcccgtcagcctcttcttctccccctgatgagcgctgagttctgtgctgccgctgctggtgctgtggccatggagctcggagtcggggatgtgatggggctgcagcaaggcatcgccgccgccaccgggccatcgtccggagacagcgacctgggtcttctcaagcgagcaggcctcgcccaggcagccacctcctacccctcccctttcctcgaccaacagaagatgctcaggttctccaaggcggcggcggctcacacgtcgccctcaggcctagacttcggaggaggcccgagcgagcaggctttcctgctgtccaggaccaagcggccgttcactccgtcgcagtggatggagctggagcaccaggctctcatatacaagtatctcaatgccaaggcccccataccttccagcctgctcgtttccatcagcaagagcttcaggtcatccaacagagtgagctggaggcctctttaccaaggctacgcaaacgcagactccgacccagaacctgggaggtgccggcggacagacggaaagaagtggcggtgctccaaggaggcgatgcctgatcacaagtactgcgagcgccacatcaataggaaccgccaccgttcaagaaagcctgtggaaaaccaacctagaaaggccaccaaggaggtgactaccgctgctgctggctcgttgccgtgtgccgggccacaaggtagcttgaagaaggcaaaagttaatgactccaagccaggcactggcagctattggacagatagcttaaacaggacaatgctgagcagagagaaggcaaacaaaccgacggacgacgagtctttgctgcttagttcgacgaagaacagtcagcccaccttgtccctgctcactcaactgaagcagcagaacaaaccagataagttaggtcccacaccggaaaatgagccgaactcggacacgatgttgaaagcctggggtggcagccaccacaagagcatttcctccacacagcgccatgacgctgaatccctccaatcagtcctccaaaatttcagcctagcccagaatgacaggttggagtcagaaaagaacagatattctgattccgtgctagtctcatcggctttctattctgcagacggtccacaaactacctgccttacacctaacatgacacaagtgcagcaggactgcatatcaagctcctgggagatgcctcaaggtggacctctaggcgagatcttaacgaactccaagattagtgaggacttaagcaagtgtggatctaggtcatatggttggctattgaatcttgaccatgcaccatgattcctcaatccatggagagcttgacatagatatctcaccacggatgcaaacaatgagtcaggaaaaaagaaggtccaaatgaccgtactgtttaccccatgcatgctcgttatctacatttgtacttctatttttgtagtattcagctgttgaattatcagttcttctgaatctggctgtatcttaaacaaattctagtttccgtcaaatgatatcttgcttgctagatgcttaatgtttccttttcagcagaaacttcagtggtccattttaatcaaaagaaaactgtttcaagatcaa

SEQ ID NO: 95591 - DNA, 2130 bp, Zea Mays
gcccacatgtcagcagctcgtgggtggccacccgtcctgtagcatggccaccgctggccacgcctcactgcgtagttgacacacgcacgcccgcgcccacgctcctaaataaagaaggcaactgcggaatcgctcgcgacgcaggaggtggggtgagttcgcgggtcgagcggaggagaagcttctggtggtggtggctctcgtcgtcaagcaggaggggagagaggagccggcggcggaggtgaatggcggtggagtaccactgctgctcggcggcctttttcgagcacatcgtcatcatcatcgtgctcgtgctcttcgcgggcctcatgtcgggcctcaccctgggcctcatgtcccttagcctcgtcgatctcgaggtcctcgccaagtccggcaccgagcaggatcgcaagcacgcagctaagattttacctgttgtgaagaaccagcaccttctgctatgcactcttctaatctgcaatgcggctgcaatggaggctttgcccatattccttgatagcttggtgacagcttggggtgctattttaatatcagtgacactgattctgctttttggtgagatcttaccacagtccatctgctcacattatgggctggctattggtgcctcagttgctccattagtccgtgtgcttgtttgggtctgctttcctattgcctatcctataagcaagctattggactatgtgctgggtcatggtcagacagctctcttccgtagagctgaactaaaaacacttgtcactctgcacgggaatgaggctggcaaaggtggagaattaacccatgatgaaactaccataatagcaggagctcttgaactgactgaaaagaaagctaaagatgctatgacacccttgtgtcaaacatttgcaattgatataaatgcaaaacttgacaggaatctaatgcaagaggtacttgagaaagggcatagcagagttcctgtgtattatgaaaagaaaacgaatattattggattgatattggtgaagaatttattatcagttagtgctgatgatgaggttcctataaaaagtgtaactatccgcaaaattcctcgtgttctagaagaaatgcccctctatgacatcctaaacgaatttcagaaaggtcacagccacatggctgtagtcataaggaaaaacaatccaagttaccaaccagctgaacaagctgctaatgatggtggaacttttgaggtgtccattgctattgatgataagaacaacgaaaaggtcgtgaaaaaccttccgccaccactgcaaagatggaagagctaccctaacactcagaacacatcaaatagaggaaataggcctaaaaaatggtccaaagatcaagcagacgttctgcaggtccataaagagcccttgcccacactgagcgaagatgaagaggctgttggtatcataaccatggaggatgtcatagaggagctcctgcaggaggagatatacgacgagacagacgtacatgaggaacaatgacgctggccttgcgccctccctccagctgttagaaagtgcgcttttatgcaaaacttatgtatagataggcagatacactgagagatattttagccgtagcccgtagccgttcattgtagtactataggtggctggctgtctcgagtattggtaaagactgttcggagtgcgtcgttcgttctcgtccagaacagctgggttctgggcatccggggaagaaacggaggcgttgacgcgtgtgtgtaggttcagaagaaaccccaataagataattgcgttgttatatgatgccgctcgcattattaggacgaatctgttgacatatagtcttataaattaaaaacaatgttttgaaaacatagtagagttgaaatttaaaataggagatgggatggaagctgctgaagatagacttagtgccaacttttaccgagatcgtggcacgcagtctggtgtttgttgtatgtagtttggaggtgattgagacatatatggtgtgtttggtttgtagagtcactctatgcttaatgaggtgatgcattataagtttatttaattaatttttgtgtaatcaacccattctttatgtatatactaattattagtttatgagaaa

SEQ ID NO: 95592 - DNA, 663 bp, Zea Mays
gcccacatgtcagcagctcgtgggtggccacccgtcctgtagcatggccaccgctggccacgcctcactgcgtagttgacacacgcacgcccgcgcccacgctcctaaataaagaaggcaactgcggaatcgctcgcgacgcaggaggtggggtgagttcgcgggtcgagcggaggagaagcttctggtggtggtggctctcgtcgtcaagcaggaggggagagaggagccggcggcggaggtgaatggcggtggagtaccactgctgctcggcggcctttttcgagcacatcgtcatcatcatcgtgctcgtgctcttcgcgggcctcatgtcgggcctcaccctgggcctcatgtcccttagcctcgtcgatctcgaggtcctcgccaagtccggcaccgagcaggatcgcaagcacgcaggtaccctatcctaccgtcgccacccgtgtttctcgggggggccgtgtcccttctctcgtctataggtcaataggtgcgatgtcatgttgcgccgggggcgtctgcggcgcctgatttggatgtacggttggtcagatttcgctgcgctggtacacgagttggcttgccattccctcgagcggctccagggtgccggttcgatccatgaataatagaataggcattttgcttggagaatcg

SEQ ID NO: 95593 - DNA, 879 bp, Zea Mays
atggcatgtgagatcaacctccagtgcctttgggccatgatgggacagcaacgggcccgtatttcaaaccagggcttcgtgaacctctccagcagcagcctagaacttgatccatatcgagaaattcaatctccgtcgaccaaccaattctaccacgggtatcgccaaccacgtggcagcgcataccgagtgaaaactacacaatgccgcagcactgcacacgcgctagctggttatggagttaaaactggacgggtaaggggacaaactgggagcctcgcgctggatctcctcgaagggcatggggcagaggaggttgaggaaactgaacatgaacacaagagaacagaggattgggaaactcaactccgcgaatctgaaacagggaatatgcgaggaggatgggtgtcgggtggcggcctcgcatctgtcatccctttggatttctttaatagtcgtaggtgggcagagggcgccgaggaagtgcagcgtcgtcgatggaagggcatcctcctccgcctcctcctcgacagccatcacctcctccgcgggcaggcccgcctcgaaggcttcggcggcttcgcctacggagacgcggagcgcgaggctaacagcgcggcggtaggtggagcgcaggcgcaggagcgaggccgggtgaggcttgggggtggaggtcgatgggagggagaggtgggagagggcggcggcgagggaggagacgaagagcgccatgcttcggacggcggggatgcgggcaccaatgctggaatcgcaggggagggtagaggatggggaaggggcctcctcgctctcggtccccatcgctgccaccgtctaccgctgtcagggagacgcctggcgggtggattccccacttga

SEQ ID NO: 95594 - DNA, 273 bp, Zea Mays
atggtgatcacctcgagcagagtggagtcaagtcgagtcgagcggcggcaacgcgctgccgatggcaatgaactgtcgaggaaggcgatcgaagtggagaggggcacggagggcgggcggggcgctggggaggatggttatagcagtaggagtagttggcgatcggtgggtgggatcggatttggaagtttcgattggaaggaaaggatggcatggaggatgggcctgcggctgcgggtcacagaaaggaaagtgacggttggaacggcgtaa

SEQ ID NO: 95595 - DNA, 835 bp, Zea Mays
aaggcaggcagccacagcacctgaccaccacaacccatcgagcttcccatccggaccggaccccatcaggagcagaggcagagtcgagagtctctcagcgaagccaccgtccgacgccatgtgctaccaggtgaggtgcggcacctgcggcaagaccacgtgggccgggtgcggccgccacgtcgcgtcggtgcacgcgcagatctcggagggccagcactgcgcctgccgcgactggcccggcgtcgaccccgccaccgccccggccggcgtcaagaaggccgccagcgccgctgacgacgctgggaaggactccggcaccgccgcctccactcccgcgcagggcggcgctgcgcagtgaggtcaaaaggtaaccagctccgccggcctcggagacatcgtccacatcgacccagatttcttcagataccttcgcttcgacttcgagtcgagggggaagcttcagctagaggggcgaagccagcgggagccatcagccatgtgctaccaggtgaagtgcgggtcgtgcggcaagtccacgtgggcgggctgcggccgccacgtcgcctccgtgcaccgccagattccccagggccagcactgcgcctgccgcgattggccgggcgttgccccggccggcgacaaggcggccgccgcggaggggccttcgtccacgtctgtctgcaccatcctgtgatttgagcccgcgcatgttacctctggtgtaggggatgtgcgattgtgtacggttatatttgtctctcttttttttgctcttttttcctaatctctaaatacaatacttctcttgcgagctcgaaaaaaatacttatca

SEQ ID NO: 95596 - DNA, 1400 bp, Zea Mays
attatataagctcaatcaatatctggcatggaggactcgagccagttcatgcagtgggccctgagcacgctgcagcacgatgagctcccaccggcgacgccgccggcggccatcgcctacgacgacaatgactgcaacaccttctcatcagtcccggcgctggggtactccgctgcatcagtcaacagcatggtcccggcggaaccaccagcacaggaaggccaccgggccaccgccgccaccaacagctggagctcggccgacaccgcgtccgtcacggccgcgcagcgtgacgcctggtcgccgtcttcgcagcagaactcggtcaattgtgccacgccccgcagcagcggcagcagccagcccgtgagctgggacttccattcggcgtcggcgtcggcgtcggcgcagctaataatcaaagaagcccaggtcaactctgccacggccgcaagggcagagagcgccgctggcggcatgccggtgccacagccacagatggttcaaaacgggtcgccgccgacgaggagggcctctgccaaaatgtcgtcggcttcttcgtctgcgccgccgtgctcccaggatcacatcgtcgcggagcggaaacgccgggagaagatcaaccagcgtttcattgagctctcggcagtcatcccctgcctcaagaagatggacaaggcgactatcctatccgacgcgacgaggtacgtgaaggagctccaagaaaagctcaaggcactgcaacaaggcggaagctgcaacgcccggggcggcacggagtcggcgccggtgcttgtcaagaagccgcgcatagcggcgccgggggatgacgacaaggaccgcggcggcgcgccttccccttcctgcgcgccgcctggggctgcggcgaccaccgggaacgcgctgccggagatcgaggcgaggatctcggacggcaacgtcgtgatgctgaggatccactgcgaggacggcaagggggtgctcgtcaggctgctggccgaggtcgagggactccgcctcagcatcacgcataccaatgtcatgcccttctcggcctgcatcctcatcataaacataatggcaaaggtggcggagggcttcaacgccacggcggatggcattgtagggaggcttaatgcagtgctagcagctggaccaacgtgttagggatgggtgcgcagaaaaacaacaagctgtgtcaaagaactagcggcgctacccgaataatttctgcatgggccgggcctgtacatacttgtatgtcaccaagaagtacctttggcgttctatcgcatgcatatgcagttcctctttgattcgagcgaataatgtcggtgtgtcgtatgtttatccaatcagaggcctagcggatattgtgagcctaaaacttactttcaagg

SEQ ID NO: 95597 - DNA, 1491 bp, Zea Mays
gagtccaacgccgcctcctcttgcaccgtagtccggagaccaggacggctccaccgtcacagtcggcggtcgagcggaagggtgacgagactcgacgaggctccgtaggtggcaggccccgtcttcctctacgacctcccttcgtctcgagaaccagaggtccgagctccgcaggctgcaagccccttcttcctccacgccctcccctcactggcgcgggggagcaccgcctcagcccggccctgctctccgccctccgcttccgcccgccgcgcctccccgggtgcgctcgtcctggcctccgagggcaagttcttcagcaacggctacgacctcgtgtgggcgcgcgcggggccggccccggcgctggggcaccgcctcttcgcgatacgcgccgcgttccgcggcctcgtcgccgacctgctcgcgctccccgtgccaacggtcacgaccgtcacgggccacgccgcgggcgccggctgcgcgctggcgcacgacgccgtccccatgcgcgcctcccgcgggttctccctactggcgcgggcgacgacgtggccggcgggagaaccggcgcggtgggcgccctgctgcggcggtggcaacccaggacctgctggaccggtcggggcccgcgctgcgcgccggggcgtgggcgttctccctgctggcgtttctcgtcattgcctgcaacgagcatggggactggaggcagttcgaccgctacgaggagtacaggtcagcgcatctccgccgtctctctctctctctctgccctctctgtccggctgtgcttctccactcttctcgtccaacgaattgatatcggtttgcttgtcaggtacatcgtttccatcggcccgctggacttcatctacacgacgctgcagctcctccggcacggcgtccgcctcactggcggccaggacctggagcccaagaccggcctcctcgtcgacttcaccggagaccagaactgcaaaacaataagactcttctccaacaaagagcatatgggtttcagcaatgtcaatgactatccaccaatggacaccctcaagctatcctctgataatttgatagagctaaaggatataatggataagagtgtgccaaagttgttcgataacaaagctctgatacttgctaataccctcaaaggaactgaatttactgcaacttcacgcagcagctttcctgatagcatgggagatgatttgatcatcgatgtgtctaattcaaagggaaagttttgtggttgtgttgttgcccaagttgctacaatggctagggatcctgagtcagggttccctcaattgtgaatgctcactcttgagcaaagggctaggctaaagagcagctccatccagttcgacgaccatagtatttgcgagtgggtgcacaacctcaaattagcaagtacatgcctacatcattgacaactaaaggcaattactgagggagctcggtggggaagacctaaaggtgaagact

SEQ ID NO: 95598 - DNA, 1411 bp, Zea Mays
attttgcaaggatctgagctgttggagtgttagaccaaccccggccgtcagctggcaaaatggaggactcgagcctgttcctgcagtgggcgatgagcacgctgcggcatgagcaacaacccgcggcagccgtcaacgacgactgcagcagcgaggcaacgttcccctcactccaagcgctccgcgaggcctcgcatgcggccgagatggtccaggagctgatcggagaagccccagcgaacagctggagctcgggcgacaccaccgacggcagcataggaggcaacagcaactcggtccctggccctgctgcggcggccatggagcacgatgtctggcctgctgcgtcgtcgaagacctctccggccaggcgcgccttgagcaggagcagcagcgacaccaaccctcccgtgagctggaacttcagcgccgcagcctcggcacagctggccggcagcgccgacggcatgctgccggaattcgcccccaagagcgccctaccgccggaccaagcgtacggatcaccgcgggcaaggagagccggcttgaagagcctggcgggatccatgtcgtcggcggcgtacgctcaagaccacatcatcgcggagcggaagcggagggagaagatcaaccagcggttcatcgagctctccaccgtgatcccaggcctcaagaagatggacaaggcaacgatcctttcagacgcgaccaagtatgtgaaagaactccatggaaagctcaaggacctggaggctggcggcagcaaccggcgcaagagcatcgagacggtggtgctcgtcaaaaggccgtgcctccatgctgcgcccgcgccggacgacgatgcctccccattgtcagcgtcgtcaggcacgccggctgagacgaagacgcagctgccggagatcgaggcccggttcgctgagaatagcgtcatggtgaggatccactgcgaggacggcaagggggtggccgtgaaggtgctcgccgaggtcgaggagctccatctaagcataatccatgccaacgtcctgcccttcgtagagggcactctcatcataaccatcacggcaaaggtggaggagggctttaccgtatctgcgggggagatcgttggcagactcaactctgcactactgcacaacaacgagcataatagatgctgcaacatcgctgatgagtgatgaagaaacaataaactagctaatactccctcccattttttatatgacgctgcttagtttaaaattgaattgaccagcgttatatataaactaacggaggtagtataatctagcgcacgcgcgccctatatataccgcggcggtatgaaattgaagtccgacggtatatgatgctggttgctggagtgtttctgctttttttaacaagttttacggctcttgctggtttt

SEQ ID NO: 95599 - DNA, 112 bp, Zea Mays
cttaagatgtgttgggcacttaatcaccaaaatatactagaaatggcccaagggcacatttccctttcactcctcacaaggaaccaaatagcaccttagtttgatcctgctt

SEQ ID NO: 95600 - DNA, 195 bp, Zea Mays
gagaaaaaagagaaaactgaggacggttaggcagctgaatctgcggtgccttccctggcgtcttcaaaaagagagaagaaatagaatggaggtgccactaaaccagcagccccgcttgcgattgagaaaggcatatgcccctcctccagctgaggcagaaaagggtgccgagatttcaggctacgtgaacaccgc

SEQ ID NO: 95601 - DNA, 700 bp, Zea Mays
atggagttccctcgaatgtcttgcacagaacttcgatgggatctagaaatcatacctagggcagcatccaacgaatcacgacgggatttgggtgcttgtcgtccatccatcgcgaacggtggggaggggcgactggatagaccagaactaagcacctatgatggaaaggggaggaggggaagatcaggcaacaagttcctgtatcgtcgaggaaggaggctgcgaggaagatcaatggatgaaggagagatggagaaaggaggatgcgaggtggagatatgtggagcttgcctgggatgggatggacggacgggggcgacgtgggatggacggaggggcagcatagttctagataggcgtgtatataacggagaagaaaggcagttggtgaagtttccgtatgaagcgcgagtagggatagcgccagacgaaatattgttgtatacaagtcggttgtacttgtgttacgatggtttacaacaatacctacataaattatctaccacaaaaagttcaagattttttattgattgtatccgctcttcgtataatatttttttttcatttggctaactgatgttattgtttactccattcaatatgtcatggtacaacacgaccaataaagtgagcgattataaaatagttcacaacgactgactgaacgaacaaagattataaaataacataattccaccat

SEQ ID NO: 95602 - DNA, 722 bp, Zea Mays
atgctcgatcgtgctatcttcttcccgtacagtgccagccagcaggccatcttccccagcaggctagtgctgcctgcccgtaacctaatggacggctgatgcttcgttatgcgctcatcttccccaagcagcgcccaccgaagatccgtatgcgcaacctccgatatcatcgacgggtggtgtgctcggcgtggccgtgccgcagcggcgcaagcaagcatggcacttgccctaacagcggcgtcggcgcgctcgctgaagcagcagccgaccatagcgcctgaatgctggctttcgtccccgacgccgacgcctatccgtgggcttcttcttcccgaccaccccccacgtctagagcgagcagccgcgcttgaccgactttcgtcttcccgagcagcaacgccggccgaagccccctcccgacggcgcgcgacttgctgaatcatccctcggagcacgctgcacgcgacggactgtctccgacgccggcgcgaatgggcagatctccgacatttaggcatgtgaagggtcgcctccacccccaccacgcaacgggccggagctaccgcgcactgacgtcagtaggccttcttccccgagccgcgcactgacgtcagtaggcccgaagcagccgtcgttggggctgttgaacatgtgctgctgaaactttctgttgtgcctactgaaactaaaactgaacctgttgaacgtgtgctgctgta

SEQ ID NO: 95603 - DNA, 665 bp, Zea Mays
ccgtaccttacgaagatgcagacgcgatggttgggacgacgcggaaccttgaggacggagcaagggcgtcggcgtcactgcggcaaccatacggacagaggaaaagggtgaaggaaacgcggcaatgcgaggagaagacggtggtggcagcagcagcagcagaagcaggcccagctgctatggcggccatggcggcagagaacatggacatgcgtgtctatgtttatgtagtaggaccacgcaaagcggaggatgagagggcaaggagttggaatgttgataatgaaaaggaagttggaatgttgataatgaaagggaagttggaatgtgatagccgtttatacggcctgctggagatggagatggcctcagaggagtcaggcctgggcgtcctcgcaaatgccaaaaagcctactgttccattccatcccatcccatcccacacggacacggccccgtgtcgcgcggagtgccgctgccgccgaaagaaggtgccggacgggcgggtgcagtcggtgcgccaggatctggatgccgccactgctgcttgccgttggcgtcagggtcaggctctccagtcatatggatggaccacaaacgcgtctctctttccctggatctatgcggcggcccttccatcccacccaccatcagcgtctctctaa

SEQ ID NO: 95604 - DNA, 1087 bp, Zea Mays
accgaaccggctgacaaaaatttcgagcagcagagtaaacatggcgggaatttttggcgccatccattctcccgccgccgcctgcctatttagcccccggcgcccgccgtctcttcgtccactcagcccactaccttccatattttccctcatctcccgccgcctgcacccaacaagcctctcgacgctagtcatggccgcttccaacggcgccgccgcggtcgacgagaccgtcgccgccaccgactccgtgcaggagcctccccagaagatctccaagatctctcccctgctcaaggtgaagaagctctccgagaaggccgtgctgccgtcccgcggctccgctctcgccgccggctacgacctctcgagtgccgaggagatggtggtgccggcgcgtggcaaggcgctcgtgccgaccgacctcagcgtcgccatcccgcacggaacctacgcgcgcatcgcgcccaggtcggggctggcgctgaagcactccatcgacgtgggcgccggcgtgatcgacgcggactaccgaggccccgtcggcgtcatcctcttcaaccactccgacgccgacttcgccgtgaagcccggcgacaggatcgcgcagatgatcatcgaggtgatcgcgacgcccgaggtcgcggaggtggaggacctcgacgccaccgtccgtggggacggagggttcgggtccaccggcgtctgaagggattcggtgtctaggttaggatggcgatgcaagccttggtgtcttttgttggctctaagaaatcgtgatgttcaccatcactatcctgctatcgataattagtattgagattagtacgtaggttgcgtagttagctcgatgcacgtactattgtcgagaactcgctattctgtgatgttgaaaatgtctaatgatcctgcagtactgtcgcattagacccatgaagaagcccaatttgacggcggatatggcctgatacccaaattactaacaacttgaggcggctatcgataatttcgctcgcctttgcaagtgtggaattgcatgactatggaccattcaacgacaataactgcctgtctattctacatgtct

SEQ ID NO: 95605 - DNA, 1071 bp, Zea Mays
aaacatggcgggaatttttggcgccatccattctcccgccgccgcctgcctatttagcccccggcgcccgccgtctcttcgtccactcagcccactaccttccatattttccctcatctcccgccgcctgcacccaacaagcctctcgacgctagtcatggccgcttccaacggcgccgccgcggtcgacgagaccgtcgccgccaccgactccgtgcaggagcctccccagaagatctccaagatctctcccctgctcaaggtgaagaagctctccgagaaggccgtgctgccgtcccgcggctccgctctcgccgccggctacgacctctcgaggtacgccttttctcgccgcaccccctaaatgcccatggaatccccagcggcgcgcggacctgttgatgggtttgttgtttggcagtgccgaggagatggtggtgccggcgcgtggcaaggcgctcgtgccgaccgacctcagcgtcgccatcccgcacggaacctacgcgcgcatcgcgcccaggtcggggctggcgctgaagcactccatcgacgtgggcgccggcgtgatcgacgcggactaccgaggccccgtcggcgtcatcctcttcaaccactccgacgccgacttcgccgtgaagcccggcgacaggatcgcgcagatgatcatcgaggtgatcgcgacgcccgaggtcgcggaggtggaggacctcgacgccaccgtccgtggggacggagggttcgggtccaccggcgtctgaagggattcggtgtctaggttaggatggcgatgcaagccttggtgtcttttgttggctctaagaaatcgtgatgttcaccatcactatcctgctatcgataattagtattgagattagtacgtaggttgcgtagttagctcgatgcacgtactattgtcgagaactcgctattctgtgatgttgaaaatgtctaatgatcctgcagtactgtcgcattagacccatgaagaagcccaatttgacggcggatatggcctgatacccaaattactaacaacttgaggcggctatcgataatttcgctcgcctttgc

SEQ ID NO: 95606 - DNA, 1043 bp, Zea Mays
accgaaccggctgacaaaaatttcgagcagcagagtaaacatggcgggaatttttggcgccatccattctcccgccgccgcctgcctatttagcccccggcgcccgccgtctcttcgtccactcagcccactaccttccatattttccctcatctcccgccgcctgcacccaacaagcctctcgacgctagtcatggccgcttccaacggcgccgccgcggtcgacgagaccgtcgccgccaccgactccgtgcaggagcctccccagaagatctccaagatctctcccctgctcaaggtgaagaagctctccgagaaggccgtgctgccgtcccgcggctccgctctcgccgccggctacgacctctcgaggtacgccttttctcgccgcaccccctaaatgcccatggaatccccagcggcgcgcggacctgttgatgggtttgttgtttggcagtgccgaggagatggtggtgccggcgcgtggcaaggcgctcgtgccgaccgacctcagcgtcgccatcccgcacggaacctacgcgcgcatcggtgagcgacgaaaccgctccctcttgtttttgcttctgtcccgttttgttcgccccgcgggtgtttgaggaaacgtttgtccggtctggtcgccttgcagcgcccaggtcggggctggcgctgaagcactccatcgacgtgggcgccggcgtgatcgacgcggactaccgaggccccgtcggcgtcatcctcttcaaccactccgacgccgacttcgccgtgaagcccggcgacaggatcgcgcagatgatcatcgaggtgatcgcgacgcccgaggtcgcggaggtggaggacctcgacgccaccgtccgtggggacggagggttcgggtccaccggcgtctgaagggattcggtgtctaggttaggatggcgatgcaagccttggtgtcttttgttggctctaagaaatcgtgatgttcaccatcactatcctgctatcgataattagtattgagattagtacgtaggttgcgtagttagctcgatgcacgt

SEQ ID NO: 95607 - DNA, 2281 bp, Zea Mays
cactttgtcagtttgccgtcgctgtcggcgccgccgcctgtcctaatctcctctgagtccagcggccacctcctccaccgggagctccccgtaccataaccgcagtccgcagccattggaatttccgcttcatgcgtggatcctcgtagaccccgacccgcgtgcactcaatccctaggcggcggcctccggcgcgaggctagcgggcggcacccatggcgtccgtggcggagctcaaggagaagcacgccgcagctacggcgtcggtgaactccctgcgcgagcgcctccgccagcgccgggagacgctcctcgacaccgacgtggcgaggtactccaagtcgcaggggagggtgccggtgagcttcaaccctacggatctggtctgctgccgcacgctgcagggccatagcggaaagactgccagagtaatgaagaagaaaatgataccgttgcgaggttgatgtttgagctgtgggacaggattatctgcatgtacattctgttgcagagatacttagcgctgcatggatctgtcactgaaatattattcgataattggtagctagaggtacaagtaaacaattctgcaattctactatatgaggggggataatgattatttctagggggcaagtcaaatcatcattgtaaaagggaaatcattctttctcttcagaagcaagctaacaaggattatatcatcccattattttggtggcacttggcagccttcttttgccctagctttgataaaaggggcctggggaagggataaaccgaggcaagcctcctccctgctgctaaaaattaggatcttccagatttattgccatttaactagagtatttttttgtgagggccatttaactagagcagaacacctcatcatgttgctaaagttatgaaaacttttggagacatggacttccacctgttcgaagatgcataattgcatatatttggattttgcggtgattcttggaaattcagcacttcagctatctgtgtatattctctggattggacccctgaaaagaattggatagtcagtgcctctcaagatggaaggttaattgtgtggaatgcattgacaagccagaaaacacatgccataaagctgcattgcccatgggttatggcgtgtgcttttgcacccaatggccaatctgtcgcctgtggtggtcttgatagtgcgtgctctattttcaatctcaattctcaagcagacagagatgggaacatgccagtatcaagaattcttactggacacaagggctatgtctcatcatgtcaatatgtcccagatcaggaaacacgtcttattactagttcaggtgatcaaacatgtgttctttgggatgttactactggacagaggatatcaatatttggtggtgaattcccatcagggcatacagctgatgttcaaagtgtgtccatcaactcatcaaatacaaatatgtttgtctctggctcatgtgatacaactgtgaggctgtgggatatcagaattgcaagtcgagctgttcgaacctaccatggacatgaggatgatgttaacagtgtgaagtttttccctgatggccataggtttggtactggctcagatgatggcacatgtagattatttgatatgagaacagggcatcaacttcaggtgtacagtagggagcctgatagaaatagtaatgaactacctactgttacatctattgcattttcaatatcaggaaggctactttttgctggttactccaatggtgactgttatgtgtgggacacacttctcgccgaggtggtacttaatttgggaaacctgcaaaactcccatgatggccgtataagttgcctcgggatgtcatctgatgggagtgcattgtgtacaggaagctgggacaaaaatttgaagatttgggccttcagtggacaccggaagatagtttgaaggccaacttttctcccccatgttgtatgttccttgttgccccttaacaacggacagtggtgattggtgaccaactcgacttgttcctgggaatccctttgttgttttgtaagctctgttcgcgctatgtttaatggaaaaatgtgcaatttgtcagtgtcacggcgctacatcttgttgagttggtaactgtttatactgttattacgagaatatcagtaacgtgtgatctgcccttttctttgtacaaccgtttgatcttttcaggttttgtgaagtagcatgtatttccttaatcaatttatcatatcagtttgtccatttgctgaatta

SEQ ID NO: 95608 - DNA, 2360 bp, Zea Mays
cactttgtcagtttgccgtcgctgtcggcgccgccgcctgtcctaatctcctctgagtccagcggccacctcctccaccgggagctccccgtaccataaccgcagtccgcagccattggaatttccgcttcatgcgtggatcctcgtagaccccgacccgcgtgcactcaatccctaggcggcggcctccggcgcgaggctagcgggcggcacccatggcgtccgtggcggagctcaaggagaagcacgccgcagctacggcgtcggtgaactccctgcgcgagcgcctccgccagcgccgggagacgctcctcgacaccgacgtggcgaggtactccaagtcgcaggggagggtgccggtgagcttcaaccctacggatctggtctgctgccgcacgctgcagggccatagcggaaagactgccagagtaatgaagaagaaaatgataccgttgcgaggttgatgtttgagctgtgggacaggattatctgcatgtacattctgttgcagagatacttagcgctgcatggatctgtcactgaaatattattcgataattggtagctagaggtacaagtaaacaattctgcaattctactatatgaggggggataatgattatttctagggggcaagtcaaatcatcattgtaaaagggaaatcattctttctcttcagaagcaagctaacaaggattatatcatcccattattttggtggcacttggcagccttcttttgccctagctttgataaaaggggcctggggaagggataaaccgaggcaagcctcctccctgctgctaaaaattaggatcttccagatttattgccatttaactagagtatttttttgtgagggccatttaactagagcagaacacctcatcatgttgctaaagttatgaaaacttttggagacatggacttccacctgttcgaagatgcataattgcatatatttggattttgcggtgattcttggaaattcagcacttcagctatctgtgtagggtactacttgcaaaattgctgcatcaaatggtttagtggtattctattaactcctaagtcatcaatcatcacaggtatattctctggattggacccctgaaaagaattggatagtcagtgcctctcaagatggaaggttaattgtgtggaatgcattgacaagccagaaaacacatgccataaagctgcattgcccatgggttatggcgtgtgcttttgcacccaatggccaatctgtcgcctgtggtggtcttgatagtgcgtgctctattttcaatctcaattctcaagcagacagagatgggaacatgccagtatcaagaattcttactggacacaagggctatgtctcatcatgtcaatatgtcccagatcaggaaacacgtcttattactagttcaggtgatcaaacatgtgttctttgggatgttactactggacagaggatatcaatatttggtggtgaattcccatcagggcatacagctgatgttcaaagtgtgtccatcaactcatcaaatacaaatatgtttgtctctggctcatgtgatacaactgtgaggctgtgggatatcagaattgcaagtcgagctgttcgaacctaccatggacatgaggatgatgttaacagtgtgaagtttttccctgatggccataggtttggtactggctcagatgatggcacatgtagattatttgatatgagaacagggcatcaacttcaggtgtacagtagggagcctgatagaaatagtaatgaactacctactgttacatctattgcattttcaatatcaggaaggctactttttgctggttactccaatggtgactgttatgtgtgggacacacttctcgccgaggtggtacttaatttgggaaacctgcaaaactcccatgatggccgtataagttgcctcgggatgtcatctgatgggagtgcattgtgtacaggaagctgggacaaaaatttgaagatttgggccttcagtggacaccggaagatagtttgaaggccaacttttctcccccatgttgtatgttccttgttgccccttaacaacggacagtggtgattggtgaccaactcgacttgttcctgggaatccctttgttgttttgtaagctctgttcgcgctatgtttaatggaaaaatgtgcaatttgtcagtgtcacggcgctacatcttgttgagttggtaactgtttatactgttattacgagaatatcagtaacgtgtgatctgcccttttctttgtacaaccgtttgatcttttcaggttttgtgaagtagcatgtatttccttaatcaatttatcatatcagtttgtccatttgctgaatta

SEQ ID NO: 95609 - DNA, 1691 bp, Zea Mays
cactttgtcagtttgccgtcgctgtcggcgccgccgcctgtcctaatctcctctgagtccagcggccacctcctccaccgggagctccccgtaccataaccgcagtccgcagccattggaatttccgcttcatgcgtggatcctcgtagaccccgacccgcgtgcactcaatccctaggcggcggcctccggcgcgaggctagcgggcggcacccatggcgtccgtggcggagctcaaggagaagcacgccgcagctacggcgtcggtgaactccctgcgcgagcgcctccgccagcgccgggagacgctcctcgacaccgacgtggcgaggtactccaagtcgcaggggagggtgccggtgagcttcaaccctacggatctggtctgctgccgcacgctgcagggccatagcggaaaggtatattctctggattggacccctgaaaagaattggatagtcagtgcctctcaagatggaaggttaattgtgtggaatgcattgacaagccagaaaacacatgccataaagctgcattgcccatgggttatggcgtgtgcttttgcacccaatggccaatctgtcgcctgtggtggtcttgatagtgcgtgctctattttcaatctcaattctcaagcagacagagatgggaacatgccagtatcaagaattcttactggacacaagggctatgtctcatcatgtcaatatgtcccagatcaggaaacacgtcttattactagttcaggtgatcaaacatgtgttctttgggatgttactactggacagaggatatcaatatttggtggtgaattcccatcagggcatacagctgatgttcaaagtgtgtccatcaactcatcaaatacaaatatgtttgtctctggctcatgtgatacaactgtgaggctgtgggatatcagaattgcaagtcgagctgttcgaacctaccatggacatgaggatgatgttaacagtgtgaagtttttccctgatggccataggtttggtactggctcagatgatggcacatgtagattatttgatatgagaacagggcatcaacttcaggtgtacagtagggagcctgatagaaatagtaatgaactacctactgttacatctattgcattttcaatatcaggaaggctactttttgctggttactccaatggtgactgttatgtgtgggacacacttctcgccgaggtggtacttaatttgggaaacctgcaaaactcccatgatggccgtataagttgcctcgggatgtcatctgatgggagtgcattgtgtacaggaagctgggacaaaaatttgaagatttgggccttcagtggacaccggaagatagtttgaaggccaacttttctcccccatgttgtatgttccttgttgccccttaacaacggacagtggtgattggtgaccaactcgacttgttcctgggaatccctttgttgttttgtaagctctgttcgcgctatgtttaatggaaaaatgtgcaatttgtcagtgtcacggcgctacatcttgttgagttggtaactgtttatactgttattacgagaatatcagtaacgtgtgatctgcccttttctttgtacaaccgtttgatcttttcaggttttgtgaagtagcatgtatttccttaatcaatttatcatatcagtttgtccatttgctgaatta

SEQ ID NO: 95610 - DNA, 2197 bp, Zea Mays
tcatcggcctctcacggtccaggctccagcgatccgatccgaccgccgtccacgcgccacggcccacgcacgtgggcatgcacaggcgcacagcacagcgcgtgtcccgcacagctcagctgcctgcttaagactctggtgcgcgtacaccagacaccggatgccttccttgcactggcccgcgtcgggacctacgtgctagcgccataccataggcggaggccacccccgcgtaggcgtagccgcgtaggcatacgattcctgcgtcatctcgcctcccgtggtcgacgagctcgcgtccacgtttaaatggctccactcacacttggcctcgttctgctgcagctcgtcccttttgccccaatcttcttctccaaaccacatcctctggcctctgacaggtgacgagtcccatgggtgccgcggcgaggaagcccgccgccgctctgctgccaatctggctctgtctcgtctgcgtgtcaagagcgcagccgtacatcggcgtgaactacggcgaggtagcggacaacctgccgtcgccggacaagacggcgaggctgctcaagtcgacgtccatctccaaggtgcggctgtacggcgtggacgcggggctgatccgcgcgctggcggggtccggcatctccgtggtggtgggtgtggccaacggcgagatccccacgctggccgccgacccggccgcggcgtcgcggtggctggccgccaacgtgctgcccttcgtcccggcgaccaccatctccgccgtggccgtgggcaacgaggtgctggagtccggggacgccgcgctggccgccgcgctcctcccggccatgcagaacctccgcgccgcggcggcggccgcgggggacggcgccgcggggatccggttctccaccgtgaacaccatgggcgtgatggcgcagtcggagccgccgtccgcgggcgcgttccacccggacgtcgcgccgcagctgcagcagatcctgggattcctgagcaagaccggcgcgcccttcatggtcaacccctacccgtggttcgcgtaccagtcggacccgcggccggagacgctggccttctgcctgttccagcccaacgccgggcgcgtggacggcgggtccaaggtcaggtacgccaacatgttcgacgcgcagctggacgccgtgaagtcggcgctggtgcgcgccggatacgggggcgtggacatcgtggtggccgagacggggtggccgaccaggggcgacgccggggagcccggcgccacggtggagaacgccagggcctacgtgtccaacctggtggcgcacctgcggtccggcgccggcacgccgctgatgccggggaggtcggtggacacgtacctgttcgcgctgtacgacgaggacctcaagccggggccgacgtcggagcgctcgttcgggctgtaccacacggacctgaccatggcgtacgacgccgggctgacctccaactccaacgccgggggaggtacaggtactgcggcgccggcgcagcccaaggcgggcgggtggtgcgtggcgcgggacggcgcttcggacgcggagctgcaggcggacctggactacgcgtgctcgcaggtgggcgtcgactgcggcgccatccagcccggcggcgcgtgcttcgagcccaacacggtgcacgcccacgcagcgtacgccatgaaccagctgtaccaggcggccgggcggcaaccgtggaactgcgacttccgggcgtccgccacgctcacctccgagaacccaagctacggcgcatgcgtgtacaccgggggaggccaataatacaccgcgtggcagcgcacgattagttttgcgtgtaccatgcatgatgccgagcgagggaagttgggcccacaggctacagcaaggaggtctggactaccatggatgccaatgcgatccacggaggcgaagcatcctcttgtttggcgcgtcctttccagatgccttgcctgccaggctgggatgtgtttgtaacttcgtgtaaaaagaactgttagatgtttgccagtgtcacgtgatctttgtgcatatagtacgcgtgtcttaatttacaagtggaatgagattgtatgtgtgattaatttttttaaataatgttttatatataaaaatgttagaatatagtataaatgaattgtctgtatcctcctattaacttaatcattttgcattgaatt

SEQ ID NO: 95611 - DNA, 898 bp, Zea Mays
tcatcggcctctcacggtccaggctccagcgatccgatccgaccgccgtccacgcgccacggcccacgcacgtgggcatgcacaggcgcacagcacagcgcgtgtcccgcacagctcagctgcctgcttaagactctggtgcgcgtacaccagacaccggatgccttccttgcactggcccgcgtcgggacctacgtgctagcgccataccataggcggaggccacccccgcgtaggcgtagccgcgtaggcatacgattcctgcgtcatctcgcctcccgtggtcgacgagctcgcgtccacgtttaaatggctccactcacacttggcctcgttctgctgcagctcgtcccttttgccccaatcttcttctccaaaccacatcctctggcctctgacaggtgacgagtcccatgggtgccgcggcgaggaagcccgccgccgctctgctgccaatctggctctgtctcgtctgcgtgtcaagctacggcgcatgcgtgtacaccgggggaggccaataatacaccgcgtggcagcgcacgattagttttgcgtgtaccatgcatgatgccgagcgagggaagttgggcccacaggctacagcaaggaggtctggactaccatggatgccaatgcgatccacggaggcgaagcatcctcttgtttggcgcgtcctttccagatgccttgcctgccaggctgggatgtgtttgtaacttcgtgtaaaaagaactgttagatgtttgccagtgtcacgtgatctttgtgcatatagtacgcgtgtcttaatttacaagtggaatgagattgtatgtgtgattaatttttttaaataatgttttatatataaaaatgttagaatatagtataaatgaattgtctgtatcctcctattaac

SEQ ID NO: 95612 - DNA, 1334 bp, Zea Mays
tggggcaagttttggtgcagatgctgctataataatcatccctctcgttgtagctaaggcaaacatcatcaggttcgaacctgagctacaaaaacagaagctttcactcttttagcaattgttgatcttggcactggcatcaagaacaagatagctctcaagttcaacaccatattttggcccaacgttgaagtgctaggtagtatcgcccccaacaacaagtgtatgtggctactttctcaaccttcacaaaacccagtcctagtatgcatggtagctggtagattcactcttttggttcattctacctaaaaggaggttggatgtccctgggaggaatactgctatgtgtaactggttctgaagcaatgtttgctgatttggggcatttcaaccagttgtcaatacagattgcttttacatgcatggtgtatccagcattgatccttgcatacatgggacaagctgcttatctgtgtaagcatcatatcatggaaagtgactacaggatcagattctatgtgtctgtgccagagaaaattaggtggcccattatgacaattgctattcttgcagcagttgtgggaagccaagccgtcatcactggtacattctcaatgatcaagcagtgcgcttctctgggctgctttcctcgggtgaagataatccatacatctgccaaagtacacgggcaaatatacatccctgagatcaattggattatgatgatattgtgcttagctgtaaccattggttttaggaacacagaacacttgggaaatgcatcaggattggctattataaccgtcatgctgttcacaacgtgtctgatgtctctggtgatagtcttgtgttggcataagagcatattccttgcgattggcttcatcctgttctttgggaccattgaggcactttacttcttagccgcactcatcaagttcagggagggagcctgggtcccaatcgttcttgctctcatcttcatcttgataatgtgcatctggcactatggcaccatcaagaagtacgagtttgacgtccagagcaaggtctccatcaactggctccttggtctcagcctgaaccttggcattgtccgcgtccgtggcattggcctcatccacaccgagctcgaaaccggcatcccaggagttattggttcttgccacatccgtaaaaatgacccagggtgtatgagcgcagacagaagggggatgaacgggtggcaacgacattggtgcggcgacataactggtgagagcaaaatgggagctaagtgtggcatcaacattggggataaagtcaggacgagtacaacaaggggatggtga

SEQ ID NO: 95613 - DNA, 762 bp, Zea Mays
ccaaatcaacccaattagcaagttggtgtaattgttgcaattaactcttccctggaaaaacaaaacataaaactttcagttatattttctggtattatttcctttgtattttcttattaatgctatgttcaatcatttgttttcgtgctcacaaaagccacttgagcttgccgtcccatccactggtgctgcgccgcaatcgacaggaactgccccaagaaaaccactcaggttgaggttaacgactttggggaaaccgaagccagctgaaggaacttcctgaatggaattgcccaggagccaacatacctagagcttgtttttccttgtattgaagcaaggatatgtggaagcgctcggcacatagcctgctttggcactgcgagttgaaacgaaatggaaaacggaggccgcctgacgtaaatgagtgcgattgtaataaattgtatgtagttcatagctgggttggtatcagagttcaccatttcgtttttgctgtagcgaatttcgtttttttaaccaaagtttgactcttatattttttgaatttggaaccaaaatccataaaaaacctgaccgaaattcgcatcttggtcaacagcgagcagcgaaaattggaaatttcaccaaaattcggtgatttccgagaaacgaatccgtggttgggcatagatgtacgcagcggtacattttctcgacgacttagctatgcttgtaattgcaatgatgttcaaacggaagtggatatcgtctttgaagcat

SEQ ID NO: 95614 - DNA, 3719 bp, Zea Mays
cacccacccggcccctgtcgcgtttccgtagttcctgtcctgtccgcgagccgcgtcagcgtcagtgcgtcaccggcctcccgtccgtcgccgccgccgggggcccatccacatccgccgccgcgggcccgtccgtccaccacaacgccgccatccgcggccgaaggcgctcccccgtccgcccgccaccacgccaccgcctcgcccctgtccgctgccgcgccgccgtcagctcggccccgtccgcaaccgtggccccatctacatctgtcgtcaccgccgccctcccatcacacgccgccatccgtccccttcggaagcagtgaagtgcttgcgcatcctctacctctctttgataaaactgggcttgggcccgctccaccacgaaggaacaagggaagggaaaggaagcagcaagcgctccgccgacctccccggtcgccgcaccgcttccctcccacgtcgcagacgccgcgcccgtcgcccgactcggaagaacggtcctggcccggcgctcgctcgcccgccgttagcttgtacccctcctgctcggatccaagaacgattccggtatcgacggcggcggcggtgttcctgttgtcaccggcgcgtttcgtctcgtgcgtctcgttctgtaactggaaaagaagccgcatcattttctttttttactcttagttatttctgatttatttgggtcctgctctttctcatctagttttggggcctgctcccggggttcttgagttgttaatgtcaagtgagaaaccgactgtaccagacattgttttaatcccccaccgtccggttcttttttgcacatgccgttgattcaatagttgtccttcactctgacacccggaggaaaataaaaaggaaaggaaaaataagtgttgaggcagtgaagggcaaaaagatcaaatttacgtttagcgaaggtagctgtgtgagaatttgttaattctgaagttgagtgttaggagagtttgtgagggctgtggaatgtcgaaggtgaagaacaataatggttatcatggagtcactgagccaatctcgctgagtggaccgactgagaaggaccttatgcagacagctgaggttgaaaagtacctttcagatgcaggactctatgagaggcaagatgaggctatcttgcgagaagaggttttaggcaagctggaccagactgtgaaagcttggattaagaaggctactaggatcagcgggtatggggagcaatttgtgcatgaagcaaatgcaaagatctttacatttggttcataccgtcttggggtacatggccctggtgccgacattgacaccctatgtgttggtccaagacatgcaactcgaaacgagtacttcttcagatggcttcatgatatcctagctgagatgccagaagtttctgagttacatccagtaccagatgctcatgtgcctgttctgggattcaaaattaatggggtctcaattgaccttttgtatgctaatcttgctcatgcagtgattcctgaggacctagatctttctcaggactctatactgcataatgtcgatgaacagactgttcgtagtctaaatgggtgtcgagttactgatcaaattctaagattggttccaaacattctgagttttcgcacaaccttaagattcataaggtgttggggaaagcgccgtggggtttactcaaatgttatgggatttctgggtggtataaactgggcaattcttgtgggtcgcatctgtcaattgtacccaaatgcatcaccaagcatgttgatatcccgttttttccgagtctacagcaaatggaagtggcctaatcctgttatgctttgccatattgaggaaggttatcttggtctccctgtttgggatccaagaagaaattacagagacaggggccatcaaatgcctattattacacctgcttacccttgcatgaattcgagctacaatgtatctgttagtactaggtatgtgatggtccaagaattcacgcaagcatttgagatttgtcaggccatagatgaaggaaaagcagactgggatgcattgtttgagccatatccattttttgaatcatataaaaattatctagaagttaatatcacagcgagaaatgaagatgacctcaggaattggaaaggatgggtggaatctcgccttcgcactcttgtattaaagattgagcgttattcacatgagatgatccttgcacacccatatcccaaagatttctcagataaatccaggcccttacatatcttttacttcatgggtctttggagaaaacaaactacccaagctcaagaaactgagcaattcgacatcaggggaattgtaaatgagtttaagaatactatttgtgcatatcaacaccggaaagaaggaatggacattgaagtgtcccatgtaaaaagaaaagaaatccctttgtttgtttttcctggtggagtgcgtccttctcgtacttctagaacaacgcacaagaacagccgtgccattccaacacgtgatgtttcagctgatgatcaagtgggaaacctattgggcgttgccagttgtagtgatgctcaacatgtaccatgtaaaggcagctatatgaaacaaccagaaccagattttgctggaggctttcagttgccaggaagtatttctctgttgccccctagcttacccaataaagtagttctgaatgggtctgctaattttcatgcagaatctattgagagtgaacatccagaacactatcaggaaagtaagtttgtggctgtgcagaataccgtgtgccttgtagtcaagcaacctaacagtttgctcccaaattcaaacaacaattcacaattgtatggatctgattcctctcttaacagttcaaaaagggaatgtgcaggcagtgctgcaaacaacttgctgaagttatccccagctattccagccacacctgatgaacttgatgagctgatatcctatcaaactaatcagaaagatgtaaatgctgaaaataacttggagatcggttctgaaaataacttggaacaaatatgcagtctgaggccccaagaatctaataataatctgaagcgtaaagccaatcaagagctcgagccacttgagcttgccgtcccatccactggtgctgcgccgcaatcgacaggaactgccccaagaaaaccactcaggttgaggttaacgactttggggaaaccgaagccagctgaaggaacttcctgaatggaattgcccaggagccaacatacctagagcttgtttttccttgtattgaagcaaggatatgtggaagcgctcggcacatagcctgctttggcactgcgagttgaaacgaaatggaaaacggaggccgcctgacgtaaatgagtgcgattgtaataaattgtatgtagttcatagctgggttggtatcagagttcaccatttcgtttttgctgtagcgaatttcgtttttttaaccaaagtttgactcttatattttttgaatttggaaccaaaatccataaaaaacctgaccgaaattcgcatcttggtcaacagcgagcagcgaaaattggaaatttcaccaaaattcggtgatttccgagaaacgaatccgtggttgggcatagatgtacgcagcggtacattttctcgacgacttagctatgcttgtaattgcaatgatgttcaaacggaagtggatatcgtctttgaagcat

SEQ ID NO: 95615 - DNA, 2188 bp, Zea Mays
ggagggaggaacacatcccttgcagctgcatgaggaggcaggcattgatacaatgagagatgacggttcaagcaagaacaagctgtcctggtccaagacccttgttaggaagtggttcaacatcaaaacaaaggcgaaggacttccattcggattatgcagctgaggaagtcggagtgcagtggaggaccagcagcttctctgatagagatgcatgtaaatccaagaaaagtaggacagagaggttgcctaagaggaatgtggagcgagatggtagagtagggaacggatttgatggtgcctatattacaaacacacaggactacaggtttcaggaaattgttcccttgaatgctggtaatgttctattgactgaagacaatggtccagcgaggaaatgggtctctcttgttagaaaaactctgaataatcttgatcagcaaggctctggtgtctataattaccacaccccctcaccagctccggatccaatcgtggagctcaatgttgacttcgagcgatcgtcaagaagacaaaggaactcgtcgtttttccatcggcgttcgttccaatccttcaaccgtagctcaaggatcgacatgatggatccacactcgttagtggaccgtcgattcagtgtctgcgacaggattagcttcgggagcaggccgagtgatgttgacactagcatgaggtgtggtgggtcgtctgatgatgagaacattgacgaggaatcacctagcggtatattcttcccaccgatgccatgtgcatatggtgctccactgtgcactggttctaggtattgcttagttgccagcaagcaaatggttggaattttcctcatggtgtgggtgcgaagcgatataagggagcatgtgaagaacttgaaggtttcatgtgtcggtagaggtctgatgggctaccttgggaacaagggatccatatcaatcagtatgtctctgcatcagacaagcttctgcttcgtttgcacccacttaacgtcaggccaaaaggatggagatcaacttagacgaaatgcggatgtggtggaaatcctgaggaagaccagattcccgcatgtccatggagcaggcgacaggaagtcaccagagacgattctggatcatgatcgtattatttggctcggggacctgaactaccggatagctctttcgtatcgctcagtgaaggctttagttgagatgcacagctggaaacagttgctggagaaggaccagcttcgcatagagcagagatttggtcgggtctttgcaggctggaaagaaggaaggatttactttcctcccacctacaagtactcatacaactccgatagatacgctggcgacgacatgcacccgaacgagaagcgaaggactccggcatggtgtgaccggattctatggtacgggcgaggcctgtcccagctatgctacgtgcgcggcgagtctcggttctcggatcacaggcctgtgtacagcatattcacggcggaggttgagattccgagccagtcagctgctcacttcggcggcatcactcgttccgcgtctctcctggggctggacgagctgccaccgtaccagacttatccacgcagttacatggacataaacttctactgaccggtcatcgtctcgacggggaggacggggccagcagccagccaagagttgcagacagacattcctcgctacctgatgagtggcagggcaggccttctgacgaccgactgactgactgactgggggttcgtttctcccaaggttcagttccatcggtcggaaatcggaatgtttggtagctagcagatgtgactcctttcgccatgcgtttctgtgcacctggcgcctggactcttgctgctgctgtcctgcatgccattgacgcccccaactcctacgccgtgccgtcttcagcgtgcagaatagatactcgaggagatcaatgctttccgagcgtgagattgttgctaggaacatttgcacagctagttttgttgaatcataaccatctgcgtgtcccgatttactacgggagaaagaagaaggagaagaaaaaaaggagtttggttcttgcttttggtgtcctgatgtaatgcaacgagggccgcgccatgggctcattcaaatgttttcttttttttgttttaatagtccgaggaatgaaatgatggcttgtacagc

SEQ ID NO: 95616 - DNA, 398 bp, Zea Mays
ggagggaggaacacatcccttgcagctgcatgaggaggcaggcattgatacaatgagagatgacggttcaagcaagaacaagctgtcctggtccaagacccttgttaggaagtggttcaacatcaaaacaaaggcgaaggacttccattcggattatgcagctgaggaagtcggagtgcagtggaggaccagcagcttctctgatagagatgcatgtaaatccaagaaaagtaggacaggtacattttgctgccccctgacagtaactgtgatatcttcagtttttttatttttatttcgtgctaaactacaaacgccatgatctagctaactttatgtttcacggtgagtgtgactgagttaactttatgtttgcatacatagagaggttgcctaag

SEQ ID NO: 95617 - DNA, 1639 bp, Zea Mays
cccaaatggcaaaaacggactgcgtagtgcggatacaacttggctacccaaggcaacgaacccagagagagagcaccaaaccgcaccgaaaagccaacacccccggcccgcgcgccggcgtcctcctatgctcgccgtcgccggcgacgggaagggccgccgacgctcagtcctgccgaaggaacgcccatccggccgtcttatccgcctcctcgccgcgctccgcccctcccgcgccgggcccctccccgtccagaccggctttcccacctctctcgccgacctcgtcgtcaagaaccatggtcgcctcaagaagcatccctccccgtcctccaagcgcggcgccgccgcttcgccttcgccttcgcctttgccttccccatccacccccacctcgccatcgctgttcccgccggctgagtctccgcctccaccgacgaccgccgacgcagtctcaccgtcggatcggcccaggcccgaccttccgccggcccagcccccacgccgcggcaaaggcagtggctttggcccgggcctgggcctgggcctgggcttcctggcggtcagcggcgtggtggcgtccctcgcactcctcgtgatctggagcaaggtggttgcggccgttaccgtggcctccttctcactctacctgctcgagtccgtgaggtcgtcctcgctccccaggcggcggccccgggcggtggtgaccgagaggcggcttgccctggacggccgcgggcgcgtctcgccgatccgggaggttgacgcggcgaccgagccgtcgcggccgagctgctgctcggattccgacagggaaagcgacggccgcatgctgctcgtcgaagaaagcggcggcgtcctggacgaatcaagcaacctgaggccgaaggcgaagaagaagtcctggaagaagctgctcgccagctccaagaagctgcacagaggacggaggagtaaggaggcgggttcgtcaggctgcgacggcgacggcgacggcagccgagagggtgatgacacggcgcgcggcggcggcaatgcaaaggcggccgattcgtcgggctcccgccgtggcgcgcccagcgaaatcggtgccgccgcggacgaagccgctgcgaaagaggcggattcttcgaggggttctcgcggcagccaatgcgtagaagtagatgctgggcacgtggaaatcgatgcgtcggtggacgacctaatcgaggaggaggaggaggagcaggcagggatccggtctcctgctctagttctggtcgccatcgtcctcgtcggcctggtcgccgggaaggtggtggccctggcggtgacggtgctctgctccgcgttccttagctcggttcagagatcgccttgcgcttgcgggtgtggtggtggcggtggttgctcgcacggcgggcggttggagctttccatgccgtagtaattattgtagatgagtggacagcagatttaaagagaagaaagatagcacttgatgtttgttcagtggccgtcgttgttcttgcctgcattcctccttgctagattcgtggtcattcgattcgatatacgtacgtactctagttacgttcttcgccttttacaagttgacagttcttccgtgcatgttcacccccgaaacacttggtgg

SEQ ID NO: 95618 - DNA, 1767 bp, Zea Mays
gaccgccccccacgacgccctccgtcccacccgcttcgcttctccctcggcctcgctcgatcgctcccacgccctcgtcgggcaagatgagggagatcctgcacatccaaggcggccagtgcggcaaccagatcggcgccaagttctgggaggtcatctgcggcgagcacggcgtcgactccacgggatgctactcgggtgtctccccgcagcagctcgagcggatcaacgtctactacaacgaggccgggggcggccgctacgtgccccgcgccgtgctcatggacctggagcccggcaccatggagtccatccgcgctggccccttcggcggcatcttccgccccgacaacttcgtctacggccagtccggcgccgggaacaactgggccaagggccactacaccgagggcgccgagctcatcgactccgtcctcgacgtcgtgcgcaaggaggccgagaactgcgactgcctccaagggttccaagtatgccactccctgggtggcggcactggttctggcatgggcacgctgctcatctccaagatccgggaggagtacccagaccgcatgatgctgaccttctccgtgttcccgtcgcccaaggtgtccgacaccgtcgtggagccctacaacgcgacgctgtccgtgcaccagctggtggagaacgccgacgagtgcatggtccttgacaacgaggcgctctatgatatttgcttccgcaccctcaagctcaccaacccttcatttggcgacctgaaccatctgatctcggcgaccatgagcggcgtgacgtgctgcctgcggttcccgggccagctgaactcggacctccgcaagctggcggtgaacctgatcccgttcccgcggctgcacttcttcatggtggggttcgccccgctgacgtcgcgcgggtcgcagcagtaccgcgcgctgacggtgccggagctgacgcagcagatgtgggacgccaagaacatgatgtgcgcggcggacccgcggcacgggcggtacctgacggcgtccgccatgttccggggcaagatgagcaccaaggaggtggacgagcagatgatcaacgtgcagaacaagaactcctcctacttcgtggagtggatccctaacaacgtcaagtccagcgtgtgcgacatcccgcccgtcgggctgtccatgtcctccaccttcgtgggcaactccacctccatccaggagatgttccgccgcgtgagcgagcagttcacggccatgttcaggcgcaaggccttcctgcattggtacaccagcgagggcatggacgagatggagttcaccgaagccgagagtaacatgaacgacctcgtcgccgaataccagcagtaccaagacgccacagccgaggagtacgacgaggaagagcaggacggcgaggaggagcacgcctgatcgatgcaacgggattcagagtcttcgctgctgtggtacatcaattgggactataagttcctacaatcctatactaccttaagcatatgtattcatgcacttccgtatttccgttgctgctgctagcttgtgtgtgtgtgtgtgtatctacaatcgtgtatgttagtgttttgtgaacttgtgatatgttgtccccgttgtccaggatttgtgcgtatgattattcatatgatgggattaattgcttgctctctgttttcttctagttatatattaggaatattcatttcattggaaggttgttttgcgtttcctcattttcgctcatgtgtaagtacatgtc

SEQ ID NO: 95619 - DNA, 1855 bp, Zea Mays
gaagacgagctacagggaccgacaggtggacccatacgacgttcgaatccctccaaaacgggggtggccaccttgccaatataactgaccgccccccacgacgccctccgtcccacccgcttcgcttctccctcggcctcgctcgatcgctcccacgccctcgcgccccctccacaaaccaccaccacccaagaccgcagcgcagggcgcgagagggatcggcaggtcgggcaagatgagggagatcctgcacatccaaggcggccagtgcggcaaccagatcggcgccaagttctgggaggtcatctgcggcgagcacggcgtcgactccacgggatgctactcgggtgtctccccgcagcagctcgagcggatcaacgtctactacaacgaggccgggggcggccgctacgtgccccgcgccgtgctcatggacctggagcccggcaccatggagtccatccgcgctggccccttcggcggcatcttccgccccgacaacttcgtctacggccagtccggcgccgggaacaactgggccaagggccactacaccgagggcgccgagctcatcgactccgtcctcgacgtcgtgcgcaaggaggccgagaactgcgactgcctccaagggttccaagtatgccactccctgggtggcggcactggttctggcatgggcacgctgctcatctccaagatccgggaggagtacccagaccgcatgatgctgaccttctccgtgttcccgtcgcccaaggtgtccgacaccgtcgtggagccctacaacgcgacgctgtccgtgcaccagctggtggagaacgccgacgagtgcatggtccttgacaacgaggcgctctatgatatttgcttccgcaccctcaagctcaccaacccttcatttggcgacctgaaccatctgatctcggcgaccatgagcggcgtgacgtgctgcctgcggttcccgggccagctgaactcggacctccgcaagctggcggtgaacctgatcccgttcccgcggctgcacttcttcatggtggggttcgccccgctgacgtcgcgcgggtcgcagcagtaccgcgcgctgacggtgccggagctgacgcagcagatgtgggacgccaagaacatgatgtgcgcggcggacccgcggcacgggcggtacctgacggcgtccgccatgttccggggcaagatgagcaccaaggaggtggacgagcagatgatcaacgtgcagaacaagaactcctcctacttcgtggagtggatccctaacaacgtcaagtccagcgtgtgcgacatcccgcccgtcgggctgtccatgtcctccaccttcgtgggcaactccacctccatccaggagatgttccgccgcgtgagcgagcagttcacggccatgttcaggcgcaaggccttcctgcattggtacaccagcgagggcatggacgagatggagttcaccgaagccgagagtaacatgaacgacctcgtcgccgaataccagcagtaccaagacgccacagccgaggagtacgacgaggaagagcaggacggcgaggaggagcacgcctgatcgatgcaacgggattcagagtcttcgctgctgtggtacatcaattgggactataagttcctacaatcctatactaccttaagcatatgtattcatgcacttccgtatttccgttgctgctgctagcttgtgtgtgtgtgtgtgtatctacaatcgtgtatgttagtgttttgtgaacttgtgatatgttgtccccgttgtccaggatttgtgcgtatgattattcatatgatgggattaattgcttgctctctgttttcttctagttatatattaggaata

SEQ ID NO: 95620 - DNA, 1783 bp, Zea Mays
ctttcacttgcggttccagcgacgcggaatggaaaccgcagcagcagcaaaactgtagatacacctggtccatgcacaaccgacgtgggaagacgagctacagggaccgacaggtggacccatacgacgttcgaatccctccaaaacggggcgcagggcgcgagagggatcggcaggtcgggcaagatgagggagatcctgcacatccaaggcggccagtgcggcaaccagatcggcgccaagttctgggaggtcatctgcggcgagcacggcgtcgactccacgggatgctactcgggtgtctccccgcagcagctcgagcggatcaacgtctactacaacgaggccgggggcggccgctacgtgccccgcgccgtgctcatggacctggagcccggcaccatggagtccatccgcgctggccccttcggcggcatcttccgccccgacaacttcgtctacggccagtccggcgccgggaacaactgggccaagggccactacaccgagggcgccgagctcatcgactccgtcctcgacgtcgtgcgcaaggaggccgagaactgcgactgcctccaagggttccaagtatgccactccctgggtggcggcactggttctggcatgggcacgctgctcatctccaagatccgggaggagtacccagaccgcatgatgctgaccttctccgtgttcccgtcgcccaaggtgtccgacaccgtcgtggagccctacaacgcgacgctgtccgtgcaccagctggtggagaacgccgacgagtgcatggtccttgacaacgaggcgctctatgatatttgcttccgcaccctcaagctcaccaacccttcatttggcgacctgaaccatctgatctcggcgaccatgagcggcgtgacgtgctgcctgcggttcccgggccagctgaactcggacctccgcaagctggcggtgaacctgatcccgttcccgcggctgcacttcttcatggtggggttcgccccgctgacgtcgcgcgggtcgcagcagtaccgcgcgctgacggtgccggagctgacgcagcagatgtgggacgccaagaacatgatgtgcgcggcggacccgcggcacgggcggtacctgacggcgtccgccatgttccggggcaagatgagcaccaaggaggtggacgagcagatgatcaacgtgcagaacaagaactcctcctacttcgtggagtggatccctaacaacgtcaagtccagcgtgtgcgacatcccgcccgtcgggctgtccatgtcctccaccttcgtgggcaactccacctccatccaggagatgttccgccgcgtgagcgagcagttcacggccatgttcaggcgcaaggccttcctgcattggtacaccagcgagggcatggacgagatggagttcaccgaagccgagagtaacatgaacgacctcgtcgccgaataccagcagtaccaagacgccacagccgaggagtacgacgaggaagagcaggacggcgaggaggagcacgcctgatcgatgcaacgggattcagagtcttcgctgctgtggtacatcaattgggactataagttcctacaatcctatactaccttaagcatatgtattcatgcacttccgtatttccgttgctgctgctagcttgtgtgtgtgtgtgtgtatctacaatcgtgtatgttagtgttttgtgaacttgtgatatgttgtccccgttgtccaggatttgtgcgtatgattattcatatgatgggattaattgcttgctctctgtttt

SEQ ID NO: 95621 - DNA, 740 bp, Zea Mays
cagttgctcaaactactagtatatccagagctcttgcatccaaccctataaatccacccagctctcgctcgtttttccgcagctgaccaccaagcctaagaagaagacgcgatccaatcgaaggcaatcatcatcatcatcatctctctctctcttactcgtcggggtcgggcaaacaaacgcactgcagcatctggccatggcttggacgaagaggaagactggcggcagcgggtcacccgcgcgcggggccggcgcctacgaggaggaggagaaggtcccgagagggcacgtcccgatgctggtcgctgacggggacggcggccacggcgagcgggtgctggtgccggtgacgcttctcagcgacccttgcgtcgcggagctgctggacatggcggcgcagcggtacgggtacggccagccgggcgtgcttcgggtgccctgcgacgccggccacttccgccaggtcctcgacggcgctatgcacagatgcgggatcagcgtcgcgtgaacacagccacagttggcagctacccgagcactgaggagaaaaacagctcccgtgccgcgagccggcgaccaagctaacttgtaggcttgtagccttgtacacttataatcctagatgattagtttgttcttgaatatattgattcatttgatccattcaattttataactgtagacgcaacgcaacatgacaccacaagtcaatctcagggcctgcatatattattata

SEQ ID NO: 95622 - DNA, 636 bp, Zea Mays
atgagggacgccgcggtggtcgtggcggtgcccgggcccggggccgcgacaagaggaggaggagcgaagccgggggcagccggggcggcgccgtgcgcggcgtgcaagctgctgcggcggcggtgcgcggccggctgcgtcttcgcgccctacttcccgcccggggagccgcacaagttcgccagcgtgcacaaggtcttcggcgccagcaatgtcagcaagctgctgcaggagatcccggcgcagcaccgaggggacgcggtgagcagcatggtgtacgaggccaacgcgcgcgtcagggacccggtgtacggctgcgcgggcgccgtctcgtcgctgcagcagcgggtggaggcgctgcaggcgcagctggcgctggcgcaggccgaggtggtccgcctcaggatgagcaacgactacgtcctgcgccgcctcaaggcggccggcgccggcgccggcgccggcgggggcagcagcagcagctacgccggctcgccgtcgtccatgtcctcgctcaagaccgcggcggcggcggagccggacgcgcgctgcagggccactacgccggagctgctggtgctggacatggtcgtggaccagcccggcatggacgacgcccacttctggtcctactag

SEQ ID NO: 95623 - DNA, 735 bp, Zea Mays
tgagtccacacgctctggcacaaaaaaaaagaaataaaaaaaggggaagacagccttatcctcagccacgaaccgcccctcagtcccttgcacaccatggccgctgcctcagcttcgcttctccacctcgcgaccccgaccctgactcgctccactcgcctcgccgtccgcctccccagcgcccagctgtcgcgctggccatcgggggcacgcatcgccgccgcgcagccgccgcgggcgtacaaggtgacgatcgagcacggcggcgagtcgcgggtggtggaggtggaggaggacgagacgatcctgtcccgcgcgctggacgagggcctggacgtgccgcacgactgcaagctcggcgtgtgcatgacgtgcccggcgcggctggtctccgggacggtggaccagagcgacggcatgctcagcgacgacgtcgtcgcgcgggggtacgcgctgctctgcgccgcgtacccgcgctccgactgcaccatccgcgtcatccccgaggacgagctgctcaaggtccagctcgccaccgccgacgactgactgacgctccgccgatgaccagcggaccggccagcaggcatcaacctccggcggtgtaatgatgtccctgagacttgtacaccattgttgactagtagcactagtgacagagcttttctcgagaatagatgctgtgtgatatgcctctctgccaaatttctggtatccaaatcgagcatttcgcga

SEQ ID NO: 95624 - DNA, 1498 bp, Zea Mays
accagacgaccccccttgcattctcagtttctcacgcccctgcgctgtcccgtcgcgagatagataaccctagctcccttccattgcttgccctcttccccaacctctctccagatctctataaaagaccagaatttcgaattccccctcgaacccgtgacacgcgcgctcctttcccgcccatttaggcctctgattcggcgcggattcgcggcgcggagccgccgaggttgcgtgcgtgattgggatggcggagccggggctcgaggacagccagccggtggatctgtccaagcacccctccggcatcgtccccacgctccagaatattgtatcaacagttaatttggattgtaaacttgacctcaaagcaatagctttgcaagcaagaaatgcggagtataacccaaagcgttttgctgcagtaatcatgagaataagagaacccaaaaccacggcactgatatttgcatcgggtaaaatggtatgtactggagctaagagcgagcagcaatctaagcttgcagcaagaaagtatgctcgtattattcagaaacttggttttccagctaaattcaaggactttaagattcagaatattgttggctcttgtgatgtaaagtttccaattaggcttgagggccttgcctattctcatggtgccttctcaagttacgaaccagaactctttcctggccttatctatcggatgaaacaaccaaagattgttcttttaatttttgtttcaggcaagattgttttgactggagcaaaggtgagagaggagacctacactgccttcgaaaacatctatcctgtgctggcagagtttcgaaaagttcagcaatgatgacctgttgtgaaggtcacatccttctaattacaagcttccttgatgattttcgtgtgaccataaattctaactgtgtacataaaaagtctggcggaatttatagcatcttgtaatttctgtgagctgctgtctggcatgattgggtgggcgtgtcgtggtagctggtggaattgtcaagatgatccgtttgggtagaggccctggtgaacacggacactacattatgtcgcagtttgagtagtttgtgtgagctgcagggtacatgcttgtcccatgtggttgcagcgttaacttgagtgctaacaagagtagataaattttggtctgcttcgtctttgaggcaggagtccttcaaagtctcttctgagtatgtttcagtgtgatgtgcgatgatgaaaaggctggcgctgtatgtaacgtgggacaagggcaaagggcaagggcaatgtactgacgactggttgtaagttatctgttgtatttgagtttgagatgctgtagcgtttgacattggggtaaatcttgctggttatgaccgtatggaggaaccggtcgattgaccatgctattggtgtgactctgttagagacaataatgtgcacttaaaccgtgcaatcaaacgatctgatgtatgcaagctatttt

SEQ ID NO: 95625 - DNA, 1111 bp, Zea Mays
accagacgaccccccttgcattctcagtttctcacgcccctgcgctgtcccgtcgcgagatagataaccctagctcccttccattgcttgccctcttccccaacctctctccagatctctataaaagaccagaatttcgaattccccctcgaacccgtgacacgcgcgctcctttcccgcccatttaggcctctgattcggcgcggattcgcggcgcggagccgccgaggttgcgtgcgtgattgggatggcggagccggggctcgaggacagccagccggtggatctgtccaagcacccctccggcatcgtccccacgctccatggcatattcctgaaatatgcggataactcggtcccctcaaattgggtggacgaagtcattccttgcggaacgcgccgccgtgccatctttgtgtcgccaggtgcgagtgcggttggacagagggctctgccatggggaagctctgtgctcaaggcaatcagaggagatgagatggatatagattacacaacgtactgggatagctctgacaacaagaggattggggtgaggaatattgtatcaacagttaatttggattgtaaacttgacctcaaagcaatagctttgcaagcaagaaatgcggagtataacccaaagcgttttgctgcagtaatcatgagaataagagaacccaaaaccacggcactgatatttgcatcgggtaaaatggtatgtactggagctaagagcgagcagcaatctaagcttgcagcaagaaagtatgctcgtattattcagaaacttggttttccagctaaattcaaggactttaagattcagaatattgttggctcttgtgatgtaaagtttccaattaggcttgagggccttgcctattctcatggtgccttctcaagttacgaaccagaactctttcctggccttatctatcggatgaaacaaccaaagattgttcttttaatttttgtttcaggcaagattgttttgactggagcaaaggtgagagaggagacctacactgccttcgaaaacatctatcctgtgctggcagagtttcgaaaagttcagcaatgcgttaacttgagtgctaacaagagtagataa

SEQ ID NO: 95626 - DNA, 678 bp, Zea Mays
ggagccgccgaggttgcgtgcgtgattgggatggcggagccggggctcgaggacagccagccggtggatctgtccaagcacccctccggcatcgtccccacgctccagaatattgtatcaacagttaatttggattgtaaacttgacctcaaagcaatagctttgcaagcaagaaatgcggagtataacccaaagcgttttgctgcagtaatcatgagaataagagaacccaaaaccacggcactgatatttgcatcgggtaaaatggtatgtactggagctaagagcgagcagcaatctaagcttgcagcaagaaagtatgctcgtattattcagaaacttggttttccagctaaattcaaggactttaagattcagaatattgttggctcttgtgatgtaaagtttccaattaggcttgagggccttgcctattctcatggtgccttctcaagttacgaaccagaactctttcctggccttatctatcggatgaaacaaccaaagattgttcttttaatttttgtttcaggcaagattgttttgactggagcaaaggtgagagaggagacctacactgccttcgaaaacatctatcctgtgctggcagagtttcgaaaagttcagcaatggtatgtagttcttttttatcatgtttcaatcatagtgcgtgcatga

SEQ ID NO: 95627 - DNA, 832 bp, Zea Mays
accagacgaccccccttgcattctcagtttctcacgcccctgcgctgtcccgtcgcgagatagataaccctagctcccttccattgcttgccctcttccccaacctctctccagatctctataaaagaccagaatttcgaattccccctcgaacccgtgacacgcgcgctcctttcccgcccatttaggcctctgattcggcgcggattcgcggcgcggagccgccgaggttgcgtgcgtgattgggatggcggagccggggctcgaggacagccagccggtggatctgtccaagcacccctccggcatcgtccccacgctccagaatattgtatcaacagttaatttggattgtaaacttgacctcaaagcaatagctttgcaagcaagaaatgcggagtataacccaaagcgttttgctgcagtaatcatgagaataagagaacccaaaaccacggcactgatatttgcatcgggtaaaatggtatgtactggagctaagagcgagcagcaatctaagcttgcagcaagaaagtatgctcgtattattcagaaacttggttttccagctaaattcaaggactttaagattcagaatattgttggctcttgtgatgtaaagtttccaattaggcttgagggccttgcctattctcatggtgccttctcaagttacgaaccagaactctttcctggccttatctatcggatgaaacaaccaaagattgttcttttaatttttgtttcaggcaagattgttttgactggagcaaaggtcagttgtcatttcttgcacatgcttaataataccgctgtttgcttcactttttcc

SEQ ID NO: 95628 - DNA, 600 bp, Zea Mays
ctcccacccaccagacgaccccccttgcattctcagtttctcacgcccctgcgctgtcccgtcgcgagatagataaccctagctcccttccattgcttgccctcttccccaacctctctccagatctctataaaagaccagaatttcgaattccccctcgaacccgtgacacgcgcgctcctttcccgcccatttaggcctctgattcggcgcggattcgcggcgcggagccgccgaggttgcgtgcgtgattgggatggcggagccggggctcgaggacagccagccggtggatctgtccaagcacccctccggcatcgtccccacgctccagtaagtcccggatctgggtcgtctggggttaggggttgcggagagatcccgtgccgtacgtgctagggtcgcgcggcggatggcggtgcttgggttccctagaggctggagctgccagggcttgagtctgggcagcggggtgcctctctgtactgtgagtggtggtgtggctggtctgtatcgtgttttttgttcagcttcccgagctccccggtgctgggtgcatcgaaatgagctaatattgactttacatagttgggactaaaa

SEQ ID NO: 95629 - DNA, 1132 bp, Zea Mays
gtaaatgttttccattagtgtttagtcattcttctgcaaagaatctgacatgtttttctttcatattcagaagcagatgtactttcagctcctccaaaactggtttacaacaactttgtcttacggttgtccagggaacttttagtggctgttgccagtggatgggataagcatgtagagatcatcgacaaaataatcccccaagcttggaaggatgagcctgtggcaaggatactcgagctctgcattctacatattgctatggcagagatgacatcaaaaggaacacctcacaaagttgtgattaatgaggcagtagatttggcaaagcgattttgtgatggtggtgcccctcgggtaatcaatggatgccttcgaacatttgtaaaggatcatgttgacgttgcaggcactagccagggagctgaatcaaaattgtgaacctttgcaaataccctgaatcgtacaacagaatggtggctgaagtaaagaactatgtagaaaacatagctgtcttggagttccagcaaccacattccatcatgaagatttagcgtttaacctaagggaacctaaacaacaaacatgctgggctcatcaaggagccacagatagttcattctttcagagtgatcggttattgggtgaagtatacagggctgtaaactggtggtgcacatccatcctccatctgaaacaactgagggttatcgcttctgataacccacagatcgttaaatgatcagataaagatcacaagttctgtaaaagcttgatgtatatgtaaaatgttctgcttatcataggcttattgcactgggagctggataattctagtttaataaattaatgcgagactatacactcgttttagtattattaatctcttatgtcgcatattgtgtttgcttctacttggatttattttagaccttttttttctcaacaaaattcgttttagatttctgtccttgtactgtccttattgcctgtctctccattctaaaatggaagaaatcttagctaacgtttttttttacatactgcaagatgttttagttaacatgaacgtgcacagcagcagtgacaaacatgaatgttgaaaccgtcgttataataattacttaaaagg

SEQ ID NO: 95630 - DNA, 1429 bp, Zea Mays
ctctcgctatccccatcttccttgtccgctccatttcgagttcaatcgctgcccgctctccactcctccggtccttccgccggcgggcacgcgccgggcgaaatggaagcggcaccatccctccgcaccttctccccctcatcgttcttctccgcggggcctagacactgccttctgctcgcgggcccggcctcgcggcgcgcccgggcgctcccggcgccgcccctgccccgcgccgtcgcctccacccgcgcgccgctggtggtctccagcccgccaccgcccgcggcctcggggacgaccgcacccgcgcacgccaaggttgaccgctccggccgcttctgcagccctcgcgccgcccgggagctagcgctgatgatttcctacgccgcgtgtctggagggaaccgacgtcgttcggctcttcgaccgcaggatcagcgcaagacgagagcccgggtttgttttcgacaaggcatgcctactgagttacaaccatatgagctttggcgggggaccgctcgaggttggaacggaggaggaggctgagaagctgaccagtcagaacgagaaggattcagccaacgaagcagatgtactttcagctcctccaaaactggtttacaacaactttgtcttacggttgtccagggaacttttagtggctgttgccagtggatgggataagcatgtagagatcatcgacaaaataatcccccaagcttggaaggatgagcctgtggcaaggatactcgagctctgcattctacatattgctatggcagagatgacatcaaaaggaacacctcacaaagttgtgattaatgaggcagtagatttggcaaagcgattttgtgatggtggtgcccctcgggtaatcaatggatgccttcgaacatttgtaaaggatcatgttgacgttgcaggcactagccagggagctgaatcaaaattgtgaacctttgcaaataccctgaatcgtacaacagaatggtggctgaagtaaagaactatgtagaaaacatagctgtcttggagttccagcaaccacattccatcatgaagatttagcgtttaacctaagggaacctaaacaacaaacatgctgggctcatcaaggagccacagatagttcattctttcagagtgatcggttattgggtgaagtatacagggctgtaaactggtggtgcacatccatcctccatctgaaacaactgagggttatcgcttctgataacccacagatcgttaaatgatcagataaagatcacaagttctgtaaaagcttgatgtatatgtaaaatgttctgcttatcataggcttattgcactgggagctggataattctagtttaataaattaatgcgagactatacactcgttttagtattattaatctcttatgtcgcatattgtgtttgcttct

SEQ ID NO: 95631 - DNA, 1491 bp, Zea Mays
ctctcgctatccccatcttccttgtccgctccatttcgagttcaatcgctgcccgctctccactcctccggtccttccgccggcgggcacgcgccgggcgaaatggaagcggcaccatccctccgcaccttctccccctcatcgttcttctccgcggggcctagacactgccttctgctcgcgggcccggcctcgcggcgcgcccgggcgctcccggcgccgcccctgccccgcgccgtcgcctccacccgcgcgccgctggtggtctccagcccgccaccgcccgcggcctcggggacgaccgcacccgcgcacgccaaggttgaccgctccggccgcttctgcagccctcgcgccgcccgggagctagcgctgatgatttcctacgccgcgtgtctggagggaaccgacgtcgttcggctcttcgaccgcaggatcagcgcaagacgagagcccgggtttgttttcgacaaggcatgcctactgagttacaaccatatgagctttggcgggggaccgctcgaggttggaacggaggaggaggctgagaagctgaccagtcagaacgagaaggattcagccaacgaccatcaaactagaacaattaatgcagtgcactggttcaaaaagatgcaatatgctatctagaagcagatgtactttcagctcctccaaaactggtttacaacaactttgtcttacggttgtccagggaacttttagtggctgttgccagtggatgggataagcatgtagagatcatcgacaaaataatcccccaagcttggaaggatgagcctgtggcaaggatactcgagctctgcattctacatattgctatggcagagatgacatcaaaaggaacacctcacaaagttgtgattaatgaggcagtagatttggcaaagcgattttgtgatggtggtgcccctcgggtaatcaatggatgccttcgaacatttgtaaaggatcatgttgacgttgcaggcactagccagggagctgaatcaaaattgtgaacctttgcaaataccctgaatcgtacaacagaatggtggctgaagtaaagaactatgtagaaaacatagctgtcttggagttccagcaaccacattccatcatgaagatttagcgtttaacctaagggaacctaaacaacaaacatgctgggctcatcaaggagccacagatagttcattctttcagagtgatcggttattgggtgaagtatacagggctgtaaactggtggtgcacatccatcctccatctgaaacaactgagggttatcgcttctgataacccacagatcgttaaatgatcagataaagatcacaagttctgtaaaagcttgatgtatatgtaaaatgttctgcttatcataggcttattgcactgggagctggataattctagtttaataaattaatgcgagactatacactcgttttagtattattaatctcttatgtcgcatattgtgtttgcttct

SEQ ID NO: 95632 - DNA, 2317 bp, Zea Mays
ctcctcttctcctgtcctgctcctgcctctgcctgaacttccagctccagacgagcagagccgcccacgagtcctccgcccccgcacatctcgtcaagactcgaggagccagcccggccacgaccgcctcggcctcgccccgcaccgcgatccccaactcccgcgcgccccgcgcggcatgccggccgacccaacctccggataaaccccccgccctgccgctcattttatggcgctcgcgcgcgggcgcttgcgcgcgcgcactgcccacgccgtcgccagcgcctgcttcctcgtgctcctcctgctccttctgacctcctcctcactcttcgcgcccatcggccgcagccgcgcggcggagcccgacgagggcgggacaacagttctcggcgccgctccgtcgtcgtcgtcgtcgtctttctcctcctcctccttgttcgggaaggggcgggggagcagctgcgaggagctgcagtccatcagcggcggggagggccggtgcgcgtacctccgcgcccactcgccctgctccccggccgggtacgtcgactacctccgcctcttctactgcggcttcgccggcgcgccggcggcggcggcgtgcgccgcgctcgcgctgtggctggtggtgctcttctacctcctcggcgacaccgcgtccgagtacttctgcgcgtcgctggagggcctctcggcggcgctgcgcctgccccccgccgtcgcgggcgtcacgctgctgtcgctggggaacggcgcgcccgacgtgttcgccagcgtcgtgtccttcgcgtcgggcgacggcggcggggccggggtcggggtcgggctcagcagcgcgctcggcggagcgctgttcgtgtccaccgtcgtcgcgggcgccgtcgcgctcgccgccgtgggcgcgcgcggcggggtcgtcgtcgagtggcgcggcttcgtgcgcgacatctgcttcctcctcctcgcgctctgctacctgctggcggttctcgtcagcggggagaccaccgtctgggtggccgcgtcgttcgtctcgctctacgccggatacgtcgtcctcgtctggacctcccactgctgcgccgagaagggcaagccggccgccgccgccggcctctccgcgccgctcctccacgacgacgacgacgacggcggcggcccgtcgctgccgtcccactcctccaagacggagggcacgtccagggctagagcgatgctgcattgcgtcgcgggcgcgctctgcatgccgctgtacctgccgcgccgcctcaccatcccggacatcgccgggcaccgctggtcccggccctacgccgtggcctccgcggcgctggcgccggtcctgctcgccttcacgtggacctcgcagcgccacaatcccttgtcgtcgcacagcctcgcggtgctcgcgggcggcgcgctcctgggcctccttctcgcggcgctggccgcggccaccacggacgccaggtcccctccgcgcgggcggaggcggcgcgtgccgtggctcgccgcggggttcgtgatgagcgtgctgtgggcgtacaccctggcgcgcgagctggtggcgctcctggtggccatcgggtacgtggtcgggatcaagccgagcgtgctgggcgtgacggtgctggcgtggggcgactccctgggcgacctggtgtcgaacgtggcgatggcggtgcacggcgggcccggcggcgcgcagaccgccgtgtccgggtgctacgcgggcccgctgttcaacacggtggtgggtctgggcctgtcgctggcgctggcggcgggcgcgcagcacccggccccgttcgcggtgcccgcggacgcggcggcgtacgaggcggtcgggttcctgggcgccgcgctggcgtgggcgctgttcgtggtgcccgtccgcgggatgcggatcgaccgcgtctacggggtggggctcatcgccatctacctctgcttcttcgccgtgcgcgtcctcgagacgctcgggctctggagctaggagccctccgcccgtggctgacacacttccttccccctgcccgcgttcgtttcttgctactgaatgatggtagatctagattgacggtaaatgacagtacgagaaggatgaaaggtagagataatcttgtatattactgtagtagtacatatggctatcctattgaagaggtagcactactccctcaggtaggggttgattagtgtcctgacagaatttgtgtttttttttcgtcctcttgtgttttagaggaggttctcctgtcctaacaattgtaggttgctgtccataagccctagtgtaagcagcatgttggtt

SEQ ID NO: 95633 - DNA, 1741 bp, Zea Mays
ctcctgtcctgctcctgcctctgcctgaacttccagctccagacgagcagagccgcccacgagtcctccgcccccgcacatctcgtcaagactcgaggagccagcccggccacgaccgcctcggcctcgccccgcaccgcgatccccaactcccgcgcgccccgcgcggcatgccggccgacccaacctccggataaaccccccgccctgccgctcattttatggcgctcgcgcgcgggcgcttgcgcgcgcgcactgcccacgccgtcgccagcgcctgcttcctcgtgctcctcctgctccttctgacctcctcctcactcttcgcgcccatcggccgcagccgcgcggcggagcccgacgagggcgggacaacagttctcggcgctgttcgtgtccaccgtcgtcgcgggcgccgtcgcgctcgccgccgtgggcgcgcgcggcggggtcgtcgtcgagtggcgcggcttcgtgcgcgacatctgcttcctcctcctcgcgctctgctacctgctggcggttctcgtcagcggggagaccaccgtctgggtggccgcgtcgttcgtctcgctctacgccggatacgtcgtcctcgtctggacctcccactgctgcgccgagaagggcaagccggccgccgccgccggcctctccgcgccgctcctccacgacgacgacgacgacggcggcggcccgtcgctgccgtcccactcctccaagacggagggcacgtccagggctagagcgatgctgcattgcgtcgcgggcgcgctctgcatgccgctgtacctgccgcgccgcctcaccatcccggacatcgccgggcaccgctggtcccggccctacgccgtggcctccgcggcgctggcgccggtcctgctcgccttcacgtggacctcgcagcgccacaatcccttgtcgtcgcacagcctcgcggtgctcgcgggcggcgcgctcctgggcctccttctcgcggcgctggccgcggccaccacggacgccaggtcccctccgcgcgggcggaggcggcgcgtgccgtggctcgccgcggggttcgtgatgagcgtgctgtgggcgtacaccctggcgcgcgagctggtggcgctcctggtggccatcgggtacgtggtcgggatcaagccgagcgtgctgggcgtgacggtgctggcgtggggcgactccctgggcgacctggtgtcgaacgtggcgatggcggtgcacggcgggcccggcggcgcgcagaccgccgtgtccgggtgctacgcgggcccgctgttcaacacggtggtgggtctgggcctgtcgctggcgctggcggcgggcgcgcagcacccggccccgttcgcggtgcccgcggacgcggcggcgtacgaggcggtcgggttcctgggcgccgcgctggcgtgggcgctgttcgtggtgcccgtccgcgggatgcggatcgaccgcgtctacggggtggggctcatcgccatctacctctgcttcttcgccgtgcgcgtcctcgagacgctcgggctctggagctaggagccctccgcccgtggctgacacacttccttccccctgcccgcgttcgtttcttgctactgaatgatggtagatctagattgacggtaaatgacagtacgagaaggatgaaaggtagagataatcttgtatattactgtagtagtacatatggctatcctattgaagaggtagcactactccctcaggtaggggttgattagtgtcc

SEQ ID NO: 95634 - DNA, 863 bp, Zea Mays
agtatgtccatgtgcaacaacatctctttttttctctctctttgcaggtgatccagattgatgaggcagctctaagggagggtctgccactgcgcaagtcagagcatgcattctacctggactgggctgtccactctttcagaatcaccaactgcggagtccaggacaccacccagatccacacccatatgtgctactccaacttcaacgacatcatccactccatcatcgacatggacgcagatgtgatcaccatcgagaactcccggtccgacgagaagctactgtccgtgttccgcgagggtgtgaagtacggagctggaatcggtccaggtgtctacgacatccactcgcccaggatcccctccaccgaggagatcgcggaccgcgtcaacaagatgctcgccgtgctcgacaccaacatcctctgggtgaaccctgactgcggtctcaagacacgcaagtacacggaggtgaagcctgccctgaccaacatggtctccgccaccaagctcatccgcacccagctcggcagcgcgaaatgagtcagatttggtagatccatggtttgttgaacacaaaagccagcagggtcatttgtttcgaataatttgggtccttactcctgttccatggcgttaggttagcctcattggtgttggtggggtacggcgttacgtgtccgtgttctaagtttggagtgtgtgtttctcttttttgttggggtttgtgtgctttggttatataaacagaaatggagtacgcagtcttcgaatcgcaacaccaactgcattgtcatgttctccttccagaggggaacgccatgccccgtgctattgcacatgatacgtgcagacatagaa

SEQ ID NO: 95635 - DNA, 2834 bp, Zea Mays
ccgacggatttggcagctgggaaatgggatctcaccagatcccgtaagcgcgcgccacgccgccacctaacgcagacactgcatcctctacctctacaaatgaaacccctcagacagtcagacgtcccgtgctcgtcatcaccacccacatctcagttcaccccggcgtcgtcctcttcccccggagctactctcccgctccacgttccaaaggaaagatggcgtcccatattgttggataccctcgcatgggccccaagagagagctcaagtttgccttggagtctttctgggatgggaagagcagcgccgatgatttagagaaagttgcctctgacctcaggtctagcatctggaagcaaatgtcagaagctgggatcaagtacattcccagcaacaccttctcgtactatgaccaggtccttgataccacggccatgcttggtgctgtcccagagcgctactcttggactggaggcgagattggcttgagcacctatttctcaatggccaggggaaatgccactgtccctgctatggagatgaccaagtggtttgatacaaactaccactttattgtccctgaacttggcccaagcaccaagttcacatacgcttctcacaaggctgtttctgagtacaaggaggcaaaagcgctcggtattgatactgtcccagtgcttgttggaccagtgtcatacttgctcctctctaagcctgccaagggtgtggagaaatctttctctcttctttcgcttcttggcagcattcttcccatctacaaggaggttgtttctgaactgaaggcagctggtgcttcatggattcagtttgatgagcctacccttgttaaagaccttgatgttcacgaattggcagcattctcttcagcatatgctgaactagagtcggcattctctggattgaatgtgcttatcgagacatactttgctgacattcctgctgagtcctacaagaccctcacgtcattgagtggtgtgactgcttacggttttgatcttatccgtggagccaagacccttgatcttatcaggagcagcttcccctctgggaagtacctcttcgctggtgttgtggatggacgcaacatttgggctgatgatcttgctgcatctcttagcactcttcagtctcttgaggccgttgctggcaaggacaaacttgtggtgtcaacctcctgctcactgatgcacaccgctgttgatcttgtcaatgaaactaagctggatgatgagattaagtcatggcttgcatttgctgcccaaaaggttgtcgaggttaatgcccttgcgaaagctttggcaggccaaaaggatgaggcttactttgcagccaatgctgctgctcaggcctcaaggagatcatcacctagagtgacaaacgaggaggtccaaaaggctgcagctgctttgaagggttctgaccaccgccgtgctaccactgttgctgctagattggatgctcagcagaaaaagctcaaccttcctgtccttcccacaaccacaattggttcattccctcagactgtggaactcaggagggtccgtcgtgagtacaaggcaaagaagatctccgaggaggaatacatcagtgccatcaaggaagaaatcagcaaggttgtcaagatccaagaggagcttgacattgatgtgcttgtgcatggagagccagagagaaatgacatggttgagtacttcggtgagcaattatctggttttgcattcactgccaacggatgggtgcaatcttatggatcacgttgtgtgaagccacccattatctatggcgatgtcagccggccgaaccccatgactgttttctggtccaagacggcacagagcatgaccgctcgtcccatgaagggaatgttgactggtccagtcacaatcctcaactggtcatttgtcaggaacgatcagcctaggtttgagacatgctaccaaatagctcttgcaataaaaaaggaggttgaggatcttgaggctgctggtattcaggtgatccagattgatgaggcagctctaagggagggtctgccactgcgcaagtcagagcatgcattctacctggactgggctgtccactctttcagaatcaccaactgcggagtccaggacaccacccagatccacacccatatgtgctactccaacttcaacgacatcatccactccatcatcgacatggacgcagatgtgatcaccatcgagaactcccggtccgacgagaagctactgtccgtgttccgcgagggtgtgaagtacggagctggaatcggtccaggtgtctacgacatccactcgcccaggatcccctccaccgaggagatcgcggaccgcgtcaacaagatgctcgccgtgctcgacaccaacatcctctgggtgaaccctgactgcggtctcaagacacgcaagtacacggaggtgaagcctgccctgaccaacatggtctccgccaccaagctcatccgcacccagctcggcagcgcgaaatgagtcagatttggtagatccatggtttgttgaacacaaaagccagcagggtcatttgtttcgaataatttgggtccttactcctgttccatggcgttaggttagcctcattggtgttggtggggtacggcgttacgtgtccgtgttctaagtttggagtgtgtgtttctcttttttgttggggtttgtgtgctttggttatataaacagaaatggagtacgcagtcttcgaatcgcaacaccaactgcattgtcatgttctccttccagaggggaacgccatgccccgtgctattgcacatgatacgtgcagacatagaa

SEQ ID NO: 95636 - DNA, 2613 bp, Zea Mays
tttttttttgggacaaatattcagctagcttctctgtcaacctgattttaacatttttctgttatatagaaagatggcgtcccatattgttggataccctcgcatgggccccaagagagagctcaagtttgccttggagtctttctgggatgggaagagcagcgccgatgatttagagaaagttgcctctgacctcaggtctagcatctggaagcaaatgtcagaagctgggatcaagtacattcccagcaacaccttctcgtactatgaccaggtccttgataccacggccatgcttggtgctgtcccagagcgctactcttggactggaggcgagattggcttgagcacctatttctcaatggccaggggaaatgccactgtccctgctatggagatgaccaagtggtttgatacaaactaccactttattgtccctgaacttggcccaagcaccaagttcacatacgcttctcacaaggctgtttctgagtacaaggaggcaaaagcgctcggtattgatactgtcccagtgcttgttggaccagtgtcatacttgctcctctctaagcctgccaagggtgtggagaaatctttctctcttctttcgcttcttggcagcattcttcccatctacaaggaggttgtttctgaactgaaggcagctggtgcttcatggattcagtttgatgagcctacccttgttaaagaccttgatgttcacgaattggcagcattctcttcagcatatgctgaactagagtcggcattctctggattgaatgtgcttatcgagacatactttgctgacattcctgctgagtcctacaagaccctcacgtcattgagtggtgtgactgcttacggttttgatcttatccgtggagccaagacccttgatcttatcaggagcagcttcccctctgggaagtacctcttcgctggtgttgtggatggacgcaacatttgggctgatgatcttgctgcatctcttagcactcttcagtctcttgaggccgttgctggcaaggacaaacttgtggtgtcaacctcctgctcactgatgcacaccgctgttgatcttgtcaatgaaactaagctggatgatgagattaagtcatggcttgcatttgctgcccaaaaggttgtcgaggttaatgcccttgcgaaagctttggcaggccaaaaggatgaggcttactttgcagccaatgctgctgctcaggcctcaaggagatcatcacctagagtgacaaacgaggaggtccaaaaggctgcagctgctttgaagggttctgaccaccgccgtgctaccactgttgctgctagattggatgctcagcagaaaaagctcaaccttcctgtccttcccacaaccacaattggttcattccctcagactgtggaactcaggagggtccgtcgtgagtacaaggcaaagaagatctccgaggaggaatacatcagtgccatcaaggaagaaatcagcaaggttgtcaagatccaagaggagcttgacattgatgtgcttgtgcatggagagccagagagaaatgacatggttgagtacttcggtgagcaattatctggttttgcattcactgccaacggatgggtgcaatcttatggatcacgttgtgtgaagccacccattatctatggcgatgtcagccggccgaaccccatgactgttttctggtccaagacggcacagagcatgaccgctcgtcccatgaagggaatgttgactggtccagtcacaatcctcaactggtcatttgtcaggaacgatcagcctaggtttgagacatgctaccaaatagctcttgcaataaaaaaggaggttgaggatcttgaggctgctggtattcaggtgatccagattgatgaggcagctctaagggagggtctgccactgcgcaagtcagagcatgcattctacctggactgggctgtccactctttcagaatcaccaactgcggagtccaggacaccacccagatccacacccatatgtgctactccaacttcaacgacatcatccactccatcatcgacatggacgcagatgtgatcaccatcgagaactcccggtccgacgagaagctactgtccgtgttccgcgagggtgtgaagtacggagctggaatcggtccaggtgtctacgacatccactcgcccaggatcccctccaccgaggagatcgcggaccgcgtcaacaagatgctcgccgtgctcgacaccaacatcctctgggtgaaccctgactgcggtctcaagacacgcaagtacacggaggtgaagcctgccctgaccaacatggtctccgccaccaagctcatccgcacccagctcggcagcgcgaaatgagtcagatttggtagatccatggtttgttgaacacaaaagccagcagggtcatttgtttcgaataatttgggtccttactcctgttccatggcgttaggttagcctcattggtgttggtggggtacggcgttacgtgtccgtgttctaagtttggagtgtgtgtttctcttttttgttggggtttgtgtgctttggttatataaacagaaatggagtacgcagtcttcgaatcgcaacaccaa

SEQ ID NO: 95637 - DNA, 2572 bp, Zea Mays
atctccccgcgcctctcggatcgcctcggcgcgcgaaagatggcgtcccatattgttggataccctcgcatgggccccaagagagagctcaagtttgccttggagtctttctgggatgggaagagcagcgccgatgatttagagaaagttgcctctgacctcaggtctagcatctggaagcaaatgtcagaagctgggatcaagtacattcccagcaacaccttctcgtactatgaccaggtccttgataccacggccatgcttggtgctgtcccagagcgctactcttggactggaggcgagattggcttgagcacctatttctcaatggccaggggaaatgccactgtccctgctatggagatgaccaagtggtttgatacaaactaccactttattgtccctgaacttggcccaagcaccaagttcacatacgcttctcacaaggctgtttctgagtacaaggaggcaaaagcgctcggtattgatactgtcccagtgcttgttggaccagtgtcatacttgctcctctctaagcctgccaagggtgtggagaaatctttctctcttctttcgcttcttggcagcattcttcccatctacaaggaggttgtttctgaactgaaggcagctggtgcttcatggattcagtttgatgagcctacccttgttaaagaccttgatgttcacgaattggcagcattctcttcagcatatgctgaactagagtcggcattctctggattgaatgtgcttatcgagacatactttgctgacattcctgctgagtcctacaagaccctcacgtcattgagtggtgtgactgcttacggttttgatcttatccgtggagccaagacccttgatcttatcaggagcagcttcccctctgggaagtacctcttcgctggtgttgtggatggacgcaacatttgggctgatgatcttgctgcatctcttagcactcttcagtctcttgaggccgttgctggcaaggacaaacttgtggtgtcaacctcctgctcactgatgcacaccgctgttgatcttgtcaatgaaactaagctggatgatgagattaagtcatggcttgcatttgctgcccaaaaggttgtcgaggttaatgcccttgcgaaagctttggcaggccaaaaggatgaggcttactttgcagccaatgctgctgctcaggcctcaaggagatcatcacctagagtgacaaacgaggaggtccaaaaggctgcagctgctttgaagggttctgaccaccgccgtgctaccactgttgctgctagattggatgctcagcagaaaaagctcaaccttcctgtccttcccacaaccacaattggttcattccctcagactgtggaactcaggagggtccgtcgtgagtacaaggcaaagaagatctccgaggaggaatacatcagtgccatcaaggaagaaatcagcaaggttgtcaagatccaagaggagcttgacattgatgtgcttgtgcatggagagccagagagaaatgacatggttgagtacttcggtgagcaattatctggttttgcattcactgccaacggatgggtgcaatcttatggatcacgttgtgtgaagccacccattatctatggcgatgtcagccggccgaaccccatgactgttttctggtccaagacggcacagagcatgaccgctcgtcccatgaagggaatgttgactggtccagtcacaatcctcaactggtcatttgtcaggaacgatcagcctaggtttgagacatgctaccaaatagctcttgcaataaaaaaggaggttgaggatcttgaggctgctggtattcaggtgatccagattgatgaggcagctctaagggagggtctgccactgcgcaagtcagagcatgcattctacctggactgggctgtccactctttcagaatcaccaactgcggagtccaggacaccacccagatccacacccatatgtgctactccaacttcaacgacatcatccactccatcatcgacatggacgcagatgtgatcaccatcgagaactcccggtccgacgagaagctactgtccgtgttccgcgagggtgtgaagtacggagctggaatcggtccaggtgtctacgacatccactcgcccaggatcccctccaccgaggagatcgcggaccgcgtcaacaagatgctcgccgtgctcgacaccaacatcctctgggtgaaccctgactgcggtctcaagacacgcaagtacacggaggtgaagcctgccctgaccaacatggtctccgccaccaagctcatccgcacccagctcggcagcgcgaaatgagtcagatttggtagatccatggtttgttgaacacaaaagccagcagggtcatttgtttcgaataatttgggtccttactcctgttccatggcgttaggttagcctcattggtgttggtggggtacggcgttacgtgtccgtgttctaagtttggagtgtgtgtttctcttttttgttggggtttgtgtgctttggttatataaacagaaatggagtacgcagtcttcgaatcgca

SEQ ID NO: 95638 - DNA, 1207 bp, Zea Mays
atggaggacggccgtgcgctggagggtggactccggtggaggcctggagcagaggcgggcaccacacactggaggggctcgagcagaggcctctgcagcagccacgtgctggagcagagggggtgcaacccgagcagagggtcgccggagcagagggggcacagtcgcgcgttggagaagggctacagagggtgcgcagccacgggctggagaagggacgatggctactgtggtacagcttgtttgaactctgtagactctggagatatcagtagcaatggcaagttatcacttggtcttcatcaatctcagtcatctgcacaacagccagctacaccgtcacagacaaaaacacttgacagtattgattgtcgtgcaaatcctgagggttcatctataagggctgcagccattgcagccggtgcacgcattggatcaccatctgatgcagctacaatcataaaagcggctcagtcaaaaggcgccatctacattaggcctggggaaataatcccgaattacctgaaaccactagcaccaaaaccactttcctcgctaccaccgatgaacccagggcagctcagacgatttggtgattctgctgccgcgaaggatgcaatcttcggttcttcggatggcacggacgatgacgacgaggaagacactgatgacgaggaggacgacgagctgactgacaacgatgcagaacatgaataatcttctccccctgcactaacctctcctaatggtatgtgacgtggtgatcttcaacaacctcttcaaccaatggaatcttgtagagcatagctgtatacatgtttatagtctgtatttaaggccccagctgccacctccatgagccaagaattcttctttgatctctctctctcacttagcatgcctagaagccccacttatttgacctaaggacaaacattggactccttaatctccttttttcttctgttggctcctggcgaggttggtggtggtgggtctgatggtcagttcacatgtgtagctggttagctatgttatgtacagcatgagttgtacgctggcgaactgctttcaacagtccaaaattttgtaccctgtttttctcttgctggaaagggatttgttggaactgagctcacaggtcctttgttgattggacttggcttggaagagtggttggttcgttgctggaaaaaaaaaatcaaaa

SEQ ID NO: 95639 - DNA, 2637 bp, Zea Mays
atggacatggagaggggggcgggaagcgagcaggggtcgcccgatagcgaaatgggcgaaggcgacaacgatagcgtcggctacggcgcggagatggaggtggacgccgggagcggctcggctccggcgagctcggcgtccgcatcggcctcggtctccgcgtcggcgtacgcggcgcgcgccggcgccttcgacggggtcgaccctttcgagggcatggagttcgacgacgaggaggacgcctggacgttctataacgtctacgcccaccgcgtgggcttcagcacccggatcagcgtcatgcaccggtcgcgccgggacggctccgtcatgtcgcgccagttcgtctgcgccaaggagggcttccgcacttaccgcgggaagaatgaggtttcccgtgctgatgccgcagacgctggcgacgacgatagtgggaggggtcggaggacacgcgctgtcacccgggttggctgcaaggccatgatccgggtgaagaagcaggacaatggccgctggagtgtgactaagctggagactgcacataaccatcccctggtccccacgaaccaggcacactgcctgcgtccgcacaagccactgtcggagtgtggaaagcaccgtccttttgggggccatcgaaatggcggctcgcttctggcaattgagccaccgccaccacctcttacgccgcctgtgcctcacacaagcgtagctcaagtggttcctcagtatttttcggatggtatcgggaatgccactagagtaattttggattatgtcaaacgcatgcaagctgaagatccagcgttcttttatgccatgcaatttgttgaggggcgtccagtgggtaatgtgttttgggctgatgcgagggctaggacgacatacaaagactttggagatgccgttgtcttggatgactactgcaaaaggagcaagcatgaactgccacttgtcgcttttactggagttaatcaccattgccagccaatcctatttggctgtgccatcatggcacataacaatgaagtatcctttgtttggttgtttgagacatttctcttagcaatgtctggatgccaccctacatctcttattatggagcatgataatgttttaaaaccagctgctttgaaagtatttcctctaactaggctccagttttgtaagtggcacatcatgaacgaagcacatgataagctgtcatatctcctagatgcatttccatcattccatgacgactttattaattgcatcaatatgtctgagacaataaatgagtttgaagaaaattggaaggcattaatttctaaggccagctctcaaaaaagtgaatggcttgacttggtgtacaattgccgtcatcattgggtcccggtatatctgagagatacattctttggggatgtgtcgttaaagctgcagtgttctagcaggagttcgttgtttgaaggttatattagtgccaaaactgattcacagtcattcattcagcaatatgaaaaagctttagactgttgttatgagaaggaggtgaaggaagaatttgaaacaaaatattcacttccggatattaagacatcatctcctatagaaaagcaaggagcagagttatatacgaggtcaatgtttttgaaattccaacaggaattgatatgtgccactgcttacactgctgaaatggtgaaagaggagggcaatgcttcaatttatacagtggccatatctgaaggaagtgagaagtctgtaacagttcagttctgttcttctggaagttctgcgacatgtagctgtcggatgtttgaatattttggtattgtctgcaggcacatacttactgtgtttggtgtaagaggtgtctctgcacttccttctcattattttgtaaaaagatggacaaagaatgcattggatagaagcttaggcaagaatgttgatgaagttagcagagaggagctcaaggaggagccaagaagtagcgctgaagatggtgagcaatccctgacatggcgttacaacagtttgtgtcatgaagcactaaggtatgctgaagagggagcatcatcattagaggtttatattgtggcgatgcaagctcttcaagaggctgctaacagggttaatatggccaagagaggtattggacaggtagcaccattagcggtaatgccaattgcagcacaaccaccagaaagttttgcaagaaatcaggagattacttccaataagcaaaagaagagaaaaaagaattcaagtagctcaagggagaacgccacatcaaatcaacttatgtatgtgcgacaacctgttaattttctttttgttgctcctggttcatcaagtgctttacaagggcctagtcaactagttgctgctcctcctgtttctttgagtagcaaatatggacaaacatctggtgcaaataattcagtagatgacaatatacctcctgcttctgtagttgataagttttctgggttacctgaccaaaatgcaccagcaacttcaactggaaatctgcaaggtggagtaacaaaatccataggggctgattcacgaataaaagaggtagactacttttgctatgctgaccaccgaaagttcataccctgcatattttcaaatgttctattctag

SEQ ID NO: 95640 - DNA, 1986 bp, Zea Mays
ccaccatgtggcacgcctccacgccgcgccggccaaagccataagaccccgtctctcctcccactcctcttgatggctgcttcttccaactctggatctacataggagtgcggtggtagactggtaggtgctcttattattaggacggacggcaagctttggggcgagagaagacaagaagacgacgagagcatggatcggctggtcatacctgagccgtcgaacgaggtggtggtccgggtggagcccgggaggcaggcgaggggggagctgacgctgcggaacgcgatgcacaccatgccggtggcgttcaggctgcagccggcggtgcgcgggcgcttcgcggttcgcccgcacacggggatcctggcgccgctcgcggcggtcaccgtggacgtgctgtacctggcctccgcgcctccggaggggcccagcggctcaggaagccgtggcgaggacgcgttcctgctgcacagcgtggtcgcgcccggcgccgcggtgaaggagcccgtcacggcgctcgactcggtcaacccggagtggttctcggcgaggagcaagcaggtgttcgtggacagcgggatcagggcgagcttcgtgggagcgtccgtggccgcgcggctcgtcgaggccggcgcggtcgaggcgctcagggaggtgctcgaccgcagcgagcccgagtggcgcgctgcggacgccacggacgagtctggccgcacgctgctcgacctcgccgtcggcctggcccgcgccgacatcgtccaggtgctgctcgagtacggcgccgacgctgacaagccgagccgaggccggacgcccctcgagaccgccgccgccgctggcgagtgcctcatcgccgagctcctcctcgccaacggcgccacgcccgccggctccgacgccatccacgtggccgccgccgccggccacaacgacgtcctcaagctgctccttgccaggcccgcctccgcttctcccgcctcgtcctcgtccttctcgtcttctttgacatctatcgacgcggcggggagggacggcaagactcctctacggttagcggcggaggcggggcggcgagacgcggtcaaggcgcttctcgcggcgggcgcgagggccgacgcgaggtgcggcgcggacggtgccaccgcgctccacgccgcggcgaggcgcggcgacgaggcggtcgcgcgtctcctcctgtcgcacggcgtctccggcacggcctcggtgcgcgacgtggccgggaagaccgcattcgagatcgccgccgaggagggccacggcggccggatcctggacttcttgggactcggcgaggccatcctcgccgccgcgcgcaagggcgaagtgagatcggtcaggcgcgcggccgatggcggcgcgtccgtcgaggggcgggatgcgcatgggtggacgccgctcatacgagctgccttcaaagggcgggccgacacggtccgcgaccttatcgaccgcggtgcggacatcgacgcggccgatgccgacggttacacggcgctgcactgcgcagccgaggcgggccgcgccgacgtggtcgacctcctcttaaagaacggcgccaacgttaaggccatgaccgtgaagggaagaaccgctgccgatgccgccacagcctcggggaagtccaaggtggttcggcttcttgacaaggccaccatcatggggaggaagcaggatgttagcgagaaggtggcgccggcggtggcgaagggcggtagcatggacaggaaacggagagcgcggaaagggagcagtggcgccatacggtttggtggtgggaaggaggggttcgaagccgccgcggttaccgttgggtggtcacactagcaactgcaaagaaagcagctatccaaccatcaagaaggatttgttccaaattgtgattagttttggatgagacgataattcaaatttgttttgaaggaacaggtaaagtgatatatgtgttatacttgtaaaaagaga

SEQ ID NO: 95641 - DNA, 707 bp, Zea Mays
aagaccaccgacgcgtagcacagtccattattgccgtctcccttttgcgtgagcaaagaaagagagcgagaagagcagtcgccatgtctggcatcatccacaagaaggacggcggggagcacaaggaaggcatcgtggagaagatcaaggacaagatcaccggcgagcacggcgacaagtccggcgaccacaaggaaaagaaggacaagaaaaagaagaagcacggcgagggccacgaccacgacggcggccacagtagcagcagcagcgacagcgactgagatctggtgtcgcagcacaggtgcaacacatgtatgcttgctggatggaggattcataccagctgatgctgatgtagtgtttcactggtgtcatgcatgtatcgtgctattataatcaaaaagaaaaaagaaataacagtcagggatggtttgtttgccatgtgatcttgtacactcctacttaaattatggctgctgcacggtgctgctagcttgtactaataaaagacaaaaatactgtaaaaataataggagccgatattaaagtcgagcgaataggcaaagtattgaatcaccgatcctgtttttatgaaacggtgtgacgtttactattaaattagtctcaatattgggtcgaccctgtatacatgcatgcgatcggacctatactatatatcgaaagcaaaaacaacagcaaacaacaca

SEQ ID NO: 95642 - DNA, 588 bp, Zea Mays
aagaccaccgacgcgtagcacagtccattattgccgtctcccttttgcgtgagcaaagaaagagagcgagaagagcagtcgccatgtctggcatcatccacaagaaggacggcggggagcacaaggaaggcatcgtggagaagatcaaggacaagatcaccggcgagcacggcgacaagtccggcgaccacaaggaaaagaaggacaagaaaaagaagaagcacggcgagggccacgaccacgacggcggccacagtagcagcagcagcgacagcgactgagatctggtgtcgcagcacaggtgcaacacatgtatgcttgctggatggaggattcataccagctgatgctgatgtagtgtttcactggtgtcatgcatgtatcgtgctattataatcaaaaagaaaaaagaaataacagtcagggatggtttgtttgccatgtgatcttgtacactcctacttaaattatggctgctgcacggtgctgctagcttgtactaataaagtgttgatctgcatgcttgcgtcttaatttgcgacacgcattcatgaacaagctggatcgaggagatccgcgtctttttgg

SEQ ID NO: 95643 - DNA, 922 bp, Zea Mays
acatcatcgatgcccctcacgatgatcccgtgcaggcggctgttagaaaccgatgctatgctcagacgtgcagggagaaagaagagaaaggttggttgctttgcttgcaccagcagctggcacgcagagcaactggtacactatcttttatttagtgccatcacgtccttcttatccgattggccttccattccttctataaataccggccggcgccgaagagccaaccaagaccaccgacgcgtagcacagtccattattgccgtctcccttttgcgtgagcaaagaaagagagcgagaagagcagtcgccatgtctggcatcatccacaagatcgaggagaagctccacatggggggcgaccacaagaataaggaggaggagcaccacaagaaggccgaggagcaccacaagaaggaggagggggagcaccacaagaaggacggcggggagcacaaggaaggcatcgtggagaagatcaaggacaagatcaccggcgagcacggcgacaagtccggcgaccacaaggaaaagaaggacaagaaaaagaagaagcacggcgagggccacgaccacgacggcggccacagtagcagcagcagcgacagcgactgagatctggtgtcgcagcacaggtgcaacacatgtatgcttgctggatggaggattcataccagctgatgctgatgtagtgtttcactggtgtcatgcatgtatcgtgctattataatcaaaaagaaaaaagaaataacagtcagggatggtttgtttgccatgtgatcttgtacactcctacttaaattatggctgctgcacggtgctgctagcttgtactaataaagtgttgatctgcatgcttgcgtcttaatttgcgacacgcattcatgaacaagctggatcgaggagatccgcgtctttttgg

SEQ ID NO: 95644 - DNA, 917 bp, Zea Mays
acatcatcgatgcccctcacgatgatcccgtgcaggcggctgttagaaaccgatgctatgctcagacgtgcagggagaaagaagagaaaggttggttgctttgcttgcaccagcagctggcacgcagagcaactggtacactatcttttatttagtgccatcacgtccttcttatccgattggccttccattccttctataaataccggccggcgccgaagagccaaccaagaccaccgacgcgtagcacagtccattattgccgtctcccttttgcgtgagcaaagaaagagagcgagaagagcagtcgccatgtctggcatcatccacaagatcgaggagaagctccacatggggggcgaccacaagaataaggaggaggagcaccacaagaaggccgaggagcaccacaagaaggaggagggggagcaccacaagaaggacggcggggagcacaaggaaggcatcgtggagaagatcaaggacaagatcaccggcgagcacggcgacaagtccggcgaccacaaggaaaagaaggacaagaaaaagaagaagcacggcgagggccacgaccacgacggcggccacagtagcagcagcagcgacagcgactgagatctggtgtcgcaggtgcaacacatgtatgcttgctggatggaggattcataccagctgatgctgatgtagtgtttcactggtgtcatgcatgtatcgtgctattataatcaaaaagaaaaaagaaataacagtcagggatggtttgtttgccatgtgatcttgtacactcctacttaaattatggctgctgcacggtgctgctagcttgtactaataaagtgttgatctgcatgcttgcgtcttaatttgcgacacgcattcatgaacaagctggatcgaggagatccgcgtctttttgg

SEQ ID NO: 95645 - DNA, 985 bp, Zea Mays
acatcatcgatgcccctcacgatgatcccgtgcaggcggctgttagaaaccgatgctatgctcagacgtgcagggagaaagaagagaaaggttggttgctttgcttgcaccagcagctggcacgcagagcaactggtacactatcttttatttagtgccatcacgtccttcttatccgattggccttccattccttctataaataccggccggcgccgaagagccaaccaagaccaccgacgcgtagcacagtccattattgccgtctcccttttgcgtgagcaaagaaagagagcgagaagagcagtcgccatgtctggcatcatccacaagatcgaggagaagctccacatggggggcgaccacaagaataaggaggaggagcaccacaagaaggccgaggagcaccacaagaaggaggagggggagcaccacaagaaggacggcggggagcacaaggaaggcatcgtggagaagatcaaggacaagatcaccggcgagcacggcgacaagtccggcgaccacaaggaaaagaaggacaagaaaaagaagaagcacggcgagggccacgaccacgacggcggccacagtagcagcagcagcgacagcgactgagatctggtgtcgcaggtaattaattaatctggggctgtattttttccctatttgtttcgttccgtttattttgttcagctggttttgatcttttgctggatctgaagatgtcgatgctggcttataatgcagcacaggtgcaacacatgtatgcttgctggatggaggattcataccagctgatgctgatgtagtgtttcactggtgtcatgcatgtatcgtgctattataatcaaaaagaaaaaagaaataacagtcagggatggtttgtttgccatgtgatcttgtacactcctacttaaattatggctgctgcacggtgctgctagcttgtactaataaagtgttgatctgcatgcttgcgtcttaa

SEQ ID NO: 95646 - DNA, 959 bp, Zea Mays
attcgtacccgttctaatcgaagtgtgatacgtgtattgtacctccgccatttctttggcacgcagccgccaacctgaggttttgtgggctcagcgctccgagaagattttcttgactatctcattgccagatgcgaaagatgttgtgttaaagaccgatcctaagggcctctttaccttctctgctgttgtccatggggaaccttttagcttcactttggagctttttgattcaatactgtcagagggaagtaaaacgaagacaaagatgggcctgcgaaacataatctgttcaatccagaaagaaaagaaaggttggtggaagcgcttgctaaagtcagaggaaaagcatccatacatcaaagttgactggaacaaatggtgcgatgaggatgaagagtctgagttctctggggattcagatggtggctttgatgaggcaaatgaaggagatgaaagtgatgatgatgatgggatgctttatctccccgaccttgaaaagctaaggggcaagtgatctggctgcttcggtgaagggagtagggttgatgtaacaagttaccgttgacgtgacagagtaggcttatcatcgacgtagttggggtcttacttgctgagcatctgcgacggcttgagacttttaggcatgtcttctatctccgaagcactctttcggtctttcctgatcagtgagctagcactctgaaaacgtagcgatgagctgtcccattttcgactaactatttagtgccagtgaatggcctaattctacaactatcacgatgtgcctatatgttaggggattatggattctgtggtccgtctttgtggtatgggatttccgttggcaggcaggccagtgtgatatgcagttcacttcgtttatccctttggattgcactgagcatgacctgcttgcttttgagcttttctactgcttgggctaggcatttagtgag

SEQ ID NO: 95647 - DNA, 1090 bp, Zea Mays
ggaccaccagagtgaactgctgtactatttttttagctgcctagttttttagtcgtttcctcttaaaaaagttgttgtgcttctcgtttcaccgtgcgccacaagcacacaactagggcgaccgccgccgacctacggccagctgtgcccatgtcttcgtcgggccctttgctggcgacgggaacccaccacaccggccgccaacctgaggttttgtgggctcagcgctccgagaagattttcttgactatctcattgccagatgcgaaagatgttgtgttaaagaccgatcctaagggcctctttaccttctctgctgttgtccatggggaaccttttagcttcactttggagctttttgattcaatactgtcagagggaagtaaaacgaagacaaagatgggcctgcgaaacataatctgttcaatccagaaagaaaagaaaggttggtggaagcgcttgctaaagtcagaggaaaagcatccatacatcaaagttgactggaacaaatggtgcgatgaggatgaagagtctgagttctctggggattcagatggtggctttgatgaggcaaatgaaggagatgaaagtgatgatgatgatgggatgctttatctccccgaccttgaaaagctaaggggcaagtgatctggctgcttcggtgaagggagtagggttgatgtaacaagttaccgttgacgtgacagagtaggcttatcatcgacgtagttggggtcttacttgctgagcatctgcgacggcttgagacttttaggcatgtcttctatctccgaagcactctttcggtctttcctgatcagtgagctagcactctgaaaacgtagcgatgagctgtcccattttcgactaactatttagtgccagtgaatggcctaattctacaactatcacgatgtgcctatatgttaggggattatggattctgtggtccgtctttgtggtatgggatttccgttggcaggcaggccagtgtgatatgcagttcacttcgtttatccctttggattgcactgagcatgacctgcttgcttttgagcttttctactgcttgggctaggcatttagtgag

SEQ ID NO: 95648 - DNA, 722 bp, Zea Mays
tttttagtcgtttcctcttaaaaaagttgttgtgcttctcgtttcaccgtgcgccacaagcacacaactagggcgaccgccgccgacctacggccagctgtgcccatgtcttcgtcgggccctttgctggcgacgggaacccaccacaccggccgccaacctgaggttttgtgggctcagcgctccgagaagattttcttgactatctcattgccagatgcgaaagatgttgtgttaaagaccgatcctaagggcctctttaccttctctgctgttgtccatggggaaccttttagcttcactttggagctttttgattcaatactgtcagagggaagtaaaacgaagacaaagatgggcctgcgaaacataatctgttcaatccagaaagaaaagaaaggttggtggaagcgcttgctaaagtcagaggaaaagcatccatacatcaaagttgactggaacaaatggtgcgatgaggatgaagagtctgagttctctggggattcagatggtggctttgatgaggcaaatgaaggagatgaaagtgatgatgatgatgggatgctttgtgagtgcccatcttgtacttttccacctcttgctctcgcttgctctcttttgatatcaattttaagccaggttgttactgaacaagattatctactcataaagtcttccactaggctctaggcttaaaatgcatgccttgctcatctgaatat

SEQ ID NO: 95649 - DNA, 617 bp, Zea Mays
attcgtacccgttctaatcgaagtgtgatacgtgtattgtacctccgccatttctttggcacgcagccgccaacctgaggttttgtgggctcagcgctccgagaagattttcttgactatctcattgccagatgcgaaagatgttgtgttaaagaccgatcctaagggcctctttaccttctctgctgttgtccatggggaaccttttagcttcactttggagctttttgattcaatactgtcagagggaagtaaaacgaagacaaagatgggcctgcgaaacataatctgttcaatccagaaagaaaagaaaggttggtggaagcgcttgctaaagtcagaggaaaagcatccatacatcaaagttgactggaacaaatggtgcgatgaggatgaagagtctggtatgtgctaatgatatacatccccagatatatgcagttgtttttggtctagatgcattctgaatttagtatgaataaagggttgtaaaaaatcaagccaggttggaattcagtagtttaaattgatgaaatgtgtattttttttatggaacttggatttgttgttgtggtggccatggagtccattccaaactagtttaattttgttaacaa

SEQ ID NO: 95650 - DNA, 118 bp, Zea Mays
ctttgttctgcctttcccattcccacttcccgcaaagcccattcccattctcattcccacatatagcccacgtctagctaaaatcaaaaacacaaatgatcccaaagggattcaaacc

SEQ ID NO: 95651 - DNA, 171 bp, Zea Mays
aggatgtggaaagcgcacggtggttaggcatgttgctaaccatcttggtctacatgtggtcgagtgtagttgtcatgatctgatcacatcatcagaaagtggggtacctgctgcacttgcaactgcctttaaagaagctcagaagtactcatttttttctatctttcccct

SEQ ID NO: 95652 - DNA, 1685 bp, Zea Mays
aaagcgaagcagcaaccagcaaagtgatcagtgtgatcgatcacacactgccatggccgtcatgggcaaggaggaggaggagcagcagcagcagcacaaggaggaggaggtggtccaaggagatgtgcgagtcgtcgtccagcaggagacggcggcggacgaggaggccgagtcggcgctggtgcgcaagatctccggcctggccgccgccatcgccaggctgccgtcgctgagcccgtcgccggaggtgaacgcgctcttcaccgacctcgtcacggcctgcatcccgcgcagcaccgtggacgtggagcgcctgggcccggagctgcagcgcatgcgcgcgggcctcatccgcctctgcgccgacgccgaggcgctgctggaggcgcactactccgacctgctggccgccttcgacaacccgctggaccacctgccgctcttcccctacttcaccaactacctcctgctgagccagctggagcacggcctgctggcgcgccacgtcccgggcccgcccccctcccgcgtcgccttcgtcggctccggcccgctcccgctcagctccctcgtgctcgcctcgcgccacctccccgccgccgccttcgacaactacgacatctgcggggacgccaacgaccgcgcgcgccgcctcgtgcgcgccgacgccgcgctcgccgcgcgcatggcgttccgcacctccgacgtcgcccacgtcacccgggaactggccgcctacgacgtcgtcttcctggcggcgctcgtgggcatggccgccgaggagaaggcgcgcgtcgtcgagcacctcggcaggcacatggcgcccggcgccgcgctggtggtgcggagcgcgcacggcgcgcgcggcttcctgtaccccgtggttgaccccgaggagatccgccgcggcggcttcgacgtgctcgccgtgcaccacccggagggggaggtgatcaactccgtcatcatcgcccgcaagcccctcccggtcgtcgacgagcacgccgtcgccggggtggggcacgcgcacgcgcacggcgccgtgctcagccggccctgcctctgctgcgagatggaggcccgggctcaccagaagatggaggaggtggccatggagcagctgccgtcctaggcacaagatggattgccccggccggcagcccatgcaatcgcattgcatctatctcatcgatctacttacgtgtctacaccacatgcgtgataataatctgcagattgacctggctactagctggtatattgtcaccgtgattgtattaagtttttgtttaacaaaagggtagaagtcgaagtccgagccggcgaaagaaaaaatactggagaaaaaaaaagagtgcacgaaggagacggaggcgagcgaacaggctggcctaatttcatttgtatgctaatgttacgtgtgtcaatgatgatggagtggttaaattattagtaattctcgatgcctaatttgtcagcctggatactgttattagcatgtagcttagctccaagggtcattgggtcagtacgacagtaccgtcaccttagagatgccaaatgagcggtttggcttggcacgacacctaagagaaaaaaaataccataaagaagctcgtggtcgtagccactacccaggtttattttcttataagattatataattcaacttatagattatctaa

SEQ ID NO: 95653 - DNA, 703 bp, Zea Mays
gcagcagcaatgcagctgatggcaactgtccagaaggccatatacccaaacgttgcaagaaggacatagacaacaaggcatgaagtagcaggcggtaaatgtgcaccgatgacagaaacggaaagcatatcagaggcatgcttgagacgtgggccagtggcccaacaactgtataatcctgctgcaattgcgaatacaactacaagcgctccaatgccaagtgcagcagtattgccaacaagaagtatgactacatcacaagcaagtgcagaaacaggggcagcccagagagaggtcttgatggcttttggcgggtttgtgacagcaaggataacccagaagcatgcagcaattgtggatactatgacagaggataccagagggatgaagttggagaagggcttgtaggcagggttctggtggtaagaggcctggacgcctaggaatgctgtgagggcaatgaaagcaagcagatgaaagatgaacagcaacttcgttacactgcctgtgaaaccactgcagcaaccacgactatcctggacctcaatgttgccaaatgctggggaataaatttgctcttcactttcaacagccgcctgagtaagatttggaatgttagtcatagcagtgcggacggtccggccccgaggccggacggtccgcggtccggacagtccgtggtggtggcgcggaaggtccgcgc

SEQ ID NO: 95654 - DNA, 261 bp, Zea Mays
atggccgctgcgggggaaggtttatatttggagtattctctcactgggcttgctgacagtgtcgtgtttgacagggcatgctactcgaagatggcagaggagctatgcgcgcttctggtggacaccccaagcgagacgctgaacctacccatggggtgtcttctaacgatgctcaacgctccagttccggacgagagcaggtcgtcgtacctgcaggacgcactctctgtcttcaccgaaatcctttgcagtgatccgtag

SEQ ID NO: 95655 - DNA, 826 bp, Zea Mays
gggttaaccagctcaaggcttctggtcgaatcagtgatgctattgataaaccattgcgtggaaagggccatgaggcagagattcaggagttcttgaagatagcttttgcttgcacccagccccgtgtgacggagaggcattcaatgtatcgggttttccacgctctgaagagcatcggagagggctgcgatgtcacggagcagtttgatgagttcccattggcctataacaaggatgattcagacgctatttagctgatgatgctgattgccaattcgattgtggaaatgtttggtcaggcttattgatgatatatatatttagccttgctatggacagaccggaagcataaatgagtgataagagaacaatatcgaggcaccaaatctagcgccggatgccgggtggtcaattacatcgttgcatcgacaggggatgtgataaccataagtaatattgctcgaaaatgtagagctgactcttgaagcctttgactacatgcagctgccattcacgctgaaagcgcattctaacacggcatgatacaccagcaactggaatgttgtcaacatcagcggcaacgacgacaacgccacatcgagaaacaacaactgtgggccagggagcacaatcccgtggtgcggtgacttgcccacgtttgccatgctgccttgatgcatggcacatcaacaagaagagcaccagtttggaaggctaattccgaaggaattgagatgtgcagagggagatgaagaatgtggagaaagacatcagggtagctaccaagcgcaatgacatgttatctgcaaaggtacggtcggtctga

SEQ ID NO: 95656 - DNA, 2298 bp, Zea Mays
agatccttgctgctgaatccgaaggatcatccggagcccagtatccttgttgaattgctaaggtgtcgtgcaagaaagcaaggttctaggtttctttcattcaatccagtgaatggaagatggaaatttgaggttgatcattttagtagatttgggcttgtggatgaggacgaagaggatgctgtgatggacgaggcagctgttcggcagccaattactgaagtaagagaaagagatccaccttcaaatagttatgagattgagctctcacattcattgcctgctcatctcgggcttgaccctgcaaaggtgcaagaaatgaggatggtgatgttttccaatgaggaagaagatgaatacatggaggatgggttcccttctgacaagaggtaccttagcagagaaaggatgaatgtggattcacctacctcaagcagtaaaggttcgaggttaaggtctctctctcccttgcacatgtcttctcagaaggctggcaggagatctggtatgcctgttcggaaagaacgtcaggcacttttggaatacaatttgaattcttcagagcttggttcatcgaatcagggtattcttatgtctgggcaaaacagaggatttccagtgagtatgaccaaggtggaaggctttaagctgccgcctgagcaagaaactcctgttgctggaaacacgtatactgtctgtgtagtggatgctgctttattcatgggtagatcatttcgtgttggttggggaccaaatggtttacttgtacattcaggtagtctggtcaatagtcctggaactggcctatcttctgttattcacatagagaaagttgcaagtgacaaagttgtgcgtgatgataaggataagattaaggatgacctaacagaactatgtttttctgctccaatggacctccataagagtcttgatcatgactttctagagattgagtctgactcgttcagattgaagcttcaaaaagtcatgacaaatcgtttggttttgcctgacatctgcaggtcatatattgatatcatcgaaaggcagcttgaagtcaatgatttatccatgtcttcacgtgtgctgttgatgcatcaagttacagtctgggagttaattagggtcttgttctcagagagagcaactggtagccagttggactctgttggtgacgatgatcaggaaggcatggttttagacaaaaaagaaggctctgtcgacatagaccctgaagcactccctttgtttaggagagcagattttagcaattggttacaggacagtgtttgccatcgggtccaaggagaggtgggttccttaaatgatgccaggtacttggaaaatatcctcgtccttttgactggtcgacaattggacacggccactgaaattgctgcctcaaggggtgatgttcggttggcaatcttgctaagtcaggcaggtgggtcaatgtcaaatcgatctgaccttgcgcaaacactggatcagtggaaaatgaatggtctagattttgattatattgaggaagactggttaaaggtatatatgttacttgctggtaacgtacaggccgcttttctagatttaccaattgactggaagaggtaccttggtttgattatgtggtatcaattatcacctgatacaccactcgatattatcattcgttcttacgatcaactccttggtgagggcaaagttccctatcctgttcctgtatatatagatgaaggacctcttgatgaagcacctcagtggtccccgggtgaccattttgatatctccttctacctaatgcttcttcatgccaataaagacgagaagtttgggctgctaaagactatgttcagtgcattctcatcttcattcgaccccttggattatcatttcatatggcatcagcgttcaattttggaggctgttggagctttcagttcaaaagatcttcacttgctagatttaagttttgtttatcaattgctttgtcttgggaggtgccattgggttatctatgtcattctgcacatgccgtatcttgacgatgccccatacattcatgagaaattaatcagggaagttttatcacagtattgtgagtcatggagtagagatgatgctcaaaggcaatacattgtagaacttggtataccagaagaatggatgcatgaagctctggctctttatcacgaatactatggagataaacagggtgcactggagaatttgattcagtgtggcaactggaagaaagctcacactattttcgtgacttctgttgctcattctatgttctgt

SEQ ID NO: 95657 - DNA, 426 bp, Zea Mays
atggcggaggaaccggtggtcggttatgatggcttcgaggccgccggtgatgctggcgccggtggcgcggaggacaacctgtcgatgtccctcggcgacttcatggcgttcctcgaaactgagcccacgtcacccgaggaaggctggaaggaggagcagcagatgcagcctgcggtcaatcaaggttgtttagagatgcctgccaacactgattgttctgaagatttattccaaagccatgaagcagaaatgcttgagaacgcagaattttggtcaaagtcaaactactcccctgtggagcatctggagtgccatatggaagttaacatggagctgaacgaaggagaacaaatgattgatcacacagaagctagccgatatgaattgtttagcaacggtgagatatacaaaggcggctgtagatga

SEQ ID NO: 95658 - DNA, 2019 bp, Zea Mays
ctccccgcaccaattccttccaagttccttccaactcgctcccaaatccagacgagaaaaagctccgcgtctgcggtttgattgcgctcgcgccccttccgaatcctctcgccaccccccgccgtcatggacgacgaccacgaccacgacgcgtcgtcgccggccgccggggagcggtgcccgtgctgctcctccccctcctcctcgccggccgtgccgtggcggcggtccgtgaagcggaagctgggcgcggagaagggggaggagggcggggaggcggggcccacggcgcgggtcgaggcggaggacgagtgcgcggcgctgcgggaggcggtggcggcggcccagtccacggcgtcggcgctgcgggccgaggtcgaggaggagcgcctcgccgcggccagcgccgccagcgaggccatggccatgatgctccgcctgcagcgcgacaaggccgaggtccagatggagctccgccagttccgccgcttcgccgacgagaagatggcgctcgacgccgcggacatcgaccagctgcgcgcgctcctcgcccagcgcgcgcgccgcctggtgcgcctccgcgccaggctccgcgagtacaggcgccagttcctccacctcggcatcccgctccccgagggcgaggacctcctgttcgcccagaccgccgccgaggaggaagaggacctactcctcctcgagggcgaggacggctacgccgatggcgatggcgatggtgatggagggtactaccctcagctccgctgcaacgacggggagtactactacgaggacgaggaggaagaagatgcggttgccctcgatctggagcgccggatctgccgcctcgagcacgatcaggaaactcccctgcttgagccaccccttcaggaagacgaagaggaaggcacccacctctacacagaagaggcgttgccggacttgtctgggcatgagcagggtggcctctatgctgatgacatgttatctgtggacggtgtggaagaactgagcgacctccacaatgacgatgaagagctgccagagtctcctactgctggccgtggtgatagggtggaagcaagcgaggctgatggtgttgacagtggcagtgatagggtatacaccattgacaaggtgcatcaaggtgagtctgcgcctattgcaagggtcatggataagtaccagggtgaggcggtggagccagacattaagaagctttacatgaggctggaggcactggaggctgatagggagtcgatgaggcaggcccttgtggcaatgcgcacagagaaggcacaacttgttcttctttgtgagattgcgcagcatcttgccaaggatggagttccagctggggtggggccaggtgtacaccgttcccctagaaaacgagcagttgggattgtagaaaggagattcacggaggacaagagggtggcactcctcaagacatattccgtggttgccttgtttaagtgggtcctcactttatttggcaagaaaaagaagctatctcaaagcaggtatacttttggcttatcaagtaataatgttggtttgctcctactcttggataagtgcccacggatccagaaaaccctcatgagaacaaagtaaaacctgccgaaaagaagcagcagcagcagctgtacaatgtaaataaatagctgtcagttgggaagtttgcatcggattgttttttttgttaatgctgggtggagccagagttcttttgattctttagttgatgattttctgatttcacatctttggtgatgaggatatgcgcgttggtcttgcaatcgttcaagtcacaaaaaagctattgctttgcttctttctcaccagcaagagctacaatgcatgtatagtaatacactggtggttggtttacttgcttgcaggttgatgagtgaatatttatgacttttagcttacatgtccaaactgcaaacttttgtaaaaaaatgttccttgtattcaaattaaatctgtttatgcttgtagcctagcggt

SEQ ID NO: 95659 - DNA, 3579 bp, Zea Mays
aaacaagcctttttctgcctgcttcagaccgctccaaagctccccaagcccaaaccctagccaccacggcaatggcggcggtggagagggccgacgagtcggcggcgaccgcggcgggtgacccgcgccacgtccgcaacacgtgcatcctcgcgcacgtggaccacggcaagaccacgctggccgaccacctggtggcgtcttgcggggacgggctcctccacccgaagctcgccggacggctccgcttcatggactacctcgacgaggagcagcggcgggctatcaccatgaagtccgccgccatcgcgctccgctcccgggccggccaccgcatcagcctcatcgactccccgggccacatcgacttctgttccgaggtctcctccgctgcgcgcctttcggactcggcgctcattctcgtcgacgccgtcgagggggtgcacatccagacgcacgccgcgctgcgccaggccttcatcgagcgcctccggccctgcctcgtgctcaacaaaatcgaccgccttatcaccgagctcagcctcacccccgccgaggcctacgtccgcctccaccgcatcgtctccgacgtcaactctatctattccgcgctccgctcccactcctacttctccctcctctccgcactggaggacaacccctccacaagctcttcgtcctcagctgaggacctaccggaggactttgaagacgacgatgacaacgaggacgccttccagcccctcaagggcaatgtcgtcttcgcctgtgcacttgacggctggggctttcgcccccaacagttcgccaacctctacgccagaaagatcggggtcaacccctctgccttcctgaaaggattgtggggccccagatatctagataagaagacggggaaggttgtagggaagaaagccatcaagagctcagacccacagccaatgttcgtggagtttgtgctaagtgccctgtggaagatgtacgagctggtgctgaaggatggtggtgagagtaagggggtgaagaaattgattgtaaactttgacttgaaaattcccgaacgagagctgaagaacagagatacaaaggctgtgctgcagtccgtcatgagccggtggctgccgctggcagatgctgtgatggatatggtggtggagtgcacgcctgatcctgttgctgctcaaggggtcagggttgcaaggcttatgccaaagagggaggttactccagaagatgctgctggatgccctgaggttgtttcggaggcagagagggtgcggaggtgtgttgaggcctgtgatgtgagtgctgatgcgccagtggtagtttatgtgtcaaagatgtttgctgtgccatctaagatgttgccattgaagggagtgtatggggaactattgaaccaccaaagtaccagtgagtcagaggagtgctttatggcatttgcgagggtcttcagtggcgtccttcatgcagggcagaaggtatttgtgctatcaccattgtatgatccagtaaaaggggatacggttcagaagcatgtgcaggaggtggagctgcaatacttgtatgagatgctaggacaaggcctgaagccagttgccagcgtgggtgcagggaatgtggttgcaatccagggtcttgggcagcatatattgaagagcgccacattgtcgtccaccaagaattgctggcccttctcgagcatgatgttccaggcgtctccgatgcttaaggttgcaattgagccctcaaatccagctgatttaggagctcttgttaaagggcttaggcttcttaaccgggcagacccatttgttgagtatacagtttcgcagaggggcgagcatgtccttgctgctgctggtgagatacatttggagcggtgcataaaggatttggaggagagattttcaaaggtcaaattggtggtctcagaccccctagtttcttttaaggagacaatcgaagggatgggtgtcagtttagtggagagcttgaagaacccacaggagtttgttgagaggactactccaaatggtaggtgtactgtgcgagtccaggtcttgaggcttcccattgccctgactaaggtccttgaggaaagtgaacagttgcttggtcaaataattgatgggaaaacagcaaaaagggatggtgttttggatcctcgcctttctcaggaagatggtgattccgctgcaactctaagacagcggatgatcgatgccatagacagtgaattagaagcaatatctaagcaagttgataaagaaaaactcgacaggtatagaaagacatggcttggacaccttgaaagaatctggtcactaggtccttggcaggttggtccaaatatccttcttttggctgaatcaaaatcaagtggtggtgcagtaactgtccaggatggaaggcaaggtgtacttgtgagtggtccagctcatgtctctgagaaattggggtttgtgagggattgcgataccaaaaataacaacaatcttgacaatggtgaatatgcaacggatgctcctgaatcattgcatatagagtctacaacactaaggaacagcattgtctcaggattccagattgccactaatgctgggcctttatgtgatgaacctatgtggggtcttgcgtttattgttgagccttacatatttgctgatggctctgatgctgccaaccaatctgatcaatacaatgtcttcagcggtcaagtaatcactgcggttaaagaagcatgcagagcagctgttcttcagaacaagccaaggcttgttgaggctatgtatttctgtgagttgaccacgccaaccgagcagttaggtgcaacttatgcagttcttggtaagaggcgggcaaggattctgaaagaagagatgcaagaaggaacctcgttatttacagtgcacgcttacctgccagttgcggagagcgttggattttcgaatcaacttaggagtttaactgcaggtgcagttagtgctctcctcgttcttagccactgggaagctattcctgaggaccccttctttgtcccaaagacgcaggatgagctcgaagaattcggggatggttcaagcattgggccaaacttggctaaaaagcttatgaattctgtcagacgaaggaaaggactgcatgtcgaagagaaagttgtggagcatggcacaaaacagcggactctcgctaaaaaagtgtagttgttggccaatggcctccatacagatgcggtaggaaaaccacatctctttttgtccaaggttctgtcttggtatactgaaacatactcaaaatttatatgcagtgaaatagctttcattcagtacgacattgttgtttgagagagttgagatgggatatgtacgggcggcattggtggtgccttggtctacaatattagaaagatcacagtttgttgtgaggaaaacggggacgatttaccaaaaaaaaaaagcccttcatgataggtattttctggaccttcgtatcttgcaataccaatgaaatagcatagagcgcccattttgtcctgggagcaagagcaaacttcgtctattattggtttgcatgtgt

SEQ ID NO: 95660 - DNA, 1678 bp, Zea Mays
atgtgcactcgataagttttcctggtgtccggtccggctacccctgttccctctcgcagtcgcagacttctcttctcgccaaaccctaatcctgctcctgcctttctcgtctccaaccgttggccgagcagtagcggtggcgatggagggcaaggaagaaggtcggatcttcgtgggcggcctgtcgtggcaaacggacgagcgcaagcttgaggacgcctttggccgcttcggcaaggtcgtcgacgcccagatcatggtggagagacacactaaccgccacaggggctttggcttcgtgacatttgaagatcggagggcagttgacagcgctattaaagagatgcatggccaagaaatagatggccgtaccatctcagtgaacaaggctgagcctaagatgaatacagatgacacaaggtatgccggtggtggtggacgaggagagtatcgtggtggtagaggtgatggtccaccccctggcaattgctttgagtgtggtcgtcctggtcattgggtccgtgactgccctagtgctgctggcggtcgttctggcaggttcccatccaagttcagtggtggcagtggcgttggcaggggagaccgcttttctggttcagataggtttggtgatcgttacatggatgatcgttatgatggtggtcgctatgggtaccgtgatcaagctgatgcaagggacaggtatgctggtggccgagatcgctatgccaatgaccgttacccatctggtggcgatcactttggtggagacaggtatggaggtggtccggattgttatgtgccaagtggttatggtagggagcgagaaagaagctacgagagagatggagttcgtggtggtggtggcggcggcggcggctatgataggagtggcccaaggggtggtggtgggtatgacagggatggtccacgcggcggtggaggaagtgcacgctatgatggaggaaattacagggagaggcctgggccatatgatcgccctagcaggggaggacgttttgatgatcgctactgatgaactgcctgtagactcaagctccttgtcttggtagtttaatgtttgcagttttgcatggccgaatgcttaatgggctatggaagatgcttaatttatccctcttcggcactttaatgtctgctctttatttcaaccagtactggggcactggtttgccttgataagtttatccagctgacagtttttgcatgagatgagtcatgctctgggctattaccctgcctgttggatatttcagtagctgaggtttgcagtgatcgattgtcattgttgatctgaatatctggtatgcgtggactatgtttaaagtgattgcctgtcatcattggtctatatagttggtgagcatatatatgttcagtgtcggtgcttgtcattgttgttggtctggatatctaggcttgcaaggatatatttgcagggctgagttgcaagggcttaacagaacaatagccaaagtaccttatattttagtagctggagaccatgttaattatgctataattagctggagaccatgtaaatttagcttagtttttgtcggcggtctgacttttggtgggattttatcttgaacaaacaccgtccctgacatttaagagtgtagagccgactaacagtagtcaatctctatttcac

SEQ ID NO: 95661 - DNA, 1190 bp, Zea Mays
gatccaggaataacctaatctcagtgcttctcttctgagatcatggtggagagacacactaaccgccacaggggctttggcttcgtgacatttgaagatcggagggcagttgacagcgctattaaagagatgcatggccaagaaatagatggccgtaccatctcagtgaacaaggctgagcctaagatgaatacagatgacacaaggtatgccggtggtggtggacgaggagagtatcgtggtggtagaggtgatggtccaccccctggcaattgctttgagtgtggtcgtcctggtcattgggtccgtgactgccctagtgctgctggcggtcgttctggcaggttcccatccaagttcagtggtggcagtggcgttggcaggggagaccgcttttctggttcagataggtttggtgatcgttacatggatgatcgttatgatggtggtcgctatgggtaccgtgatcaagctgatgcaagggacaggtatgctggtggccgagatcgctatgccaatgaccgttacccatctggtggcgatcactttggtggagacaggtatggaggtggtccggattgttatgtgccaagtggttatggtagggagcgagaaagaagctacgagagagatggagttcgtggtggtggtggcggcggcggcggctatgataggagtggcccaaggggtggtggtgggtatgacagggatggtccacgcggcggtggaggaagtgcacgctatgatggaggaaattacagggagaggcctgggccatatgatcgccctagcaggggaggacgttttgatgatcgctactgatgaactgcctgtagactcaagctccttgtcttggtagtttaatgtttgcagttttgcatggccgaatgcttaatgggctatggaagatgcttaatttatccctcttcggcactttaatgtctgctctttatttcaaccagtactggggcactggtttgccttgataagtttatccagctgacagtttttgcatgagatgagtcatgctctgggctattaccctgcctgttggatatttcagtagctgaggtttgcagtgatcgattgtcattgttgatctgaatatctggtatgcgtggactatgtttaaagtgattgcctgtcatcattggtctatatagttggtgagcatatatatgttcagtgtc

SEQ ID NO: 95662 - DNA, 847 bp, Zea Mays
atgtgcactcgataagttttcctggtgtccggtccggctacccctgttccctctcgcagtcgcagacttctcttctcgccaaaccctaatcctgctcctgcctttctcgtctccaaccgttggccgagcagtagcggtggcgatggagggcaaggaagaaggtcggatcttcgtgggcggcctgtcgtggcaaacggacgagcgcaagcttgaggacgcctttggccgcttcggcaaggtcgtcgacgcccaggtacccgtgcccccagtccgtctacgttagtgctcatgcccgccccaggtagttttgctagatccatcgatttcgtgttgtccgcggtgcgatattgttgggtatgatggttggaagatcggtgggtgaggtggaaaggcggatctgtagattgtttttgcgttctgtcgaacagagatgtgtgttttgcgtaggaaggaggattgcgatttctgctcacttttatgtctttcgttgttcagcaagaggcgtaacttggtgagagaaaatatttttcttctctttagtttgcagtagcaaagttgaattctttggcatcactgagagcgaaattaaaatgatgaaacggtacttcttgttgcgatgaaccaagaaattagtatcctgtagacctgtacaaacatgcatccttggattccttgcttcttaaagagagtaaggacctaaatagtctagtgtcatttgtctattatggttcatgtttatttttctatgttgatagcttgctctcagaaattcatgaatactcactgttcttgtttttccatctttctttgcaactgggatctgttctctcggccattctttgtttgc

SEQ ID NO: 95663 - DNA, 1271 bp, Zea Mays
gaccagttcattgcgtcacaacttcctaccgatcccgtccgccgtgcactttcctcaaccacaaccatggctcaggttccttctgagtccagcaagagtgacgctgaaacctcgccaccagccgataaagctccacccgaaatctctagccccgaatgctacagcgatctcgtatccactcgtccagcgagaggagggtgggtgcagccgctggtactgtaccagaactactggctgacccccggcaggctccagcacatcatccccgtgaaagagctctacaagcctcgcgccgacgacatcgtcctcgtcacctacccgaaatgcggaaccacctggctgaaagctctcgccttcgccatcacgacccgcagccgccacgctttcgccgcccaccctctgctcgcccggcaccctcaggagctcgtgccgcaccttgagctgccggccctggcgggagacctagcggacgtcgagaagctagctgccctccccgaggcttctcgcgactcacctacccctttccctgctcccgccggacgtgtccggctaccgcgtcgtgtacctgtgccggcatcccaaggacgccttcgtctcgtggtggttcttcgcgaacggcatgctgcgcagaggctcctcctcctcctccgtggacctcgacgacgcgttgagcatgttctgcgaggggttctcgccgttgggccccttctgggagcactacctcgagtactggaaggcgagcttggagaggcctcagcatatcctgttcttgaggtacgaagagatcgtggcagacccggtgaaggttgtcaagacgcttgccggcttcttctctgacccgttcactgaggcggaagagagaggaggagtccccgagcaggtggcgaggctgtgcagcttcgaggtgctcagcggcctggagaaaaaccaaaccggaggtgtcgcttttggaaacgatttagtcattggcaagtctacgttcttcagggaaggcaaggtgggggactgggaaaaccacatgaccaaagagcagggacagaggttggatgacgttttggaggacaagcttaagggatctggtctcgtgttttgattaattcatatagcatgttgtttgtcatgaataatcattcgctcacacatgtagtggtattttatgtaattggatcttttttttttctacatagattacgttatggtaatgcagaattatggtgtagctcgatttatcatgtgcatctgtatgtaaggaattgaggtcctttctggtg

SEQ ID NO: 95664 - DNA, 1728 bp, Zea Mays
actgcttcccgtagtcctttgtcgcgagctgctgtgctgtgtcctgtgtgcccgcaccatcgcctgaggcctgagggtgcgtgctgcaggtatttattggacgcttcccggatcaaagcaatgtcgagtggcgacagtcggcggtgggcgcgcatgcagtgggtggcgacgcgaccgagtgcggtggtggtacggcgagcgagcgagcgacacgagctgagtgagtgccctgcaagcccaagctcgtgacagagataggacttcagctcgactcgcgcggtcgccttgcctgctgcacacgagccgtcgccaactcgatcctcaccggtgacccctaccgcagctcatatcatcctgttcttgctcttcatcttactgttaatttcctgccaatttaatcccaccggccatcgttctcctgaaccaaagccatggcgcaagctgcttccggctccagcaagatcgacaccaaagctcccacctcagccgacgaggccgctcaacccaagagctacggcgacctggtatccactctcccggctagaggcgggtgggtatcgctcgtgcagtaccagaactactggctgaaccccggcaggctccagaacatcatccccgtgaaagagctctacaagcctcgcgccgacgacatcgtcctcgccacctacctgaaatgcgggaccacgtggctgaaggcgctggccttcgccatcacgacccgcggccgccaccaccaggccttcgccgccgccgaccaccccctgctcaccgtgcacccgcaggaggccgtgccgcacctggaggtgcacacgccagggcagggcctggcagacatcgagaggctgccgtcgccgaggctgctcgggacgcacctgcccctctccctgctcccgccggccgtggccacctccggctgccgcgtcgtgtacctgtgccggcagcccaaggacgtgttcgtctcgctctggcacttcgtgaagggcatgcgcgggggcaggtcccccgtggagctggacgccgcgctggccatgttctgcgagggggtctcgcctttcgggcccgtctgggagcactacctcgagtactggaaggagagcctggcgaggcctgagcgggtccttttcctcaggtacgaggagatggtggcggacccggtgcgtgccgtgaggacgctcgccggcttcttcgccgtcccgttcaccgacgaggaagaggggcgaggggtcccggaggagattgtgaggctgtgcagcttcgagatgctgagcggcttggaaagcaatcggaccggagatcttgattgcggagacaacacggtgatcggaaaatctaccttcttcaggaagggcaaggttggggactgggagaaccacttgacaaaagagatgggcaagaaggtcgacgccgttttcgaagacaagctccagggatctggtctcgtgttttgaattttgattactatccatgcatggcttttgtttgtgtgatgctgtttgtccagaataactaatcgtttgcgcatgttgcagtatttacgtaacgggatctttctatgctcaaaagacaaagatcaagggatctagccagccctatattttgattagccgtgtctttcgattgtgtgatgatgtttgtcaagaataatctttgtgtagtatttatgtaatgggatctttctactcgaaaaaattactctataactacgcttttatatatgttacttttacc

SEQ ID NO: 95665 - DNA, 1450 bp, Zea Mays
tcggcggtgggcgcgcatgcagtgggtggcgacgcgaccgagtgcggtggtggtacggcgagcgagcgagcgacacgagctgagtgagtgccctgcaagcccaagctcgtgacagagataggacttcagctcgactcgcgcggtcgccttgcctgctgcacacgagccgtcgccaactcgatcctcaccgccatggcgcaagctgcttccggctccagcaagatcgacaccaaagctcccacctcagccgacgaggccgctcaacccaagagctacggcgacctggtatccactctcccggctagaggcgggtgggtatcgctcgtgcagtaccagaactactggctgaaccccggcaggctccagaacatcatccccgtgaaagagctctacaagcctcgcgccgacgacatcgtcctcgccacctacctgaaatgcgggaccacgtggctgaaggcgctggccttcgccatcacgacccgcggccgccaccaccaggccttcgccgccgccgaccaccccctgctcaccgtgcacccgcaggaggccgtgccgcacctggaggtgcacacgccagggcagggcctggcagacatcgagaggctgccgtcgccgaggctgctcgggacgcacctgcccctctccctgctcccgccggccgtggccacctccggctgccgcgtcgtgtacctgtgccggcagcccaaggacgtgttcgtctcgctctggcacttcgtgaagggcatgcgcgggggcaggtcccccgtggagctggacgccgcgctggccatgttctgcgagggggtctcgcctttcgggcccgtctgggagcactacctcgagtactggaaggagagcctggcgaggcctgagcgggtccttttcctcaggtacgaggagatggtggcggacccggtgcgtgccgtgaggacgctcgccggcttcttcgccgtcccgttcaccgacgaggaagaggggcgaggggtcccggaggagattgtgaggctgtgcagcttcgagatgctgagcggcttggaaagcaatcggaccggagatcttgattgcggagacaacacggtgatcggaaaatctaccttcttcaggaagggcaaggttggggactgggagaaccacttgacaaaagagatgggcaagaaggtcgacgccgttttcgaagacaagctccagggatctggtctcgtgttttgaattttgattactatccatgcatggcttttgtttgtgtgatgctgtttgtccagaataactaatcgtttgcgcatgttgcagtatttacgtaacgggatctttctatgctcaaaagacaaagatcaagggatctagccagccctatattttgattagccgtgtctttcgattgtgtgatgatgtttgtcaagaataatctttgtgtagtatttatgtaatgggatctttctactcgaaaaaa

SEQ ID NO: 95666 - DNA, 2424 bp, Zea Mays
atggagccacgatgtctcaacggaggtgctggtgtctccatggcacgtggggctgcaagatgtaaccacgacttggtggctggcgcatctggtggctgtcatggtgcgactacaatagagtttggggattttttttgtcgtgaggtactgaagtgggctttgtcgcttcgttgggcttcatgcaaggtagccagcagaagtactggggctcacacaagtggcactcctacctatctcgctcaagagacctcttgtgtccgtgcctccgtggtcgcgtcgtccctgagaaccaaccagacggtggacatggtgttcggcggcgaccgtgccatgggagcggcccccggcgccgacgccgcaagcacgatgcggttcgcgttgcacgtcgtgcgcgggcggtggttcatgttcttcgcgtccatcctgatcatggcggcagccggcggcacgtacatattcgccatctattccaaggcgatcaagacgtcgctcgggtacgaccagcagacgcttaacacgctgagcttcttcaaggacgtgggcgccaacgtgggcatcctgcccgggctcatcaacgaggtcaccccgccgtgggtggtgctggcctgcggcgccggcatgaacctggtgggctacctcatgatctacctggccatctccggtcgcacggcgcggccgcccgtgtggctgatgtgcgtctacatcgccgtcggcgccaactcgcagtcgttcgccaacaccggctcgctcgtcaccgccgtgaagaacttccccgaggaccgcggcgtggtgctcggcctgctcaaggggttcgtcggcctcagcggcgccatcttcacccagctgtaccgcgccatctacggcaccgacaacgacggcaccgacctggtgctgctcatggcgtggctccccgctgccatatcgctcgtcttcatccccaccatccgcatcatgccgcggaacaccgccgcgcgcggggagcgcaaagccttcttcctcttcctctacgcctccatcgtgctggcagtgtacttgctcgtcatgaacgtcgttgagctggaggtgatccacttcccgaagccggcgtactacgtcacggccgtggtgcttctccttctcatcttcttcccgatcgtcatcgtcgtgaagcaagaactgaagacgtaccttgcgccgccggagccggcgacagcagcagcaacctccgccgccatcgtgacgatcaccgtaaacgagaagacgcgggcgtcgagcaataacgtggcaccggagtcgaccgatcatcgtcatcaggccacggccgccgccgccgccaacgacgacgcagacagctcgccgtcctgcttccaggacgtgttccggccgcccgcgcggggccaagactacaccatcctgcaggccctgttcagcgtggacatgctggtcctgttcgtggccaccatctgcggcatcggcggcacgctgacggcggtggacaacatggggcagatcgggcagtcgctggggtacccgcagcggtccatcacaacgtttgtgtccctggtgagcatctggaactacgccgggcgcgtggtggccgggttcgcctccgagtacgtgctggcccggtacaaggtgcctcggccgctggcgctcacggtggtgctcctcctggcgtgcgtgggccacgcgctgatcgccttcggcgtcaacaatgggttgtacgcggcgtccgtgatcctgggcttctgcttcggcgcgcagtggccactgctgttcgccatcatctccgaggtgttcgggctcaagtactactccacgctctacaacttcggcgccgtggccagccccgtgggctcctacatcctcaacgtccgcatcgccggccgcatgtacgaccgcgaggcactccggcagggcgggcagcggggaaaggacctcacctgcatcggcgtgcgctgcttcagggagtcgttcctcatcatcaccggcgtcacgttactgggcgcgctcgtgtcgctgctgctggcgtggaggacgaggaacttctaccgtggcgacctttacggacggttcagagaggtcggcatggtcggagcgactgccggaggagcaaatgacagaaaggtgcatgaggccgaggcgagcaccagcggtggtgccagtgactctgacaccaaggacactagtagcagtgagaccgttaatggcagtaaggtctgaattgttgacgtgtgctgtgtctctctcagggttaagtcaagtggcctgaatatatgcatatttgagctagtagtactatgtgcgtgtgatcaccagcgtcgccccgccagcacgcacgaccgcgtcaactgcgtgcgcgcgcacgaagcgtaacctactacgcaccgggccggtccaacggcacgcacggcgtggaggtcccagcgtccggcgagccggcgg

SEQ ID NO: 95667 - DNA, 2140 bp, Zea Mays
aattatcttgtgttggccaaacgagccacccttgttctgctaagaactgaaagaacgtttcagtgattcactcgcatagttaaaaaatattattttatattatagattatattatttatagaatggagtttaagtaatgagaggatgatgcgtaagctgctggatggaggtagtataaaggtaagaggtaatataaagcgctaaaaaggttcccacctccaacgcccgccttcgtgaacccagctgcgggatggaggatcggacggccagggtctctccggggaggagaactcacagccaccatctcagccaacaggtccggatagcgtctcgtcgtcctcccgcctcgctccctccgtcgccttctccaacgggaaatagccattaccgaaggaggcccgtcagcagcgtcggggcaaaaatttcaccgcgcgcgatcaagcgattgatgcccccgtcatggcgtccgtgccgctgtcctcgccgtcgcaggccggcctccttggccccccgttcccgctcctgccaccgcccttcggtgcatgcctccgctaccgcttgccgaggctgcctacaggcctctcgtcgagcgtgaggaagggagggctcctgccgctgccgctcctggtgcctccccgggccgcggggggcaaggacgggcgggccgtgaccaaggaggagttggaagaggaggaagaggagttcgaggtgaccaaggagggcgaggaggttaatcaggagacaggaggaggcagtggagccaccaaggaggcggcggcaaggggttcgggtcgattcgcggcggactacgtctcgctcggcgtcagggagcccgtctacgaggtgatagaagtgagatcaaatgggaggatgtccaccaagaaaataagcaggcggcagctactgaaatctagtggtctccgcctacgagatactagaagtgttgacccatcactatggttaatgaattcaatgccttccctgctggtacgtgagcaagctattttactcaatcttggttcgttgcgagcaattgctatgtatgcgcgtgttcttatattcaactataacagcccaggagggaaggcctttctagggttattactgtctaggttaaatccaagaaacatcaatggtgggcctgcaatgccttttcagcttgaggttgttgaagctgcacttctttctagaatacaaagattggagcagagactaatgaaaattgagcctcatgtggctacattgctagaagttctgccaaatcgcttgacagctgatgtgttggagcagcttcgtctaagtaaacaagcattggttgagctgggatcacgagcaggtgacctcaagcagatgcttatcgatctcctagatgatcctcatgaaatcagacgaatatgcataatggggagaaattgcacacttgatagattgagtgatattgtggagtgcactgttcctttagagaagcagattgctgaagaggaagaggaagaaattgaaatgttattggaaaattatcttcaacgatgtgaatcatgccatggtcaagcagagagacttctgaattctgcaagagagatggaagactcgatttctgtgaacttaagttctcgacgacttgaagtaagtagagtggagctgctgcttcaagtgggaacattttgcgttgcaataggagcattaattgcaggaatatttggcatgaatcttaaatcatatctggaaacaaatgcgtgggcattttgggtgacgactggtggaatagtagttggagcagtagctggatttttcgtcgtatactcgtatctaagggctaggaagatattgtgaaccctgtaacatctgtatgttaggatattttttggagctgtaaataatgtcattagcacatccagtgagggatatgcgtgttccaaactctgcatggtttgtgtactctgtactcttgcgagaatgttgccaccctatgtatttgtagttgcccgttgagacggaaataggttagaactcagaaacaaatatttggtttccaccctagacgatttctcgtagctgcattttactatcctgtattgaaaattcgtgtcaacatctgtcttaatcttctaaattttggtaatgcactaaatgcttggggacc

SEQ ID NO: 95668 - DNA, 79 bp, Zea Mays
tccgagtcgagccgagctgaccatgaaccgagcgagccagcgagtcacgagcatttcgtccagccctaatcgtgcctaa

SEQ ID NO: 95669 - DNA, 1888 bp, Zea Mays
atgcccccactcgtcccctcgctgctcctcccaatcccagccttgatcctacccgcgccacctcgcctctcccgccaccgctgcttcctgcccgccgtgtcctcctcctcctcctcctcgtcgtccccgcactccagggagccataccgccgccgccgacgcgacaccccgagccagacaccgacgcctgcgccgcgcccatcctcccagccgcagccgcctccgcgccgcgcaaatgccgccacgcccggcgctcggagtcaggaggagctggaggcggcgatctacgacttcatgtgccgctccgccaagccgggagccttccccacccgcgaggagctcgtcgcggccggccgctccgacctcgcggccgccgtcgcgtccagcgggggctggctctccctaggctggtcctccaccgccgcggagggccccgcgacgacggctgcaccgtgctcatcaggcgggggccaccctgactacccgcctgagacgggcgtgtattaccgtggtgatctagcgcccgtctcggtggaggactccgagtgcgaggtccggctcaacgcaggaatcgaggggatgctcaccaggctgcagaaggatagagagcgagcgcggccacctccacggactagtacccacgacacacagggccaaagtgacgatgatgcgggcaacagtggcgctcctagccatacagcggctggtggcaggcatattccaagggctcctgagaatggaagtgtccatggatctcattctcaaaatggaacaatagagggcaacagcacctttcagggttcgaacgatgatgcatggcaaacatggacccttggcaagggcgatttatctcattttgaagctgctgaggtcttacctattgaaagaagaaaagtatcccgacatgatgacattgcatccgtgcaaaatgacattcacaggtcatctaatggtgtggctgtaagcgatttttctagcgatggtgttggcactggaagagatgagatacattcacggcttcaaattctggaattggacctttctgctgctctcaagacattaagatcaagatttgacaaagttttatcagatttgtcaaatagtaatggagcaactgtgttggatgacatctctgatgattgggaatttgaggagacaaaggtaatgcaagctcaggaggagttaagatcaatccgggctaaaatagctgtgttagaagggaagatggctcttgagataattgaaaggaacaaaataattgaagataaacaaaggaggcttgataaagttgagaaggcactgagtgagctccgtactgtctgtattatgtgggccaaccctgcttcagatgttttagtggttgggtcctttgatggctggacaagtcaaagaaagttggaaagatcagaaaacggcatgttttccttaaatctgagactgtaccctggtagatatgagattaagtttattgttgatggtgtttggaagaatgatccgctgcgacccactgtgcacaacaatgggcatgaaaacaaccttctgcttgtcacttgatttgaagttttcaccctggtagcatttttgtagatcattgcctagctccttctcggtatggttgatggcaactgattagatcggtccctccgtgtaactaatcagctttcttttcagtttttttctgtcttttctagataggtgtgtacaacataaacagtgtagggtgttattgaaatgcgtcgccctgttgagatagagaagaaagtagtgtgttcttttcttcccgtcgttctcccctgtgttggctcttcttcatgattctgtttaacaatgttgtaatgtctatatgctgtgaaggtggtctatcatcgaaattatccaaaagttattt

SEQ ID NO: 95670 - DNA, 316 bp, Zea Mays
gtttgagtgattgagtcactgtttttttggaaaaagtccattttgctaccctcaacaaatctctttccccatttgacaccctatacaaaatattgacttgatctagttcttcaaactattcaaattagtccaattcttcctgtacaagttgtgtttctatttttattttgggatgatacattgcatcatgttctatgacattttgataattttatgtccgtttcttttaacatcttcatatctcaagggctaggtctgtagtcatgaaactaattgcgaaaaaaaaacatgaaatgtgttttgttacatatgctac

SEQ ID NO: 95671 - DNA, 282 bp, Zea Mays
atgggtttcatcatggacttcgcggagaatatgatcctccgtctgatggaggacccggacaagcgcgaccaggttcggcgggagcatgtctacaagatgaaggagcggtgcgagcgcactaaggcggcgtggagcctccctctgcgcccctacggcttctggaccttcgaccgcttcaactcgcagctctcctgggatccccagatcagccaggccgccggccgtcgggacccctacgatgacctcatcgcccgccactctggctcgccgccgtcttcctga

SEQ ID NO: 95672 - DNA, 956 bp, Zea Mays
agaagccaacgagagggaaatggagaatgaagaaagaggagatctggaaggaagagaggagagacctcacaggaaaccacagtagcggcggcgacaccggctctgacgggagaagagaacggcgcgcggatggacaacgacgaaggatgattaatggttctcctcaacggctaataacgattatgagtctatttcagcggcttcgcgttctctgtattttcatattatcgaaaccctcgtctacatctccgtttcgacgaagccaaatctgtcgtgttttataatcccaaaagtctccacctaagtcaccgactcgatacggcaagatcgacagagagaccgacgcgccggcagatcccaagctcaccggagagggggaagagggcgaccgaaggcggcgatgggtttcatcatggacttcgcggagaatctgatcctccgtctgatggaggacccggacaagcgcgaccaggttcggcgggagcatgtctacaagatgaaggagcggtgcgagcgcactaaggcggcgtggagcctccctctgcgcccctacggcttctggaccttcgaccgcttcaactcgcagctctcctgggatccccagatcagccaggccgccggccgtcgggacccctacgacgacctcatcgcccgccactctggctcgccgccgtcttcctgaacacccgttccgatctttgcccagaaggtctacttgggcatcaataagaaactctttcccctcaaactgattgtggttccatcctcttctgtctggaaaatgttgtcaccaaactaccctatttcctgttccagtttggcatggaagtataagttgtgtacttctattctcaagttgttgtctttgtattatgaaatgtttccaataatcagcagtttttgatgtatggtcgtggatccaaaggtggttctgtgctcggttttgctctgtacta

SEQ ID NO: 95673 - DNA, 1155 bp, Zea Mays
agaagccaacgagagggaaatggagaatgaagaaagaggagatctggaaggaagagaggagagacctcacaggaaaccacagtagcggcggcgacaccggctctgacgggagaagagaacggcgcgcggatggacaacgacgaaggatgattaatggttctcctcaacggctaataacgattatgagtctatttcagcggcttcgcgttctctgtattttcatattatcgaaaccctcgtctacatctccgtttcgacgaagccaaatctgtcgtgttttataatcccaaaagtctccacctaagtcaccgactcgatacggcaagatcgacagagagaccgacgcgccggcagatcccaagctcaccggagagggggaagagggcgaccgaaggcggcgatgggtttcatcatggacttcgcggagaatctgatcctccgtctgatggaggacccggacaagcgcgaccaggttcggcgggagcatgtctacaagatgaaggagcggtgcgagcgcactaaggcggcgtggagcctccctctgcgcccctacggcttctggaccttcgaccgcttcaactcgcagctctcctgggatccccagatcagccaggccgccggccgtcgggacccctacgacgacctcatcgcccgccactctggctcgccgccgtcttcctgaacacccgttccgtatgctgtctgggaaatcagatggttgcatttgaattttcagaggctgagtttatacatgacgatggggcacttaagttgtaatcaatgttggaagtaaatgatctcttcacgtttgtgatttatactccagatgttcgttgtgtcagctgggacgctttcaaacaaactggaatcggtcatattctcataactacttctcaatctttgcccagaaggtctacttgggcatcaataagaaactctttcccctcaaactgattgtggttccatcctcttctgtctggaaaatgttgtcaccaaactaccctatttcctgttccagtttggcatggaagtataagttgtgtacttctattctcaagttgttgtctttgtattatgaaatgtttccaataatcagcagtttttgatgtatggtcgtggatccaaaggtggttctgtgctcggttttgctctgta

SEQ ID NO: 95674 - DNA, 934 bp, Zea Mays
agaagccaacgagagggaaatggagaatgaagaaagaggagatctggaaggaagagaggagagacctcacaggaaaccacagtagcggcggcgacaccggctctgacgggagaagagaacggcgcgcggatggacaacgacgaaggatgattaatggttctcctcaacggctaataacgattatgagtctatttcagcggcttcgcgttctctgtattttcatattatcgaaaccctcgtctacatctccgtttcgacgaagccaaatctgtcgtgttttataatcccaaaagtctccacctaagtcaccgactcgatacggcaagatcgacagagagaccgacgcgccggcagatcccaagctcaccggagagggggaagagggcgaccgaaggcggcgatgggtttcatcatggacttcgcggagaatctgatcctccgtctgatggaggacccggacaagcgcgaccaggttcggcgggagcatgtctacaagatgaaggagcggtgcgagcgcactaaggcggcgtggagcctccctctgcgcccctacggcttctggaccttcgaccgcttcaactcgcagctctcctgggatccccagatcagccaggccgccggccgtcgggacccctacgacgacctcatcgcccgccactctggctcgccgccgtcttcctgaacacccgttccggtgcgctcctgtttttctgctggatagatttcgatgctgtcccgtcgtcataggaatttgggcaaattgattagggacatgacggtttggttggtctcaattgctgagatggtcggatgggttcctgcaggatgcgcttgttatttggcgacaatagatagagccttctgctgagagttgtatttagacgaattgtgcgctggttctatctagggtttatttatctcgctgttggtcgtt

SEQ ID NO: 95675 - DNA, 2186 bp, Zea Mays
atgactaaggttttgcagtcatcttctgataaaacatctttagacactaaagaggaaaataagttttttgagtccgatatactggataaagtgtggcacatcctttatgatgattgtctgtatgctcttggtacttgtgtggaaggggaactcaagcatttccacaaggcgagatacaagcttgcgcaaggatattatagaagaggtgaagcaggggacctggaacgggctaaggaagagctctcgttctgtttcaaatcttctcggtcttcctttacagtaaacatgtgggagattgatggcactgttagaaaaggaaggaggaaaaatccaaatgtgggtggatccagaaagaatctggaggtcagtttgtcagaaagttcacggaaattcattacgtgcattagaaaatatatgatactctatttaaacctgctggagaagaacacggacctgtggactcttgagaaggcttatacttatctgcgaacagataagaggtttgcattgtgtttaggtgatattgttcctgttggtcttgggaagtatattctagttctaacggcagcaattcataatcctgagattcgtcgagcttctggtgatgcttctgttgagcaattacttgagaaaatgttcactgtattcatggatcatgcgaacatgtgggctgatataagcaatataccagaggtgaacagtccagaattatcagaaagcaatctttacagctatatccaccagtacatccatttgctcgagagtgatgtacgactagatgttctagaaggactaaacgagaagataagaaagcgtttcaagacaccgaagttatcaaatagtaacttcgctaagatatgcaagcatgcttctctggcatggtgccggtgtattctcatcaaactggcctcaatcactccactgcctgaatccgcagatgcaaccaatcagcctgcaccattatccaatgggcttctactctatgttgacttgcaacctgatgagcttcttatctcatcccctgatgggcctgctcaattcaaagggcttgacatgaactggtttgagacacttaacagaattaaaaacatcccggtcaagcaaacatccgaagataacttggagactgctgttacgttaatgaagagcacttataacttttatcgggagagcccttgtggaacatttccttcaggtatcaatctctacacggttacaccatcacaagctcctattgaagggctaccgccaaccgctgctgtagttgagacgctcgacttaagtattccaagaaaactccttctgtgggtatacactctggttcatggtcgttactcaaatatatcctccgttgtaaagtattgcgacgagatgaagttaagaagtaaaagaggaaccccagctgcgtctgcttcgtcacaagttgtgcagccagtgtcgcatagtaccgtttcttcccaagttgtatctaaagaaaagagctcccaagttgaacccgctgaagcagcacaaaatccttctgatctagctgccacttgcgttcctgcataccaagaagttggtggtgctagtgcctcgcaaagtgccattgaggcccagaaagctactgctgcggcatctcagctcactcgcagtggttcatcaagggcaatggaaaatgcacaggacggcggggagaggaagtaacgagatagagttcgattttttttatcctctatgctacatcgtatggatgcatatgatcctgcctgacgattctcaggtctcagctctccgtggctccgtgtgcaaatctctgccacgggcgtgttttaacgcctgattggatggttgcccgctggcgcgcccggccagcctcgtacggccacttcggacgcatctgcatcttcggaggtacccgcagatgtagatgaatggccgtaaaatggtttggtctgcgtctctttacatataaccaaataaaaactcagataaagttaactcatgtggtggtctatgttgagatgatgcgggtaaccaatcgaacggttaacaaattcaggtcgtatgtatatcctggtttacagttagtgtttcctaagtgcatttgtagattatagagctgtcaagattgaacgatacatctgtaaggtgttacaaatgctaaatgctaatcctgattttgtggctgatgctaaaaacctgtg

SEQ ID NO: 95676 - DNA, 4110 bp, Zea Mays
atggagaactgcgagcgaacgataaaggggtttttgacattgaaaaatcttgcatctgttttccttcaacaaggttttgagttctacgataatgctcttcactgttacctacaagctgtagagcttgattcaaatgattcagttgtctggaatcatctgggaacactttcttgttcaatgggtttgctgagcgtatcaagatgggcatttgagcaagggcttgtatgcagcccaaacaactggaactgcatggagaaattgttggaggtgcttatatcaattcgtgatgaagtcgcatgcctttctgtagcaaatttaatacttaatagttggccatcacatcatcgtgctttacatgtgaagaagaccattgaatgtgctgaaccggtaccttttgcacctcgtggtattgacatacttgaacccaagcatgcaaaactcatcttttcgaataaaagaaaatccgttgatgatgaaatctgtcaagaaatagggacaaagaagagtaaacacagtgctacattgcaattgaatgaagcaaaatggttggcccttttagatggtatcctaagcttaataagtgcaaacaccgagaaggctggtgaatataattgctcaaatactgttgataggtgttcaatcagtgagggtagtgccaaggggcttgcttataacattatagacgttgtcatatctacagatacattgaaaagtgtggaaactgctggtggaaatggaaatgattctcaccatggtgagattctgccatatgattgcaaagctacagttaaagagaaagatggtaattcagatagggaacatccccatgaaagacggagcacacgccttgagaggctgcgaagtcgcaaatctggaaaagatgaaaatggatctgatggtaaagatatatcccatgctatgacccagtttctagaatcatttattctaaaaggaccaagccctgtagaaaaggcttattgttctggaaatgccgatgcttcaaatcctgatactcataactatacatccaacgaggaggcaaatgatcttaagcaatttctatgcaagatatccaagaattttggccctcatcacattggttatatgttacttgaggagatggctcatctcaaagtgccattccaagattattttgtcaagttaattgaactggacaaacttactagaggctgggctgaagacagatctgcatcgtgcaatttatttctagctgaactgtactatgatcgggctttgtgttctggaagtccaccaacatcttctgagctgtctgattcatcttaccatctttgtaagatcattgaatcagtagctctggaactgccattcaacatatctgttagagaaatacattccaccaacttggatacggaaagtagcaggacaggtgaatcttcaagtgaattaatcgagagaagtcatgaaaatggtcacatcaacatgcttaatgaccaaaagtccaaacatgattcttcttcaaacatgaattgtgcattctggattcgcttcttctggctgagtggttgcctgtccctttcatcagactgcaaagagaaagcttataaggagttcaatattgccctgtcaatactaaaaaatagcaacaaaactaaaagctatggagaggtcattcttctacctcacaccaaacttgtaaaatcacttacaactgacaggattcttcgtgaaatcaacttgatcaggcttgaatctctactttggaataatgatgagaatatcaacaaaataactcatacagagttcatgcagttgctacctccacttttgctttccaccaaagatgcctacgttggaaatgcatatggtccacaaagagaaagcgagaatgttatttcacttgagttgtctgccttggatgtcttaatatctgcatgtgaaaaagcaaaaccaatgaacatccaggtatatcttgactcccatcgaagaaaaattcaagttctaactgtggcagccggcatggttggatctgtcacacccctgaaagcgaaaggttcaagcaatgtggaatttgtggaagcaatgaacaggaaccggctagaaaatgttgtggaagcagtcaaagatgtgtctcgaaatgccagtaaagcaaaagacataatcgatcaatgcgataattccgtaccaagtatcactattgtgttaattcataagtatatcagtcaaggttatcaagtcgataagtcgagtcgagtcgacaaggcgtccattaagcgtcgccttagcgtcgctttagcgctaaggcgtgctcacagggcaagacgtctagctcgccttccgccgtggcgtaaggcgtccgccgcggcacaatgcgtccgctgcggcgatgggcaagatggctggagcccactaatgtctatcgttggtgatattcaatcattgctcttgacaatcatgtgtgctgctgtcaagataatactatcgagaaaactctcatgctctggaacctcctatcaggttgaccacttggaatgttcctgtctcatagatgcagccattgcattttgcaagctccagcaccttgatcctacaatatccatcaaaactcaggttgacttaattgttgcagtccatgatttgcttgctgagtatgggctctgttgtgctggaagagatggtgaaggggaggaagggatgttcctaaagttcgcaatcaaacatctcatggctctagatgtgaaactaaaatctcaactcaattcaaatgggatggaagaagatgcagttccaaaagacgtcagagcagaagacagtgtggccgatgaaccatcggttagtgacaataagcagaactccgatgatgaggaagaatcggagttagatgagattcagtcatgtcttgatagtgccttggaccaggcttttttctgcctgtatggtttgaagatcaacccagattcttgcagtgaagatgatctcgctgtacataaaaatacaagccgcggtgattatcaaaccaaagaacagtgtgctgatgtgtttcaatatgtcctgccatatgcaaaagctctatctaaaactggcttggttaaattacggagagtgctgcgggctatacgtaaacactttccgcagccaccttatgacttatttgttaacaaccctattgataatttcttggatggacctgactcatgtgaaaaaatactctctgaaatttgtgaaagcaatgaatctagggaagctatcctgaatgtattgttcccaggtgaaagaggctatgaagcattcaaaaaactctccactgccagctctgagccttattcagatgtttatgagaacttatattatttcatagctcaagccgaagatattagtgccaccgacaagcatacaggttttgttttgaaaaaggaaggagaagaattcgttgaacagagtgccaatattttcaagtatgatttgttgtacaatccattgcggtttgaaagctggcagaagctttccaatctttatgatgaggtggaagttgatctgttgctcaatgatggtagtaaacatataagcatcttggattggcgaacaaacacggatttaatcagaagggttgagatgggccgtcgacatagtcgacgctgcctattgatgagttcactactggccaaaactgcccctgagcagagcgaggcacatgaactgttggctcttgtgtactacgatagccttcaaaatgtggtgcctttttatgatcaaagagctactttgccagtgaaggattcatcatgggagacattttgtaaaaattctatgaagcactttgagaaggcttttgaaatcaaggagcagtggcttcatgcgttttaccttgggaaactgtgtgagaaactggggcattctttttctaaggcattatcatactacaacaaagccatgatgctgaatccaactgcagtcgaccctgtttacaggattcatgcatcacgcttgaagttactttacactcaaggcaaacagaatcttgaagctatacaggaatcaggttgttgccgtgacctactgcccacaactgacctggcctggcttttcgtgaacttggcatgttatattagctgtctaacagctgtgggatga

SEQ ID NO: 95677 - DNA, 92 bp, Zea Mays
ttccaaaaagctctcatttactattttacgatttttctgtgatttactacgattttctaaagttcggcaccaaatctgtgaaataaaattcg

SEQ ID NO: 95678 - DNA, 233 bp, Zea Mays
aagcatgtgagagcaagttaaatctaaaactaattattttctgtggattcatgaccatattaagttttattaggctactataatatcatgcaaggacagtggaacaccattttacatttttgcatctatacattatttttaaatcatttaaaactacttaaggtgcattaaacaagttaaatcactaacttaatcatacatgcacaacaattcatgaaatgtttaccagtcac

SEQ ID NO: 95679 - DNA, 914 bp, Zea Mays
attgttttatagtagtggaaccctagtctgacttcccagctgattgacgaataaagtatatagagcgtacactcagcaagcctaggacgaaagtcagaggcctccgcgaccgccgttttaacaggaagtaggggcgggcgaccatgttctttctgcgcaacaacgacagcaactgcgggcgggcccaaggagctggcgaacgtgattctcacatgatcctgtgccgggcgctgggcgggcgcaccgggcggtcgaccaagggctgggacatcggggtgagctgcatccacccgacggcggcggcggcgcggctgttcgcgccgctgaagctgccggtgcacatgccggtgatcgagttccaccacgacgaggtgtgggagctgcccgccggcgccgaggtgctggcgcggtcggaccagacccgcgtcgagatgttccgcctgggggaccgcgccatgggcgtccagggccacccggagtacagcaaggacatcctcatgagcatcgccgaccgcctcctccggcataaccacatcctggactgccaggtggacgtggccaaggcgagcttcgacgtgcggcagccggacaaggagctgtggaagaaggtgtgcaggggcttcctcaaggggaggctgcagtcgcagcagcaattccactaaccgctgcagaggaggaaattgggatgtcttaggttaatttttaattcacccttgttttgattgtgcttcagagctcaagagttgtacataaactactattgtccgaagcattaataaagagagagggggcaaatggttcgttggttttaatcattccgttctcgtactgcctgctgtttctgtgcctcgtcgacagtctcagcatctgtcattggcgtatctggtgaacgatgtcgttggaactgattttca

SEQ ID NO: 95680 - DNA, 1524 bp, Zea Mays
gagttggaacaaacgaacttaacgttataactttgttcggttacatcgaaggggagtgaagaggcccagagggggatcggagtcggagtggaaggggacaacccaacccgtgcctgactgccgttggccgttgccataccataggctatagcggctagcccatgacccttgtaaaaaaatactcctagtaatagcaaaacaaaaatcaggggcgaaaaggcgaaaaaacaattaattttccgagggaaaaccgcccggatcgctttaaatagcgccctcgcctcacagccctcccccattcctctccgccccctcccaccccaccccaccccacccgcaagcgaggcagcctaggacgcagcagcgcacccccgatcctcgcctgtcgcctccatctccattcgcaggcctgagaccctcgcccgcaccgcgctgccgccagccatgggaatggggcctctcgagaacgccgcgtcggccgctgagtccgcggccttgccggaggccggcgccgccgcggcagcgggctcgtacgcggtgctgcagtgcggcgaggactcggagtacgtgcggcagaagtacggcggctacttcgccgtcttccgcgcgctgctggaggaggacggcgagagctggcgcgtgtacggcgccgtccgcggggagctccccaccgacgccgaggcggccggcttcgacgggttcgtcatctccgggagctgctccgacgcgcacggcgacgagccctggatcctggacctcgtcggcctcatccgccgcctccacgccgccggcaagcgcatcctcggcgtctgcttcggccaccagatcctgtgccgggcgctgggcgggcgcaccgggcggtcgaccaagggctgggacatcggggtgagctgcatccacccgacggcggcggcggcgcggctgttcgcgccgctgaagctgccggtgcacatgccggtgatcgagttccaccacgacgaggtgtgggagctgcccgccggcgccgaggtgctggcgcggtcggaccagacccgcgtcgagatgttccgcctgggggaccgcgccatgggcgtccagggccacccggagtacagcaaggacatcctcatgagcatcgccgaccgcctcctccggcataaccacatcctggactgccaggtggacgtggccaaggcgagcttcgacgtgcggcagccggacaaggagctgtggaagaaggtgtgcaggggcttcctcaaggggaggctgcagtcgcagcagcaattccactaaccgctgcagaggaggaaattgggatgtcttaggttaatttttaattcacccttgttttgattgtgcttcagagctcaagagttgtacataaactactattgtccgaagcattaataaagagagagggggcaaatggttcgttggttttaatcattccgttctcgtactgcctgctgtttctgtgcctcgtcgacagtctcagcatctgtcattggcgtatctggtgaacgatgtcgttggaactgattttca

SEQ ID NO: 95681 - DNA, 1492 bp, Zea Mays
gagttggaacaaacgaacttaacgttataactttgttcggttacatcgaaggggagtgaagaggcccagagggggatcggagtcggagtggaaggggacaacccaacccgtgcctgactgccgttggccgttgccataccataggctatagcggctagcccatgacccttgtaaaaaaatactcctagtaatagcaaaacaaaaatcaggggcgaaaaggcgaaaaaacaattaattttccgagggaaaaccgcccggatcgctttaaatagcgccctcgcctcacagccctcccccattcctctccgccccctcccaccccaccccaccccacccgcaagcgaggcagcctaggacgcagcagcgcacccccgatcctcgcctgtcgcctccatctccattcgcaggcctgagaccctcgcccgcaccgcgctgccgccagccatgggaatggggcctctcgagaacgccgcgtcggccgctgagtccgcggccttgccggaggccggcgccgccgcggcagcgggctcgtacgcggtgctgcagtgcggcgaggactcggagtacgtgcggcagaagtacggcggctacttcgccgtcttccgcgcgctgctggaggaggacggcgagagctggcgcgtgtacggcgccgtccgcggggagctccccaccgacgccgaggcggccggcttcgacgggttcgtcatctccgggagctgctccgacgcgcacggcgacgagccctggatcctggacctcgtcggcctcatccgccgcctccacgccgccggcaagcgcatcctcggcgtctgcttcggccaccagatcctgtgccgggcgctgggcgggcgcaccgggcggtcgaccaagggctgggacatcggggtgagctgcatccacccgacggcggcggcggcgcggctgttcgcgccgctgaagctgccggtgcacatgccggtgatcgagttccaccacgacgaggtgtgggagctgcccgccggcgccgaggtgctggcgcggtcggaccagacccgcgtcgagatgttccgcctgggggaccgcgccatgggcgtccagggccacccggagtacagcaaggacatcctcatgagcatcgccgaccgcctcctccggcataaccacatcctggtgagtagtcagtcagtctcagtcatatataacctcggtccagcgggtcttggaatttaaagtgtcttcttgttttggtgtcggcaggactgccaggtggacgtggccaaggcgagcttcgacgtgcggcagccggacaaggagctgtggaagaaggtgtgcaggggcttcctcaaggggaggctgcagtcgcagcagcaattccactaaccgctgcagaggaggaaattgggatgtcttaggttaatttttaattcacccttgttttgattgtgcttcagagctcaagagttgtacataaactactattgtccgaagcattaataaagagagagggggcaaa

SEQ ID NO: 95682 - DNA, 953 bp, Zea Mays
gagttggaacaaacgaacttaacgttataactttgttcggttacatcgaaggggagtgaagaggcccagagggggatcggagtcggagtggaaggggacaacccaacccgtgcctgactgccgttggccgttgccataccataggctatagcggctagcccatgacccttgtaaaaaaatactcctagtaatagcaaaacaaaaatcaggggcgaaaaggcgaaaaaacaattaattttccgagggaaaaccgcccggatcgctttaaatagcgccctcgcctcacagccctcccccattcctctccgccccctcccaccccaccccaccccacccgcaagcgaggcagcctaggacgcagcagcgcacccccgatcctcgcctgtcgcctccatctccattcgcaggcctgagaccctcgcccgcaccgcgctgccgccagccatgggaatggggcctctcgagaacgccgcgtcggccgctgagtccgcggccttgccggaggccggcgccgccgcggcagcgggctcgtacgcggtgctgcagtgcggcgaggactcggagtacgtgcggcagaagtacggcggctacttcgccgtcttccgcgcgctgctggaggaggacggcgagagctggcgcgtgtacggcgccgtccgcggggagctccccaccgacgccgaggcggccggcttcgacgggttcgtcatctccgggagctgctccgacgcgcacggcgacgagccctggatcctggacctcgtcggcctcatccgccgcctccacgccgccggcaagcgcatcctcggcgtctgcttcggccaccaggatctcgcagaggagggttgggtcttagcagttcctccaaacggaaccccggtaattccgttctattttgaaccaaatcccgccccggggaccggaggaggaaggaagaacgcagatggcgtggcgcg

SEQ ID NO: 95683 - DNA, 122 bp, Zea Mays
ttttgttttctttttctgtgcaggagggaggcagcggtggggcgccccgagccccctactgccctacagctttcaaacacataaacttctacggtaagtttgtaacctatcctaaattttga

SEQ ID NO: 95684 - DNA, 1780 bp, Zea Mays
ggatggaataatttcaagagcccacgcaggccgttgagtgcaatctgttcggagcagataagatgggcgccaagcccacgagccgaagttatcaaacgcagcactcgccagtcgccaccccgatgctactggtgcgcgccccgccgtctcccgcgccgctctcggcggcggccaatttcccggctgatctggagcgcccccttcgccttcgcggtctgtcctcttcccgtgccggcgttactacggccactgccacggcgaagccggcggcttcctccctgggcgggcaaaagcgcaagcaggtgacgagcgtggcgaacccgctggtgaagcactgcgtcaagctccggctctccgccgcgtaccgacgctcctgccgccgcctcctcctcgtcggcctcgcgcctatcctggaggtgtgtagttttgagctcgaagccatcgattacttgcttctcctggacggcgtagaggccccagaggcgctgcgcgagttctctggtgatatattgtatgtcagcgccgcggtgatgaagaaggtgtccgggatgcagtcggttgattccaccgaggcggttgctgtcatgcacatgcctaaccatttccgcgatctcgggagccatcaggatggggatgctcttgatggtttgttcagttatccaaagaggattctagtccttgatgggattcaggatcctggcaaccttggaacactgataagatcagcttgtgcattcaaatgggatggagtattccttcttccggcttgttgtgatcctttcaatgaaaaggctattcgagcagctcgtggagcctctttgcagcttcctattgtctctggtacgtggcatgacctgcatgcattggtgacaaagtatcgtatgaagatgatggcagggcatccagaaagtagcagtgatgcatccaaagaaacctactcgctgtccaacgaactagctgattcactgttgaatgagtctctgtgcttagtgttaggaagtgagggcaatggtctctctgcagagaccctccaggcatgtgagcttgtaaacattccaatggaaggtacttttgaatctctgaatgtttcagttgcaggtggtatatttttgttcatgttacaacccaaaggtcaaatagacagaacttcaaccccttagatttgcgtctgttattctgtttcttttgctgttatcttgttaacttttctttgttttcatttctctggttgttggtttctatgtttaccgttaatgctgattcaaagtaaaggaacattttgtttaatccagtttaccttttgagtgatgagaaacataacgtaaagaaaaatgaatctgatgacctgttactcatggaacttcttactaattactatgatagcatggtgtagtttcactggctctttaataaatgaagaattctgggagtattgattgattattaacactctgatgagactgtctggcattacatagaatacagaaatggttagaggcttaaagcgtaatggttaaggtttccgagtattatatcaaggagagatcgaaacatggtgccggccaagaaaacccccgaaccctggccctcatcactaatgggccgatcaactgcccattctgcaacggtccagccagagggcggcgcacaggatatcgatccccgagaggggcggggcacagcgaggggattttttaaccaaacccgaaattcgcccctgagggggattgaatccgggacctggaggtgctactccgaagccttaaccattacgttagag

SEQ ID NO: 95685 - DNA, 1245 bp, Zea Mays
ggatggaataatttcaagagcccacgcaggccgttgagtgcaatctgttcggagcagataagatgggcgccaagcccacgagccgaagttatcaaacgcagcactcgccagtcgccaccccgatgctactggtgcgcgccccgccgtctcccgcgccgctctcggcggcggccaatttcccggctgatctggagcgcccccttcgccttcgcggtctgtcctcttcccgtgccggcgttactacggccactgccacggcgaagccggcggcttcctccctgggcgggcaaaagcgcaagcaggtgacgagcgtggcgaacccgctggtgaagcactgcgtcaagctccggctctccgccgcgtaccgacgctcctgccgccgcctcctcctcgtcggcctcgcgcctatcctgtactctgcagctccaggcccgtgtcatcctacctgtcccgccagtcttctcttcctaaacctgtgcttctgccccttgctacagggaggtgtgtagttttgagctcgaagccatcgattacttgcttctcctggacggcgtagaggccccagaggcgctgcgcgagttctctggtgatatattgtatgtcagcgccgcggtgatgaagaaggtgtccgggatgcagtcggttgattccaccgaggcggttgctgtcatgcacatgcctaaccatttccgcgatctcgggagccatcaggatggggatgctcttgatggtttgttcagttatccaaagaggattctagtccttgatgggattcaggatcctggcaaccttggaacactgataagatcagcttgtgcattcaaatgggatggagtattccttcttccggcttgttgtgatcctttcaatgaaaaggctattcgagcagctcgtggagcctctttgcagcttcctattgtctctggtacgtggcatgacctgcatgcattggtgacaaagtatcgtatgaagatgatggcagggcatccagaaagtagcagtgatgcatccaaagaaacctactcgctgtccaacgaactagctgattcactgttgaatgagtctctgtgcttagtgttaggaagtgagggcaatggtctctctgcagagaccctccaggcatgtgagcttgtaaacattccaatggaaggtacttttgaatctctgaatgtttcagttgcaggtggtatatttttgttcatgttacaacccaaaggtcaaatagacagaacttcaaccccttag

SEQ ID NO: 95686 - DNA, 1382 bp, Zea Mays
gaacagctgcgactctccacggcaccgaagaggtcacctcccctcatggcctcattacagcgcctcctcccacccacccaagagctcaccttccccgtcctctcgcaccttatcttactcgtttaaatacctgggtttcttctcggggggagagagctagagaaagcgtagagctagtcagagagagagagagagagagagagagagagagagagagagagaggcggggggcgggaggatggctttgctgcagagccagagcctgccaggcattggctgctgcagcagcagcatcgtcttggcacgagcgagggtgcagcagtgtctggcagcggcgtcgcactcacaggcgcccctcctgcaggccaatggcggcagggcgggcctcccctcctcctcctcgatccttaaggctggcaatgcgatcagcttcagccggcggagaaggagagacctgcgcgtcgtcgcggaggcggccacggcggggacggccaaggtcacgccggcctcgtctggcggcgtcagcctcagcgacgtgctctggccttctgccggagcattcctggccatggcggtactggggaaaatggaccagatggtggcgttcaagggagtatccttgacgattgcgccccttggagcagtctgctgcgtgcttttcagcgctccagactcgcctgcggccaagaaatacaatatgttcgtcgcgcagattgcttgcgcggcctttggcgtattagccctctcgttgtttgggcctggctggttagcgagaggcgccgctctttcagcctgcatagcattcatgaccatcacgggtacctcgcatcctccagctgcgagcttgcccctcttgtttatcgatggccccaagtttcacagtttgcagctttggtacgcgcttttccctggagctgcaggctgcatcgtcctttgcttgattcaagaggtggtggtttacctgaagaagaacttcaagttttgactcaagcagcttgacgctatggatttttgtggaagtggtccgattaattattcaatcatgtaacataaattacattgcctgcatttgcgataaagttgtgaaaatgaaggtttactgtctcctgtcttggttaaagaagaaagaagactttccttgataccttgtgctcatcaaaatgcagttgatacaaatgtgtacataccattctcccatcgaataaagtctgacaatttattcctttttccttctggtagcatcaatcctgtaatgtaattgtgcaaagtgaaataaccaggaatactttgtgataacctctggtttatctgaagggagataagatcatttgttctagaacagagttgtagttgcatggacagaacccatagtaacagattgc

SEQ ID NO: 95687 - DNA, 1439 bp, Zea Mays
gaacagctgcgactctccacggcaccgaagaggtcacctcccctcatggcctcattacagcgcctcctcccacccacccaagagctcaccttccccgtcctctcgcaccttatcttactcgtttaaatacctgggtttcttctcggggggagagagctagagaaagcgtagagctagtcagagagagagagagagagagagagagagagagagagagagagaggcggggggcgggaggatggctttgctgcagagccagagcctgccaggcattggctgctgcagcagcagcatcgtcttggcacgagcgagggtgcagcagtgtctggcagcggcgtcgcactcacaggcgcccctcctgcaggccaatggcggcagggcgggcctcccctcctcctcctcgatccttaaggctggcaatgcgatcagcttcagccggcggagaaggagagacctgcgcgtcgtcgcggaggcggccacggcggggacggccaaggtcacgccggcctcgtctggcggcgtcagcctcagcgacgtgctctggccttctgccggagcattcctggccatggcggtactggggaaaatggaccagatggtggcgttcaagggagtatccttgacgattgcgccccttggagcagtctgctgcgtgcttttcagcgctccagactcgcctgcggccaagaaatacaatatgttcgtcgcgcagattgcttgcgcggcctttggcgtattagccctctcgttgtttgggcctggctggttagcgagaggcgccgctctttcagcctgcatagcattcatgaccatcacgggtacctcgcatcctccaggtaaaactcccaagacgaatgtttcgtctggctgtgttgccctagctgttctgcacatcatctcctccttactgaactcttgttttgttcactgcttatgatttctggattcttgcagctgcgagcttgcccctcttgtttatcgatggccccaagtttcacagtttgcagctttggtacgcgcttttccctggagctgcaggctgcatcgtcctttgcttgattgtaagtaaattggacctcacaaacggctttctgaaagaacatgatgcttaggtgcatagaaaatagaacattaaccctcatgccacaatattttgcagcaagaggtggtggtttacctgaagaagaacttcaagttttgactcaagcagcttgacgctatggatttttgtggaagtggtccgattaattattcaatcatgtaacataaattacattgcctgcatttgcgataaagttgtgaaaatgaaggtttactgtctcctgtcttggttaaagaagaaagaagactttccttgataccttgtgctcatcaaaatgcagttgatacaaatgtgtacataccattctcccatcgaataaagtctgacaatttattcc

SEQ ID NO: 95688 - DNA, 831 bp, Zea Mays
gaacagctgcgactctccacggcaccgaagaggtcacctcccctcatggcctcattacagcgcctcctcccacccacccaagagctcaccttccccgtcctctcgcaccttatcttactcgtttaaatacctgggtttcttctcggggggagagagctagagaaagcgtagagctagtcagagagagagagagagagagagagagagagagagagagagagaggcggggggcgggaggatggctttgctgcagagccagagcctgccaggcattggctgctgcagcagcagcatcgtcttggcacgagcgagggtgcagcagtgtctggcagcggcgtcgcactcacaggcgcccctcctgcaggccaatggcggcagggcgggcctcccctcctcctcctcgatccttaaggctggcaatgcgatcagcttcagccggcggagaaggagagacctgcgcgtcgtcgcggaggcggccacggcggggacggccaaggtcacgccggcctcgtctggcggcgtcagcctcagcgacgtgctctggccttctgccggtgagtctgaagaaacgctggtgcttctgccggtgagctggtttttttaggggccatggctggtgcttctgattccttttcctcttttggtcatttccgaggtatcctagtatatttcatctcttcgatccgatctgctcactgcttgcttttattcacgggctggctcgcccttgtctgaacctctccggtctctgctgtcgccattgccagacgatgacaactattccttgcatatatgtattccagaaaacaaagtagttgttgcacttgcatg

SEQ ID NO: 95689 - DNA, 1234 bp, Zea Mays
ctccctcaccgcccaccgacctaatcccctcctccactttccccaccgcgaagccatgtcggagcaccccgcgtcccgcagctccgtaggaagccgcagctccgcgctgccccctcaccagcagcgccttacgcctgcgcccgacccgctcgcctccgtctggatccgccgcctccacctctcccccaacccgccgccgccgccgcggcccccacccctgcacatccgcgcgccgccgcctgcacatcaggatgccatctccaccgacgagtcccacacgacgcctccgccgccgccgctcacgctgcgcggcaccgggttcggccccttccgctggagcccgcgcccgttgctgggggcgccggccggcgcatgggacgccgccgccgccgcttccgttggggtggctcctggcggtagtgccgtcggcggcgaccaaacgatgctgtcgccgttcttccgtctcccagcgccgctgccgtcagtcgtggattttgaggaggccatgcctttgaggccgttgatcgggctcggaagccacagcggcagtggtgggtttcctggactgtcacgacagatggtcggcggcggcgacccctgtgacggctggctgtcgtccagagttgcaggatctgcgtgacagacagcatggcgcaataccagcacaaccaaatctcgcaaggcatgatcctagctctagcagccaacgtgatgaacctttctcatactggaacatggggaggttccgaagaaatactgcaacttcgtcggtcacacctttgggtgccgctcctgccaatttcggcacgaagaggaacgctgactcgaacgatttcctccctctgaagctcaggaaactaagcggggctatttagtggctgatttatgaaaaatatctggccgaccgttttttgatatgcataagaagcacaagtatgctgttacctgaaacagcatgcagtaatacttaaccacgttagggcttcagaaggctggagatggacgcatttggtggtggcaaccattgtaaattgtacgtttgctcccaaatcgttgcatttggcatcctctgacccactggcctgcatgtttgtatattttttgtgtgatatacggggagatgtcttgtgccacgtttcctccgtggcgtgtacattcaaacaaattggcatcaaacatgtagtaattttcgttctatggaattgtacgttttctgtttgcccccaaacccaaa

SEQ ID NO: 95690 - DNA, 1282 bp, Zea Mays
acttctccctcaccgcccaccgacctaatcccctcctccactttccccaccgcgaagccatgtcggagcaccccgcgtcccgcagctccgtaggaagccgcagctccgcgctgccccctcaccagcagcgccttacgcctgcgcccgacccgctcgcctccgtctggatccgccgcctccacctctcccccaacccgccgccgccgccgcggcccccacccctgcacatccgcgcgccgccgcctgcacatcaggatgccatctccaccgacgagtcccacacgacgcctccgccgccgccgctcacgctgcgcggcaccgggttcggccccttccgctggagcccgcgcccgttgctgggggcgccggccggcgcatgggacgccgccgccgccgcttccgttggggtggctcctggcggtagtgccgtcggcggcgaccaaacgatgctgtcgccgttcttccgtctcccagcgccgctgccgtcagtcgtggattttgaggaggccatgcctttgaggccgttgatcgggctcggaagccacagcggcagtggtgggtttcctggactgtcacgacagatggtcggcggcggcgacccctgtgacggctggctgtcgtccagagttgcaggtgctgcatatcctggccatgctttggacatggttcccacaagaacccttaatgatctgcgtgacagacagcatggcgcaataccagcacaaccaaatctcgcaaggcatgatcctagctctagcagccaacgtgatgaacctttctcatactggaacatggggaggttccgaagaaatactgcaacttcgtcggtcacacctttgggtgccgctcctgccaatttcggcacgaagaggaacgctgactcgaacgatttcctccctctgaagctcaggaaactaagcggggctatttagtggctgatttatgaaaaatatctggccgaccgttttttgatatgcataagaagcacaagtatgctgttacctgaaacagcatgcagtaatacttaaccacgttagggcttcagaaggctggagatggacgcatttggtggtggcaaccattgtaaattgtacgtttgctcccaaatcgttgcatttggcatcctctgacccactggcctgcatgtttgtatattttttgtgtgatatacggggagatgtcttgtgccacgtttcctccgtggcgtgtacattcaaacaaattggcatcaaacatgtagtaattttcgttctatggaattgtacgttttctgtttgccccc

SEQ ID NO: 95691 - DNA, 1328 bp, Zea Mays
cttcattcattgcaggttattagggggtacttcacatctcataacaacaaaataaataatccccaatgtcatttggagcctgaatactgtagaacctgcttaatcaatttaacaaaaatatgagaaagatcttggtcgaaacataattttccgtagtaaaaacaactaattttgacagtccataacttaaagcaaataaaataaaatatcttaatgtactttctaggcattggttttcctagatatgttataagaagcgctagccaccagtgactgtagagacttaattgttgttgcacgatctggttaccaattcctctttgctgaatcacatatggtgtatttagtttgaggaatggggcatccatcatcttctcactcctcacatttttgtttgctatggggattggaatggttatctatgatcattcacctcatccttgcaatcacatgagcttccactaaagcccatgtgatataatgatgaacacctcataccaatctagatgagatgttttctcaaacaaaacaccttgatcgcttcatgattagctacataaaaatggatatagaaatttatcataataatacatcttgtatatttgtataactggcctgtttgggtggaagggtattttggtatgaaaacacccacattgtactgctgagaatgactagctgatagagaaacctggctgccatgaactaaccgttaacatggcagcatttcttcactaaacactggcctgccattccttgcaggatctgcgtgacagacagcatggcgcaataccagcacaaccaaatctcgcaaggcatgatcctagctctagcagccaacgtgatgaacctttctcatactggaacatggggaggttccgaagaaatactgcaacttcgtcggtcacacctttgggtgccgctcctgccaatttcggcacgaagaggaacgctgactcgaacgatttcctccctctgaagctcaggaaactaagcggggctatttagtggctgatttatgaaaaatatctggccgaccgttttttgatatgcataagaagcacaagtatgctgttacctgaaacagcatgcagtaatacttaaccacgttagggcttcagaaggctggagatggacgcatttggtggtggcaaccattgtaaattgtacgtttgctcccaaatcgttgcatttggcatcctctgacccactggcctgcatgtttgtatattttttgtgtgatatacggggagatgtcttgtgccacgtttcctccgtggcgtgtacattcaaacaaattggcatcaaacatgtagtaattttcgttc

SEQ ID NO: 95692 - DNA, 370 bp, Zea Mays
ttagcgtagttagatgcagataagaagggcatacatgtgatctgggcaaggcataaaccaaggcgagccttcccacaaatatggagaggctgttttgaactagcaaatgtggagatttagtgagaatgctctcacaatgtctcaccactgcatgggacatgcccttcatcgcagttaaatgtagatctcgtggtaaattgtattttgttaggaattgtgttttattttgctgttcgtactcttttatgatcaaagtaagatattttcattctttccggacttcaaaagtcaaaccatattcccaaattttgttgtctaaatcatgagcatttgttccttcaggaactctctattgtatttgagttaagat

SEQ ID NO: 95693 - DNA, 327 bp, Zea Mays
gaggaaggcgccaccgagctcaaccaggagagccgatggccggtgtggtcttctctgctcctgtaccggcagatcctcgacgagatcgaggccaacgactacgacaacttcacccggagggcctacgttcctaagacgaagaagttgatggcgctgcccaaggcgtacctgagatcactggtggtgccctcctcctcttctcaggctgagagccggagacgctattccaccctaacatagaccggtctctctctcactgtcggtacataacagaagcaatgaatgatcgatatgatgtacaaatttctggccaagctgtttggagga

SEQ ID NO: 95694 - DNA, 288 bp, Zea Mays
atggcacgactcactcgctcctcattatcaaacagaacagtcagcgaagctaggcgtttgcgcccagctcaacactcccaggatgatgcccctgtgcacctccaccatggctgttgtagtaagagttgccaccgccggagcgaccaccccggcctctgttgtagttcctcggctggtagtatccagattcgtagtagtacccgccagcaccgccacgaccattctggtatccaccacggccattctggtacccgccacctcggccaccacgtcctccacgaccattag

SEQ ID NO: 95695 - DNA, 1893 bp, Zea Mays
gaagagtacgccagacggcgtctgcacacgggaacggtaaacggtgacaggacactgatacctgtttaggcagccgcaaatgctgtctcatatctattttagagtttgtctgtcggctgcgtctccaaaatagagaagccaacgccaacgcctccatttcgtcgaatccccttctctcttcttctataatggcaattatctcacctaacaccggactcatcgccgcctccttcgccgtttcgccttccacttttccgcgccgccggttcgtgccaaaaccctactccctacaaaatgcagcggcgcctaagctgaaatcggtgaatcgtgcgccgcggcgaagagagaactcgaactcggcaggacttgtgcggaataggaggggagcggccgagcggtggtcagagagggagatagagatcatcaggtttgccatgtcctccagggctggcggcggcaagccgttgtggtctgcctccaccatcgtcgccaaagtcgcgagtgggtaccacatcctcaggatcgatggctactccaggaccatggagacccccacaggagagtccatcgcgtccctcccgttctcggtgggcggccgttgctggcgcattcgctactaccccaacggcgacaagttggagaataaagaatacatctcgctttatcttaatctccacgacagaagcgtcgaggcagagaaggcgcagttaatgttccgtttcgtcggtgacgtagcggagcagccgttgattctgggaagactgcataccttcgaaaagcaagatgcgatgtggccgtgcgcttcaacgatgtccgcgtggagaaggcgccggaagccgctgctgcagcagctatgatttccgtgcaaccatctgacctgcaccagcacctcggcagtctcctgctgacccagaagggcgccgatgtggtgtttgacgtcgccggtgagacgttcgcagcgcaccggtgcgtgctcgcagcccgctctcctgtcttcactgcagagctctttggtgcgatgaaagagggccacaccggaggcgtggtgcgcatagaggacatggaacctcgggcgttcaaggcattgctctacttcctttacaccgatttactattcccaaagacaatggcaacgacgatgaatcaatctgaagacggagacgtaggcggcgacgatgaagacgttctgtgtcagcacctactggtcgctgcagacaaatacaacttggagaggctgaaatcgctatgtgaaaagaagctgtctgagtgcatccatgtgggcacggtagcaatcatcctgacgctagctgagcaacaccgctgccctggactgaagaaggtgtgcctccattttctcagatctcctgcaaatttgagggcagtcgcctccagcgacgcctttaagcatctgagcagcagctgcccctctgttatggtggagttggttgccatgcttggcaactcagcgtagaccttcatctaagcagcaaactgcacttggtgattttttctggatcgacttgtattatcaagcggtcttggaaaaatgctactagttcatagtttccacttccagtagctatgcatcctaagtttcaaggtagattctgaagtagttgaatccgttggcgcttttggtacaccatttcgcagcggatgattttggtatctggtagctagctttgaatgtctgccagaagcccagaagtccatctatgtccttaacatacaattctcagacgttggaaacttggaatgcaatgcagttcttgttattgttattaagttgtagaattcgtttacttctagttctctagccgtcaatctagatgcatatatacatcgttgtcagatcatcatatatatatatatacagcatcacgttggagttgg

SEQ ID NO: 95696 - DNA, 849 bp, Zea Mays
atgcaaggtggacggggcaaaaggaagactcttgcacacctcgaattctccaaacgcgcggagccgctcgagaatctgctccattggagaagagaacgcctgaagaaaagaagaattgagaacttgatcagacgaggacatgttccggaggcaataacgaagctcccgcatcccgcattctttgagaaatccaggagcaagagccggccaatcgagacgtacgcgctggaaatcgagacgcacgcgctggaagagcaagaacgcgaatggatcaataatcaggaagacaagacagcatctagcatccatgtgttcgcgagaatccgtgaaccaccaaggagaagaaaacgagagaaaaaaaaactcaagaaaccagagagtcaagatcccgaccttcttctccatgacacagacgccaatggtgatcctaccggcgccgccattaccctccatcaccaccattgcggcccgcccctgtcctggcctcctccgcccccgatctgtcccacagcccgcgcacgcgaatccgacgagatttcccacgattttgatgccgggaggataagaggcgtttggtcgggggagttcgggaaggggaggcggcgagaggcgtgcgtgttgcacacaactctccctctcctcttagctgcggcggcgttcgggtcagggtacgggattggcggtctcgtctcgtgcgagtgcgatgcgatgggcgggcgccgagcggcttcgagcggcgcgacggcagatgtggagcggttcttatcggctccagtgtgggctgggcgctggggctgtatgtgccgaccggggttgcagttggaagaatccacgaaacatcaagtttga

SEQ ID NO: 95697 - DNA, 324 bp, Zea Mays
atgaacccgtacctagattccaatgttcttcttaggatggcgcaagaaatggaagaggaagaagagttggagttgcgacgtacctgcatcttaggaggcgtcgtgcacataacgagcgtcggtttcgcatgcgtcgccatgtgtttgagcgcctcgttgatgctgtgcaacaagtcgatccctacttcattcagcgaccaaactgtgccggcgcataagttgtctccccaaatattaatagttgccctcctaaatagtactgctttcccagaggtggttgcattcctaaggaaaaagctactacaaattgtgccccaacactaa

SEQ ID NO: 95698 - DNA, 1180 bp, Zea Mays
gacatgagagctgccgattatattaattaagaagtggtccggaccggactaaacaacaaacaacatgcggttggattgagacatcaacacgccaacaccatacaactcaactcgtcggttggattaggacatcaacacgacaccacactcaccgtcgacatagagtgcccaaacaacacaggcagcggcaaccccacacgagagcacaaaactgctaaaggtcatcgttatcaagcaaagatgcagagcatccaacaactccgactttccaaagcagccaacaggcgaaccaaacaaaaagcagatagacaacccgaagcgaaaggtctcaacaagtcatcgttgccgggctcaggcacaaagcagcttcgacttccaatcttgaccctctgccctgcctccggtttttgcccgaccttcgaaacattctggaccacgaagaagggaggttcgcctcgtgttatcgttgccgagccacatccactgatgtagcagctccgacttcacgttgcaaaacccccacctccactcgcataccaggcaccgagaagcgaagcaacagccgaaggcaaagtcctggccgagacgaacttcagaagcgacgccttcaggaagggagtgacgtcactgtgacgccaccgtcacctgtccgtgatggaccgagctttcacccaaggaagatagcactggggtgtgacgcccttaacaggggaagcgacgcccatgggcgtcaccgtcgccgagactttcgcccaagagcccccagcacaacgtctggccgaaacctcgagacacagcaagctgcctccgccgtcgccggtaccccgacgtaccacacaaatgatgaagattttgggcctgccgccaccaccaccctgcgctagcccgatcgactagccgatgctgccccagacgagaggaggtcccgccactgcaattccggccgactgcgcaggcctgccggcgcaccaacgccgacctccaccccggctcatgcgctagcccgggaccagcctgccgccgcctccgacggatggcatgcggaggccgccaacctcgcgcgccagatccagccctccgcgcatcaggtacgcgagcacacagtccaggcacacctccaacccccgagcagcagcgattgccgtcgcggcacgcaggcgccgccaccgggctagcctcg

SEQ ID NO: 95699 - DNA, 2634 bp, Zea Mays
atggagcaatctgcaggtgacgaatcaagagaaaccgaggctgagaatgctgtggaatataacaagaaggtggatcaagaagataccattaacagacaaggtacagctaaggaagacagtggtgtggagccacaagaggagaacgttgtggatccagatcaaggtgtggatgacttttctgtactagatgagggtaatgtggtggcacagtgcaccagtgatcaattgagaacaaccatggaagataatgctgcagagatgcaagaggtggtggagcaagaaggtgccatttttgaaaagggtgtgacctcagatggcattactgttgaagatcaagacaaggaaatggaacaatctgcaggcgatgaatcaagagtgaccaagggtgagaatgctgtgaaagataaaaaggtgtatcaagaagatgccattgacaaacaaggtgcagctgaggatggcagcggtgtgaagtcacaagaggacaacatggtggttccaggtcaatgtacagatggccttcctgtactagatgagggtaatgtggtgccacagtacacaagtgatcaactgagaacaaccacagataacaatgctgcagttgatccagagttggtggagcaagaaggtgttgatagcatagtgggtgcagccaaggttggtattgctgtggaagaatcgcgagaggacatcatggtggaaaagcaagttgaaggtgttcttttacaagatcaagatgaggcagtggagcaatgcaccagtgatcaactgaggacaatcacagatggtaatgatgtggaagatcaagaggtgcacagagagaaggttggtctctctgaagggtacccacagaagcctggtaaactgaactgtcgtttttacatgtcaacagggaggtgctcatatgggtcatcgtgccacttcaatcatccacggctcaaagcaaaactagaagtttcaagtttcccttccgaacaaagaaatcatgaagctgaatttctggaactgaaccgtgttggcctccccattagagaaggagcaaggaagtgtatctattacatgcgtaatggtacatgcagatatggaaagaaatgttgttttaaccatccagagcaagttcttgatgttcaacgccacactgcaacaggatgggatgatactaacttgcaatcttcaccacactcaaagaagtcacctgaacataaaactatggatgacatatcgtctggatctgaggttcttcctccaaacatacttcggatgcttttacctccccagaatgtgccccctagtacaaaagaaaaggaaatcaggataaaaaaggatcctgattgggcttcagcttcagatgattctgatggctgctgctcggccgatagttcagatgggcctttgtgcaagcaggaacatgaggactatcctgagaggcctgaatgccctttccttcttagatttggtaattgtaagtttgcatcatcatgccaatattaccacccaaaagacaaatttccaagtacctaccatccagaagacaaattccaaagtcgataccatcaaaaagaaaaatcaagtcgacaccatccaaaaaaagagccagcactatcaggagaactgatggtttatcctgacagacctagtgaacctgactgccccttctatgtgaaaactgggtcctgtaaatttggggcaaactgtaagtttcatcacccgaaggatataactccaaacatgcagggtccagcaagtccaaaaaggtcggtcgctgcaaaagagcaccacgcagcagctagagcgacattacaagaccagatgtaccagcaacaaaaattccctgagcggcctggccaaccagattgccggtactacatgcaatttgggaaatgtaaatttcaatcagcttgtatattcaatcattcaaaagacatactttcaagtgggtggcatccagcagaatgcccattctacatgaaaactaggacatgccaatttggatcagcttgtgagttttatcacccaaaagatcggtgctcaggcagagggggagtgattgatggtactgactatggacatgattttgccacgaagtcacggaatgttctgcaggaactggcaatatatcctgaaaggcctgatgaacttgagtgttctcactacatgaagcatggctactgtaaatataagatgaactgcaaatttcatcatccaagagatcgtcttccaaagaaataggaccatttgctacaaccactgttgtaactggctgtcgttgatgagtggagcaagtactgatgatgggacagaaatgcaggaaggaagccatagtcttccttttttgaagagctcgattctactcatgtctatgtcgaatttctgccctagtgtcgttagagttctcgtaccagatgcgaactgcctggtggcttcccaactcccgttcattcatatactaccaaacattgctgtgatctagatctagcccgatgcggtgctaacctgagattgtgggttactgtagctcagtatgcagctcaggtacctgcacttgctcaagattgcgataatgatcagattaaaatagcaggccacgcatattctgcaacttgcgacttttacatcgttgttgagtctcctgggttc

SEQ ID NO: 95700 - DNA, 471 bp, Zea Mays
aattcttcatgcggttcgtttcccataaggccataacaaatgttggaccgccgatcgcctcgccaaaagggggctgccacaccctgaatgctgtccactttgcgaccaagttgaggagacaattgaccactttccagtttcatgttttttcactcggcaactgtggttcaacatcctgcataagtttggtgtgcagtccctatgtcctcagcccaacgacatctcctttaatgatcggtgggcaagattagtttctagaatggatggttagataaaaaacttctcaactccataatgttgggggcctgatcaatctaaaatgaccgtagttgctactcattagagaggagtttctattttggagtctggatgggctagaggaatttttgatctctttgcttactgccaagtgcagactagggctcttttttggttgatgtcaagtctttcactgtaataggctagcagtgt

SEQ ID NO: 95701 - DNA, 95 bp, Zea Mays
aatgtttacgctagattatctcagcgtaatggttatatctttacagtttcgatgaccattcaatcttttgatagacatcattgagagtgaattgc

SEQ ID NO: 95702 - DNA, 287 bp, Zea Mays
gagcctcgcttgcacctatggcatgcttgtacaatagtcgttgccgtccacttataccactgagagtttttttccctaatttatcaaataacacttaaaattgaatactaccttacattcttagatgcgggaactttatttctgaagtgaatagatgagttttttttctgtaattcttgatattccagttagtttctctgaccttgttctgtatgaatggtaggccttttttggtgaatgaattggagccacaatacctcctccatgaccgcagaaaagtgtacgag

SEQ ID NO: 95703 - DNA, 1695 bp, Zea Mays
atggctggggtggaggatgaggacgagttcaaggacgcctcggtggccgccgatccgccaccttgctcgccgaagcccgcctccaagtccatgaccgctaccggcagcggcggtggcctcgggaggaggctgttcgcttccattcctctccccgccaccctctccgccgccatcggccgcttctccggccccaacccgctggctaccaatgtgggcctcgggctcctactcgacgcggggcccgctgcctcctctgacggcccccttgcctccgacgcggcctcgggcggcagcagcctccacctgccctcgttgcctgctctccagcggcagcacggggatgatcaggttgctgggcgtggcgcgggtgagtgggaggaggagctagggttgttaccggccgaggaagggtgggatacagctgaagacagtcgggagaaggagggtcttgctgttgatgggcgctctgcgaacagaaattgtttcccgacgcgtggtcaggaggagggggcacagagacagagacctggtgatgagttgggggcagccgtggcccaagaccaggaggtggtggtgaagcaacaaggggccactgaggattgtgctgctgtggtggaagatgagagtaactactctgcggtagagcaatgtgctggtgatgaaacaagggcagtcaaggctagtaatgctgtggaaataaataagagggtgatcgagcaagaatgtgctggtggcatactggatgaagccaaatatggtgtttctttaggattgcaagaggagaatgccatggtggaagagcaaggtgtggatgtcatttctgtacaaaatcaacgtgtggcgatggagcaatgcgctggtgatcagttgacaacaaccacaggcggtagtgctgtacaagaggtggtggtggagcaagaaggggacactgagtgttacactgctgtggaagctgtagaacaatgcaccaatcatggatcaagagcagacaaggatggcaatgttgtgaagagaaaggagaaggcggtggagcaagaagtttctgttggtgtacgtgatgcagctaaggattgtgttactgtggaaccacaagaggagaatgtggtggtggtggagcatggtgaggatggcatttctgtgcaagatcaacataaggcggtggagcaatgtactagtggtcaacttagaacaaccatggatgatactgctgcagaaggtcaaagggtggtggagcagggaggtgccattttctatttggatgcaacagcatatgatattgctgttgaagatcaagagaaggaaatgaaggaatctgatggtgacgaatcaagatcaaccagggatagaaatcctgcggaagtcaaagataaggaggtgaaccaagaagatgtcgtagacagacacaatgtgatcaaggatggaagtggtgtggagttactagagaataacatagtggctatagagcaaggtgaggatggcatctctctatcagatgaggataatatggtggaactatatacaagtgatcaactgagagcaaccctggatgatcatgctgcagcaaatcgaaaggtggtggagcaagaaggtgacattgttgaaagggttgtgaccacagatggtatttctattgaagactatgagaaggaagtagagcaatctactggtttttctcaaggtcaaccaagggtgtga

SEQ ID NO: 95704 - DNA, 1089 bp, Zea Mays
atggcggggatgcgctgggggcggtggctggggctggtgacggtggcgtgggtgcagtgcatctccggcaacaactacaccttgatgtccagctccagccccgaaaactgctcctcctcctcagaatggcccgaccgagcggcggcatcgcgctccaaccggtacctcttcgacgcgaatgcgcaggcccggtgcgcggggtacctggacctgatgaggctagaggtggatgcgcagctgggcaggctcaggggcggtgtcaccggcctggagagctacgccttgccgggcaacggccgtgcgatcagaggtgcgcacctgggcatgtcgcttgatgtcatgttgattgagattgatgagaggttcaacgccctgaagctgctcatgggctccgtgttccgttcgacatctgcacatggtcgtggtacagggtgtattgaaagcaattcatatcagttgtgttggttatccaacgaagaggacattaagatgagttcattgaccagtttggaatgcttgcaccggaccttgtcgacaggaaggaacaagcatcaggcgacgaccgtctcgactgcgggagaggggagtgcccctcgagtatccgcagggatccaacacttggacaccgacattcgcattcctaggaacatcgaccggggggaaaagagccacaggccaagcggcgagacgaggcggtttggaactgccatggcagcggcagccgccaacttccgatcccgccgcagctgtggccgccatgtccacctgtacccactccacctgtgcccactggttcgttcctggctccgaatttctttcccatccatctcccttgcgcttcctggtcccttgctgtacatgggtcgccgtgtatgtgatgtgcttgaactgaaatgcctccacaatgatcagttactgatcatcggaagctcgtggcaaatgcatcctcacaacaggacgatggagctcaaggcatcaagtggtggcttgctcggactcgcgctcctctgcaacaaggcactgttccccatgagggttcccattaccattgcgctcgcgtcgcctgtcactgggtctctgagccattag

SEQ ID NO: 95705 - DNA, 1731 bp, Zea Mays
tcagccctcagaagcaaaagcaaccaactttcttctccgtcacctgactcacacctccactcacctccggtccaccaacctctgccggccatggcggctgcggcggcgcagaagctcctcgaggcgagcacgaagatcatcggcgtcgggcgcaactacatcgcccacgccgaggagctcggcaacccgatccccaaggagcccgtactattcctgaagccgacctcgtcgttcctccacgctggcgtggccaccgccgccgtcgagatcccggagccgctcgaatcgctacaccacgaagtcgagctcgccgtcgtcatctcccggcgtgggcgtgacattcctgaagcgtccgccatggacttcgtcggaggctatgcacttgctttggacatgacagcaaggggccttcaatctgttgctaagtctgcaggccttccatggactttggctaaagggcaagacaccttcactccaattagtgcagtagtaagcaatgggttttcttcatgtgcttggagttggttggtgtctcaggacagtatgttttatttatttgtgttcgctttttataattacacctcaataaatcaataccatattgaagttagtcagggcagaagtactagtcagtgcggaagggttgttagataatagacacctcatctttgctgccttccgtgttatctgcagcaatccagtgacatgaaatgtgtaatctcatcagcatgacacactaatcccgatgataattttgacttccattaatgataatttttctattaatcaggttccaaaatcatctgtcactaatcccgacgatctcgagctatggctaaaggtagatgatgaactaaggcagaaaggatcgacaagtgacatgatattcaagattccttttctgatcagctatatcagctccatcatgacattaatggagggtgatgtgatactaacaggtagtgacattttctcaagaccagcttgtttttgcgcatctgaggtctttctgcgggcaatccattatttattttcgtctacaggtactcctgagggtgtgggtcctgtgcgagtaggtcagaagatcaaagctggtataactgacctaattgatgtcgagttcgatgttcagaggcgcaaccggtcattttccacatgattcaataagcaagaaagtaacggtaagcaacaagtattccgaacatatgagctggagctgatttttccaatacaacacataaggtagtgaaggcagcatgcttttatttgttgtgtgactaaaaataatatcagacaattgatttcgtaaaagcaaacctgttggtcaggtagatgatgaactaggtcacaacatcatgctgctattgtttgcaggccaaccgcttgaagattgctgctcgtgtcacgctcacgcgttcctcttgggtattcattcttccttgcgttgcagcgagattgcttcggcccatgagatgcgagtttagcctgtgccccggcatggcttaagcaaaatacctgctggccaatgtcgtatacttgtactggtgatatattactgtgtaaaatagaaaaaaagttttgtttttcaggtttttataaaccgtatcaaataattccaggcccttgttagccgtctccctttacagccacctgtcttgtcaccttttgtgagaaggctccttgtcaatctctatctctactactacataagaagttactgtagacgttcac

SEQ ID NO: 95706 - DNA, 1114 bp, Zea Mays
tcagccctcagaagcaaaagcaaccaactttcttctccgtcacctgactcacacctccactcacctccggtccaccaacctctgccggccatggcggctgcggcggcgcagaagctcctcgaggcgagcacgaagatcatcggcgtcgggcgcaactacatcgcccacgccgaggagctcggcaacccgatccccaaggagcccgtactattcctgaagccgacctcgtcgttcctccacgctggcgtggccaccgccgccgtcgagatcccggagccgctcgaatcgctacaccacgaagtcgagctcgccgtcgtcatctcccggcgtgggcgtgacattcctgaagcgtccgccatggacttcgtcggaggctatgcacttgctttggacatgacagcaaggggccttcaatctgttgctaagtctgcaggccttccatggactttggctaaagggcaagacaccttcactccaattagtgcagtagttccaaaatcatctgtcactaatcccgacgatctcgagctatggctaaaggtagatgatgaactaaggcagaaaggatcgacaagtgacatgatattcaagattccttttctgatcagctatatcagctccatcatgacattaatggagggtgatgtgatactaacaggtactcctgagggtgtgggtcctgtgcgagtaggtcagaagatcaaagctggtataactgacctaattgatgtcgagttcgatgttcagaggcgcaaccggtcattttccacatgattcaataagcaagaaagtaacggccaaccgcttgaagattgctgctcgtgtcacgctcacgcgttcctcttgggtattcattcttccttgcgttgcagcgagattgcttcggcccatgagatgcgagtttagcctgtgccccggcatggcttaagcaaaatacctgctggccaatgtcgtatacttgtactggtgatatattactgtgtaaaatagaaaaaaagttttgtttttcaggtttttataaaccgtatcaaataattccaggcccttgttagccgtctccctttacagccacctgtcttgtcaccttttgtgagaaggctccttgtcaatctct

SEQ ID NO: 95707 - DNA, 1411 bp, Zea Mays
tcagccctcagaagcaaaagcaaccaactttcttctccgtcacctgactcacacctccactcacctccggtccaccaacctctgccggccatggcggctgcggcggcgcagaagctcctcgaggcgagcacgaagatcatcggcgtcgggcgcaactacatcgcccacgccgaggagctcggcaacccgatccccaaggagcccgtactattcctgaagccgacctcgtcgttcctccacgctggcgtggccaccgccgccgtcgagatcccggagccgctcgaatcgctacaccacgaagtcgagctcgccgtcgtcatctcccggcgtgggcgtgacattcctgaagcgtccgccatggacttcgtcggaggctatgcacttgctttggacatgacagcaaggggccttcaatctgttgctaagtctgcaggccttccatggactttggctaaagggcaagacaccttcactccaattagtgcagtagtaagcaatgggttttcttcatgtgcttggagttggttggtgtctcaggacagtatgttttatttatttgtgttcgctttttataattacacctcaataaatcaataccatattgaagttagtcagggcagaagtactagtcagtgcggaagggttgttagataatagacacctcatctttgctgccttccgtgttatctgcagcaatccagtgacatgaaatgtgtaatctcatcagcatgacacactaatcccgatgataattttgacttccattaatgataatttttctattaatcaggttccaaaatcatctgtcactaatcccgacgatctcgagctatggctaaaggtagatgatgaactaaggcagaaaggatcgacaagtgacatgatattcaagattccttttctgatcagctatatcagctccatcatgacattaatggagggtgatgtgatactaacaggtactcctgagggtgtgggtcctgtgcgagtaggtcagaagatcaaagctggtataactgacctaattgatgtcgagttcgatgttcagaggcgcaaccggtcattttccacatgattcaataagcaagaaagtaacggccaaccgcttgaagattgctgctcgtgtcacgctcacgcgttcctcttgggtattcattcttccttgcgttgcagcgagattgcttcggcccatgagatgcgagtttagcctgtgccccggcatggcttaagcaaaatacctgctggccaatgtcgtatacttgtactggtgatatattactgtgtaaaatagaaaaaaagttttgtttttcaggtttttataaaccgtatcaaataattccaggcccttgttagccgtctccctttacagccacctgtcttgtcaccttttgtgagaaggctccttgtcaat

SEQ ID NO: 95708 - DNA, 1047 bp, Zea Mays
tcagccctcagaagcaaaagcaaccaactttcttctccgtcacctgactcacacctccactcacctccggtccaccaacctctgccggccatggcggctgcggcggcgcagaagctcctcgaggcgagcacgaagatcatcggcgtcgggcgcaactacatcgcccacgccgaggagctcggcaacccgatccccaaggagcccgtactattcctgaagccgacctcgtcgttcctccacgctggcgtggccaccgccgccgtcgagatcccggagccgctcgaatcgctacaccacgaagtcgagctcgccgtcgtcatctcccggcgtgggcgtgacattcctgaagcgtccgccatggacttcgtcggaggctatgcacttgctttggacatgacagcaaggggccttcaatctgttgctaaggttccaaaatcatctgtcactaatcccgacgatctcgagctatggctaaaggtagatgatgaactaaggcagaaaggatcgacaagtgacatgatattcaagattccttttctgatcagctatatcagctccatcatgacattaatggagggtgatgtgatactaacaggtactcctgagggtgtgggtcctgtgcgagtaggtcagaagatcaaagctggtataactgacctaattgatgtcgagttcgatgttcagaggcgcaaccggtcattttccacatgattcaataagcaagaaagtaacggccaaccgcttgaagattgctgctcgtgtcacgctcacgcgttcctcttgggtattcattcttccttgcgttgcagcgagattgcttcggcccatgagatgcgagtttagcctgtgccccggcatggcttaagcaaaatacctgctggccaatgtcgtatacttgtactggtgatatattactgtgtaaaatagaaaaaaagttttgtttttcaggtttttataaaccgtatcaaataattccaggcccttgttagccgtctccctttacagccacctgtcttgtcaccttttgtgagaaggctccttgtcaat

SEQ ID NO: 95709 - DNA, 922 bp, Zea Mays
tcagccctcagaagcaaaagcaaccaactttcttctccgtcacctgactcacacctccactcacctccggtccaccaacctctgccggccatggcggctgcggcggcgcagaagctcctcgaggcgagcacgaagatcatcggcgtcgggcgcaactacatcgcccacgccgaggagctcggcaacccgatccccaaggagcccgtactattcctgaagccgacctcgtcgttcctccacgctggcgtggccaccgccgccgtcgagatcccggagccgctcgaatcgctacaccacgaagtcgagctcgccgtcgtcatctcccggcgtgggcgtgacattcctgaagcgtccgccatggacttcgtcggaggctatgcacttgctttggacatgacagcaaggggccttcaatctgttgctaagtctgcaggccttccatggactttggctaaagggcaagacaccttcactccaattagtgcagtagttccaaaatcatctgtcactaatcccgacgatctcgagctatggctaaaggtagatgatgaactaaggcagaaaggatcgacaagtgacatgatattcaagattccttttctgatcagctatatcagctccatcatgacattaatggagggtgatgtgatactaacaggtactcctgagggtgtgggtcctgtgcgagtaggtcagaagatcaaagctggtataactgacctaattgatgtcgagttcgatgttcagaggcgcaaccggtcattttccacatgattcaataagcaagaaagtaacggtaagcaacaagtattccgaacatatgagctggagctgatttttccaatacaacacataaggtagtgaaggcagcatgcttttatttgttgtgtgactaaaaataatatcagacaattgatttcgt

SEQ ID NO: 95710 - DNA, 781 bp, Zea Mays
tcagccctcagaagcaaaagcaaccaactttcttctccgtcacctgactcacacctccactcacctccggtccaccaacctctgccggccatggcggctgcggcggcgcagaagctcctcgaggcgagcacgaagatcatcggcgtcgggcgcaactacatcgcccacgccgaggagctcggcaacccgatccccaaggagcccgtactattcctgaagccgacctcgtcgttcctccacgctggcgtggccaccgccgccgtcgagatcccggagccgctcgaatcgctacaccacgaagtcgagctcgccgtcgtcatctcccggcgtgggcgtgacattcctgaagcgtccgccatggacttcgtcggaggctatgcacttgctttggacatgacagcaaggggccttcaatctgttgctaaggtgagttttctacaatctgttgttttttctgagcctcagtactgcttgttcaattactgttgttgcagtgtcatctgtcatccctattagttgttgaatcttatatatgatcatacaaacattcaatttacataattaaattcaatagctttgcaatttagtgtcagtagttggtcttctccatgatcatatctattgatgaatagcaaagattcagatgcttttagtcgagctagtgtcttcatccatccaatataattcgtttcacataatgttttttaaatattttgttgtacaaatctggtagcatcaattggctgccaataccttaagtagactcgatctcttgatgctt

SEQ ID NO: 95711 - DNA, 1860 bp, Zea Mays
aacgcgatagcaaccggcaacggcaagcaaccatctgggcactcggctctcccccctcccacgctctgctctccgcagcaagccagcaaacagtctcccgtgccacctcagcccgctgcctgcgaggctgcgaccttctcccttcactcccctcgccgacggagcaaacggcgatcggaagtcgagcgccgtcacctgagggacagatggcggcggcggaggggcaggtgaggcgggacatgtgggggcaggagtatcggacgtcatccgccgactgcgcggcggcgctcgacgcctactacgccgccttcatgtccttcggccgcggccgcgtggcggccgtcctccgcgccgccgcggccgacccgacctgcgccctcgccgccgcgcacgccgcgcaatcagtcgcccccagggaccccgcgggggccgccgccttcctcaacgccgccgcggacaacctcgggaaagcaacggagtacgagagggccgttttcgggacgctctccgtgctggtgggcgagaagagggacgaggaggtggcgatcgagcggcacttcgagcttctcgagcaattccccagggatctcctgtctctcaagagagcgcagctcatctgtttctatatgggaaagccagatttgtccctgaaattcgttcaacaagttttgccgaagaatcaagatcagaatttcatatatggcatgcttgccttccctttgcttgagcttggacggatggatgaagctgagagagctgctcgaagaggcttggctataaacaagaatgacttctggtcacagcataatttgtgccatgtttttcagcaggaatgtcgtttcagagaagctactgagttcatggaatcatgttctccgtcatgggaggcatgcacatcatttctgttaactcacaactggtggcatgtagctgtttgttacttagaagctgagtcccctttgtgtaaagttctggagatatatgatcacaacatcatgaaggaacttgagaaaagtgattgtgagacagcagaggtgtatttgaatggtctagggttgctgctgcgattattcatacgcggtcatatagattcagctaaagagaggttaacgacattgctagatgcactaaagaatgagtctatatggcatgtggaatggctccttgacttgcttatattgtgggcactatcaagtatgggtgagctaaaaagtgcacataatatgttggaatcattgaagtcaagggtacgtttaatggacaggaatcggcagcaagcgatgcagaaggcaatcaagctggcggaggctgcttatgaatatgggaaaggagatcacatgaaagtctatgacactctgggtccagactttgatgcgcttggttataaaatgattggtgcatcagatgaacaagtggatgtcttcaatgaagtttggtacactgttctaataaatgctggagagacttccaaagcaattgagattcttggcaaacaaattaggaaacgagagggtgcacctttcttgtggcgcttgctggagaaatcatactcattggctggcagaagcgcagatgcttcagtagcatctaaaaaggcaaatgctctacaatcctcttacttccattagctcatatcttgttgaataatgaataaccttgtttctggaaggtcttgtaactttttttttactgatggaagttaccagtatgcaccataggaagtctacagtcagtatatataccgcataatcaacagttcagaatactggaacatgtgcagtgtatcaatatgtgcgtacatggaagttttatgttcagtaaccttatgggtatagatatgacatatgtcaaattgtcgca

SEQ ID NO: 95712 - DNA, 1844 bp, Zea Mays
aacgcgatagcaaccggcaacggcaagcaaccatctgggcactcggctctcccccctcccacgctctgctctccgcagcaagccagcaaacagtctcccgtgccacctcagcccgctgcctgcgaggctgcgaccttctcccttcactcccctcgccgacggagcaaacggcgatcggaagtcgagcgccgtcacctgagggacagatggcggcggcggaggggcaggtgaggcgggacatgtgggggcaggagtatcggacgtcatccgccgactgcgcggcggcgctcgacgcctactacgccgccttcatgtccttcggccgcggccgcgtggcggccgtcctccgcgccgccgcggccgacccgacctgcgccctcgccgccgcgcacgccgcgcaatcagtcgcccccagggaccccgcgggggccgccgccttcctcaacgccgccgcggacaacctcgggaaagcaacggagtacgagagggccgttttcgggacgctctccgtgctggtgggcgagaagagggacgaggaggtggcgatcgagcggcacttcgagcttctcgagcaattccccagggatctcctgtctctcaagagagcgcagctcatctgtttctatatgggaaagccagatttgtccctgaaattcgttcaacaagttttgccgaagaatcaagatcagaatttcatatatggcatgcttgccttccctttgcttgagcttggacggatggatgaagctgagagagctgctcgaagaggcttggctataaacaagaatgacttctggtcacagcataatttgtgccatgtttttcagcaggaatgtcgtttcagagaagctactgagttcatggaatcatgttctccgtcatgggaggcatgcacatcatttctgttaactcacaactggtggcatgtagctgtttgttacttagaagctgagtcccctttgtgtaaagttctggagatatatgatcacaacatcatgaaggaacttgagaaaagtgattgtgagacagcagaggtgtatttgaatggtctagggttgctgctgcgattattcatacgcggtcatatagattcagctaaagagaggttaacgacattgctagatgcactaaagaatgagtctatatggcatgtggaatggctccttgacttgcttatattgtgggcactatcaagtatgggtgagctaaaaagtgcacataatatgttggaatcattgaagtcaagggtacgtttaatggacaggaatcggcagcaagcgatgcagaaggcaatcaagctggcggaggctgcttatgaatatgggaaaggagatcacatgaaagtctatgacactctgggtccagactttgatgcgcttggttataaaatgaacaagtggatgtcttcaatgaagtttggtacactgttctaataaatgctggagagacttccaaagcaattgagattcttggcaaacaaattaggaaacgagagggtgcacctttcttgtggcgcttgctggagaaatcatactcattggctggcagaagcgcagatgcttcagtagcatctaaaaaggcaaatgctctacaatcctcttacttccattagctcatatcttgttgaataatgaataaccttgtttctggaaggtcttgtaactttttttttactgatggaagttaccagtatgcaccataggaagtctacagtcagtatatataccgcataatcaacagttcagaatactggaacatgtgcagtgtatcaatatgtgcgtacatggaagttttatgttcagtaaccttatgggtatagatatgacatatgtcaaattgtcgca

SEQ ID NO: 95713 - DNA, 1128 bp, Zea Mays
actccactgtcccacccgaccgacgaccccaatccatggctgcggcagaggcgccctgcgacggcagcgtcgcgcgcatcaggctgatgtgcagccacggcggccgcttcctgccgcgcggccccgacggggcgctgcggtacgtcggcggcgagacgcgcgtcctggtcgtgccgcgcgcggcgacattcccggacctgacggcgcggctgtcagaggtggccggcggcgcgaaggtgcgggcgatcaggcaccgcctcgccgacgagggcgtccaggacgtgatcgtctcggtcacctgcgacgaggagctcgcgcacatgcgcgacgagtacgaccgcctgcgggctacgcggccgtccgcgacgttccgtgtcttcgtcacgaccaccactcacgctggctccggccgaggcggtgcctaccggaggagatcggcggccggacttccacccctgtcgatggagatgcggcgcacgcagagcgaacaggtcctcgccgtgcgtgcacaccagcaacaggcgatgcgacgcgtcaagagcacgcaggagttcgcaggggccatccgcttgcagccgtctttccaccgccgtggcaaccagcagtgctgcagctgctctcagcgctgcaacatgtgcgcccccgcgccgacggcagcacagccggtgtgcgcactaccctacctgtccaagaaagtagatccaccttggatgcccgcggcgaaggcaacagagggagtgtttgctattagagtttagattaaaaagaggcaggatctagtgttgaaggcccaaggctcccactcccacatactccctccgtttctttttatttgtcgcttgatagtgcaattttacactatccagcgacaaataaaaagaaacggagggagtaactaacagatcgagtctgctattaaggtttagattaaaaaagaaataaatcgaaaaaagtagctgtgtcctattctagtattattagagtttagattactgtgacaataatgtcatcatcatcttctctttatagaagctgtaaaaatttctgtaatgtaatgtcctctatttatccatccaaagtttactttggacgatttgtggtttatttgttaaccacagccaaaaagaa

SEQ ID NO: 95714 - DNA, 820 bp, Zea Mays
acagtaacagcacacacgggatcaacgccagagctaccgctaccgccgccaccgacctccctagccgtgtcgcggcgggagcgcccgacgacggcccgcctggacctggcgcggtgccgttgtcggtcgccggtctctccgcggggcaggtgtagccgcagaggctgggcctgacgacgcggtacacgcccttgctcgccaggacgaagacgtccttgcggctgtcctccccgaacgagaagacgtacccgagcagcgggtccgtgctcccggcgacggactcgcagccgatcggggaggccttggagcagctcaccggcttcacggccgacgtgtagttcccgctcccctctggggcctccgtgcccgtccacatcagcgatgagtacagcagaatggtcgtagcccatgacggggaagattgcgtttatggactcaggcgaagtattccctccaggcgacttttgcgggtgaaagatgtatggcccctcgtatacacgccatccgtagtttccacccttggtgactaaatctacctcttcgtatgcgtcctgctcatgtgtaacagtgtaaggtacaagtccaaggcaaagccgaaagatcagccagcgttttcagaaagagtgcagaaaacttcatggtcaaaacatgaggctcgataaatttaggctctatttgttacttatagttccgcttttcctccttaatcgtttgaccttttcttgtgcccatttagaccttgctggttcttgtgggttttatctcttttatgtgtttccccgtttcgtcgttttcggttctcctttgcctttgtttcccc

SEQ ID NO: 95715 - DNA, 1536 bp, Zea Mays
ggtccattttaccctgtcactgtcagcaacggcaaccagaagcaacagagcaggccgaaagagggcgcgcggcagccactgccaagagaccaatccgacccatcctccccgcctagcgtgacagtcagagaagccaaggcccggcggtcaccgtccgtgccttcgcaagacgaggaggatgacaccccgtctccgtgcagggatcgctccatgtcacagccacaggagctggagccccagcggaacgagaggaggacgcaaccgccagcgagcgggtctgcgagcccagtggagctcagagctcacaggcccaccaccggctgcacggacgccgcaacccagaccgacgatctcggcagaaggccggcgggccgcagggcgctcgagctgccgcgcaagaagagtctgagcacggaccacgacgccgtcgtccgtgagatcgcagagtaccggcagagccaccctcgccggtcggcagacctccacgggatctcccgggagctcctgcgccagtgcatcactactccgctgaccgtaccctcgacctgcgccaagtccgagagcctagagtcgctgatacgcgcggacaacgtgatgacggacagcttcaggatcctcgaagaggaggacgtcgtcgcgcgcacctgccccaagctgaggccggcgagcgtgctgatgcagctcgtcacctgtggctcgctctcggtgaagggtcacggggacgctggggtcgttcggacgtgcaagccgaggttccccaacctcaggttcctcccctcgccgctgatctcgcgcaccatgatgatgggcgagctcgactacctgtcggaaaaccccaggttgatggggatgaagctggaggagaaggagtacttcagcgggagccttgttgagaccaagaagacgcaaagagatggtccggctgagaggtattcggcgcttaaacggtcttcttcctacaatgcagaaagggccggcgaggctctggactgcacaagacgcgaagaggataaagccgacgacgtgtcgtcgcgcacgaggtgcctcccgcggacgccgatcctgtcatccttcctgcacccgaagggcgactcgctcaggtctcccgtctcggactgccggcggagctcctcggcccggcgggactacgacgcggcctccggggacgggagcaggaggttcgccgacgcctccgtcgcgtccgcgaccacaggggccgagtcgttcaggaaggaggagaaactcgtcaagatcgaggaaagttaagtgccgcccgtggcctttctttacctgaacctactgtgaactctttgtcagtgctcggctgtcgtccggagcccgtgtcgtgatccactacaccgtcccttgcaacgacagcgacgaaggctctgaacgctcggaggagtgacactgctgttcagctagacgacccattttttcttcccgttttttttttcactttctcccttagaaacattaggcccccttatcattgtataagtgcctgttataatgtatcattcatgtgtttcactt

SEQ ID NO: 95716 - DNA, 720 bp, Zea Mays
atgcgccggcaacgccgcaccggcggcctccgcccggtgctgctgctcctccccttcgccgcgctcatttcggtcgcaaccttctccctgcactccgccgaccgcctcctcagctcctccgacacgggcacggcgcagaaggccgcttcgtcgtcccggcagcatcggcggctgcccgtcgccaccctcgacgtgcgcgcgctcgacgccgccccgccgctgcacgcggccgccgcgcgcgccttccggtccggcgggcgcctcctccgcgacgtcctctcctcctcctcgccgtccgcccccgcgccgccgcccgcgggtcccggcgcggcgcggtgcccggcctcgatcgtgcggtcgggcgcgcagctccgcggcgctggcggcggcgtcctgctgcccctgccatgcgggctgactctggggtcgcacgtcacggtggtcggcgcgccgcggggcggtcgaggcgctgccgccgtggcgcagtttgccgtggagctgcgcggggaaggggacggggacgaggcgccgaggatcctgcactttaacccgcggctcagcggggactggagccgccgcccggtgatcgagatgaacacgcgcttccgcggacaatggggccccgcgctccggtgcgacggccgtcggtcgcgccccgacttggagacagtaccagtggtacttcttaccgtcaatgtcttcttcatgattgcacggtga

SEQ ID NO: 95717 - DNA, 1513 bp, Zea Mays
gatgtgatgtgtgaacatattctgacttctgagaaatctccatcgccgtatctaatcatagctacgtaagtactttgtttgatacgtattaaaaaaaatgtactcgttcaaaatccagatagctatatagtcaagaaccagtttaagaaggcactatataatagtcagtctgccacatcccaaaacgcaacacacaagctaaaataaagcaagcaccagaactcttttttccccaaactcgcaagtcgcaacggccatgtctccgctgccccgccgcctcgtggtcctcgtcctcctcgccgccgccgtcgcggccacggcgtccgccgcgtccctcagcggcgcggcgaacgacctgctgcccaagtacggcctcccgaaggggctcatcccggactccgtcacctcctacagcttcgacgaggccacgggcgccttcgagatccacctcgccagcacctgctacgtccacttcggctcccacctcgtctactacgagaggaccataaccggcaagctctccaggggcgccatctcggacctctccggcgtccaggccaagaagctcttcctctgggtctacgtcacggggatggtcgcgcaccccgaccagggcaccatcgagttccaggccggcttcgtctcggagtcgctatcagcctccatgtttgacgaggtgcgcacctgcggttccagcgctggcgcgcagctgcgcggcgcggctggggtcatcggagagcttgggctgctccccgttgcgcaggcatgaacctcgagtttgagaatccacgctaccagagaaccgcaagagcttccagtctgctgtcgttctagagtgcaggacgttcagctgtggggtgtgttcgagtatctggttgttgcttcccggtctcaatggacatggatgctctgtagaaatgtatatcccatacgctgttgctgaacctgcgtaggatgtaggcaggctggctctcttctctcttgttttcctggatcatcgtatattcatgtcatcatcatgtgtgcaaccatgaactgcccccagaggcgtagcagcacgaattcgactagcatgcgttttgttttgtcgagactgaaggcacacgtacgctggtagagatagtgactgcgagggaaacgatgtattacaaagtcaaaacaatgacaaatgggttatagcataaatattattaaaaaatgggaatggtattctataagactaacttcagcaataaactgtatatagttttgaactctaaatataacgtttatagacttctttttcgtatccagcagtactaaaaggaactctaaagtagagatctaaagtagaaactctaaagtagagatctaaagtagaggagcagtaaagtgtctgctatctgtggagtgcactgttagcagcagtacggaaccatcagtacggaaccatctagaaccaagcaaaagcagcagtacaaatattgtttacttattgtttggtaagagaatacaatatatttttatagttggt

SEQ ID NO: 95718 - DNA, 978 bp, Zea Mays
gatgtgatgtgtgaacatattctgacttctgagaaatctccatcgccgtatctaatcatagctacgtaagtactttgtttgatacgtattaaaaaaaatgtactcgttcaaaatccagatagctatatagtcaagaaccagtttaagaaggcactatataatagtcagtctgccacatcccaaaacgcaacacacaagctaaaataaagcaagcaccagaactcttttttccccaaactcgcaagtcgcaacggccatgtctccgctgcccaagtacggcctcccgaaggggctcatcccggactccgtcacctcctacagcttcgacgaggccacgggcgccttcgagatccacctcgccagcacctgctacgtccacttcggctcccacctcgtctactacgagaggaccataaccggcaagctctccaggggcgccatctcggacctctccggcgtccaggccaagaagctcttcctctgggtctacgtcacggggatggtcgcgcaccccgaccagggcaccatcgagttccaggccggcttcgtctcggagtcgctatcagcctccatgtttgacgaggtgcgcacctgcggttccagcgctggcgcgcagctgcgcggcgcggctggggtcatcggagagcttgggctgctccccgttgcgcaggcatgaacctcgagtttgagaatccacgctaccagagaaccgcaagagcttccagtctgctgtcgttctagagtgcaggacgttcagctgtggggtgtgttcgagtatctggttgttgcttcccggtctcaatggacatggatgctctgtagaaatgtatatcccatacgctgttgctgaacctgcgtaggatgtaggcaggctggctctcttctctcttgttttcctggatcatcgtatattcatgtcatcatcatgtgtgcaaccatgaactgcccccagaggcgtagcagcacgaattcgactag

SEQ ID NO: 95719 - DNA, 2476 bp, Zea Mays
gctcctccccggaccgccccactcgtgtggaaggccaaaccggcaagtgaaggcgaacttgcgaaagccagaagtaggacgaaacggaggcgcaccgcaccgcagctagcccacgccaccacctcctccagacctccacctcattctctcccaccaccacctccaccacaaagttcgcgttgcgccgcgcccggccccgcccagccgcgcggctcgtctcgtctcgtccctcttcgaaatcctcccacgcaatcgcctccccgcacccctgcccgtgtgacgcggcctcgcactgccaccgccccccaccccggtcccccggggcgccgatctcgtgtcgcgtcgcccgggcgaggaggaggtgggaggatgggggcgtgcgtgtcgcggcccagcgcgtgcgtgggcaagccccactcgccgcggtccggcgatgccagcggccgctcgggcggcgggggtgggacgcggcggaggcgcagccgccgcgtagggaaggggcggaggacggcgccgtcgcgcgccgcgtcgatggaaaccattcaggaggccgaggtgcccggctcgccgtccgccgccgccgccgccgccgatcaccggacgtacagcaaccccgcgttccaagtgtccgggagcattgaggaggactggtacgattccttggcgatgagcgagtcggatgccgaagacgatttccacagcgtgcaagatgatgctttctcattgaatggcttcgagaatgaagctgcattgagcatgaaagatggcaacggtgggagcttcaatggagctgcgcaatcaggcgagcagcaccataaaaagccaaagtccagcgaactgtcgaaggggagctcggagaatggtgtaaggacgtccattagccatgaagatgcggtgagtgtttctggtgcggataccacgcacggtggaggtaggatactggacaattgcgggcttctgccgaataattgtctgccatgcattgcctctgctgttggggtgaacgagaagaagagaactccctcgagccctactcattcaatgaagatgccttctttgaagctttccttcaagaagaagtcaggggaagctcatccatcttccacactactatcaacgaaggatttcctggaaaggcctctagcaggttctcaagtacagttatgcttgctggaaacaaatacgctcaacagttggtctcgtattgatcctggtacattccgggtccgtggagcaaactattttagggataagaagaaagagcttgctccaaattatgctgcatattatccatttggagtcgatgtgtacttatcaccacagaaactcaatcatatatctcgatttgtccaacttcctgacattcaactctccagcaagctcccacctcttttggtggtcaatgtacaggtcccattatatccggcttcattatttcagaatgaaacagatggggaagggatgagctttgttttgtactttaggctttctgatggttactcgaaagagcttccacattcattcattgaaagtatcagaaggctggttgatgatcatgtagagaagataaaagcattcccaatggaaacaactataccattccgagagcggctgaagatacttggccgggtggctaatctggaggatcttcctttgagtgcagcggagaggaagctaatgcatgcctataatgagaagcctgtcctttctagaccacagcatgagttttacctgagtgataactacttcgagatcgacattgacatgcacagatttagctacatctcaaggaaaggttttgaaacatttttggacaggctaaaagcatgcgttttagatgttgggctgacaattcagggaaataaagctgaagagctgcccgagcagatcttatgctgtgttaggttaaatgggatagattacaccaaatatcagcctcttttgactcacggtgcctgaaatcaaggcttacaggaatcacctaacctttaatttggatgctgtgaggtaaccataactggaccagactcctggaaatttcagaccagagccgctgtcgactatcacagcttctgccgaaacgccatcgtccgagcttagttcacacaagtaacattaacagagggtcaatcactcagtgaccattggctaatatagttgaatccgtggtgctgtgctagtatagccgtttctttctgcaaacgtggagaaaaaaaggtgggagactgcggtacatgtaaatgtgtaaatcattgctggatagcttcggttgcctccggcggcagattcagggaaaaaattaggagctgaacaaaaacagtacagcgtgattgatcgctttgctcggctgcgatgtggagccaggacacattgatttggtacaagcatatgtgattgactgattggtttggccgtatgcaatgagccagactgacagggaacgatgtgatgtttggttgactggattaataagatg

SEQ ID NO: 95720 - DNA, 301 bp, Zea Mays
ttcctgtagttccctgccttcgagtcttcgacggccgaaaaggaattgtgtgaaccttgaacgagctggaacaccgccattgttactctctctacacgcgatgtagctaatcaagctgttatctcatttctacatctgtcgacgtttcatcttgtgggttgtgcataaacatgttgagaacatgtagcaaatatgatgaagttgcttgtttcatcatttggtcggaagcttaaagcagtaccgcagaaaaatgaaacaatctttttcagcagtaaataaagatgggaaaagggaagtttgc

SEQ ID NO: 95721 - DNA, 138 bp, Zea Mays
atttatttattcaaggtttggtttagattggtcatatttgccttgtagtgagatgtgtcaagagcagctaacgcagagtagtgagatgtgtctggcatgtggacttcaaacaaaagttgagctttttaaatacttcct

SEQ ID NO: 95722 - DNA, 757 bp, Zea Mays
gtggaattggaacccaggcccgcacagcaagcccatttgccggcacctacccaggctccccgcctacccatacttatacacgttatgacgccccaccgaagcggagaaaaaaaaacgtgctgtcttcccgtctcttcccaatgcggcgtctcgctctcctcttcctcctgcctctcctcctcgccaccggcgtcaccacggcgtcagcggagcccgcgacccctcccgcctctcctcctcctcctcctcctcctcctcctcctcctcctcctccaccgcctccgccgaccctcgccgagctcctcccgaagtacggcctgcccccgggcatcttcccctcgaccgtcaccgccttctcgctcgccagcaacggcagcctcaccgtcgacctcgcggggccctgctacgtacacttcgagtatctcacctacttcgagccccacatcacgggggtgctccgctacggctccctctccgacctccagggcatccaggtccgccgcttcctcatctggttcaacgtcatccgcatcaaggtcgacctacccccgcctccgcgctacgtctacctcgacatcgggtggatcacgcgcaagctccctgctgcggacttccagtcgctccacgcctgcgaggactccaggaggtgccgcctcacctccgcgcttgccgtcgccgccaaatggttccaggacttctttgcccaattttaggggatggggaaggcctacgatttgacaacagcagtggatgaggt

SEQ ID NO: 95723 - DNA, 1128 bp, Zea Mays
caatccatctctcactactacatacataagtacatataaccaactaggcttgatcgatctctcgacagcaaatagctagcaataatggagaagtacaccaaagccctagcgtcattgctcaccatgctggtgctggcacctctcctcgccatggccaccgacccagaccccctgcaggacttctgcgtcgccgacctcaacggcaagccatcagtgaacgggtacccatgccagccgccgtcgtcggccggcgaccagttcctcttctcgaccaagatcgccacgggaggcgaccccctggccaacccgaacggctccaacgtgacggagctggacgtttccgagtggcccggcgtgaacacgctgggcgtgtccatgaaccgcgtcgacttcgcgcccggcggcaccaacccgccccacgtccacccgcgcgccaccgaggtcgggctcgtcacccgcggcgagctcctcgtgggcatcgtcggcagcctcgactccgggaacaggtactactccaaggtagtccgcgccggggagacgttcgtcatcccgcgcggcctcgtgcacttccagttcaacgtcggcaaggaggacgccaccatggtggtgtcgttcaacagccagaaaccgggcatcatcttcgtgcccctcacgctgttcggctcctctccgccgatccccacgccggtgctctccaaggcgctacgggtggacgccagtgtcgtggatctcatcaagtccaagttcaccggtgggtactgagactgagacccagcatgcatcttgttagcgcactgtgcatgcgccgacaatggctttgcgtgatatttctcgttacggaatgggcgacgtcgtggagatccgcaacagtttgatacgccaggaaaataaaataatgtgcgtcagagcacgtataataagctatattactatcgttaagattcagtcgtaataaaaagtaaagattattcttgcttctgtgttcactgcctagctagtctccgggtcaaatgtatttgctcatttacttcaaaaaaatgtatttgctcattttacatgtaataataagaatggatctatatatatatgtctgccttttcagtgtgtttcattaaaaatataagaaac

SEQ ID NO: 95724 - DNA, 2877 bp, Zea Mays
cgtctccgaggatcgcttcggtgcttcctctcttcttctctcttcggtcgccgcagctgatccaccgttggctggtgtcgtctgtccagagattcgtgttcacgatgaggtcgctccagggcgcgctcatcatcgccggcgtcttccaggccgtcgtcggcttcttcggcatatggagagtctttattaggttcctgagccccctcgcggcggtccccttcgtcacgctcacgggcctgggactcttcttcttcgcgttccccggggtcaccaagtgcatcgaagtgggtctccccgcccttgtcctcctggtgatcttcgcagagtacgcctcccacgtgttcgctaaggggagcttcgtgttcagccggtgcgccgtgctggtgaccgtcgtgatcatctggatctacgccgagatcctgacggcggccggcgcctacaacgagaggggccctgtgacgcagttcagctgccgcgccgaccgctccgggatcatccagggctcaccttgggtgaggtttccttatccgttccagtggggataccccattttctgcttccaggattgcttcgccatgctggcggcttcttttgcgtcgcttattgagtctaccggcaccttaatcgcagtgtcaagatactcaggcgcgacgttctgcccaccctccgtcttctcacgtggaattggctgggagggtatatctatcatactggacgggatgtgcggtacactgacaggaacagcggcttcagttgagaatgcaggtctactggcagtgacgcgagttggaagccggcgagtcattaagatctcagccttgttcatgattttcttctccttgtttgccaaatttggggcggttcttgcatccattccattgcctattttcgctgcactgtactgcgtcctcttcgcttattcagctggtgcaggcttcagcttactccagtactgcaacctcaactccttgaggacaaagttcatactcagcatctcgttgttcctggggctgtccatcccacagtacttccgggtctacgagatgttcttcggcttcggaccagttcacacccattcagtagcgttcaacgtgatggtcaatgtcatcttctcatcgccggcgacggtggccgccatactggcctaccttctggactgcacccacctgtactgggaggctagtgtgaagaaggacaggggctggttctggtgggagaagttcaagtcctacaagtatgatggcaggagcgaggagttctaccgtcttccttatggcttgagcaggtacttcccctcgctctaggacgccgggaggaagacgacggacccaagttctatgtagctgctcgagcgtagaagctgaacatcagttgaaggcaacagaaccatatgttattttcatatatcaagcagttgggagggagcttgatgttttgatttaccttgtaaaacattttggatgataaacttttgcaattactgggagagtaggatcaaccaggggagaattctgcaacaattcagtcaccgtttttgcttcagattcgaaacagaacacagatgccttcacaggcttcgattattttcccacatcatccatgcacaagtcaagcgtgagttcgctaaagcaaaagcatagtcaagttactacccgagtggagtggcaatccgattatttgtcctcgccgctggaggatggtccagccaccgctgccttgggcacccacacaagcccgtgcggctgtgcagccctaatgccgcgggggcgccagggttgagccgacctcctcgcaatccgtggattcggcccggtcacggcctggacctccaccaccggttgccggcgctgcccttcgactaggccctctggcttcgcctccatggtcttgcggagcatgccaccgctcttcgatttgctcctgccatcggcgggcgaggtggaagggttcagagccggggccggggccggggacggggccggagccttcccatcaggagaatcgctgcctgtcccggcgtctgcgagcctgggcgctgcaggtttcggtttccccgcgttgcccgacttgacgcctcgcggcagcgacggaccggccgtcttcaccttcaccggaccatcgccccggctcgtctctgcgctccggttacccgcgcctttccccttcctccccttgcaggtcaggtggcccggggatgatgccacggccgccttggccggatcgagtggcgcaaccgaggccttccccatcgccttgagttcgctcttgatgtccaccttgccgccgttcgatgttggaggagctgcctcggccagattacctggctcgcccttcttattccccttcctcttccccttccgcgggtacttgcgtccgccacggggatggggtgcactgtccgcgacatcgtccagccccttcttgccacggctacctcctaccatccattccctcttccctgccgcaacttccccgcacgtcggcggcgctcgatgcaccacggccacccaccggtggccctgccccccatgctgcctatccttggccccacagaaggcctcgcgcgagaccgatcgtcccttagtctctgccttcagcgccgcctcccgcttaaccgcggcggccatggcctcctcctccgcccttagcgccgcctcccgcttaaccgcggcggccatggctgcggcggcctcctcctcccgctgccgcttctcctcctcctcctccttctctttgaggcgaagctcaaggagctgctggaggctgacgtagttgggagggatggaaggcggctcccgcctcgacttggcgatcggcgccgccttcatcgcttctcccctctcggtgatgggccttggacaggaaggaaaaagagta

SEQ ID NO: 95725 - DNA, 3317 bp, Zea Mays
ccccgaccgcttcttcgcaaacctccccctctcccatcgacttcctccgtcgtccgtcgcactgccacggatcaccctcttccttcgtcttcctccacaaaacctacagcgctggtgcgccgaggagctagctagctagcccggccggccggccggcgccatgcctcccgtgaaggccgaggacctggttgtgcacgccgtcaaggagcagttcgccggcctcgactactgcatcaccagccccccgccatggatcacgacggtgctcgttggcttccagcactacctggtcatgctcggcaccaccgtcctcatcgccaccatcatcgtcccgctcatgggcggcggccatgccgagaaggcgatcgtgatccagaccatcctgttcctctccgggatcaacacgctgctgcaggtccacttcggcacgcggctccccgccgtgatgagcggctcctacacctacatctacccggccgtggccatcatcctgagcccgcgatacgcgctcctcatcgaccctctcgagagattcgtgttcacgatgaggtcgctccagggcgcgctcatcatcgccggcgtcttccaggccgtcgtcggcttcttcggcatatggagagtctttattaggttcctgagccccctcgcggcggtccccttcgtcacgctcacgggcctgggactcttcttcttcgcgttccccggggtcaccaagtgcatcgaagtgggtctccccgcccttgtcctcctggtgatcttcgcagagtacgcctcccacgtgttcgctaaggggagcttcgtgttcagccggtgcgccgtgctggtgaccgtcgtgatcatctggatctacgccgagatcctgacggcggccggcgcctacaacgagaggggccctgtgacgcagttcagctgccgcgccgaccgctccgggatcatccagggctcaccttgggtgaggtttccttatccgttccagtggggataccccattttctgcttccaggattgcttcgccatgctggcggcttcttttgcgtcgcttattgagtctaccggcaccttaatcgcagtgtcaagatactcaggcgcgacgttctgcccaccctccgtcttctcacgtggaattggctgggagggtatatctatcatactggacgggatgtgcggtacactgacaggaacagcggcttcagttgagaatgcaggtctactggcagtgacgcgagttggaagccggcgagtcattaagatctcagccttgttcatgattttcttctccttgtttgccaaatttggggcggttcttgcatccattccattgcctattttcgctgcactgtactgcgtcctcttcgcttattcagctggtgcaggcttcagcttactccagtactgcaacctcaactccttgaggacaaagttcatactcagcatctcgttgttcctggggctgtccatcccacagtacttccgggtctacgagatgttcttcggcttcggaccagttcacacccattcagtagcgttcaacgtgatggtcaatgtcatcttctcatcgccggcgacggtggccgccatactggcctaccttctggactgcacccacctgtactgggaggctagtgtgaagaaggacaggggctggttctggtgggagaagttcaagtcctacaagtatgatggcaggagcgaggagttctaccgtcttccttatggcttgagcaggtacttcccctcgctctaggacgccgggaggaagacgacggacccaagttctatgtagctgctcgagcgtagaagctgaacatcagttgaaggcaacagaaccatatgttattttcatatatcaagcagttgggagggagcttgatgttttgatttaccttgtaaaacattttggatgataaacttttgcaattactgggagagtaggatcaaccaggggagaattctgcaacaattcagtcaccgtttttgcttcagattcgaaacagaacacagatgccttcacaggcttcgattattttcccacatcatccatgcacaagtcaagcgtgagttcgctaaagcaaaagcatagtcaagttactacccgagtggagtggcaatccgattatttgtcctcgccgctggaggatggtccagccaccgctgccttgggcacccacacaagcccgtgcggctgtgcagccctaatgccgcgggggcgccagggttgagccgacctcctcgcaatccgtggattcggcccggtcacggcctggacctccaccaccggttgccggcgctgcccttcgactaggccctctggcttcgcctccatggtcttgcggagcatgccaccgctcttcgatttgctcctgccatcggcgggcgaggtggaagggttcagagccggggccggggccggggacggggccggagccttcccatcaggagaatcgctgcctgtcccggcgtctgcgagcctgggcgctgcaggtttcggtttccccgcgttgcccgacttgacgcctcgcggcagcgacggaccggccgtcttcaccttcaccggaccatcgccccggctcgtctctgcgctccggttacccgcgcctttccccttcctccccttgcaggtcaggtggcccggggatgatgccacggccgccttggccggatcgagtggcgcaaccgaggccttccccatcgccttgagttcgctcttgatgtccaccttgccgccgttcgatgttggaggagctgcctcggccagattacctggctcgcccttcttattccccttcctcttccccttccgcgggtacttgcgtccgccacggggatggggtgcactgtccgcgacatcgtccagccccttcttgccacggctacctcctaccatccattccctcttccctgccgcaacttccccgcacgtcggcggcgctcgatgcaccacggccacccaccggtggccctgccccccatgctgcctatccttggccccacagaaggcctcgcgcgagaccgatcgtcccttagtctctgccttcagcgccgcctcccgcttaaccgcggcggccatggcctcctcctccgcccttagcgccgcctcccgcttaaccgcggcggccatggctgcggcggcctcctcctcccgctgccgcttctcctcctcctcctccttctctttgaggcgaagctcaaggagctgctggaggctgacgtagttgggagggatggaaggcggctcccgcctcgacttggcgatcggcgccgccttcatcgcttctcccctctcggtgatgggccttggacaggaaggaaaaagagta

SEQ ID NO: 95726 - DNA, 681 bp, Zea Mays
accgacgacgaccaccaccatggcagccgccttccttgtgcacctctacctccgcagttgtggcctccctccggtgcctcctcacagccccctccaccggcctcatcctctcgtccccatctgactcctctgcctctctcccagtcctcttgccttctccgtcccccgaggggatgatgcttctaaggtttaaagcgtctcgattgacttgtagggcttttgttaagggttgaggctgggagtatgagatggagttccatggattggtgctccaaggtatcaaatgatgtcattagagactgatctgaacacactccctatgattccaaacatcccagagaaggttttttcaagtgatgctaagagtactgaaggttatctctattaacccttgataattacaatctgatcagcataagaggaatactggcttgtagttgactttctctgcgaactgttcggcactgatgaattactgtaggtattgtgtgtgacagttcactttttattgtcacctttatgactctgttcatactcttatgacagtggtcatatcaaccagaacttatcaaggaagtgtgaaacattagctgtgtcaggtttggcagaatatggtgatgaaatagatgtgattgccccacctgatatcatgaagcagattttaaaaattccatactccaa

SEQ ID NO: 95727 - DNA, 695 bp, Zea Mays
tgtgctatacatcccgaatccgacgctccatcgagtgtgtgcggcggcgggaggagacggaagagaacgatgcaggcggtggcacgggcgcgtgggcttgcggctgcggctgtggctgcgcggccgtcggcgatggaggcagggcaccgcgggcaggtgcagcaagcccggggcattgtggtgcaggtgagggacgggaacctggagcgggcgctggcggtcatggagcgcaagatgaggtccagcggcatggagcgccttatccgagcgcgcacccactaccacgtgaaagactcggagaagcgcgtgctcgcgcgtaaggcgcttatgcagcgcgtccggtcccaggagctcggcaagaagctccgcgagatcctcatcaagaaaatcaggggccagtgaggacatcagcgcattggccatttacgggcagcatctgtgtgggtgctccctttttgagcgtgtggagaataaactcaactgcgaccttgagcaagagaacttttgctatattgcatgaaggacagattgagaataaaactagtttttggcgaacgaactattgtattttattgtacaatttagtatctatatatggatttaactgctgtttgtgctggacttagagcctttttgtttgggattataatatgttcagattatataatctaacttatatcaagagaacttttgct

SEQ ID NO: 95728 - DNA, 523 bp, Zea Mays
atgatgtataggaacaaccgaacaaggacttacatggttcaagatattgttcagcagcacccataagaaaattcagtcacgaaactaatggaccgccaagcagcttcggaggtaaacatgaggccccaacataacctctcataaaacagtcagttttccctacagcaatttcacaccaacacctcttagagaatctatcacggccttgaccttgccatggtacttctggtctcttgacatggagacagatactgcagggatacccttgaacagcaagcgctctccaagcaacttcccaatctttgcagccgcagcaacatcccgtgtcgactccatgcttggcctcaggagtttctcctgagagcttgcagagcatgcgaccgtggctgtcggtgtgtggatgacctgagcgctcacaaaactgtttgtgaaatgcatcttcaaaatatacggcttgaggaacttggtgattgcaggagccctagctggtggagggataaccatattgcctaatcaagctgac

SEQ ID NO: 95729 - DNA, 4755 bp, Zea Mays
ctgaactgtatcagcaaaaagatattccttgcatggacataagattactatttgacaagcctggtgtcatctgttacataccacaatgtactcgttgctaaaaccacttgatctttggctgcctcctttattcctcttgatgctgttcacgttgacaagtgtctcttcatcaaacttgcccctctcctcaattgaaagctgattgaaacgtttctcaccatcatccacgctacgtttcacatccacctttttagaacaataaatgtgattaataggcattgaagtgagaaatttactgaattccaaacctttatgaccctgccactaaaggcatgataaggcgctcatgcatgaagtattgatttgacttacaacctaaaaaggactttatgaccatttcatcgctggtgaaataggcatgtaaatgaaaaggttgttttgtatttttctaggagttgtgcataacattacattgcaggacaagtcatagagttacacatttagatggaaacaagaaacaaactgcaatctgctaaataagctaaagaatacaaattaaagcaataggtgggcttaccgaagagtaagctgagatacaacaatccggatgccgaagtaatgctaatgttgtctctatagaacagcataacaactaaacaatcagaatgatttcaaggtaatagcagaatggtcataagcgttacagaaacagtatatctatacagtttatttccaagaaaattatgatgcataatgtgattacactttaaagcaacagtagaactatagtcaagattattgattttgtataaggtaacatgcgttctagcccaaaatagagaccgtaaaaacaaagaagcagcactgtaatggattgtcacagatagaaattgtgaccagtaaagtatgaaagtgatccttaaccagcaataagggcgaacaaggcccaatgagaaatgaaaggaaccaaaacatatcagaacagaaggccaacattaggtacattacttcaactaaaagcaacacaacccaatgagacccaatccatccaatgtttaatcttgatggttatcctcaacaaccgcagtgttccaagttcaggtttcccctgttttgctctaatgtggtgtgtgatgcatactagttgatggggattggtaatataacaccgcggttgttgataactgagctgtggcagcagctgtgcagcagccaaccagcagaggcagcagcagcagcttaaatgtgaagtagtatgaagtagtaaaatcaaacagcatgtagatttttgttttacctgtcaacacatagctcaagccagccggagtagatgtatctgctttctcagctatttggtcaagctccttctgaaatgatcgtgccatgcccagcaagccaacctacgaacaatgttaacgtattagaatgctttaagtggatgcctacataatacttgtcatcagaattctacatcacggtaccagagagaatcggagagaaagagagaggggcgtaggcctgtaaccgctgcaatagagcactggcatgacggtatgcacacacgcgatatagagaggttcgtaccgcctaaacgtactacactacatcctctatgctgtcaatgtatagctgtaagtgtgggcagagcttacatactcagatgatactgggaacctacaaactatggactcaggtttcggggtctgaactcaggtgtgagcctttgaacgctagttgtcagccctgctgtagcccagtgtccccagtagttcaaggtgtgccgtagcgacctgtttctatgtagctctacccctccttttatagcacaagggaggaatgagttatattcctgcctggacgatggtccccgcctagctgaggttcaattactcccatcctgtcatagtcattgtaacatacacggtgcgcgcctccggtgtgccacaatgacatgtatgggagctcacgccattgagtacaacgtagttgatagctgcacacactgcatattgcttgcaggtaagcctacggccacatgtgtggctatagtgatgtcccatgctgttaagtacaatgtagttggtagcattatagccgcacatactacatagtgctcgagagtacgtctgcggccttagtcgtggctaaagagacgtcttttgaccacaacattgcccctcgcaataaatgcgaaggacaagagccttatctcaaccacccaatgttgcacgaccggcctggtcgatggcacatgtggtgccgaggccgtgccgcctgggtcgtcctgcctcgggggtagggctggaaacgagccgagccaagctcggtgcggctcgttggctaactgaaaatggctcggctcggcttgtccactaaacgagctaaaggaggctcggctcgaagttggctcacaagctggctcggctcgcgagctgcacattgataaataacattgcattatatagtgatttaatagtatataaatgtgaaaaatacaatcatcattcaacattataagtaaaattatccaatattcatcattattctatagtttgattaatttggcacagctcgcgagccagaatgagttggcacggctcgactcgacttgctggaccaacaagctcgaaaacctggctcggcttggctcgcgagccactccaagccgagccgagccgccctgatctcgagctgtttcgtgagcctcgagcttttttccagccctacttgagggcgtcttagggagagccggggggccctcttgcataaagccctcatcttgtaggggggcagggcctaaccaacacagggttggcccttgaggcacagagtcctaaggatgtcaggctggcaccagccacgcccactatgggtctatcttctgctgatagtcttggatggtgttttgtcaacatcttagggtatgccttctcctagacactgatagtggccctcaggcccaccgcaggcctaaggaggcctataggtgggaccattctttccataaacacttgatagaatgggttcgttgtgcgcgcgggggatatcgtgcgcttcaaccgccttaactcgtagtcgaagcatcaaacagtagtcatgctacacacctctccagttgcaagaatcgtgcgacacttcgagcattgtgcccaacaattgtgacagagggacgcctttaaatacgggtgtgtggttccatattttcctccattacttcgcacaatcaaccgcactcgtcaacgagtgttctctctcccgccgccatccccaacgaattttggctgtcccgtcgctccagtcgaacgcgccatggccactaccaccgcattgaagtcgttgttgagcacgtggatcttgaaccaggaggggatgaacgagtggtggtgttcacactatttgggggctgccatcgaggccacaattggtgtccttgtagcgatagtaggcgcgggcttgaggtctgctggtgatgagacgaatgtcgaggagtcgtcgaaaacagtcctggttggcgctaccggggatgcatctgcgagagctgacagacccgcaaatgaggaccctccctatccaaacgctgaaacgcatcagcgccataggagatatgaagggggcttgcatagagtaaaaaacactcgttcaaatgtgacgtctaatgtgggagaccctttcagtgggagaccctcgttcaaatgtgggagtaattggagccaggcgtccaggagtcccacatggtatcgacgagtatgagagtccacgtggttgagtacgacgtagttggtagtcattgaagctgcacgcactgcacaatgcttgcggatacgcctatggactcacacgtggctataatgacgccccacatcgtcaagcccgttgtagccgcgcagactgcatagtgctcacgtttacgccttaagcgtggctatagtgatgtcttctgaccaacatcgccccagtaataaatacgaaggacgagagtcttatctcttatctcaaccactcagcgtcgcacgaccgacccagttgaaggcgcacatggtgccgaggccattgccgctcgagggcattctgatgagagtcgggggctcctgcgcagagcctctagcttgtagggtactgggatctgatcggtatgatgcttggcccccgaggcgtaggaccccgaagattataggctagcaccaaaccgggctcattgtgtgtctgactatgttgctggagccttgaaggacgttttactaagagaggcatgccttccttggacgctgacactactaataatgaaatgaatataagcatgccttatttttgtacatctaggtacattgcgtaaatatcatgatttaaaaaggcaataatagcaagcagcgattacttcgttaagctcaagtatataaatatatcctacaaataaaatatccgtgcaacgaattcgctattcacatccagtcactaatatggattgtaggcaacgtatctgttatctggtgtactaaccataagaccaagatcagttgcaatgctatttaagcaatggcttaaaccaagcatgttaaaatggtatggcaggtcatgacaagtactgaaataggaaatgtaacagcagcttacatgtgtactactgtttcctgctaactgagaaataggaaatgtaacagcagtttacatatgtaccactactattttctgctagccattgaagtggttatggtaagtgacccgtgcaaatgtcaatgtatcccccaaagcaacagc

SEQ ID NO: 95730 - DNA, 1271 bp, Zea Mays
cgtcacactgctgcgaaggacaccaggcccgccgaaaattgtgtgaacgcccctttcttctaccccaagacgaactcggtgaactctttccggttcgttcccctacgcccgtttctctctcgtcgcgcaacatcagagcacaagcgaggaacccagtccagtcccgggaatggagtgcgtattgggcgtggttggccgcgacttcgcgctggtggcggccgacacctccgccgtgcagagtattctcgtccacaagaccgacgaggacaaggtgatggtgctcgactcgcaaaagctgatgggcgcttcaggggagcctggtgatcgggtgcaatttacggagttcatacagaagaacctccacctgtaccagttccggaacaccatcccgctctcaaccgccgccgccgccaacttcacacgcggcgaactcgccacagcccttcgcaagaatccatatatggtcaatattattcttggtggttatgataaggatgttggtgcttccctctactacatcgactacattgcaaccttgcacaaaattgacaaagtagatcttgttgacaagtgcatcaaggagattcggctgcgattggttgtcgcgcctcagaactttgttatcaagattgttgacaaggacggggcgagggagtacgccaggcgtgaactcgtcggtgacaatgcacctgctgaagctgcaaccgcagttgttgctgcctgaggcatgaactcgtttgaggttggaatgtgttagttgtttctcagcgatgctacttatgcgatcacaggatactggtggggggcccacaactgttttatcaattttagcccagtcgtgtaattctgtttctgcactattcatgtctgctgagtacaagtagtgtttcacgcttgaacaaatacaatactgttgctgtgcaccttttctgatcactgaaatggccggcgacccaggccgttacaagcaggccatggcccgttactaggtagtctattttctttgccaaactcgcttatctttatctgtctgctcatataatcaacgtttttgcgctttttcttcattgttatttgactattaccttctgcttttaaacttcctgttggagttccactaggcgtcgggcgtccaacgcgtggagatgaaacaaaacgctctcaacgaagtttcactggcattcattggaaacgatgtgcgctaggtttcgtcagataaaataaaacctacatcccctctctaaccattcttatgccatgttatttttttt

SEQ ID NO: 95731 - DNA, 1352 bp, Zea Mays
cgtcacactgctgcgaaggacaccaggcccgccgaaaattgtgtgaacgcccctttcttctaccccaagacgaactcggtgaactctttccggttcgttcccctacgcccgtttctctctcgtcgcgcaacatcagagcacaagcgaggaacccagtccagtcccgggaatggagtgcgtattgggcgtggttggccgcgacttcgcgctggtggcggccgacacctccgccgtgcagagtattctcgtccacaagaccgacgaggacaaggtgatggtgctcgactcgcaaaagctgatgggcgcttcaggggagcctggtgatcgggtgcaatttacggagttcatacagaagaacctccacctgtaccagttccggaacaccatcccgctctcaaccgccgccgccgccaacttcacacgcggcgaactcgccacagcccttcgcaagaatccatatatggtcaatattattcttggtggttatgataaggatgttggtgcttccctctactacatcgactacattgcaaccttgcacaaaattgacaaaggtgcttttgggtacggatcatacttctgtttgtctcttatggacaagttgtaccacccggacatgactgttgaggaagcagtagatcttgttgacaagtgcatcaaggagattcggctgcgattggttgtcgcgcctcagaactttgttatcaagattgttgacaaggacggggcgagggagtacgccaggcgtgaactcgtcggtgacaatgcacctgctgaagctgcaaccgcagttgttgctgcctgaggcatgaactcgtttgaggttggaatgtgttagttgtttctcagcgatgctacttatgcgatcacaggatactggtggggggcccacaactgttttatcaattttagcccagtcgtgtaattctgtttctgcactattcatgtctgctgagtacaagtagtgtttcacgcttgaacaaatacaatactgttgctgtgcaccttttctgatcactgaaatggccggcgacccaggccgttacaagcaggccatggcccgttactaggtagtctattttctttgccaaactcgcttatctttatctgtctgctcatataatcaacgtttttgcgctttttcttcattgttatttgactattaccttctgcttttaaacttcctgttggagttccactaggcgtcgggcgtccaacgcgtggagatgaaacaaaacgctctcaacgaagtttcactggcattcattggaaacgatgtgcgctaggtttcgtcagataaaataaaacctacatcccctctctaaccattcttatgccatgttatttttttt

SEQ ID NO: 95732 - DNA, 595 bp, Zea Mays
cgtcacactgctgcgaaggacaccaggcccgccgaaaattgtgtgaacgcccctttcttctaccccaagacgaactcggtgaactctttccggttcgttcccctacgcccgtttctctctcgtcgcgcaacatcagagcacaagcgaggaacccagtccagtcccgggaatggagtgcgtattgggcgtggttggccgcgacttcgcgctggtggcggccgacacctccgccgtgcagagtattctcgtccacaagaccgacgaggacaaggtgatggtgctcgactcgcaaaagctgatgggcgcttcaggggagcctggtgatcgggtgcaatttacggagttcatacagaagaacctccacctgtaccagttccggaacaccatcccgctctcaaccgccgccgccgccaacttcacacgcggcgaactcgccacagcccttcgcaagaatccatatatggtcaatattattcttggtggttatgataaggatgttggtgcttccctctactacatcgactacattgcaaccttgcacaaaattgacaaagtagatcttgttgacaagtgcatcaaggagattcggctgcga

SEQ ID NO: 95733 - DNA, 824 bp, Zea Mays
ctttcttctaccccaagacgaactcggtgaactctttccggttcgttcccctacgcccgtttctctctcgtcgcgcaacatcagagcacaagcgaggaacccagtccagtcccgggaatggagtgcgtattgggcgtggttggccgcgacttcgcgctggtggcggccgacacctccgccgtgcagagtattctcgtccacaagaccgacgaggacaaggtgatggtgctcgactcgcaaaagctgatgggcgcttcaggggagcctggtgatcgggtgcaatttacggagttcatacagaagaacctccacctgtaccagttccggaacaccatcccgctctcaaccgccgccgccgccaacttcacacgcggcgaactcgccacagcccttcgcaaggtactaatccgaattaatcttgtttctctctttgtgcgatttgggcgttccaaggttccattggatggatattattaaatggcgttcaatttttttagtcgagagtgattacataccaagtttaatctgtgattggggctgatttcattaagcaaggggcacgaaacttggggcaaaagacgtgtgtccgagtttctaatctctttagccttttggtttagtggtttgtggatgaactggtttatccctagtcatttactgagttctgtaatcataaaacatcttctaatttcaaacaaaacatcacatggcagctcctaatgaactggtgtgatttattgaattgaatctagaatcttgtaggcttgctaaagattgttttttaatgtctgtagtttataaggccatcacagggtaaatatctc

SEQ ID NO: 95734 - DNA, 1785 bp, Zea Mays
gggcattatttaatcaactcaccctctatataactaaatggcggcgaacgtgtcttcataagaaagggaaacgagtccaaatctttgaagcctgtcttatatctttggtaacatccacgatttcctttgtgttgccactactgaggaaatgcagcccatgccctaagttagaaactaattctggcatagaatgccctcatccacctggcacagatgggaattttgttaacttctattgttcacaagatagagagtacaatgatttagcaaccattttcttcaatactcaggatgatgcaatacgtaatcttttcagtgcaaaaacatttcatgaatacagtgcacaaagcctgatcactttcctggtcatgttttatttcttggctgttgtgacatttggaactgcagttccggctggccagttcgttcccggaataatgattggatctacatatggaaggcttgttggaatgtttgttgtcaagttctataagaaactaaacattgaggagggcacgtatgcactccttggtgctgcatcgtttcttggaggttcaatgagaatgactgtatctttatgtgttatcatggttgagattacaaacaacttgaaactcttgccattgatcatgcttgttcttctggtttctaaggcggttggtgacttttttaatgaagggttatatgaagagcaagcccgattaaggggcatccctttactggattccaggcctaagcaagtcatgagaaatatgaatgcaagggatgcgtgcaagaatcaaaaggttgtctgcctaccacgtgtttcaagggttgttgatatcatttctgttttgcgaactaacaagcataatggtttccctgttgttgaccgtgggcagaatggcgagtcacttgtcataggtctcatacttcgtagccacttattggtacttctacaagctaaagtagatttccagaacagtgctttcccctgtgggccaggcgtactgaacaggcacaattttagtgactttgttaaaccagcatcaagtaaaggaaagtcaattgatgatattcatttgacagaggatgaactggggttgtatttggatcttgccccatttttaaatccttcaccatacatagtgccagaggacatgtcgttggcgaaggtgtacaatctcttccgtcaacttggattgagacatatatttgttgttcctaggccttctcgtgttgtaggattgataaccagaaaagatttattacttgaggaggataacaacaatgtgatgccggagctccaatcgacgagtgtaaggggcttgctgaacggcaaaatgctcgggggtaatatacatctggaacgtcctcttcttgacaacctagttattgaatagacacgtagcagcatgtatgtcaaaataattttgatagctagcagttaaccttgcactgcatgttgggacatggcccatgggtattatacttcacatgaatgatgaagcagcagtgagcggataatgcagcatggttttggattctgccgactgttgcgcatggatgttggcgttgcgcatcattttttgctccgtcagcagtggctagggaggcgattccccggtgccgtgtgtttagattaggtgattgtaacttacaaaggcgtccatacatacacaccatccatgtatcccacggtaaatttcgaagactgtatgtataagtacatatttgttatacgatggtaaagacaaaagctatgtaggatttgcgtgctctcatgaaactatgatacgtggctat

SEQ ID NO: 95735 - DNA, 1696 bp, Zea Mays
gggcattatttaatcaactcaccctctatataactaaatggcggcgaacgtgtcttcataagaaagggaaacgagtccaaatctttgaagcctgtcttatatctttggtaacatccacgatttcctttgtgttgccactactgaggaaatgcagcccatgccctaagttagaaactaattctggcatagaatgccctcatccacctggcacagatgggaattttgttaacttctattgttcacaagatagagagtacaatgatttagcaaccattttcttcaatactcaggatgatgcaatacgtaatcttttcagtgcaaaaacatttcatgaatacagtgcacaaagcctctgcagttccggctggccagttcgttcccggaataatgattggatctacatatggaaggcttgttggaatgtttgttgtcaagttctataagaaactaaacattgaggagggcacgtatgcactccttggtgctgcatcgtttcttggaggttcaatgagaatgactgtatctttatgtgttatcatggttgagattacaaacaacttgaaactcttgccattgatcatgcttgttcttctggtttctaaggcggttggtgacttttttaatgaagggttatatgaagagcaagcccgattaaggggcatccctttactggattccaggcctaagcaagtcatgagaaatatgaatgcaagggatgcgtgcaagaatcaaaaggttgtctgcctaccacgtgtttcaagggttgttgatatcatttctgttttgcgaactaacaagcataatggtttccctgttgttgaccgtgggcagaatggcgagtcacttgtcataggtctcatacttcgtagccacttattggtacttctacaagctaaagtagatttccagaacagtgctttcccctgtgggccaggcgtactgaacaggcacaattttagtgactttgttaaaccagcatcaagtaaaggaaagtcaattgatgatattcatttgacagaggatgaactggggttgtatttggatcttgccccatttttaaatccttcaccatacatagtgccagaggacatgtcgttggcgaaggtgtacaatctcttccgtcaacttggattgagacatatatttgttgttcctaggccttctcgtgttgtaggattgataaccagaaaagatttattacttgaggaggataacaacaatgtgatgccggagctccaatcgacgagtgggcttgctgaacggcaaaatgctcgggggtaatatacatctggaacgtcctcttcttgacaacctagttattgaatagacacgtagcagcatgtatgtcaaaataattttgatagctagcagttaaccttgcactgcatgttgggacatggcccatgggtattatacttcacatgaatgatgaagcagcagtgagcggataatgcagcatggttttggattctgccgactgttgcgcatggatgttggcgttgcgcatcattttttgctccgtcagcagtggctagggaggcgattccccggtgccgtgtgtttagattaggtgattgtaacttacaaaggcgtccatacatacacaccatccatgtatcccacggtaaatttcgaagactgtatgtataagtacatatttgttatacgatggtaaagacaaaagctatgtaggatt

SEQ ID NO: 95736 - DNA, 702 bp, Zea Mays
atgtggtctcctcaagcaagctttgaggaggtggatgtggcatggcggcactatgagcaggccggtactggattagctgctatattcataaacctggctgttgagaacttctctggatggaaatatactgcgacatttgctataataaagcactcgtattttgtgggattctttgtgtacacagttttcaatttagccctggtcttctcttctgtatatatagtcacaaactttgctccagcagctgctggatctggtattccagagatcaaaggttacttaaatggagtggatacacatggaatcctccttttcaggacattagttgggaagatctttgggagcattggatcagttggaggtggattggctctagggaaagaagggcctcttgttcatactggggcctgcattgcttcgcttcttggacaaggtggatctgcaaagtaccacttgagttctaggtgggtacggatttttgaaagcgatcgtgataggcgagaccttcttatttttgtttttgaggtttcacaacttgaaattctctggccaagtcatgaagctattgttaaagtgacatgtggatgtgcagctggagttgctgctgccttcagagctcctgttggtggggtactatttgccttggaggaagttacttcctgttattcctttagctgctggcaacaaattcttcagtactaa

SEQ ID NO: 95737 - DNA, 101 bp, Zea Mays
gggaagcgttttttacctaccgtagtaggccgcctgtatgtatttataggagatggaataccatcatcagattacaaaggggctggcgccagcaatcaatc

SEQ ID NO: 95738 - DNA, 246 bp, Zea Mays
atggcgcggctcgcgtggacgcgcctccccaccgccgacggggagggggcgggcccctccacttccgaggccgcggacgacgaactcttatcgggcgctgccatagagagcctcgactacgaggtcatcgagaactacgcgtaccgggaggagcaggcgcagcggagcaagttctgggtgccctactacgtcatgctcaagtggctgttcgctctgctgatcggcgttggtgagcactctgtttga

SEQ ID NO: 95739 - DNA, 180 bp, Zea Mays
atggaggtcgtgaagagctcctcccagggtcggccgtgccgggaccgtaaccgaacaaaatcgcgtacctggagggcagtggcgttggaagggagtcgcggagtcgatgagggtgtggaggtgcacgataccgacgacaaggagcgattgggcgaagttcacagtggggaaatcgcgtga

SEQ ID NO: 95740 - DNA, 1436 bp, Zea Mays
ctctcacggtctccgttcccctgccgacgagtgggcggccgctgccgccggcttacggaaggtgtgatctccatcttcgggacgttcgccaccggagcacccactccttttcttccgttcacgctgtgcgaaacggatcatccaaaaaccagctatttgtatctggatctgatccaatttcaatttgtggttatttctttggcgcactcatgatttagcaccagccaaattgacctttaactctggtgacataagctgttgctagggtagcaaatcaagagctaagaatggcagattcaatggtagcaagcttctgggggcctgtgacatcaacgactgagttgtgcgaggagaattatgcacactcgtcatatatcgcagaattctacaataccatctctaatgtcccatgcgttcttttggcacttattggattagtgaatgctttctgccaaggttttgagaaacgatttagtgtcctgcacatatccaatatgatacttgctattgggagtatgattttccatgccaccttgcaacttctcctacaacagagtgatgagactcctatggtttgggagatccttctctacatgtatgtcctctattcaccggactggcactacaggagcacaatgccaactttcctgttcctgtatggtgctgcctttgccgtagtacatttctttgcccggttccaagtcgtattcaagctgcattacgttggcctctgcttgctctgcatcccccggatgtacaagtactacatacagacgaaagacgtgggtgcgaagcggctcgcaaaactgtgggtccttacactgacccttgggaccctctgctggctggttgatcgcgtcttctgcaagaagctttcgcattggtacgtcaacccgcaggggcacgcgtggtggcacgtgcttatgggcctcaactcgtactatgcaaacacgttcctgatgttctgccgggctcagcagcgcgggtgggagccgcggatcacgcacctccttggattcttgccgtatgtcaaggtccagaaaccagagaagagggaatgatttctgtctctgcttgaaaactgatgatattcagtcggccaccagtaagctaatgcccccaatgtgtgctcagacaagtccgtggcactcttgtatatgggcgcccaaatgattacggacttcaaatgttctgatgtcgcattagattttgtatcatacttaaatcatcgaacagagattgtcctagttttggccacctttcttttggtttcttcgcaattaccgtttggtggtaaattaggactgagttatttatttatttgtttgtcgttgaatggagtccagttgtactagttaccactgcacaagaagatacattcatccacatgatgacatgttaattatttggcttgtgttgctgccaatagacaactc

SEQ ID NO: 95741 - DNA, 2055 bp, Zea Mays
catacctctcacggtctccgttcccctgccgacgagtgggcggccgctgccgccggcttacggaaggtgtgatctccatcttcgggacgttcgccaccggagcacccactccttttcttccgttcacgctgtgcgaaacggatcatccaaaaaccagctatttgtatctggatctgatccaatttcaatttgtggtatacatgtattgtgtctacaaactatttttcgtttgtttttttgcaaaaatatttttcgtttgtctacaaacaatttcaattgtagtacacccatgtcctttacccgtgcacacccttgcgctgcctgctgcggttatcccatatttgttgtggagcgtgtgccgggggaatttggtttggatgtggttgggatcgaggtatactctagattagggttcgaagttctcatatgacctgtgtgatgtggtagattcgatgttagagtgtcgatgaaagttgtctctgagtttagttttgcacatgagtattgaatatttgcaggtgtttctctgagtttacttctacacatgtcaattattgagtattggtaggtatgattgtctatctcttgctaaggaaattgtttaggtgttctatgatagtgtttgactttagattgcctattttgaagggacactttcagcgacagtatttaatttggtgtgttgccagaagacctggctctgaattatctttctatttctttgattatcacagggaactctactaatagtatgctggattagcacgattaaactgaagtatgacaaatttgcatatcatccttgcaggttatttctttggcgcactcatgatttagcaccagccaaattgacctttaactctggtgacataagctgttgctagggtagcaaatcaagagctaagaatggcagattcaatggtagcaagcttctgggggcctgtgacatcaacgactgagttgtgcgaggagaattatgcacactcgtcatatatcgcagaattctacaataccatctctaatgtcccatgcgttcttttggcacttattggattagtgaatgctttctgccaaggttttgagaaacgatttagtgtcctgcacatatccaatatgatacttgctattgggagtatgattttccatgccaccttgcaacttctcctacaacagagtgatgagactcctatggtttgggagatccttctctacatgtatgtcctctattcaccggactggcactacaggagcacaatgccaactttcctgttcctgtatggtgctgcctttgccgtagtacatttctttgcccggttccaagtcgtattcaagctgcattacgttggcctctgcttgctctgcatcccccggatgtacaagtactacatacagacgaaagacgtgggtgcgaagcggctcgcaaaactgtgggtccttacactgacccttgggaccctctgctggctggttgatcgcgtcttctgcaagaagctttcgcattggtacgtcaacccgcaggggcacgcgtggtggcacgtgcttatgggcctcaactcgtactatgcaaacacgttcctgatgttctgccgggctcagcagcgcgggtgggagccgcggatcacgcacctccttggattcttgccgtatgtcaaggtccagaaaccagagaagagggaatgatttctgtctctgcttgaaaactgatgatattcagtcggccaccagtaagctaatgcccccaatgtgtgctcagacaagtccgtggcactcttgtatatgggcgcccaaatgattacggacttcaaatgttctgatgtcgcattagattttgtatcatacttaaatcatcgaacagagattgtcctagttttggccacctttcttttggtttcttcgcaattaccgtttggtggtaaattaggactgagttatttatttatttgtttgtcgttgaatggagtccagttgtactagttaccactgcacaagaagatacattcatccacatgatgacatgttaattatttggcttgtgttgctgccaatagacaactc

SEQ ID NO: 95742 - DNA, 1446 bp, Zea Mays
gggccttaaactttgtgcagcccacgtcactttgacatagctattcgttggatcaacagcggatggggtagattagctgactgctctgttgcgtcatcgaggtggaagttagagatctgattccgccccacagcatacctctcacggtctccgttcccctgccgacgagtgggcggccgctgccgccggcttacggaaggttatttctttggcgcactcatgatttagcaccagccaaattgacctttaactctggtgacataagctgttgctagggtagcaaatcaagagctaagaatggcagattcaatggtagcaagcttctgggggcctgtgacatcaacgactgagttgtgcgaggagaattatgcacactcgtcatatatcgcagaattctacaataccatctctaatgtcccatgcgttcttttggcacttattggattagtgaatgctttctgccaaggttttgagaaacgatttagtgtcctgcacatatccaatatgatacttgctattgggagtatgattttccatgccaccttgcaacttctcctacaacagagtgatgagactcctatggtttgggagatccttctctacatgtatgtcctctattcaccggactggcactacaggagcacaatgccaactttcctgttcctgtatggtgctgcctttgccgtagtacatttctttgcccggttccaagtcgtattcaagctgcattacgttggcctctgcttgctctgcatcccccggatgtacaagtactacatacagacgaaagacgtgggtgcgaagcggctcgcaaaactgtgggtccttacactgacccttgggaccctctgctggctggttgatcgcgtcttctgcaagaagctttcgcattggtacgtcaacccgcaggggcacgcgtggtggcacgtgcttatgggcctcaactcgtactatgcaaacacgttcctgatgttctgccgggctcagcagcgcgggtgggagccgcggatcacgcacctccttggattcttgccgtatgtcaaggtccagaaaccagagaagagggaatgatttctgtctctgcttgaaaactgatgatattcagtcggccaccagtaagctaatgcccccaatgtgtgctcagacaagtccgtggcactcttgtatatgggcgcccaaatgattacggacttcaaatgttctgatgtcgcattagattttgtatcatacttaaatcatcgaacagagattgtcctagttttggccacctttcttttggtttcttcgcaattaccgtttggtggtaaattaggactgagttatttatttatttgtttgtcgttgaatggagtccagttgtactagttaccactgcacaagaagatacattcatccacatgatgacatgttaattatttggcttgtgttgctgccaatagacaactc

SEQ ID NO: 95743 - DNA, 600 bp, Zea Mays
atggacgaaaccactgcatacactgtccaagaagacgagtggacattgacttgtattgggacacaacctacagtgatgatagaagggaagatgattcaagtgcttcccgttttcgaaatagcattccctgtgaagatgaattgggagaaggcattccgtgctctgatgcagtcctcgatgagactagctgtgggtcgacagaggaaaaataggatgaaaggatgccttgagggaggtagtggaaaaaagaaagttaacactgacagtggtaagcaaagcattcggggcaagatcatgtgtccaaactgtggtgaactagggcacaggaaagcaagctacaaatgtccattaaatgggacaaagaaaaggaagcggaagcctaggaaaaattcaacaaaaggctggttccccaaagatgtacctgagtcatcacaggcaaatgtccaagagaatgaagctaatgaagaccttgttgaaagatcagaccttgcaattataccagctattgaagatcttgttgaaagaccttcgtcgccacccgaagaacgtgtagttcgtgtccttgttaaaaagatcacacctaggaaaaagaatgtttga

SEQ ID NO: 95744 - DNA, 986 bp, Zea Mays
acttcactactctctctctctgcctgcaaagctgcttgatccatcatcgatcacatcactccaccagccgcagcgcacgaacgtacgactcatggcagatcgcgaccgcagcggcatctacggcggcggcgcctacgggcagcagcaggggggcggccgcccgatgggtgagcaggtgaagggcatgatccacgacaaggggccgacggcgtcccaggcgctgacggtggcgacgctgttccctctgggcgggctgctcctggtgctgtcgggcctggcgctggcggcctccacggtggggctggccctggccacgcccgtgttcctgctcttcagccccgtgctcgtccccgccgcgctgctcatcggcacggccgtcgcggggttcctcacgtcgggcgcgctggggctcggcggcctgtcctcgctcacgtgcctcgccaacacggcgcggcaggcgttccagcgcaccccggactacgtcgaggaggcgcgccgcaggatggcggaggccgcggcgcacgcgggccacaagaccgcgcaggccgggcacggcatccagagcaaggcgcaggaggccggtgctggcactggcgccggcggcggcaggacttcctcgtaaataagcaaatcatccatggatgcgtgcgtgtcaatgtcagcagggtcgtcgtggaatgctcttctctgtacgtgggtaaccgtcttttggtcgtcttccccgagtgcgtgataaatatcctggtgttcgtcgtgtgtggtgctgccctaggctggggcctggggtcggctgtgtaccggtatctgttcatcgccgctccgtcgcgttcggagatgtgaataagtgatgtgaaggttaagtttcagctttgctattgctattgtggcttgtgcatcagcggtttgctcgttgactgttatggaaataagcattggtgaaggtattgtctattatttgctgaataattttgttatatatgataaaa

SEQ ID NO: 95745 - DNA, 257 bp, Zea Mays
aaatctaaatagtaaagtagatctggttacagagcagaaattttgaagtgtcatagataggctgaaaatatgtagtcacgagcaacacattactacttgaggccatcaatactgttttttcttctccaacctatgtaactatgttattcttttcctccttaaatgtaaggcaaacctcctatcctttttctttcaaattcattgcattaactgagtggttcttacatgtagaaatgaagttggagcaaagaggcttg

SEQ ID NO: 95746 - DNA, 1257 bp, Zea Mays
atggcggcgtcaatgggcgaggagatctggggaggagcgggcgggatcaaggcggtggcgctcgtgcccctccggtctcgctttgggctggttcgggggcggctgcagggttccacggagggtggaaaactaggcattctgctcaatagatttaagtgccttataattgatgaagctgatcggatacttgagcaaaatttcgaggaggacatgaaacaaatatttaaacgcctccctcaggacagacaaagtgttcttttttctgccacgcagactaaaaaggttcaagatttcgcgaacttcacgtttgggaaaaatgaagaacgacaacggaaacttgtttatgttggagttgacgattctgaattaaagcctaccgttgagggcttgcagcagggctactgtgtcattccaagcgagaaaaggtttcttgttctgtacactttcctaagattgaaagcgcgcgaggcgcagacggcgaaggccgccctaagaggggaagtgggtgaggagcagaagaaggtgaagatcatggtgttcttctcgtcatgtagctcagtcaaattccacgcagaactcctaaacttcctcgggatcgagtgttacgagatccatgggcaactgaagcagcagaaacgaaccagtacattcttccgatttctgaaggaaaaaagtggcatcttgttgtgcactaacgtggcagcacgtggccttgatattcctgaagtcgactatattgtgcagtacgatcctccagatgacccaaaggattacattcacagggttggtcgtaccgcacgaggtgataaaggcagaggaagcgcattactgttcttgctaccggaggaattaaagctgctcattcacctgcaggcagccagaatttctctgactgaatatgtgttcaccgaaaagcatgtcccaaagtcactatcacagctcgagaatatcgttagtgggaattactttctaaacaagtctgccaaggaagcctataggtcctaccttttggcatacaactcacactctatgaaagatatttttgatatccatcagcttgatctcaagaaagtagcggcgtcattctgttttaaggagcctccgaaagtgaatctagacctggagagcagcgcatcaagacatcgaaagatgaggaaagtgttcggcgggcagagccatggaattggcgcttcaaacccctatggaaggagaggcgtatatgatcgcagcaaatttgcaagattctgaaacgacatc

SEQ ID NO: 95747 - DNA, 1083 bp, Zea Mays
atggcaactgaatccggcaaaaccgattcgtttccccgcgcgcagccgtccgccgccacgcgatcgccgcccgctgtcagccctcccgatcccgactgcgactgcgccagctaccgcatggacgaacgccggatgacgcggccccacccgcccgacgcgccggcgcgacccgacgcggccctgcccaggcggccggacgtgcaaagttgcccaggggcggcctgcgatgagctccagagggagaagcggaaggaagggaaggggaaggggaagcggaagcggaagcggaaggatgacggcgagatggaggggacggggaaggacaagacgatggggaagaaggaaaagaacggggaagaaaagctgaagaagggcaagggaggcgggattctgacaaacaagcttttctcagagctctgcatctcggagctcactgccaaggccatcagagagatgaactatacccacctcaccaagattcaagctagatcaataccgcatctgatggaaggaagtgacgtgatgggttcagcaaagactggctcaggcaagacccttgctttccttgtaccagcgattgaactgctccacagatcgcacttcttgccaaggaacggaactggagttgttgtggtttgcccaacaagggagcttgctatccagacacacaatgttgccaaggaattaatgaagtatcactcgcaaactcttggatatgtaattggtggcactagcatgagaagtgaggccaaccagctcgcagaagggatcaatattttagttgccacaccaggcaggctcctggaccatctgcgaaataccagtagtttcaaatacaaagagctaaagaaaactcttatcctagttccatatctttatgtttttaccctttttcgtgtagatgtaaccggctacgctgtctccatagaagtcgtctttagtcggctagatgatgttggcgttccaaaccgggcaattagtgaacaaaacagagcatgccctagcatccatgttcctatagatttcaagatcatgactgatgatgtccagtatttgacaattggagcatgcacatacgagtag

SEQ ID NO: 95748 - DNA, 943 bp, Zea Mays
aaattctacatgggcctggccgtcttcagttcttcacccttcaccaccagaagcttctaggaagtaggaactcgaacggccggcagcattccgacgagacgagtcacgaatccggatagagcgccgccccccaacctgctgcgccgaccctgctcgccgccggcccgagtagagagagagagagaggagagaaggaagcatgacgacaatccgtcggttctgctgcgacgacctcctccgcttcgcctccgtcaacctggaccacctcaccgagacgttcaacatgtcgttctacatgacgtacctggcgcgctggcccgactacttccacgccgccgtcagccctggcggccgcgtcatgggttacatcatgggtaaagttgaaggccaaggtgaatcttggcatggacatgtcacagcggtttctgttgcctctgaatttcgtaggcagaagttagccaaaaaacttatgaacttactggaggaaatcagtgataagatggataaggcctacttcgtggatctctttgtaagggcatctaacatgccagcgataaggatgtatgaaaagcttggttatgtggtttatcgaagggtgctccggtactactcaggggaagaagatggcctcgatatgagaaaagcattatcacaagatgttgagaagaagtccatcataccactcaagaggccaattacgcctgatgaacttgaatatgattgatgttagctacctggtgcttacgttggatgctccggtggggaatttgacaggctttgaaaatctggtagtgagtgtattgttgtcgtttttacgcctgctaggggacaggttttgatggtgaattctgcagtttttgtatttgagaatagcaagaactatgacttggcatggaatcaaattgctttgttgtgatgtcgaattttcaaaaaaaaaaaaaaa

SEQ ID NO: 95749 - DNA, 810 bp, Zea Mays
aaattctacatgggcctggccgtcttcagttcttcacccttcaccaccagaagcttctaggaagtaggaactcgaacggccggcagcattccgacgagacgagtcacgaatccggatagagcgccgccccccaacctgctgcgccgaccctgctcgccgccggcccgagtagagagagagagagaggagagaaggaagcatgacgacaatccgtcggttctgctgcgacgacctcctccgcttcgcctccgtcaacctggaccacctcaccgagacgttcaacatgtcgttctacatgacgtacctggcgcgctggcccgactacttccacgccgccgtcagccctggcggccgcgtcatgggttacaggataaggcctacttcgtggatctctttgtaagggcatctaacatgccagcgataaggatgtatgaaaagcttggttatgtggtttatcgaagggtgctccggtactactcaggggaagaagatggcctcgatatgagaaaagcattatcacaagatgttgagaagaagtccatcataccactcaagaggccaattacgcctgatgaacttgaatatgattgatgttagctacctggtgcttacgttggatgctccggtggggaatttgacaggctttgaaaatctggtagtgagtgtattgttgtcgtttttacgcctgctaggggacaggttttgatggtgaattctgcagtttttgtatttgagaatagcaagaactatgacttggcatggaatcaaattgctttgttgtgatgtcgaattttcaaaaaaaaaaaaaaa

SEQ ID NO: 95750 - DNA, 993 bp, Zea Mays
aaattctacatgggcctggccgtcttcagttcttcacccttcaccaccagaagcttctaggaagtaggaactcgaacggccggcagcattccgacgagacgagtcacgaatccggatagagcgccgccccccaacctgctgcgccgaccctgctcgccgccggcccgagtagagagagagagagaggagagaaggaagcatgacgacaatccgtcggttctgctgcgacgacctcctccgcttcgcctccgtcaacctggaccacctcaccgagacgttcaacatgtcgttctacatgacgtacctggcgcgctggcccgactacttccacgccgccgtcagccctggcggccgcgtcatgggttacatcatgggtaaagttgaaggccaaggtgaatcttggcatggacatgtcacagcggtttctgttgcctctgaatttcgtaggcagaagttagccaaaaaacttatgaacttactggaggaaatcagtgataagatggataaggcctacttcgtggatctctttgtaagggcatctaacatgccagcgataaggatgtatgaaaagcttggttatgtggtttatcgaagggtgctccggtactactcaggggaagaagatggcctcgatatgagaaaagcattatcacaagatgttgagaagaagtccatcataccactcaagaggccaattacgcctgatgaacttgaatatgattgatgttagctacctggtgcttacgttggatgctccggtggggaatttgacaggctttgaaaatctggtagtgagtgtattgttgtcgtttttacgcctgctaggggacaggttttgatggtgaattctgcagtttttgtatttgagaatagcaagaactatgacttggcatggaatcaaattgctttgttgtgatgtcgtatttatccgtcgctgtttgctctgtagtgtgtttttatacagcttgcataatatataagttatattcgacc

SEQ ID NO: 95751 - DNA, 797 bp, Zea Mays
cagctaaacacggtttgttattcttatcatcatgtaaaatacgtacaacacattgcatgactcgtcatgctcatgcacgcacttgggctgcagctggtggtgcctgctttacatgcacgcgcgcaccgacgggcgaccggtggtgctgatcagaaatgtacacgcctttcagcctgtgaggcaggcaggcagagagagagagagagagagagagagagagagagagatattcacacacgcacgcacgcacccgctgattctgattgggggtggggagctagggacgatgaggttatatattaggcgtggatggacgtgggctggatgatgatggagtccaggtcggacgtcgtcgacctcaccacgctcacggccggcaccggcagcttgtcggaggagcgttcagcggcctcgccccagatctccgggatggcccgccggagcgcgccgatgctctccaccgcgtagtccgcttccttgctcctcgccctcttgccaacctgggcggtgcggaggccgagcgctttccccgcggcgatgttcctctcgctgtcgtccaggaacagctgacagaccaaacaatgtcagtaatatacgacggatataataataataataataataataataataataataataataataataataataataataacaacaacaacaacaacaacaataatagtaatattaataataatagtagtagtaataataataataataataataataataataataataataataataataataataataataataataataataataataat

SEQ ID NO: 95752 - DNA, 618 bp, Zea Mays
atgattccatggtattgttgcaatttctggcgaatacatttacagacaaatcgtgctagtacgtgccacagcgtgcggtcatttctaaatatcaccctcagcaaggaaatgctagacacaacacaagagagttatgcactctacaagcagcgccgccgtagatcctcactggattttctccatcccgtaggtatcttcagctccactggctacatttcttcttctctctgctatcatctcggtgtatgcctgagggtacgagtagagaaatatgtaccaccatgcggatattacaaaagaaaccccagcagtaattacaacagattggataagcacccaactacaggcaacggcaccagttcccgtaagcaatattgtccaaggctgacacctggcaggcttggtgtcccagacagagtcgtactcgagggacaggtagttgaggtacccgtccatgtcgtccaccaccccgtcctcatcaaagaacgccgccgcgccgttcttgccactctcccccttgcccccaccgccgccgccacctacccgcgccacgccgccgcgcctctggctcctgccgcagagctgcagccttgtttgtgcaccggtggcagcacatga

SEQ ID NO: 95753 - DNA, 1191 bp, Zea Mays
gccgactcccaggcctcccgctcccctgtctagcgccgccgcggagacgctctcctgcaacgcctgagcgagagcgacagccgccgccgccgcctgacgcccctacctcgacggtcgacgcatcacggccgtgcgtttccccaagctgccgagcatcgtccaactctgctgctccagcaccctggcgccagcggccagccagaccgtgcggccacttccccgcgttcgcttacagtagaaatttgattcctcgctcccaggcccgcaggatggcaccggcttttatggagctagcactcgagcaggctaagtttgcgctggataacctcgaggtccctgttgggtgtgtgattgtggaggacgggaaagtgatttcctctgggagcaacaagacgaatgccacccggaatgctaccagacatgctgagatggaagctattgatgtcctgcttcgggagtggcagagcatgggtcttgatcagccacaggtcgcggagaaatttgcaggatgcgacctttatgtcacgtgtgagccctgcataatgtgcgcgacggcattgtcgataattgggataagagaagtatactttggttgtgccaacgacaaatttggtggatgtggatcaatcatgtcattgcacaatggtgctgcttcgtcgtcagatgaattatcagggagccaagcctctacaccaaaaggtttcaaatgcactggagggatcatggctgaagaagcagttgctctttttaggtgtttctacgaacaaggaaacccaaatgccccaaggcctcacagaccagtacgaatgcctcaacaataattggtttgttttcctggactacaatcataacgcaaaaacttcaggagtgcagacatacaaacttactgtaaaacttgtttaggattctttgtatgctttagtgtgacgcatgtatgctatttgatagtgtctttttagtctgggagcgcagccacatttcttgatcggaccatgcaagttggtcgatttaaaaggatctgtgacagaagagtttgccagtgtccgcaaaatcagcattatgcaattggagtagattgttttcatcatttgcaatcttgaaagaaatattctgtaatgatgtagatacactgcaacgtcattgactcgtgatatggtatgcttttctttgtacaaaatactatttagaggt

SEQ ID NO: 95754 - DNA, 1267 bp, Zea Mays
aagggtataggccgactcccaggcctcccgctcccctgtctagcgccgccgcggagacgctctcctgcaacgcctgagcgagagcgacagccgccgccgccgcctgacgcccctacctcgacggtcgacgcatcacggccgtgcgtttccccaagctgccgagcatcgtccaactctgctgctccagcaccctggcgccagcggccagccagaccgtgcggccacttccccgcgttcgcttacagtagaaatttgattcctcgctcccaggcccgcaggatggcaccggcttttatggagctagcactcgagcaggtacggctgttaatcgtgctcgctttgcagctgtagcgtgtataattctaccttcggctggttgttttttgtaggctaagtttgcgctggataacctcgaggtccctgttgggtgtgtgattgtggaggacgggaaagtgatttcctctgggagcaacaagacgaatgccacccggaatacatgctgagatggaagctattgatgtcctgcttcgggagtggcagagcatgggtcttgatcagccacaggtcgcggagaaatttgcaggatgcgacctttatgtcacgtgtgagccctgcataatgtgcgcgacggcattgtcgataattgggataagagaagtatactttggttgtgccaacgacaaatttggtggatgtggatcaatcatgtcattgcacaatggtgctgcttcgtcgtcagatgaattatcagggagccaagcctctacaccaaaaggtttcaaatgcactggagggatcatggctgaagaagcagttgctctttttaggtgtttctacgaacaaggaaacccaaatgccccaaggcctcacagaccagtacgaatgcctcaacaataattggtttgttttcctggactacaatcataacgcaaaaacttcaggagtgcagacatacaaacttactgtaaaacttgtttaggattctttgtatgctttagtgtgacgcatgtatgctatttgatagtgtctttttagtctgggagcgcagccacatttcttgatcggaccatgcaagttggtcgatttaaaaggatctgtgacagaagagtttgccagtgtccgcaaaatcagcattatgcaattggagtagattgttttcatcatttgcaatcttgaaagaaatattctgtaatgatgtagatacactgcaacgtcattgactcgtgatatggtatgcttttctttgtacaaaatactatttagaggt

SEQ ID NO: 95755 - DNA, 1108 bp, Zea Mays
acaaggactcagtccacactccacagggaaggagggagcaggagaggtaggtagccaagaagatcggttccagcggcaggcgcgagcgaggcgtgaccgatggcggccgcgtcgctgctgagccgggcgcggtggctcctggtggagcacccggccgtggcctcgttccgctggcagccaggccgcacggtcggcgcgacgccgtccttcgcggccgccgtcatctgcggctacctcgccgcggtgctcgtcctccgccgcctcgtcctgccccgcctcccggcgctgcctccgccggcgctccgcgcgctctccgccgcccacaacgcggtcctgctggcgctctccgccgccatggccggcgggtgcgcgctgtcgacggccgcgacggcgccggcgccgcggtgggcgtgggccttctgcttcccgccgcggggcgccacggaggcgtcggggcccgtcttcttctgggcgcacgtgttctacctctccaaggtgtacgagctcggcgacacgctgctcatcctgctcgcccgccgcccgctcacgctgctccacgtgtaccaccacgcgctcgtcgtggccatgtgctacctctggctcgccacccggcagtcgctgatgcccgtcgcgctcgtcaccaacgccggcgtgcacgtcgtgatgtactcctactacctctcctgcagcgtcggcctgcgctggcccgggcggtggaagcgcgccgtcacggagctgcagatcgcgcagttcctcttcagcttcgcggcctccgtggtgatgctgtggctccacttcgccgctggcggctgcgaggggatggccggctgggtgttcaacgccgtcttcaacgcgtcgctgctcgcgctcttcctcaacttccacggcgccgcctacaaaggcgccgccaaggccaacaagggtaaagcggaatgacgcggccgacaagctttaatttgccggcaaccaaaatcctcgtgagatttaattgggaccaattgtttaatgttgcttcttcgccaaattattactgatacgaagtctgtctgaaataattgttcgaaaaagaatggcatcgatcgcccttgaattatgggtgaattttcca

SEQ ID NO: 95756 - DNA, 832 bp, Zea Mays
tccgttcgcaaacccttctcgctgccttctgcatccacgacgacgcctgcggcggcgctggcaaaatcccactgcgatggccaccaaatcccacgagaacaagaagcctactgcctccaagccgtctgtcaaccccaagtccccttcctccgacaagaaatccaagccgccgaagcccaccgaggagcagcgggagcaggtgccggcggtcaagaagccgaagaagcagaaggtgagggacgagatcgatgagatcttcagcgccgcaaaggcgggaaagaagcggaagccgccgcagcgggaggaggctgagacccatggggacgggaggaagaagcccaaggagagggccggggggagcagcagcaagaagaagaacaacaaggcgtcggggagtaagggcaagggtcgggtagctgctgctgacgacgacgaggaggaggagttcgaggagaagcggccgcgtcggcgcactgcggacggactcgccatatactcggccgatgagctcgggttcggcaaggccgacgccggtggcaccccgatgtgcccgttcgactgcgaatgctgcttctgagctctgagtttgtcggctgccgccttccctgccggaggtgatttgcacgaggctaattccagtgtagttgtacttgatgaattcggtggcgtgtccgcttacatctgtgctctgatgaaatggaaattttgatcctgaaattcagagtcaatgcttactgactggagcattaagaatttattatgttgacacatctagagcttgttgtttgttgatcagccgtagcttaatacctagcgtttcagtgcaacacaa

SEQ ID NO: 95757 - DNA, 1918 bp, Zea Mays
cttaacatcaaactcgtcgtccacgcctcctcggcaaggttgcgtacggcgtggccctaaggttcatctcgccgcctccctcaacctcttgattccgcctccctcaacctcttgattccgcctccctgaaggcataccagcgggatcaagctattttgctggccaaccgaacggtcaagccgacgatgacgctcggatcggcggcacacaagatcccgctggaggttgcgcacaccctcgtcgagatcgccgaggtcgcgcgctacgcctaccaccaccgccccggccgccctgcaacccacgagggggacccgactgcgccgcccgcaggggctgatagcagcgggggcaccaacgaggatgccgcgcggctgctggaggagaacgccatgctccgcgcccgactcgcagatgacctcgcgctcctgcgtgagctccacggcgcgccctgcgtctccaaggagtgccctcctgatctatacaaccgattgatggcggcggtcaacaatgttagcttccttgctcatctcgagaaattacaggatgagtcagcacgtcaacttaatgaactaacttctggcgacatgacagaggtggaagctgcagacattccggacaaagcgggtaacgggaagaaaggattgtgggtcttggtcccttgtgatacagctggagctaatttggaggaaattagtgggattgatgatgaaaattatgtcatagtaaatgaagacgatatagtcgatggtattgccgcctttgttgctaggtgcattcttgaagatccaaaatccaaggtacttacctctttaagacttttttagatgctatcaatggttgatgagcattctcattagcatctctaattttctatgatgtctaactatttctcattatgttccctccagtcgttatcgccaatgcagctccaaaagggttcgtctatcctccatgcaaccatgctgcactcaaacattgcaccgttaaatagctagctgtctgggtttctggggttcatcatttctgaatagttacataaattctcaactccgctactatatatcttactatgcattgatgatgattgtagccttttgttttatttatctagttttctgattacttgatgatatgtgagatatagtgtattgtacaagatgttaatccttatggtacctgagagtgtacacctatggtgtatgatggacaacgttgctaagttttgccactgtttaaagatccattgctgctttgacgaggttgcatatgtgatgattgattaagttgattttaagattgctatttgatgaagttgtactgtgtaggacatgttgggtacttttttctttcaatttctcattaaattaaccccactgggggtgtaacatgaatattagacagtatacatgaggttgaactttgtatttttttactcgccaacatcagtttcttattcatggctgagcttgagctgtgttcatgtgcaatctgatattttgttggatttaacttgtaagcagctgttgcaaaggcattagatagcatgaaagctcgatggagatggtcaaccttttgggaggctggacagattatatatatcttggctacttggggcatcacattagcagggttgtacaagagccgccatgtcctgaaggtggcagcaaagggtgctgctgtgtctgccagatttgttatgaaggccatttgagtgtaagaggcactcatgtgggatcagcaatttgcaaaatgtaaatacaaaactcgtcccgtcagttgtgcatatggttgtggcatgtttatcatgatgaagttatgatcatccagacatgaaaaactgtttcatttattttcgttgtatggacggtggtgtgattgcagaaaaaaaaaagatacatatgtgattacttgtaggatc

SEQ ID NO: 95758 - DNA, 1301 bp, Zea Mays
actcgcatatgagtcgttgcctcgcagtttatatccctactgtttcggactttcgggttttggccgacacccgacaatcttaacatcaaactcgtcgtccacgcctcctcggcaaggttgcgtacggcgtggccctaaggttcatctcgccgcctccctcaacctcttgattccgcctccctcaacctcttgattccgcctccctgaaggcataccagcgggatcaagctattttgctggccaaccgaacggtcaagccgacgatgacgctcggatcggcggcacacaagatcccgctggaggttgcgcacaccctcgtcgagatcgccgaggtcgcgcgctacgcctaccaccaccgccccggccgccctgcaacccacgagggggacccgactgcgccgcccgcaggggctgatagcagcgggggcaccaacgaggatgccgcgcggctgctggaggagaacgccatgctccgcgcccgactcgcagatgacctcgcgctcctgcgtgagctccacggcgcgccctgcgtctccaaggagtgccctcctgatctatacaaccgattgatggcggcggtcaacaatgttagcttccttgctcatctcgagaaattacaggatgagtcagcacgtcaacttaatgaactaacttctggcgacatgacagaggtggaagctgcagacattccggacaaagcgggtaacgggaagaaaggattgtgggtcttggtcccttgtgatacagctggagctaatttggaggaaattagtgggattgatgatgaaaattatgtcatagtaaatgaagacgatatagtcgatggtattgccgcctttgttgctaggtgcattcttgaagatccaaaatccaagtcgttatcgccaatgcagctccaaaaggctgttgcaaaggcattagatagcatgaaagctcgatggagatggtcaaccttttgggaggctggacagattatatatatcttggctacttggggcatcacattagcagggttgtacaagagccgccatgtcctgaaggtggcagcaaagggtgctgctgtgtctgccagatttgttatgaaggccatttgagtgtaagaggcactcatgtgggatcagcaatttgcaaaatgtaaatacaaaactcgtcccgtcagttgtgcatatggttgtggcatgtttatcatgatgaagttatgatcatccagacatgaaaaactgtttcatttattttcgttgtatggacggtggtgtgattgcagaaaaaaaaaagatacatatgtgattacttgtaggatc

SEQ ID NO: 95759 - DNA, 1231 bp, Zea Mays
actcgcatatgagtcgttgcctcgcagtttatatccctactgtttcggactttcgggttttggccgacacccgacaatcttaacatcaaactcgtcgtccacgcctcctcggcaaggttgcgtacggcgtggccctaaggcataccagcgggatcaagctattttgctggccaaccgaacggtcaagccgacgatgacgctcggatcggcggcacacaagatcccgctggaggttgcgcacaccctcgtcgagatcgccgaggtcgcgcgctacgcctaccaccaccgccccggccgccctgcaacccacgagggggacccgactgcgccgcccgcaggggctgatagcagcgggggcaccaacgaggatgccgcgcggctgctggaggagaacgccatgctccgcgcccgactcgcagatgacctcgcgctcctgcgtgagctccacggcgcgccctgcgtctccaaggagtgccctcctgatctatacaaccgattgatggcggcggtcaacaatgttagcttccttgctcatctcgagaaattacaggatgagtcagcacgtcaacttaatgaactaacttctggcgacatgacagaggtggaagctgcagacattccggacaaagcgggtaacgggaagaaaggattgtgggtcttggtcccttgtgatacagctggagctaatttggaggaaattagtgggattgatgatgaaaattatgtcatagtaaatgaagacgatatagtcgatggtattgccgcctttgttgctaggtgcattcttgaagatccaaaatccaagtcgttatcgccaatgcagctccaaaaggctgttgcaaaggcattagatagcatgaaagctcgatggagatggtcaaccttttgggaggctggacagattatatatatcttggctacttggggcatcacattagcagggttgtacaagagccgccatgtcctgaaggtggcagcaaagggtgctgctgtgtctgccagatttgttatgaaggccatttgagtgtaagaggcactcatgtgggatcagcaatttgcaaaatgtaaatacaaaactcgtcccgtcagttgtgcatatggttgtggcatgtttatcatgatgaagttatgatcatccagacatgaaaaactgtttcatttattttcgttgtatggacggtggtgtgattgcagaaaaaaaaaagatacatatgtgattacttgtaggatc

SEQ ID NO: 95760 - DNA, 1348 bp, Zea Mays
actcgcatatgagtcgttgcctcgcagtttatatccctactgtttcggactttcgggttttggccgacacccgacaatcttaacatcaaactcgtcgtccacgcctcctcggcaaggttgcgtacggcgtggccctaaggcataccagcgggatcaagctattttgctggccaaccgaacggtcaagccgacgatgacgctcggatcggcggcacacaagatcccgctggaggttgcgcacaccctcgtcgagatcgccgaggtcgcgcgctacgcctaccaccaccgccccggccgccctgcaacccacgagggggacccgactgcgccgcccgcaggggctgatagcagcgggggcaccaacgaggatgccgcgcggctgctggaggagaacgccatgctccgcgcccgactcgcagatgacctcgcgctcctgcgtgagctccacggcgcgccctgcgtctccaaggagtgccctcctgatctatacaaccgattgatggcggcggtcaacaatgttagcttccttgctcatctcgagaaattacaggatgagtcagcacgtcaacttaatgaactaacttctggcgacatgacaggttcattcctcgttaagtattgtgaagtttgtttctagactacattttatggtcactgttggttcttctaatacattttgcgaagtgctattccattttctgcttcaatggaactagaggtggaagctgcagacattccggacaaagcgggtaacgggaagaaaggattgtgggtcttggtcccttgtgatacagctggagctaatttggaggaaattagtgggattgatgatgaaaattatgtcatagtaaatgaagacgatatagtcgatggtattgccgcctttgttgctaggtgcattcttgaagatccaaaatccaagtcgttatcgccaatgcagctccaaaaggctgttgcaaaggcattagatagcatgaaagctcgatggagatggtcaaccttttgggaggctggacagattatatatatcttggctacttggggcatcacattagcagggttgtacaagagccgccatgtcctgaaggtggcagcaaagggtgctgctgtgtctgccagatttgttatgaaggccatttgagtgtaagaggcactcatgtgggatcagcaatttgcaaaatgtaaatacaaaactcgtcccgtcagttgtgcatatggttgtggcatgtttatcatgatgaagttatgatcatccagacatgaaaaactgtttcatttattttcgttgtatggacggtggtgtgattgcagaaaaaaaaaagatacatatgtgattacttgtaggatc

SEQ ID NO: 95761 - DNA, 1406 bp, Zea Mays
atatgagtcgttgcctcgcagtttatatccctactgtttcggactttcgggttttggccgacacccgacaatcttaacatcaaactcgtcgtccacgcctcctcggcaaggttgcgtacggcgtggccctaaggttcatctcgccgcctccctcaacctcttgattccgcctccctcaacctcttgattccgcctccctgaaggcataccagcgggatcaagctattttgctggccaaccgaacggtcaagccgacgatgacgctcggatcggcggcacacaagatcccgctggaggttgcgcacaccctcgtcgagatcgccgaggtcgcgcgctacgcctaccaccaccgccccggccgccctgcaacccacgagggggacccgactgcgccgcccgcaggggctgatagcagcgggggcaccaacgaggatgccgcgcggctgctggaggagaacgccatgctccgcgcccgactcgcagatgacctcgcgctcctgcgtgagctccacggcgcgccctgcgtctccaaggagtgccctcctgatctatacaaccgattgatggcggcggtcaacaatgttagcttccttgctcatctcgagaaattacaggatgagtcagcacgtcaacttaatgaactaacttctggcgacatgacaggttcattcctcgttaagtattgtgaagtttgtttctagactacattttatggtcactgttggttcttctaatacattttgcgaagtgctattccattttctgcttcaatggaactagaggtggaagctgcagacattccggacaaagcgggtaacgggaagaaaggattgtgggtcttggtcccttgtgatacagctggagctaatttggaggaaattagtgggattgatgatgaaaattatgtcatagtaaatgaagacgatatagtcgatggtattgccgcctttgttgctaggtgcattcttgaagatccaaaatccaagtcgttatcgccaatgcagctccaaaaggctgttgcaaaggcattagatagcatgaaagctcgatggagatggtcaaccttttgggaggctggacagattatatatatcttggctacttggggcatcacattagcagggttgtacaagagccgccatgtcctgaaggtggcagcaaagggtgctgctgtgtctgccagatttgttatgaaggccatttgagtgtaagaggcactcatgtgggatcagcaatttgcaaaatgtaaatacaaaactcgtcccgtcagttgtgcatatggttgtggcatgtttatcatgatgaagttatgatcatccagacatgaaaaactgtttcatttattttcgttgtatggacggtggtgtgattgcagaaaaaaaaaagatacatatgtgattacttgt

SEQ ID NO: 95762 - DNA, 1176 bp, Zea Mays
ctcaaggagtcaaggtggtgtggaatttctaccagtgttgggcatgatgatttttggaatccgatttctttacgccactgtgaccttagttcagtagtcatttgttgcgttttatctgagttgcctggattgaattagtcgcaggactgacataggactaggacctaaggccgcattagcaaaaactcagatggtctaggatcataagtgttataccaaatcttccatgagctccagatcagccctgatccttgtataatgctaacacaaagctttcgtgtgttgaaaaacattcctaggtcaaccatattaagttatcacaacgtttactcaatatatcacaaggcgcagatgcttatatttgcagattatgaacatgccatggacaaacgaagcagagttttacttctatgcttagcaagtcttatctattgtgttgctttacattctctgttacttcacacttctgcaggtaaaagatacaggctgtggaattggtccacaggatctacctcatgtatttacaaagtttgctcatcctcaaagcggaggaaaccgagggtttaatggtagtggtcttggccttgccatatgcaagaggtttgttagtctcatgggagggcacatctggattgacagcgaaggaaccggaagaggttgcaccgcaacattcgtcgtcaagctcggcgtgtgtgacaacacaaacacctaccagcagcagctgatccctctagtatggccaagcagcgcagactccgatttgcgtgctccgaaacctcttccggacgggagaggatctactcccttgaaatctcggtaccaaaggagcgtatgagcctagtgtaaatgattgacggcatagtgccaagtaggggaccgattagtgccaccgtctaattttgtttgtaaccctgtcatagcaggcatatgatgtacaaatactgtaaagcaaatggagactgcggccgtgtatctgggtggcaacgctgacttgctgcattgagtggtatatacatatgctaccagcggattgaattgcttattctggggtgtgccgagcgcgcccgtgtgcgaccaccgtagctcgttgcttgttctattgtgacttgaattccatattcatcgtgtaatatgaaatccagtgcaaatacacggtaacaagctgttttcggtgct

SEQ ID NO: 95763 - DNA, 2440 bp, Zea Mays
atgcttagacgacttacagaacagcgccggactgccttcaccctgcctattctttctcccgttcaccccgcgtgcacgctctttcccttcctcgtgccgacgaccgggcgaccgccgcgccccggcccgcgcccccttgtctcgggccactcgccggcaacgagcagccaccaggaaatgttgtgaggactgatgcaataactaagcttgctggatggacggatgtgattgcatcgagccactatggcctaccgatgatctccttgtcaagtatcagtacatctcagacttcttcatagccctcgcgtacttctctattccgttggagctcatatatttcgtgaagaagtcgtccttcttcccgtacagatgggtcttgatccagtttggtgcgtttatagttctctgtggggcaacccatctgataaacctgtggacgttcaccacacatacaaagaccgttgcgatggtcatgaccatagcaaaggtttctacagcagttgtgtcctgtgcaactgctttgatgcttgttcatatcatccccgacttattgagcgtgaaaactagagagttgttcctgaagaataaagctgaagagcttgacagagagatgggactgataaggacgcaggaggagaccggtagacatgttaggatgcttacacatgaaatcagaagtactcttgacaggcatatgattttgaagactactcttgttgagctaggaaggaccttgggtctggaggaatgtgcattgtggatgccatctcgaagtggttcaagccttcagctttctcatactttgcaccaccagattactgttggatcatcggtgccaattaatcttcctgtcatcaatcaagtgttcagtagcaaccgggcaattataataccccacacatctcctttggcgcggattcgacctcttacagggcgatatgttccaccagaagtggctgcagtccgtgtacctcttctccacctttcaaacttccaaataaatgattggcctgagctttcggcaaaaagctttgcaatcatggttttgatgcttccatctgatagtgcaagaaaatggcatgtacatgaattggagctggttgaggttgttgctgatcaggtagcagttgcactatctcatgcggctattcttgaagagtccatgcgagcacgtgatttactaatggagcagaatgttgccctggatttagctcgaagagaggctgagatggctatccgtgctcgcaatgattttctagctgttatgaatcacgaaatgagaacacccatgaatgcaataatagccctttcctccttgcttttggaaactgagcttactcctgagcagcgtctaatggtggaaacagtactgaaaagcagcaatctgttagcaacactcatcaatgatgtgctagatctttccaaactcgaggatggaagccttgaactggagattaaagcattcaatcttcatgctgttttcaaagaagtgatgggtttcattaaaccaattgcatctatcaagaggctatctgtatcggttatgttggcaccagatttgccgttatgtgccattggtgatgaaaagagactcatgcaaactattctgaacatctctggcaacgctgtaaagtttaccaaggagggacacatcacacttgtagcttccattgtgaaggctgactctttgagagagttcagaaccccagaatttcatccaactgcaagtgatgaccatttctatttgaaagttcaggtaaaagatacaggctgtggaattggtccacaggatctacctcatgtatttacaaagtttgctcatcctcaaagcggaggaaaccgagggtttaatggtagtggtcttggccttgccatatgcaagaggtttgttagtctcatgggagggcacatctggattgacagcgaaggaaccggaagaggttgcaccgcaacattcgtcgtcaagctcggcgtgtgtgacaacacaaacacctaccagcagcagctgatccctctagtatggccaagcagcgcagactccgatttgcgtgctccgaaacctcttccggacgggagaggatctactcccttgaaatctcggtaccaaaggagcgtatgagcctagtgtaaatgattgacggcatagtgccaagtaggggaccgattagtgccaccgtctaattttgtttgtaaccctgtcatagcaggcatatgatgtacaaatactgtaaagcaaatggagactgcggccgtgtatctgggtggcaacgctgacttgctgcattgagtggtatatacatatgctaccagcggattgaattgcttattctggggtgtgccgagcgcgcccgtgtgcgaccaccgtagctcgttgcttgttctattgtgacttgaattccatattcatcgtgtaatatgaaatccagtgcaaatacacggt

SEQ ID NO: 95764 - DNA, 2425 bp, Zea Mays
ctccccccttcctgctgtacgaaaccgagcacccaaaccctaacttaagcttatttggctatttacattcggatctgatctagttacaggagcacacacgtattatccctactaaatccgattttagtggaaaaagctgtcgggtgtacatgtgtccacccatgtcctttacgagttcggcccttggccgaggtccgtttggaattggaaatgggaatcagaggggcgaatgccgaatgggcatgtcttgcgcaatttccatgctctgctagaaatgttgtgaggactgatgcaataactaagcttgctggatggacggatgtgattgcatcgagccactatggcctaccgatgatctccttgtcaagtatcagtacatctcagacttcttcatagccctcgcgtacttctctattccgttggagctcatatatttcgtgaagaagtcgtccttcttcccgtacagatgggtcttgatccagtttggtgcgtttatagttctctgtggggcaacccatctgataaacctgtggacgttcaccacacatacaaagaccgttgcgatggtcatgaccatagcaaaggtttctacagcagttgtgtcctgtgcaactgctttgatgcttgttcatatcatccccgacttattgagcgtgaaaactagagagttgttcctgaagaataaagctgaagagcttgacagagagatgggactgataaggacgcaggaggagaccggtagacatgttaggatgcttacacatgaaatcagaagtactcttgacaggcatatgattttgaagactactcttgttgagctaggaaggaccttgggtctggaggaatgtgcattgtggatgccatctcgaagtggttcaagccttcagctttctcatactttgcaccaccagattactgttggatcatcggtgccaattaatcttcctgtcatcaatcaagtgttcagtagcaaccgggcaattataataccccacacatctcctttggcgcggattcgacctcttacagggcgatatgttccaccagaagtggctgcagtccgtgtacctcttctccacctttcaaacttccaaataaatgattggcctgagctttcggcaaaaagctttgcaatcatggttttgatgcttccatctgatagtgcaagaaaatggcatgtacatgaattggagctggttgaggttgttgctgatcaggtagcagttgcactatctcatgcggctattcttgaagagtccatgcgagcacgtgatttactaatggagcagaatgttgccctggatttagctcgaagagaggctgagatggctatccgtgctcgcaatgattttctagctgttatgaatcacgaaatgagaacacccatgaatgcaataatagccctttcctccttgcttttggaaactgagcttactcctgagcagcgtctaatggtggaaacagtactgaaaagcagcaatctgttagcaacactcatcaatgatgtgctagatctttccaaactcgaggatggaagccttgaactggagattaaagcattcaatcttcatgctgttttcaaagaagtgatgggtttcattaaaccaattgcatctatcaagaggctatctgtatcggttatgttggcaccagatttgccgttatgtgccattggtgatgaaaagagactcatgcaaactattctgaacatctctggcaacgctgtaaagtttaccaaggagggacacatcacacttgtagcttccattgtgaaggctgactctttgagagagttcagaaccccagaatttcatccaactgcaagtgatgaccatttctatttgaaagttcaggtaaaagatacaggctgtggaattggtccacaggatctacctcatgtatttacaaagtttgctcatcctcaaagcggaggaaaccgagggtttaatggtagtggtcttggccttgccatatgcaagaggtttgttagtctcatgggagggcacatctggattgacagcgaaggaaccggaagaggttgcaccgcaacattcgtcgtcaagctcggcgtgtgtgacaacacaaacacctaccagcagcagctgatccctctagtatggccaagcagcgcagactccgatttgcgtgctccgaaacctcttccggacgggagaggatctactcccttgaaatctcggtaccaaaggagcgtatgagcctagtgtaaatgattgacggcatagtgccaagtaggggaccgattagtgccaccgtctaattttgtttgtaaccctgtcatagcaggcatatgatgtacaaatactgtaaagcaaatggagactgcggccgtgtatctgggtggcaacgctgacttgctgcattgagtggtatatacatatgctaccagcggattgaattgcttatt

SEQ ID NO: 95765 - DNA, 1567 bp, Zea Mays
aggttgccaatccgagcgcagccaaacccaaaccctcctccctcccggctctcgacgggcgacggcgatggccgccgcgacagagaagacggctgaggacatccgccgcgagctccaggagctccagcgtcagcaccgcgagatcaccgagcgcctgcgcgacccccgtggccttcgccgcggcgcccccggccctggtcctggacccggggccccccgcccgctccgcggcttcgcgagacccgctgtgggtccggaatcgggggatcaacctccgcagaagcgtcggctgctatcagccgtagttaaggtggatggggctgaaaataacgaggaaggcacaaaggatgcggatgcggaggggcatgggacaggttcaggtgccactgaaggcagtgccgggaggggtttcaacaatggcgggttcagaagggatggtggcttgcggatgcagaggagagtggactataattcgctgccagagccagctccaagggagcttcccaggaatgaggacccgaatttggtgagaagaaataagaggatgctggggcagcttcttgtcggtacattagagaaatttcaacaagaagataaaaaactatctaactccgaggcttttctgcgtagatcagagactcagcgaaaggctgagcaaaaggtccgcgaagaaagtgaaaggctgcgacagaaggaacgtgagcaaattgcagagaagcgtaagcgtgatatgacgcttcgcgctcgtgtagctgctaaggcggaagaaaagaggttggagctgttgtacattcagtggactgagcaccataaaaggctgtccaatttcttaaggacaaaagctgaaccacctatttactacatgccaactaaaccaattattgacgatccagccattgttgaacagaacaaggaaaaggtattcgaagaatggaaatctatgcgcagggatgagctgactcggttccaaaagcaagttgaggagcaatatctctcaaatgtggagaggcagctggagaggatccagaatgcccggaacgctcgaaaggcgaacgggcatgctaacatgcaagaaatggacaaggagctggacacacacagggcggagcatggtccgaagactcggcgagttcctgaggagggcggtaatgatgacgacgaagacgcagaggacatggctgcggaagacgaggtgatggatgaagttctgggcatcaacgatgggatcaacgaggacccatccaagccgtccgaagaagctactactgaaggtggtgagcctgcacccgaggaagcacaataggattctttgttcacacaagctaggcacatagccgtacgtaccattccgtatgcttagttgccgtattgttgggaactgtttgtgcgtgtatttctgttagacgttccccgctggtttaggctgtgttttatattgctgttttgtctttttgaatgttgagaccatacaactgtcgatcattatctcataattgttgtaaaaatactataattgataccttgatttggacgtcggtggcgttaaacgtttcgggttctgttcttc

SEQ ID NO: 95766 - DNA, 1744 bp, Zea Mays
aggttgccaatccgagcgcagccaaacccaaaccctcctccctcccggctctcgacgggcgacggcgatggccgccgcgacagagaagacggctgaggacatccgccgcgagctccaggagctccagcgtcagcaccgcgagatcaccgagcgcctgcgcgacccccgtggccttcgccgcggcgcccccggccctggtcctggacccggggccccccgcccgctccgcggcttcgcgagacccgctgtgggtccggaatcgggggatcaacctccgcagaagcgtcggctgctatcagccgtagttaaggtggatggggctgaaaataacgaggaaggcacaaaggatgcggatgcggaggggcatgggacaggttcaggtgccactgaaggcagtgccgggaggggtttcaacaatggcgggttcagaagggatggtggcttgcggatgcagaggagagtggactataattcgctgccagagccagctccaagggagcttcccaggaatgaggacccgaatttggtgagaagaaataagaggatgctggggcagcttcttgtcggtacattagagaaatttcaacaagaagataaaaaactatctaactccgaggcttttctgcgtagatcagagactcagcgaaaggctgagcaaaaggtccgcgaagaaagtgaaaggctgcgacagaaggaacgtgagcaaattgcagagaagcgtaagcgtgatatgacgcttcgcgctcgtgtagctgctaaggcggaagaaaagaggttggagctgttgtacattcagtggactgagcaccataaaaggctgtccaatttcttaaggttatttttatttctggtccaaaagtgtccatattgacaattaaattgagggaagatacattctaattatgcagacttgatgtttgataaccattagtgtatctatttacattgtatactgatgaacaatatttgttccatgtttgactctatcttattacccccttatgttggcaggacaaaagctgaaccacctatttactacatgccaactaaaccaattattgacgatccagccattgttgaacagaacaaggaaaaggtattcgaagaatggaaatctatgcgcagggatgagctgactcggttccaaaagcaagttgaggagcaatatctctcaaatgtggagaggcagctggagaggatccagaatgcccggaacgctcgaaaggcgaacgggcatgctaacatgcaagaaatggacaaggagctggacacacacagggcggagcatggtccgaagactcggcgagttcctgaggagggcggtaatgatgacgacgaagacgcagaggacatggctgcggaagacgaggtgatggatgaagttctgggcatcaacgatgggatcaacgaggacccatccaagccgtccgaagaagctactactgaaggtggtgagcctgcacccgaggaagcacaataggattctttgttcacacaagctaggcacatagccgtacgtaccattccgtatgcttagttgccgtattgttgggaactgtttgtgcgtgtatttctgttagacgttccccgctggtttaggctgtgttttatattgctgttttgtctttttgaatgttgagaccatacaactgtcgatcattatctcataattgttgtaaaaatactataattgataccttgatttggacgtcggtggcgttaaacgtttcgggttctgttcttc

SEQ ID NO: 95767 - DNA, 2170 bp, Zea Mays
aaataggacacgccggctagtactgcgccagcccactccagcgctgaaggcctgcagcgccagcgcagcgcctctctgctactgtgctggctgacgccggtggggtgtgagcgaactgcgagctgctgccacccctgctgccgcggtcgaccgccggccccggaccgagatggacgctcggtgggcggtgctgctcgcgctgctggtcgccagcggcggcgtccgtgtctgcgccgccgctggggccaagggcgccaactggctgggcgggctgagccgcgcgtcgttccccaaggggttcgtgttcgggacggcgacgtcggcgtaccaggtcgagggcgccgcgtccaccaacggccggggcccctccatctgggattcattcgcgcacgtcccaggaaatattgcagggaatcaaaatggagacgttgcagtggatcaataccatcgctacaaggaagacgtcgatctcatgaaaagtttgaactttgatgcctaccggttctcaatctcatggtccaggatcttcccggatggcgaagggaaagtcaatccagaaggtgtagcgtattacaataatttgataaactatctgcttcagcaaggcatgactccttacatcaacctttaccactatgatcttcctcttgcgcttgagaagaaatatggagggtggttaagcgcgaagatggcggacttgtttacagactatgctgacttctgttttaagacctacggcgatcgcgtaaagcactggtttacattcaatgagccaaggatagtagcgctacttggctatgacacagggtcaaatcctcctcaaaggtgcaccagatgcgctgctggtgggaattcagcaaccgaaccttacatagttgctcataattttctcttggcacatgctactgcagttgcaagataccgtacgaaatatcaggctgctcagaagggtaaggtcggaatagtcctggacttcaactggtacgaggctcttacaaactcacctgatgaccaagcagcagcccaaagagccagggacttccacattggctggtttgttgatccattgataaacggacactatccacagataatgcaagatctcgtgaaggagaggctgcccaggttcactcctgagcaggctaaactggtgaagggctcggcagactacatcggtatcaacgagtacacatccagctacatgaaggggcagaagctggtccagctggcgcccagtagctactctgccgattggcaggttcaatatgtttttgcacgcaatggcaaaccgattggaccacaggcgaattctaagtggctctacatcgccccgacggggatgtacgggtgcgtgaactacctcaaggagaagtatgggaatccaacgatctacataacggagaacggaatggaccagcctggaaacttgacccgagaccagtacctgcgcgacgccacgagggtgcggttctacaggagctacatcggccagctgaagaaggccatagaccagggagcgaacgtggctggctacttcgcctggtctctcctcgacaacttcgagtggctggcagggtactcgtccaagttcggcatcgtctacgtggacttcaacacgctcgaacgccacccgaaggcgtcggcctactggttcagggacatgcttcagaagcattgagatctccagagccgagcctgagcacggaaggtaccattttgttcagcttcgcctagtgtttgggatggcccaatggttcaaatccggctcagtgcctggctaccaaaatgggaacaaaggacagctaccccgatcaattgtgatgttgtgtgtttgtgggtatgttctctctggagtttgagctgtggttattttatcgtgttggttgatcgtgtttgaaatgcttaattcaggactgtgacatctcgagttgttttaactaaatcttataagaactaccctgatcgagcgctgggtaattggataaaatgaaaccaagagcccacaagtagagtttgaaataaaaatttcaaaaaatgtgatgagtaacgttatagtagagtttgaaataaaaaatgtgatgaagatagtcttaagaacttatttggatagtcttgcatcatctcattgttggaacttgctctcccgagcaagatgatccaacggggaagt

SEQ ID NO: 95768 - DNA, 875 bp, Zea Mays
aataaatatgtatttgccttggatatatatttttttcaccaaacctaaacatccgtcccataaattctgtagttgcacgcaatggcaaaccgattggaccacaggcgaattctaagtggctctacatcgccccgacggggatgtacgggtgcgtgaactacctcaaggagaagtatgggaatccaacgatctacataacggagaacggaatggaccagcctggaaacttgacccgagaccagtacctgcgcgacgccacgagggtgcggttctacaggagctacatcggccagctgaagaaggccatagaccagggagcgaacgtggctggctacttcgcctggtctctcctcgacaacttcgagtggctggcagggtactcgtccaagttcggcatcgtctacgtggacttcaacacgctcgaacgccacccgaaggcgtcggcctactggttcagggacatgcttcagaagcattgagatctccagagccgagcctgagcacggaaggtaccattttgttcagcttcgcctagtgtttgggatggcccaatggttcaaatccggctcagtgcctggctaccaaaatgggaacaaaggacagctaccccgatcaattgtgatgttgtgtgtttgtgggtatgttctctctggagtttgagctgtggttattttatcgtgttggttgatcgtgtttgaaatgcttaattcaggactgtgacatctcgagttgttttaactaaatcttataagaactaccctgatcgagcgctgggtaattggataaaatgaaaccaagagcccacaagtagagtttgaaataaaaatttcaaaaaatgtgatgagtaacgttatagtagagtttgaaataaaaaa

SEQ ID NO: 95769 - DNA, 2087 bp, Zea Mays
attgatgaggcgacgtgaccagcaacaaataggacacgccggctagtactgcgccagcccactccagcgctgaaggcctgcagcgccagcgcagcgcctctctgctactgtgctggctgacgccggtggggtgtgagcgaactgcgagctgctgccacccctgctgccgcggtcgaccgccggccccggaccgagatggacgctcggtgggcggtgctgctcgcgctgctggtcgccagcggcggcgtccgtgtctgcgccgccgctggggccaagggcgccaactggctgggcgggctgagccgcgcgtcgttccccaaggggttcgtgttcgggacggcgacgtcggcgtaccaggtcgagggcgccgcgtccaccaacggccggggcccctccatctgggattcattcgcgcacgtcccaggaaatattgcagggaatcaaaatggagacgttgcagtggatcaataccatcgctacaaggaagacgtcgatctcatgaaaagtttgaactttgatgcctaccggttctcaatctcatggtccaggatcttcccggatggcgaagggaaagtcaatccagaaggtgtagcgtattacaataatttgataaactatctgcttcagcaaggcatgactccttacatcaacctttaccactatgatcttcctcttgcgcttgagaagaaatatggagggtggttaagcgcgaagatggcggacttgtttacagactatgctgacttctgttttaagacctacggcgatcgcgtaaagcactggtttacattcaatgagccaaggatagtagcgctacttggctatgacacagggtcaaatcctcctcaaaggtgcaccagatgcgctgctggtgggaattcagcaaccgaaccttacatagttgctcataattttctcttggcacatgctactgcagttgcaagataccgtacgaaatatcaggctgctcagaagggtaaggtcggaatagtcctggacttcaactggtacgaggctcttacaaactcacctgatgaccaagcagcagcccaaagagccagggacttccacattggctggtttgttgatccattgataaacggacactatccacagataatgcaagatctcgtgaaggagaggctgcccaggttcactcctgagcaggctaaactggtgaagggctcggcagactacatcggtatcaacgagtacacatccagctacatgaaggggcagaagctggtccagctggcgcccagtagctactctgccgattggcagttgcacgcaatggcaaaccgattggaccacaggcgaattctaagtggctctacatcgccccgacggggatgtacgggtgcgtgaactacctcaaggagaagtatgggaatccaacgatctacataacggagaacggaatggaccagcctggaaacttgacccgagaccagtacctgcgcgacgccacgagggtgcggttctacaggagctacatcggccagctgaagaaggccatagaccagggagcgaacgtggctggctacttcgcctggtctctcctcgacaacttcgagtggctggcagggtactcgtccaagttcggcatcgtctacgtggacttcaacacgctcgaacgccacccgaaggcgtcggcctactggttcagggacatgcttcagaagcattgagatctccagagccgagcctgagcacggaaggtaccattttgttcagcttcgcctagtgtttgggatggcccaatggttcaaatccggctcagtgcctggctaccaaaatgggaacaaaggacagctaccccgatcaattgtgatgttgtgtgtttgtgggtatgttctctctggagtttgagctgtggttattttatcgtgttggttgatcgtgtttgaaatgcttaattcaggactgtgacatctcgagttgttttaactaaatcttataagaactaccctgatcgagcgctgggtaattggataaaatgaaaccaagagcccacaagtagagtttgaaataaaaatttcaaaaaatgtgatgagtaacgttatagtagagtttgaaataaaaaa

SEQ ID NO: 95770 - DNA, 1328 bp, Zea Mays
attgatgaggcgacgtgaccagcaacaaataggacacgccggctagtactgcgccagcccactccagcgctgaaggcctgcagcgccagcgcagcgcctctctgctactgtgctggctgacgccggtggggtgtgagcgaactgcgagctgctgccacccctgctgccgcggtcgaccgccggccccggaccgagatggacgctcggtgggcggtgctgctcgcgctgctggtcgccagcggcggcgtccgtgtctgcgccgccgctggggccaagggcgccaactggctgggcgggctgagccgcgcgtcgttccccaaggggttcgtgttcgggacggcgacgtcggcgtaccaggtcgagggcgccgcgtccaccaacggccggggcccctccatctgggattcattcgcgcacgtcccaggaaatattgcagggaatcaaaatggagacgttgcagtggatcaataccatcgctacaaggaagacgtcgatctcatgaaaagtttgaactttgatgcctaccggttctcaatctcatggtccaggatcttcccggatggcgaagggaaagtcaatccagaaggtgtagcgtattacaataatttgataaactatctgcttcagcaaggcatgactccttacatcaacctttaccactatgatcttcctcttgcgcttgagaagaaatatggagggtggttaagcgcgaagatggcggacttgtttacagactatgctgacttctgttttaagacctacggcgatcgcgtaaagcactggtttacattcaatgagccaaggatagtagcgctacttggctatgacacagggtcaaatcctcctcaaaggtgcaccagatgcgctgctggtgggaattcagcaaccgaaccttacatagttgctcataattttctcttggcacatgctactgcagttgcaagataccgtacgaaatatcaggtatttccatcttgagaacctcagaagttcctctgaaaaataacatcactctagcactcctaggagtggtaaactgatgttattttattcaatgaagtgtgtggtccaagattttatttttaaatgaaatgtgggcagggtctatatatgcttggaagttggaacaatggtcagcatactttcacattaataactctactgttcatgaaatgcattagcttgttctcctaaacgattggacatgtgcctgtcgaatttcattagtttcttggactgaaaactgctgatggaagagtgacatgatgttttaaaaacataggctgctcagaagggtaaggtcggaatagtcctggacttcaactggt

SEQ ID NO: 95771 - DNA, 1521 bp, Zea Mays
atgattgctgttcgatgggcggcgctgctggtcgcgctggtggtggcgtgcggcagcgctgctgcaggtgcagcggcgggggaaggacctaactggctgggcgggctgagccgggcggcgttccccaaggacttcgtgttcgggaccgcgacgtcggcgtaccaggtcgagggcgccgcgtccaccaacggccgaggcccctccacctgggacgcgttcgtgcacaccccaggaaacattgtatacaatcagacggcagatgtcgcagtggatcaatatcatcgctacagggaagatgtcgacctcatgaaaagtttgaattttgatgcctaccggttttcaatctcatggtccaggatcttcccagatggcgagggaagagtcaatccagaaggtgttgcctattacaacaatctgataaactacctgcttcggaaaggcattacaccgtacgccaatctttaccattccgatctccctcttgcgcttcagaacaagtatggagggtggttaaatgccaagatggcgaaactgttcacagactatgccgacttctgttttaagacttttggcgaccgtgtaaagcattggtttacattcaatgagccaaggatagtagcactacttggttatgacgctgggtcgattcctcctcaaaggtgtaccaaatgctctgctggtgggaattcagcaacggaaccttatatcgttgctcataattttctcttgtcacatgctgctgctgtgtcaagataccgtaacaagtatcaggctgctcagaaaggaaaggttggaatagttctggacttcaattggtatgaagctctcacaaactcaaccgaagaccaagcagcggctcaaagagcaagggatttccatgttggttggtttgctgatccattaataaatggacattatccacagataatgcaagatattgtgaaagagaggctgcccaagtttactccggagcaagctaagttggtcaagggctcagcggattacattgggatcaatcaatacaccgctagctacgtgaagggccagaaactgctccagcagaagcctactagctactcagctgattggcaggttcaatatgttttagaacggaacggcaaaccgatcggaccacaggcgaattcaaagtggctttacatcgtcccagaagggatgtacggttgtgtgaactatctgaagcacaagtatggaaatccaacagttttcataaccgagaacggaatggatcagccaggaaacttgactcgtggccagtacctgcacgacaccacaagggtgcaattctacaaaggctacctcgctgagctgaggaaagccatcgatgacggcgccgacgtggctggctacttcgcttggtctctcctcgacaacttcgagtggcagtcaggttacacgtccaagtttggaatcgtctacgtcgacttcagcacgcccaagctcgaacgacaccccaaggcgtcagcctactggttcagagacatgctccagaaacacttatga

SEQ ID NO: 95772 - DNA, 2060 bp, Zea Mays
agattgacctgttgccctgttgagtgtgaaggaggcgcacgcgcttgagctgaagaaactgccgcgctgatctagcccgccgggatgggcgcctcggggcctgcggctccgccggcaacgcatcgccgccgctgcatccagctgctgctgctgctcgccctggccgtcgcgccgcttggcagccgtgggcttcgcgtccgtgccgcgggggcggacacgggagggctgagccgggacgcgttcccgaaggggttcgtcttcgggacggcgacgtccgcgtaccaggtcgagggcgcggcgacgtccggcggccgcgggccctgcatctgggatcccttcgtccacacccccggaaagattgctgaagacgccaacgcagatgttacaacagatgaatatcatcgctacaaggaagatgttgatctcatgaaaagcctaaattttgatgcataccggttttcaatctcctggtccaggatcttcccagatggcgaagggaaaattaatgaagaaggagtacagtattacaacaatcttatagactacatgattaagcaaggccttactccttacgccaaccttaaccactatgatcttccgcttgcgcttcagaagaagtaccaaggctggttaggcccaaaaattgtggacatatttgctgactatgctgatttttgtttcaagacttttggcaatcgagtcaagaactggttcacattaaatgagccaaggatagtagcattccttggttatgataaagggcttaacccccctaaccggtgcacacaatgcactgccggtgggaactcatcgacagaaccttacattgttgttcataacattctcctatctcatgctactgcagttgcaagataccgcaataaataccaggcaactcagaaaggcaaggtcgggatagttcttgacttcaactggtatgaaccttttacaaactcaactgaagatcaaaaagcagcgcaaagggccagggacttccatattggttggtttcttgatccattaataaatgggcaatatccaaagataatgcaagacattgtgaaagaccggctaccaagtttcacacctgaacaggccaagctagtcaagggctcatcagactatttcgggatcaatcaatatactacatactacattgcagatcaacaaactcctccgcagggaccaccgagctactcgtccgactggggcgtccaatattactttcaaaggaatggcgtgcaaattggacagatggcgcactcaatttggctttacatcgtcccatcgggcatgtatggagtcgtgaactacctaaaggaaaagtaccataatccaatcatcatcatatcggaaaacggaatggatcagcctggaaacctcacgcgcgaggagtacgtgcacgacgccgtgaggatcgacttctacaagaactacctgacggagctaaagagagggatcgacggcggcgcgaacgtgatcggctacttcgcgtggtctctcctggacaacttcgagtggctgtcgggctacacgtccaagttcggcatcgtctacgtcgacttcgcgacgctgaagcggtaccccaaggactcggcgtactggttcagagacatgctttcggggacgggctccaaggctgctaccccgcagactggttcaggcggccggccggctggttcggcttcagccacctcgaacggacctgccttgctggtctcccttttggtctccttgggtgttctgcttccatccatcttcatggtttcctcggtctaattagaaatgtattttcatagtacggatttgtagttgtgtggatgacaacatgttccttttaagaatcaggacatgttgcatcgatgcgggacctgttgtaggaatgagaccatgattcagggcttattgttcagagccagttttgttttgttttgtttgcggattttcagatacagatttgaacgtgtattcatggatagcttgcgttttttggtgtatctgggcacctaccggtttagtggaggtgttctcttctctgcaacccgccgccggtgagaaag

SEQ ID NO: 95773 - DNA, 1932 bp, Zea Mays
atggacctgctcagcatcattctagttatagcatctctgctcccattcgcagcatctgatggtcaaggttattcacatgcctatcatatgtgttttccacttcgttttagttcactttctctaccaatgcgtagttttcaagctctggcaaataacaaagaagtaccttttgtttacttaggtgatgccttgtacgatatgaagctgaaactaaatgctactggcagtcagctttctgactggaaccaaaatcaagtcaacccatgcacctggaattctgttatttgtgacaacaacaaccatgttgtgcaagtaacattggcttctatggggtttactggagttctgtcaccaagaatcggagatctggagtatttaaatgttctgtccttgcctggtaacaacatctctggtggcataccagaagaatttggcaacctctctcgattgacaagcttagatttggaagacaacctgttggttgggccaataccagcttcacttggcaggctttcaaagctccagcttctgatactaagtcaaaacaatctcaatggctctattcctgatacactagcaagcattttaagcttgacagacattcggctggcttacaataaactcactggtcaaataccttcccagttgtttcaagttgcacgttacaatttttcaggtaataacttgacatgtggagcaaacttcctccatccatgtgcctcaaatatgtcttaccaaggttcttcccgtggttcgacaataggcattgtgcttgggacagttggaggtcttatggggcttctaatcatatgggctgtattcattatctgcaatggaaggaggaaaagccatctacgtgaaatatttgtggatgtatcaggtgaggatgatcgtagaattgcatttggccagttgaaaagatttgcatggcgagaattgcaacttgcaactgataatttcagtgagaaaaatgttcttggacaagggggttttgggaaagtatataaaggagcacttccagatggcactaagattgctgtaaaacggttaactgattacgaaagtccaggtggagaggctgctttcttgcgtgaggttgagctaattagtgttgcagttcaccggaatcttttaagattgattggtttctgtacaacacaaacagagcgcctacttgtttatcctttcatgcaaaatcttagtgtggcctaccgtctacgagaatttaaacctggggagccaatattagactggtccgcaaggaagcgagtggctataggcacagctcgtggactggagtatttgcacgagcactgcaatcctaagattatacatcgtgacgtcaaggctgccaatgtcttgcttgatgaaggttttgaaccggtggttggggatttcggcctggccaagctggtggacgtgcagaagacgtccgtgactacccaggtccgtggaaccatgggtcacatcgcccccgaatacctgtccactgggaagtcctccgagagaaccgatgtttttggctatggcataatgcttcttgagctagtcactggtcagcgtgccatcgacttttcacgtctggaggaagaagatgacgtgttgttacttgaccatgtcaagaagctgcagagggaagggcatctcgacgccatcgttgaccgcaacttgaacagctgttacaacgggcaggaggtggagatgatgatccagatcgcgctgctctgcacgcaggcgtcgcccgaggaccgcccgtccatgtccgaggtggtccggatgctggagggcgagggcctcgccgagaggtgggaggagtggcagcaggtggaggtgacgaggaggcaggactacgagcggatgcagcagcgcttcgactggggcgaggactccatctacaaccaggacgcgatcgaactgtccgccggcaggtga

SEQ ID NO: 95774 - DNA, 2819 bp, Zea Mays
atgagcttgcacgccgcgcgcggcgggccgcacgaggatctgagctggagcgccatcgggcggcgggcaccccgtgacgtggtgacattcggtgatcgagaaggaggcggcgggatgaggagtgcgcagcaggggccgggggcggtgcgggtggacgaggcgtcgtccgcgtccaccttccgtgagctcgacgaggccttcctgcagacacaaacaaagatctggcttggagaagttctacatcttaggtttggtgaagacgctttagttgctgatcttcttgctgacggagaattactgtttcaagtttccaaggtattatggaaaatgttactaaaaaataacagagaacaattgaaacaatcaaaagtgtatatttatgagagactatccttcggtagaagtagtggaaaatacatgccctattcaaaagttgactcctttctaaagatatgtcaaatccttgggttagctggaattgatctgtttaccccttctgatgtggtcgaaaaaagaaatgttcggaaagtctgtatatgcatacgatcggtgtctaaaaagtcactcatcttgcacctaaatgtgcctgattttgatgtagtcacctacacaatatccatgccaaactatgttgttggaggtattcgtagaaatctggagcagacacagtacagctcatccagttcaagtggatacagtccatgtgcccgttctaaagtactacagcaacagataatatttggagggcagaatgaccagcacgaggacacacattatgactctgatgaagcagaaagcaaactctctcttctagaacctgaggactcagttaatgaagataattttgcggctgtgctttcacaatttaacgatgcccatgcccccaacaaagaaagcgaaggctatggagaaagtggacgtggcaagcatggagaaaaatctctagctgaatcagtgggatcacttaacattggcattattgattctgagttcatggattcaagtcctctaattcatgataaagaatcatgttttcctctagaacctgagggctccgttaatgaagataattttacagctgtgctttcacaatttaacgatgcccccaacaaagaaagtgaaggctatggagaaagtggatgtggtaagcatggagaaaaatctctagttgaatcagtgggatcacttaacattggcattgttgattctgagttcatggattcaagtcctctaattcatgataaagaatcatgttctcctctagaacctgaggactccgttaatgaagataattttacagctgtgctttcacaatttaacgatgcccccaacaaagaaagtgaagcctatggagaaagtggatgtggtaagcatggagaaaactctctagatgaatcagtgggatcacttaacattggcgttattgattctgagttcatggattcaagtcctctaattcatgataaagaatcatgttctcctctagaacctgaggactccgttaatgaagataattttgcagctgtgctttcacaatatagcgatggccccaacgaaggaaatgaaggatatggagaaagtggacattacaagcatgaagaaaagtctctagatgaatcagtgggatcactaaccattggcattattgattctgagttcatggattcaagtcgtccaattcatgataaagaatcatgttctactggttctgcagctgaccaatgttcaaggactataccggctaaatatgaattaagttcagaagagtcagattccacaggcagtcatttggtgtttgacagtggcaagaattatctggagttgaacaatcattctgtcacagatttggaaaggatttacaatggacatgccacgtctgtagatcaatatgttcggggaaatggggagacattagctgaccatccaaaaaaagaggaagctggcctccaaaaggacactggcaccatagctcaacatcgtgatacccttgcttgtgatggggagtctgtgtgttcgagttgtgaagagccgagacgtggattaaatggcgagccatcagacttcagctcggagtcacactcgagactgaccccaacacataacacaggtggcaaattgtcgatggtttctgaacatccagtgcataatatggagtcagatatgactgggatggcaagtgatagcactaacccggagctgaatcctgaagccagcaccaggaacgaaatggacggctcccgatccactgataacccagtggaaccagaaaacgtagctcaggacagcgccactcgaggaaggcctgaaggcgacgcccccagatcagggaaaggggttctgaggtcggtcgctggaggaatcacccttgtcggcgcagtgttcttcatgttccatctcagtgccgcgctgctgcagaagaagcaaggggggaagctttgcgacggtcataccatctctttcgggaaaatctgctcggagcaacgcaagggccaggaacatgggcagagaaaacgtccctgatgcgtatcccggggggcggctgaaggcttgacaagacgatggagcacagtctgcttcacagaatctggatgaactctgtcgacccaccagtcaagttgaagtcagtaccctgccttctttcatgtacagaacgacataatcatatgatttaggtgatcgattacagcaaatagtgggacagattttgtacaagtatagttgaggcatgaataaagtctagtttccaacctccaacgtttaaacctagacggtggttgaaaaccagaacggcgttgtgtttaagtcatcactaccctttc

SEQ ID NO: 95775 - DNA, 2803 bp, Zea Mays
atgagcttgcacgccgcgcgcggcgggccgcacgaggatctgagctggagcgccatcgggcggcgggcaccccgtgacgtggtgacattcggtgatcgagaaggaggcggcgggatgaggagtgcgcagcaggggccgggggcggtgcgggtggacgaggcgtcgtccgcgtccaccttccgtgagctcgacgaggccttcctgcagacacaaacaaagatctggcttggagaagttctacatcttaggtttggtgaagacgctttagttgctgatcttcttgctgacggagaattactgtttcaagtttccaaggtattatggaaaatgttactaaaaaataacagagaacaattgaaacaatcaaaagtgtatatttatgagagactatccttcggtagaagtagtggaaaatacatgccctattcaaaagttgactcctttctaaagatatgtcaaatccttgggttagctggaattgatctgtttaccccttctgatgtggtcgaaaaaagaaatgttcggaaagtctgtatatgcatacgatcggtgtctaaaaagtcactcatcttgcacctaaatgtgcctgattttgatgtagtcacctacacaatatccatgccaaactatgttgttggaggtattcgtagaaatctggagcagacacagtacagctcatccagttcaagtggatacagtccatgtgcccgttctaaagtactacagcaacagataatatttggagggcagaatgaccagcacgaggacacacattatgactctgatgaagcagaaagcaaactctctcttctagaacctgaggactcagttaatgaagataattttgcggctgtgctttcacaatttaacgatgcccatgcccccaacaaagaaagcgaaggctatggagaaagtggacgtggcaagcatggagaaaaatctctagctgaatcagtgggatcacttaacattggcattattgattctgagttcatggattcaagtcctctaattcatgataaagaatcatgttttcctctagaacctgagggctccgttaatgaagataattttacagctgtgctttcacaatttaacgatgcccccaacaaagaaagtgaaggctatggagaaagtggatgtggtaagcatggagaaaaatctctagttgaatcagtgggatcacttaacattggcattgttgattctgagttcatggattcaagtcctctaattcatgataaagaatcatgttctcctctagaacctgaggactccgttaatgaagataattttacagctgtgctttcacaatttaacgatgcccccaacaaagaaagtgaagcctatggagaaagtggatgtggtaagcatggagaaaactctctagatgaatcagtgggatcacttaacattggcgttattgattctgagttcatggattcaagtcctctaattcatgataaagaatcatgttctcctctagaacctgaggactccgttaatgaagataattttgcagctgtgctttcacaatatagcgatggccccaacgaaggaaatgaaggatatggagaaagtggacattacaagcatgaagaaaagtctctagatgaatcagtgggatcactaaccattggcattattgattctgagttcatggattcaagtcgtccaattcatgataaagaatcatgttctactggttctgcagctgaccaatgttcaaggactataccggctaaatatgaattaagttcagaagagtcagattccacaggcagtcatttggtgtttgacagtggcaagaattatctggagttgaacaatcattctgtcacagatttggaaaggatttacaatggacatgccacgtctgtagatcaatatgttcggggaaatggggagacattagctgaccatccaaaaaaagaggaagctggcctccaaaaggacactggcaccatagctcaacatcgtgatacccttgcttgtgatggggagtctgtgtgttcgagttgtgaagagccgagacgtggattaaatggcgagccatcagacttcagctcggagtcacactcgagactgaccccaacacataacacaggtggcaaattgtcgatggtttctgaacatccagtgcataatatggagtcagatatgactgggatggcaagtgatagcactaacccggagctgaatcctgaagccagcaccaggaacgaaatggacggctcccgatccactgataacccagtggaaccagaaaacgtagctcaggacagcgccactcgaggaaggcctgaaggcgacgcccccagatcagggaaaggggttctgaggtcggtcgctggaggaatcacccttgtcggcgcagtgttcttcatgttccatctcagaagaagcaaggggggaagctttgcgacggtcataccatctctttcgggaaaatctgctcggagcaacgcaagggccaggaacatgggcagagaaaacgtccctgatgcgtatcccggggggcggctgaaggcttgacaagacgatggagcacagtctgcttcacagaatctggatgaactctgtcgacccaccagtcaagttgaagtcagtaccctgccttctttcatgtacagaacgacataatcatatgatttaggtgatcgattacagcaaatagtgggacagattttgtacaagtatagttgaggcatgaataaagtctagtttccaacctccaacgtttaaacctagacggtggttgaaaaccagaacggcgttgtgtttaagtcatcactaccctttc

SEQ ID NO: 95776 - DNA, 697 bp, Zea Mays
caggtgcagcagcggcagcgccgcgctcattccggcgcagcacgcgacacgcggcttctgcctcgcctccacggctgcagcccgcgccgcccaccccaggcgcgcgcgcacgcaaacggcaacgcgtgctcacgcatcctcctcctcccgccgctgaagtggagtagccgagtagcaaactacggcacacggccatgagcttgcacgccgcgcgcggcgggccgcacgaggatctgagctggagcgccatcgggcggcgggcaccccgtgacgtggtgacattcggtgatcgagaaggaggcggcgggatgaggagtgcgcagcaggggccgggggcggtgcgggtggacgaggcgtcgtccgcgtccaccttccgtgagctcgacgaggccttcctgcagacacaaacaaagatctggcttggagaagttctacatcttaggtttggtgaagacgctttagttgctgatcttcttgctgacggagaattactgtttcaagtttccaaggtattatggaaaatgttactaaaaaataacagagaacaattgaaacaatcaaaagtgtatatttatgagagactatccttcggtagaagtagtggaaaatacatgccctattcaaaagttgactcctttctaaaggtatggatctttgcacattttccttctagacgattcggttctattaatatatt

SEQ ID NO: 95777 - DNA, 1926 bp, Zea Mays
ccgagtccgaatcccgacgcgctccggctcccatggagcttagattttaggtgtgagctgctccccctgtatggacccgtccacacccgccgacgaaacctcgccgattgcgcgggcggtctcggcgcccggtgctcagccgactcgctccttccctgcccccattcccgaggagtcactccactcttcgcctgcttccaccgccaccgagtcggcggaggagcctaccgttgcggcgcccgaggagtcacccaacgctgcccctgcctctgctgtcgtggctcccgtcgggggtttgcccctgccttcgccaaggaggggaggcggggaggtagggatacggggtgcacggccgcctttactctccccgcctccgccaattggtgcactagctcctccgccagttaggaggtccttcgttgacaatgacatgactgggtccgcttgggacattgtgcagtcgtttgctcccagggatcagggaagtgaactgggactgggaggaagtgtcgacagtcgttgcaattcggacaaagaggaagagaatgatgttgaggatggggacgcagcggtggagggcgagctgaaggaattgaggataggagagactttcgaggggttcactggaacttcttcattgtcgacgacgaatgatgatgacgcgtccagtacaaccacggaggccatgttcatcatttcaccgaatggcaagttcaagcggaacattaaatcatggatgcgtggtgctcttctgggaagcggctcatttgggatggtgtacgaggggatcagtgatgagggtgcattttttgctgtgaaggaagtatctttgcttgaccaaggaagcaacgcacaacaatctattgttgcacttgagcaggaaattgcactcctcagtcagtttgaacatgaaaatatagtccagtattatggaactgacaaggaagaatccaaactctatatttttattgagcttgtcacacaagggtctctttcatccctctatcaaaagtataaactacgagaatcacaagtctctgcatacacaaggcagattcttaatggattggtttatctccatgagagaaatgtggtccacagagatatcaaatgcgccaatatattggtccatgcaaatggatctgtaaagcttgcagattttggattggcaaaggagatgtcaaaaattaatatgctaaggtcatgcaaaggaagtgtttactggatggcacctgaggttattaatcctaaaaagatgtatgggccttcagctgatatatggagccttggctgcaccgtgttggaaatgctaacccggcaaataccatttcctaatgtcgagtggacaaatgctttcttcatgattggaagaggggaacagcctactattcccaactacctgtctaaggaggcacaagattttattggccagtgcgtaagagttgatcctgagagccggccttctgcgtcacaacttctggagcacccatttgttaacagaccactgcgagcttcatttgaatcttcgtctccaccagccatctgattctagtattgatataatggggtgtttctcgttgaggccaatgctcaggtcacgtactcacgtgttgatcttcatgatctacactactggttccagaatggaattacgtgggcttgtttaggatgtagtttagtagctgtagtccgtagggttggtgggcagcattgctctgtggttttgtattctttggggtgttcttcattgggcaaagggttttcttcctggttattacgtagatttgtgtaaacttgtaggtaaaagggctgcaattgcctctgggctctggtgtaggtttagccgatgtttgtgaatgtttgacatcgccattctttacgtaaatggttttgttgctcaaaaaagcatccggagcattgaatccc

SEQ ID NO: 95778 - DNA, 2443 bp, Zea Mays
acacgccatacccttctcgcaagcagtcaagctcctcccccaatccttccccgatgctgcggcgcaacagcgtgtgcgaaaccgagtccgaatcccgacgcgctccggctcccatggagcttagattttaggtgtgagctgctccccctgtatggatccagatgttctcgtggagccgtaagcagtcctcctccggctcgtcctccggccgccgccgcggcggggcggacgcctccatggactccagcagccgcggcggcggcgggagcgggagccgcggacggagcccgcggttggatcgccgcaacgcagtgaagcgcatcgagtacgaggcgagcgcgggggcgtccgcgtcgtggtcgtcctcgtcctccgcggagcagcagcgctcgccggggctccggccctcgcgctccctggaccttgcccccggcgcggacctccgaatcagcgggagcgtggagggggaggtcgacgagctctgccgcagcctggggctctcggggcccgaggatttcgccgtccccgtcgcggcctgggaggcgcgcaagtcgcggtctaactccgacctcctcccgcgctcccgcctcgacccgtccacacccgccgacgaaacctcgccgattgcgcgggcggtctcggcgcccggtgctcagccgactcgctccttccctgcccccattcccgaggagtcactccactcttcgcctgcttccaccgccaccgagtcggcggaggagcctaccgttgcggcgcccgaggagtcacccaacgctgcccctgcctctgctgtcgtggctcccgtcgggggtttgcccctgccttcgccaaggaggggaggcggggaggtagggatacggggtgcacggccgcctttactctccccgcctccgccaattggtgcactagctcctccgccagttaggaggtccttcgttgacaatgacatgactgggtccgcttgggacattgtgcagtcgtttgctcccagggatcagggaagtgaactgggactgggaggaagtgtcgacagtcgttgcaattcggacaaagaggaagagaatgatgttgaggatggggacgcagcggtggagggcgagctgaaggaattgaggataggagagactttcgaggggttcactggaacttcttcattgtcgacgacgaatgatgatgacgcgtccagtacaaccacggaggccatgttcatcatttcaccgaatggcaagttcaagcggaacattaaatcatggatgcgtggtgctcttctgggaagcggctcatttgggatggtgtacgaggggatcagtgatgagggtgcattttttgctgtgaaggaagtatctttgcttgaccaaggaagcaacgcacaacaatctattgttgcacttgagcaggaaattgcactcctcagtcagtttgaacatgaaaatatagtccagtattatggaactgacaaggaagaatccaaactctatatttttattgagcttgtcacacaagggtctctttcatccctctatcaaaagtataaactacgagaatcacaagtctctgcatacacaaggcagattcttaatggattggtttatctccatgagagaaatgtggtccacagagatatcaaatgcgccaatatattggtccatgcaaatggatctgtaaagcttgcagattttggattggcaaaggagatgtcaaaaattaatatgctaaggtcatgcaaaggaagtgtttactggatggcacctgaggttattaatcctaaaaagatgtatgggccttcagctgatatatggagccttggctgcaccgtgttggaaatgctaacccggcaaataccatttcctaatgtcgagtggacaaatgctttcttcatgattggaagaggggaacagcctactattcccaactacctgtctaaggaggcacaagattttattggccagtgcgtaagagttgatcctgagagccggccttctgcgtcacaacttctggagcacccatttgttaacagaccactgcgagcttcatttgaatcttcgtctccaccagccatctgattctagtattgatataatggggtgtttctcgttgaggccaatgctcaggtcacgtactcacgtgttgatcttcatgatctacactactggttccagaatggaattacgtgggcttgtttaggatgtagtttagtagctgtagtccgtagggttggtgggcagcattgctctgtggttttgtattctttggggtgttcttcattgggcaaagggttttcttcctggttattacgtagatttgtgtaaacttgtaggtaaaagggctgcaattgcctctgggctctggtgtaggtttagccgatgtttgtgaatgtttgacatcgccattctttacgtaaatggttttgttgctcaaaaaagcatccggagcattgaatccc

SEQ ID NO: 95779 - DNA, 86 bp, Zea Mays
ctgccagccgcaaacatagcaactgcggtgtgagtagggctggtaatggatcacgatccaaatgcctcttcacaaaaaattaaggc

SEQ ID NO: 95780 - DNA, 210 bp, Zea Mays
atgtacttgccaacctccttacggagggtgatgacctcctcctcggagaggtccttggtgatcttgttatcgaaattgaggtccaggaggatctggcgtgagcgtgagcgtccaatgccatgtatgtactgcagcgagtactccaccctcttgtggtttggaatctcaacaccaccaatacggatgcactcgatccgcaagccaccgtga

SEQ ID NO: 95781 - DNA, 2288 bp, Zea Mays
ctgcactggtagtagtagcccagtactggcaccgctctagcccagatcaaagctcgggagaagagggagaggaggtagtgcaacataaatcccgagtcccaccaaatcgcaagtcctagcagcttccggtctgcaactgcaacgccgcgggcttgagtgcgagagtgcgcgtgggggatgaggcgggtggcaccggcgatgaccgccgccagcagcgctgctggcggcgaggagacggcggtggtggagaagacgctgctcaacggggacgtctaccgcggcggctcgccgcacgggaagggcaggtacgtgtgggccgacggctgcatgtacgaggggaactggcggcggggcaaggcgtccgggaagggccgcttctcgtggccgtcgggcgccacgttcgaggggcagttccgcaggggccgcatcgacgggcagggcgtgttcgtcggcccagacggcgccacctaccgcggcgcgtgggtggcggaccgtcgccacggcctgggcaacaagacctacgccaacggggactgctacgagggccagtggcgccgcaacctccaggacggccacggccggtacgtctgggccaacggcaaccagtacatcggggagtggcgcgccggggtgctctccggccgcggcgcgcttatctgtgccaatggcagccgctacgacggcgtctgggagaacggcgtgcccaaagggtcaggggtcttcacgtggcccaccggcggctcctggcctgggagctcggtagacctgccggccatgagcgccactttcttcgcgcctcctggtgctgttgctgtgagtaggaggtcttctgtggagggcgtgggggacaaggcgaccccgcggatctgcatatgggagtcggagggcgaggctggagacattacctgcgacatcgtcgacgcgctcgaggcgtctatgcctatgctcttcaaggaagccgcggctatcgcgggtggagcaacttacatgcgatcagccagcggagtcccacgctgggcgtcggcggtggcaaccacgccgcagagtaaacgacccgggcggaccatatccaagcgacacaagaattacgagcttatgctgcagctgcaattaggcatcatgcattccgtggggaagtcttcggctgtgccgatgcgagaactggaacagggagattttgatccaagggaaaatgctttgtcctggacagagttcccaccagagggttcgaaggccacactgccgcattcaactgggtacttctgctggaaggactactgccccatggtgttcaggcatttgaggaagttgtttgctgtggatacaggggattacatgctttcgatctgtggcaatgatcctctgagggagctgtcttcgcctgggaaaagcgggagcttcttttaccttacccaagacgaccaattcatgattaagacagtgaagaaatcagaagtcaagctgctacttaagatgttaaatagctactgcaaacatgtcgatcgatacaagaactcattaatcacgaggttctatggtgtacactgtgtgaagcgccataatggacagaaggtccgattcattgtcatgggtaatctgttctgttctgaataccagattcatcgccgttttgatttgaaaggttcatcatatggacgaacagcagacaagtttgaagatgagattgatgagacaactacactcaaggacttggacctcaattttgtcttccggttgcagaaatcttggtacaccgatctccatgaacaattgagacgagactgcgatttcttggaatcagaagggattatggattacagtttcttgataggaattcacttttgtgatgacatctctgcctcaaagatgggatcctctacttttactgcttctccaaagcgtttaatcaagagtgaatcatttcaaggtggtggcacaacagagctttgcttctcagatgatgcttttgatatggtacctgattgcagccggaaatctttgattagactgggcgcacacatgccaggccgggcagagcaagcatccagaaggagcgggttcgtattcccaaaccagaccggcgaagtgcacgacgtgattctctttttcgggataattgacatccttcaggattacagcgtcaaaaagcggctcgagcatagttacaagtcattgcagacagaccccaactcgatctctgccgtggaacccaagctctactcgaggaggtttcaagagttcatcggcagaattttcgtggaagatggctaacacgcattgggtacaga

SEQ ID NO: 95782 - DNA, 111 bp, Zea Mays
gaccttttgtattgttttgagtttaccaatattattccaaaacattgttaatactccactctgtacaacgtacatagactacttcctttttttcgaaaatggaaatcgtat

SEQ ID NO: 95783 - DNA, 2391 bp, Zea Mays
ccgatccctctccttctctccttctctgacccgacccgaccaatccaatccatcccctctccatctcccatgaccatgaacagcggctcggcaatatactactgctaggttatgctactccattacgaaaaagcgcagagagaacgcagaatggaatcgtcgctcttatcatactccatgactccatcactagactagagagagaaacccttgtaccctttgttctgtttatcccccatttctccgagtcacccacccatcgccgaacttcgagtccaaggaagcggagccaccggagaaggggatatttgcctttcccgtcggggggtctagggagcaggagagatgcagcggcggcgggggcacacgtgggcgggggtggggaagacggcccaggcggcgtcggcgcacgccgcgctcttctgcttcactctcctcctcgcgctcagggtcgacggacgcaccacatactcctggtggataatattcattccactatggctctttcatggtattgttgcgcgtggaaggttttcaatgcctgccccttcattacctcatggccgtcattgggcaccatgtcattcgattgttgcagcgcctttactaattgcgttcgagctgcttctctgcatatatcttgaaagcataagagttagaaatcatccatcttttgatctgaagattgtgttccttcctctgttggcctttgaagcaattatccttattgacaattttagaatgtgtagagctttaatgcctggagatgaagaaagcatgagtgatgaagctatttgggagacgcttcctcatttttgggttgcaatttcaatggtgtttcttatagctgctacaacattcacccttctcaagctgtctggtgatgttggtgctttgggctggtgggatttgtttataaattatgggattgcggaatgctttgcatttcttgtctgtacaagatggtttaatcccatgattcataagtcccccactcatggggaggctagctcatcatcagcggcaattaggtaccgtgattgggaaagtggtcttgtcctcccatcactagaagatcacgaacaagagaagctttgtggtctacctgacattgggggccatgtaatgaaaatacctcttgtggctttccaagtattgctttgtatgcggttggagggcacaccaccaagcgctcgctacatcccaatatttgctcttttctcgccactatttattctgcaaggtgctggtgttcttttctctctagcaagattagtggagaaggttgttctgctattgcgtaatggaccagttagtcctaattaccttacagcctcatcaaaagttcgcgattgctttgcttttcttcatcatggttcaaggcttcttggttggtggtctattgatgaagggagcaaggaagaacaagcccggttattttatactgaatctactgggtacaataccttttgtggctatccgccagaggtggttaggaaaatgcctaaaaaggaccttgcagaagaggtttggaggctacaggcagctttgggagaacaatctgaaatcaccaagtgtaccaaacaggaatatgaaaggcttcaaaatgagaaggttctttgtaggatttgttatgagggggagatatgcatggtgctacttccctgccggcacagaactttatgcaaatcttgtgctgagaaatgcaagaagtgtccaatctgccgtgtgccaattgaagagcgcatgcctgtatatgatgtttaaacctcactaactcagcttaacaatacaaatttgtgcatgtgggttctgtcatgctgtgcatttagtctcgatcacaactttaagctgattgaggtttgcacttcagaaagggtctgcaatatatgggggaaatacaagtatatcatgtctaaccaaaagcatggatatgtggttgatgagcattgtcgttttggaccagttatctactgtaagtatgtggtcagtgtatttcccttccctcttgtgattggtagatgagtcagatagtcttgttcgcgtagcagcattttctcagggatatgcagttgttgagaagaaagtgaaacaaaaacagactgtaaataaaaacactgccttgtttgaatctagtccttgtttgagaagaaagtggaacaaaaaaaatgtaaacatctctgttgtattattttgtagtagaaaaatgtctgccgaaatttgtgaccgcaatgcttcgtcggcggcttggtggcttttcacaatgtgaagggtcagcgagagcatgtaagggttgtggaagcgtgcctggacaagaaaactcgtgtccgatctttgaccaagaatcacgggagatatgatttcaagccgtactgaggcgattggaaccaa

SEQ ID NO: 95784 - DNA, 1386 bp, Zea Mays
atgcagcggcggcgggggcacacgtgggcgggggtggggaagacggcccaggcggcgtcggcgcacgccgcgctcttctgcttcactctcctcctcgcgctcagggtcgacggacgcaccacatactcctggtggataatattcattccactatggctctttcatggtattgttgcgcgtggaaggttttcaatgcctgccccttcattacctcatggccgtcattgggcaccatgtcattcgattgttgcagcgcctttactaattgcgttcgagctgcttctctgcatatatcttgaaagcataagagttagaaatcatccatcttttgatctgaagattgtgttccttcctctgttggcctttgaagcaattatccttattgacaattttagaatgtgtagagctttaatgcctggagatgaagaaagcatgagtgatgaagctatttgggagacgcttcctcatttttgggttgcaatttcaatggtgtttcttatagctgctacaacattcacccttctcaagctgtctggtgatgttggtgctttgggctggtgggatttgtttataaattatgggattgcggaatgctttgcatttcttgtctgtacaagatggtttaatcccatgattcataagtcccccactcatggggaggctagctcatcatcagcggcaattaggtaccgtgattgggaaagtggtcttgtcctcccatcactagaagatcacgaacaagagaagctttgtggtctacctgacattgggggccatgtaatgaaaatacctcttgtggctttccaagtattgctttgtatgcggttggagggcacaccaccaagcgctcgctacatcccaatatttgctcttttctcgccactatttattctgcaaggcttcttggttggtggtctattgatgaagggagcaaggaagaacaagcccggttattttatactgaatctactgggtacaataccttttgtggctatccgccagaggtggttaggaaaatgcctaaaaaggaccttgcagaagaggagaaggttctttgtaggatttgttatgagggggagatatgcatggtgctacttccctgccggcacagaactttatgcaaaaagggtctgcaatatatgggggaaatacaagtatatcatgtctaaccaaaagcatggatatgtggttgatgagcattgtcgttttggaccagttatctacttagaaaaatgtctgccgaaatttgtgaccgcaatgcttcgtcggcggcttggtggcttttcacaatgtgaagggtcagcgagagcatgtaagggttgtggaagcgtgcctggacaagaaaactcgtgtccgatctttgaccaagaatcacgggagatatga

SEQ ID NO: 95785 - DNA, 2240 bp, Zea Mays
ccgatccctctccttctctccttctctgacccgacccgaccaatccaatccatcccctctccatctcccatgaccatgaacagcggctcggcaatatactactgctaggttatgctactccattacgaaaaagcgcagagagaacgcagaatggaatcgtcgctcttatcatactccatgactccatcactagactagagagagaaacccttgtaccctttgttctgtttatcccccatttctccgagtcacccacccatcgccgaacttcgagtccaaggaagcggagccaccggagaaggggatatttgcctttcccgtcggggggtctagggagcaggagagatgcagcggcggcgggggcacacgtgggcgggggtggggaagacggcccaggcggcgtcggcgcacgccgcgctcttctgcttcactctcctcctcgcgctcagggtcgacggacgcaccacatactcctggtggataatattcattccactatggctctttcatggtattgttgcgcgtggaaggttttcaatgcctgccccttcattacctcatggccgtcattgggcaccatgtcattcgattgttgcagcgcctttactaattgcgttcgagctgcttctctgcatatatcttgaaagcataagagttagaaatcatccatcttttgatctgaagattgtgttccttcctctgttggcctttgaagcaattatccttattgacaattttagaatgtgtagagctttaatgcctggagatgaagaaagcatgagtgatgaagctatttgggagacgcttcctcatttttgggttgcaatttcaatggtgtttcttatagctgctacaacattcacccttctcaagctgtctggtgatgttggtgctttgggctggtgggatttgtttataaattatgggattgcggaatgctttgcatttcttgtctgtacaagatggtttaatcccatgattcataagtcccccactcatggggaggctagctcatcatcagcggcaattaggtaccgtgattgggaaagtggtcttgtcctcccatcactagaagatcacgaacaagagaagctttgtggtctacctgacattgggggccatgtaatgaaaatacctcttgtggctttccaagtattgctttgtatgcggttggagggcacaccaccaagcgctcgctacatcccaatatttgctcttttctcgccactatttattctgcaaggtgctggtgttcttttctctctagcaagattagtggagaaggttgttctgctattgcgtaatggaccagttagtcctaattaccttacagcctcatcaaaagttcgcgattgctttgcttttcttcatcatggttcaagcttctttgtccatgtgttgtgcaggcttcttggttggtggtctattgatgaagggagcaaggaagaacaagcccggttattttatactgaatctactgggtacaataccttttgtggctatccgccagaggtggttaggaaaatgcctaaaaaggaccttgcagaagaggtttggaggctacaggcagctttgggagaacaatctgaaatcaccaagtgtaccaaacaggaatatgaaaggcttcaaaatgagaaggttctttgtaggatttgttatgagggggagatatgcatggtgctacttccctgccggcacagaactttatgcaaatcttgtgctgagaaatgcaagaagtgtccaatctgccgtgtgccaattgaagagcgcatgcctgtatatgatgtttaaacctcactaactcagcttaacaatacaaatttgtgcatgtgggttctgtcatgctgtgcatttagtctcgatcacaactttaagctgattgaggtttgcacttcagaaagggtctgcaatatatgggggaaatacaagtatatcatgtctaaccaaaagcatggatatgtggttgatgagcattgtcgttttggaccagttatctactgtaagtatgtggtcagtgtatttcccttccctcttgtgattggtagatgagtcagatagtcttgttcgcgtagcagcattttctcagggatatgcagttgttgagaagaaagtgaaacaaaaacagactgtaaataaaaacactgccttgtttgaatctagtccttgtttgagaagaaagtggaacaaaaaaaatgtaaacatctctgttgtattattttgtagtagaaaaatgtctgccg

SEQ ID NO: 95786 - DNA, 197 bp, Zea Mays
gggtaaattaaaacacgagcaatataagcatgacagttaaacctgtcgattcgcagcaagcatgcccagtgccgcacaaccaccgtatctccctcacagtctcactccctgacgctcgttgcctgccagcctgcctaatctataagctcatcgccgtcgaggcagtgctcagccgctctcttctatttttacaagtg

SEQ ID NO: 95787 - DNA, 1715 bp, Zea Mays
tagcattcaggccttcgcatgctgtggtttccaatagtggtgtcattcctgttgcacctagcctggacactataggttggtttgcaaaggatccaagtgttttgcatcgtgttgggcatcttcttcttagacttccttatgctggtattcgccaaccgagaattttttacatagcagatgattgctttgatctttcaaagatacctgctaggagacttactcaggtggtgacaaaatctgtggagaagctctttggaagacaagtccggcatgtgaatctcgaaaattatttgagttcaagaatatccagcctgggtaactattcaaatgggcataagaatggggattcaaagttccctctgttgctagcactttgtaactccatgatatcacttcacaagcaggaattcaaagataagcatatggagtggataaattcagttaagcctgctgtggatgcacgcatagtcagtgatttgtctgaggatggtgattcagatattgatggctgccaaaatgtgaggaaagaagcgcgctctgctctaagtggacttcttaaggatgatgggattctggtgattccaactgctttggggtgccccccgaagcttaacgctaaggaactctcgtctgaaagctacaattctcagacactacgccttttgtctttagctagcatgtcagggtgttgccaggtttccattcctttgggtacacatgataagtgccccatttcagtttcgttgattgctaggcatggtggtgatcggtttttgttggacaccacacaaaccatgtatacaaccatccaagagcaagtggagatactagcgaaatctagtgtttcaagtaaacaggcgatgaatgaagaagcagctgaagctgctaaagagaaaggtaatgctgcatttaaggaaaaacaatggcaaaaggcagtaaatttctacactgaagcaataaagttaaatggaaaagtggctacatactacagcaacagagctgctgcctttctagaactaactagctaccgtcaggctgaggcagattgcacaagtgccatcgaacttgattccaagagcgtgaaagcttatttacggagaggcactgcaagggagatgctaggttattataaggaggccgttgatgatttcaaccacgcccttgttctagaaccaatgaacaagacggctggtgttgccatcaacaggttaaagaagctgtttccttgaatatgaagctgcatgaagatatgataacctcatattttgtgcacacacaaggggtgggattgaagtacctgagttcaaccgacggatgctgatcacagtttgagctagtgggaacggatttcaacactgagatcaggttaagggtcaatttagcggtttctctccccacccaaagttttggaaaagcaaaataaagaaggttttttgggaaccggaaagcagtttacgggtgtccgccatccccaccatgtataatatagtttcgccaattatttgttcagacgctttgccaatcgaactttttctgccatgcttacctgtacccatctctccttgccgttctgagcggcagcttttttgcgggctcgctctgaaaacggctgccaccagtgaggtcgctcgtggaggctgttaggcggccatgtgctgacgcgcagtcgcttcgccggctgaacctttcagccctttcagtttcggttgtttgct

SEQ ID NO: 95788 - DNA, 1350 bp, Zea Mays
gtcatatgtaccaacggtccaaccccaagcagcgtctcgagaagaagttccgtacccttcactccactattccggtcaacccatccctttcctccgcctccgcttccgcgtccgcccgccgctatgccgccagccagtagcctcaccgccgaccagctcagcttcttcgaggccaatgggtacctcgtgatggactcgttctcgagcgcggaggaggtgcgggagatgcgggaccgcatggccgaccttgtcgctgggttcgatggcgccaactccgcggtgttctccaccaaggatcatcggcagttaaaggacgactacttctttaagagtgctgagaatatctcattcttctttgaggaaaaggcatatggagatgatggatgcttgaaacagccgaaagaactttcaattaataaagttgggcatgcattacatgaacttgatccggtgttcaaaaagttttctttctcagagagtgttgcaagcttgttctcttctttaggctacaagaggcctgcagtcattcaatctatgtacatatttaagcaaccaggtattggtggtgaggtcgtgccgcaccaggataatacattcctttacacggaacctcgtacatgcacagggctgtggcttgcacttgaagatgcaacaatcaacaatggttgcctgtgggcaattccaggatcacataaaaagggtttggtgagacgtatggtcagagatgaaaatggtacacattttgatcggccctccccagtctatgatcagaaagaatttgtaccgctggaagtaaaatctggtgctttggtggttatacatggagatcttatacatcagagttttgagaacctttctccagcgtcaagacatgcattcagcttacatgtagtggatactgaaggatgtaaatggtccgaagacaactggatacaaaggaaaacggcccctgaaccgctctatgtgtcttagcaaaaccagtaactagtgccgtaaaacaatagagattcccagcaagtgatttgtggatcgcttctctgcacaataaaatgggggaatcaagctgcgccatgctgtttccgtttcacctgtaaacatatgagggcttgttcggttatttccaatacacatggattggatgggattgaaaaaaattgagaagaagtttgacttgtttgggattcaaactcattcaatcccactcaatccacatggattgagagctaaccgaacaagccctaaactgtaaatactattgctactgtaataccataaaaaatctctctcggctgggtaggagaaagactgcctctacgatattatattaaaaagaagctcaatcggagtcct

SEQ ID NO: 95789 - DNA, 1305 bp, Zea Mays
gtcatatgtaccaacggtccaaccccaagcagcgtctcgagaagaagttccgtacccttcactccactattccggtcaacccatccctttcctccgcctccgcttccgcgtccgcccgccgctatgccgccagccagtagcctcaccgccgaccagctcagcttcttcgaggccaatgggtacctcgtgatggactcgttctcgagcgcggaggaggtgcgggagatgcgggaccgcatggccgaccttgtcgctgggttcgatggcgccaactccgcggtgttctccaccaaggatcatcggcagttaaaggacgactacttctttaagagtgctgagaatatctcattcttctttgaggaaaaggcatatggagatgatggatgcttgaaacagccgaaagaactttcaattaataaagttgggcatgagagtgttgcaagcttgttctcttctttaggctacaagaggcctgcagtcattcaatctatgtacatatttaagcaaccaggtattggtggtgaggtcgtgccgcaccaggataatacattcctttacacggaacctcgtacatgcacagggctgtggcttgcacttgaagatgcaacaatcaacaatggttgcctgtgggcaattccaggatcacataaaaagggtttggtgagacgtatggtcagagatgaaaatggtacacattttgatcggccctccccagtctatgatcagaaagaatttgtaccgctggaagtaaaatctggtgctttggtggttatacatggagatcttatacatcagagttttgagaacctttctccagcgtcaagacatgcattcagcttacatgtagtggatactgaaggatgtaaatggtccgaagacaactggatacaaaggaaaacggcccctgaaccgctctatgtgtcttagcaaaaccagtaactagtgccgtaaaacaatagagattcccagcaagtgatttgtggatcgcttctctgcacaataaaatgggggaatcaagctgcgccatgctgtttccgtttcacctgtaaacatatgagggcttgttcggttatttccaatacacatggattggatgggattgaaaaaaattgagaagaagtttgacttgtttgggattcaaactcattcaatcccactcaatccacatggattgagagctaaccgaacaagccctaaactgtaaatactattgctactgtaataccataaaaaatctctctcggctgggtaggagaaagactgcctctacgatattatattaaaaagaagctcaatcggagtcct

SEQ ID NO: 95790 - DNA, 1535 bp, Zea Mays
tgtaccaacggtccaaccccaagcagcgtctcgagaagaagttccgtacccttcactccactattccggtcaacccatccctttcctccgcctccgcttccgcgtccgcccgccgctatgccgccagccagtagcctcaccgccgaccagctcagcttcttcgaggccaatgggtacctcgtgatggactcgttctcgagcgcggaggaggtgcgggagatgcgggaccgcatggccgaccttgtcgctgggttcgatggcgccaactccgcggtgttctccaccaaggatcatcggcagttaaaggacgactacttctttaagagtgctgagaatatctcattcttctttgaggaaaaggcatatggagatgatggatgcttgaaacagccgaaagaactttcaattaataaagttgggcatgcattacatgaacttgatccggtgttcaaaaagttttctttctcagagagtgttgcaagcttgttctcttctttaggctacaagaggcctgcagtcattcaatctatgtacatatttaagcaaccaggtattggtggtgaggtcgtgccgcaccaggataatacattcctttacacggaacctcgtacatgcacagggctgtggcttgcacttgaagatgcaacaatcaacaatggttgcctgtgggcaattccaggatcacataaaaagggtttggtgagacgtatggtcagagatgaaaatggtacacattttgatcggccctccccagtctatgatcagaaagaatttgtaccgctggaagtaaaatctggtgctttggtggttatacatggagatcttatacatcagagttttgagaacctttctccagcgtcaagacatgcattcagcttacatgtagtggatactgaaggatgtaaatggtccgaagacaactggttagttcatattcataatggtattattgaagaattctttatttataatactattttgattttccattgtccgtagaaggtcttggcataattgactatcagtattatttgagtttagaaatgcttataaattctgtattcgatcttgaatgggatgtggctggtactattttccttctgaaatcaagcttgtgacaacagaattatcgcattgatatctttgtatgatactcccgttcataaatatatgacaccattgacttttttgaaatctttgtccactcgtcttattcaaaaaataacgagttataatttattttgttgtattttgttttatcacttaaggtagtctgtggttgacttaaaattttacatttttgaataaatattttgaataagagtggtcaaaggtttcaaaaaaaagtcaacagtgccatatttgtgaacggatgtagtagtttgcagttttcatcactaaacattgacaaacaaaataacacattttgtgcataaagttgccggttgcttattatgtttgctctgcatcttattaagttcctgatctagacaaacttatgatagtatgatgtttcagttgacaatgttgctctt

SEQ ID NO: 95791 - DNA, 1167 bp, Zea Mays
ctccgccgaaaggaaccatccccaaagacaaagagggcatcggtccggcccatagctctggttctgtgcatggtgcgctggcgcaccttgtggtgcatgcacagcagagagcgcggcgtctcttctccctgccgcccgtgagcatccactcacgggacgaatacgaccaaaacgcgcacgcccccctcccaccaccctggcctgtaaatcagcgccgccaggcagtcacagcggcaagtccgcaccgcaactgcagttggaaaaccagctcgccgccactagataatctcgtctcgccagggacgggaacggcaggccgtgccgtcacgagactcctagcgaccgagagagagagagagcgcgcacgcgcgtggtggaagagacttcgttctagagctcccgcgaggatggagcgcggcagttcctggcgactcccggcggtggtcgtcggcatccttgtctgcgcggccctcttctcgccgcccgccgccgcgctcaacatcggcatccagtccgccggcgacggggtgagcaagcagcaggcgtgcagccgcacgtgcgagtcggaccactgcacgacgccgccgttcctgcggtacggcaagtactgcggcatcctgtacagcggctgccccggcgagccgccgtgcgacgcgctggacgcctgctgcatgcaccacgacaactgcgtccaggcaaagatggactacctgagcacggcttgcaacgaggccctgctggactgcctggccaggctgcgggagggcacgtccacgttcaacgggaacaagtgcatgatcgacgaggtcatcgacgtgatctcgctcgtcatagaggccgccgtcgtcgccggcagggtactgcacaagccgtagccgcgccgcgcgcagggacatgtgaacagcagcctgcggttggtgggcgatacatctttttcgtgcttggtttagggcgtcctttccggctggccggggcccgggctctgcgtcggctcacatggcggcatgtgtgctactagctggcgagctcccaggctcccaacccggccaaaactgacgacaaggtatatggagattattaaagatatagcttgtttggttttgagcatctcgtgttcctatcactgtattaccgtacaaaataagtataagaaagtttcctcatgct

SEQ ID NO: 95792 - DNA, 1164 bp, Zea Mays
cgcggcgtctcttctccctgccgcccgtgagcatccactcacgggacgaatacgaccaaaacgcgcacgcccccctcccaccaccctggcctgtaaatcagcgccgccaggcagtcacagcggcaagtccgcaccgcaactgcagttggaaaaccagctcgccgccactagataatctcgtctcgccagggacgggaacggcaggccgtgccgtcacgagactcctagcgaccgagagagagagagagcgcgcacgcgcgtggtggaagagacttcgttctagagctcccgcgaggatggagcgcggcagttcctggcgactcccggcggtggtcgtcggcatccttgtctgcgcggccctcttctcgccgcccgccgccgcgctcaacatcggcatccagtccgccggcgacggggtgagcaagcagcaggcgtgcagccgcacgtgcgagtcggaccactgcacgagtacgtacatacaacaattaacccgtctcttattacacgactctcactttaagcgcccgacatgcatgatcttctgccgctcaccggcgttaataactcgtcttacgacagcgccgccgttcctgcggtacggcaagtactgcggcatcctgtacagcggctgccccggcgagccgccgtgcgacgcgctggacgcctgctgcatgcaccacgacaactgcgtccaggcaaagatggactacctgagcacggcttgcaacgaggccctgctggactgcctggccaggctgcgggagggcacgtccacgttcaacgggaacaagtgcatgatcgacgaggtcatcgacgtgatctcgctcgtcatagaggccgccgtcgtcgccggcagggtactgcacaagccgtagccgcgccgcgcgcagggacatgtgaacagcagcctgcggttggtgggcgatacatctttttcgtgcttggtttagggcgtcctttccggctggccggggcccgggctctgcgtcggctcacatggcggcatgtgtgctactagctggcgagctcccaggctcccaacccggccaaaactgacgacaaggtatatggagattattaaagatatagcttgtttggttttgagcatctcgtgttcctatcactgtattaccgtacaaaataagtataagaaagtttcctcat

SEQ ID NO: 95793 - DNA, 1574 bp, Zea Mays
ctccgccgaaaggaaccatccccaaagacaaagagggcatcggtccggcccatagctctggttctgtgcatggtgcgctggcgcaccttgtggtgcatgcacagcagagagcgcggcgtctcttctccctgccgcccgtgagcatccactcacgggacgaatacgaccaaaacgcgcacgcccccctcccaccaccctggcctgtaaatcagcgccgccaggcagtcacagcggcaagtccgcaccgcaactgcagttggaaaaccagctcgccgccactagataatctcgtctcgccagggacgggaacggcaggccgtgccgtcacgagactcctagcgaccgagagagagagagagcgcgcacgcgcgtggtggaagagacttcgttctagagctcccgcgaggatggagcgcggcagttcctggcgactcccggcggtggtcgtcggcatccttgtctgcgcggccctcttctcgccgcccgccgccgcgctcaacatcggcatccagtccgccggcgacggggtggtacgtactagtacgcaggataaatcatggttggagtaatagctttcatcatgctcatacacccacacccacacacccgcagcacgccgtacgttgccccactaatctagctcctctgatccactcccctgtacgctaattgcgctctttgattcgcgcgcagagcaagcagcaggcgtgcagccgcacgtgcgagtcggaccactgcacgagtacgtacatacaacaattaacccgtctcttattacacgactctcactttaagcgcccgacatgcatgatcttctgccgctcaccggcgttaataactcgtcttacgacagcgccgccgttcctgcggtacggcaagtactgcggcatcctgtacagcggctgccccggcgagccgccgtgcgacgcgctggacgcctgctgcatgcaccacgacaactgcgtccaggcaaagagtacgttacggcgttatctttatacacacaagcttagtgagtcttcagttcggcgacacgcacgcatggacgtgggctgatgacggctgcgcgcgtacgtacgtattggtgtaatggtgttggtatacatgtgcagtggactacctgagcacggcttgcaacgaggccctgctggactgcctggccaggctgcgggagggcacgtccacgttcaacgggaacaagtgcatgatcgacgaggtcatcgacgtgatctcgctcgtcatagaggccgccgtcgtcgccggcagggtactgcacaagccgtagccgcgccgcgcgcagggacatgtgaacagcagcctgcggttggtgggcgatacatctttttcgtgcttggtttagggcgtcctttccggctggccggggcccgggctctgcgtcggctcacatggcggcatgtgtgctactagctggcgagctcccaggctcccaacccggccaaaactgacgacaaggtatatggagattattaaagatatagcttgtttggttttgagcatctcgtgttcctatcactgtattaccgtacaaaataagtataagaaagtttcctcat

SEQ ID NO: 95794 - DNA, 988 bp, Zea Mays
ctccgccgaaaggaaccatccccaaagacaaagagggcatcggtccggcccatagctctggttctgtgcatggtgcgctggcgcaccttgtggtgcatgcacagcagagagcgcggcgtctcttctccctgccgcccgtgagcatccactcacgggacgaatacgaccaaaacgcgcacgcccccctcccaccaccctggcctgtaaatcagcgccgccaggcagtcacagcggcaagtccgcaccgcaactgcagttggaaaaccagctcgccgccactagataatctcgtctcgccagggacgggaacggcaggccgtgccgtcacgagactcctagcgaccgagagagagagagagcgcgcacgcgcgtggtggaagagacttcgttctagagctcccgcgaggatggagcgcggcagttcctggcgactcccggcggtggtcgtcggcatccttgtctgcgcggccctcttctcgccgcccgccgccgcgctcaacatcggcatccagtccgccggcgacggggtgtggactacctgagcacggcttgcaacgaggccctgctggactgcctggccaggctgcgggagggcacgtccacgttcaacgggaacaagtgcatgatcgacgaggtcatcgacgtgatctcgctcgtcatagaggccgccgtcgtcgccggcagggtactgcacaagccgtagccgcgccgcgcgcagggacatgtgaacagcagcctgcggttggtgggcgatacatctttttcgtgcttggtttagggcgtcctttccggctggccggggcccgggctctgcgtcggctcacatggcggcatgtgtgctactagctggcgagctcccaggctcccaacccggccaaaactgacgacaaggtatatggagattattaaagatatagcttgtttggttttgagcatctcgtgttcctatcactgtattaccgtacaaaataagtataagaaagtttcc

SEQ ID NO: 95795 - DNA, 283 bp, Zea Mays
ataggttagggatccacttcctcttacgatacaccatatgcccatagctgtaacatttgcatattttggtgaaggtaacatcgtggttcttgatcccacatacaaggaagaagcagtaatgggagggaggatgactgctatagttaactcaaatggggatgtttgtgccattcataaagctggtggagagggtctcatgtcaagtgttaccatgcagtgtttaagaattgcttcggtaaaggctgctgatataacaagcaaaataaagaaagcagtaagtaac

SEQ ID NO: 95796 - DNA, 765 bp, Zea Mays
atggcgctccgccggtggaagcccttcttcccggcgttcgctgccatcgacaccgccatagagaccgccactggggcccgctcccgggacaagttccggcaactgaggagcgagctggtggagatgctctgcgatgccgcggacgacgacgccgatcgagtcaaggggctctgccggctgctcgacgcggccatgaccgaggcgcttttgacgctgcatgtggtcccggtgacgacgaccatgctgaccaccaccggcgtggacaaggccgtcgaaggcctgctgagccacgaggccgggaaggtgcgcgccctcgcgcgcggcatcttaatcaagtgggcgcaaggcggcgtgttggacaccacggtgttggccgctcctccgtccactccccggatgcgtccgcagcaggtgcagaggcctgagacagccgttctactagctgatacccccaagatctcggacgagaagatgcctcctgtcgtttccaatgccggcggcgatcgcgtcaggagcgggcagacaggagatgcgaaacgcaagcacccaggctactaccgagaagctgatgctgatgacgagaagcggcagcgcaacgtctctgagaaggtcgaggacaggccaaggaaaatggagccggacatcaagagtaggagcagctggagatccagggacacgaagagcaggagccgggcgagcagctggagatacagggacgagaggcgcttctcgtcgtcgacgcgtcatagtcataggagggtttaa

SEQ ID NO: 95797 - DNA, 1467 bp, Zea Mays
tataactactaaaagggaatatcattgacttaatcatataatttaacctactttcgcgttactaactcatcatacctcacataggtttatccatatatttctcgcataataaatatttaaacataaccctcccattattaattcgatcattcatcggatacgaatcaccaatttaatcttctcacataacctatatcgttaatcctaaacatagctacgcagcacgacgacttcgcaatcgtggacacaattgtcatgctacctgtagccccgtattcctacaagcgttatataaatacgtgcttagctacaagcaggatattcatcgcgacgtacacacctatcaattcatccatcaaaccagtcaataaaatagcaaattagctcaccatttcaatatttgactcgaatccgtgaggttggtaatgattttccgatccagacaatttgtcgagcgcttggcaggtactatacaaacttcacgcacatcttcatccgacgctcaacaagtttctccataaccggctaggaccttttttgtatctccccgtcatacaccacatgacgaactctcaacaccggtcgaaaataatccgagtaacccggcgaaaccaaactcaactcacagccggcgtggtcaactgaaacgacaacgtcgggggttagagaaacccgcgcgacatgggtaggggcgagctgggctaaatccgagctggagctcgcggcaactgggagcagggcgctggttctagggagcctattggtgttgccaagctgggctactactgctcctaagcatccatggccagagaagggacagaacagggaggaatgcgctgaacaggggagcacagccggaggagctcgacaacagagagcttagcagaggaacgacgccgagctgggtgcaagcagaggcgcggttcggcgaggtcacgacctgggcgagcctggtcggagcaggacgtgaggaatggcgtagcagagagagagagagcagcgtggagagagaaacgccatggggacgagcgcggcagggaacaacgccggcataggaggagctcggccggacgccatggggcgagcagagagctcggagcggagctgggacgacgcgcagaggaggagccggctgcgcgcggctgccaagacaagcgcagaggaaactccgaccgggcgccggaaagaagaggccgccggggcgaagctccatggtcaggagctgggggcgaactcgagcagaaggaagggagcaggcacggcgtaaaaattctgagcaggggaggtactgccgtgagctgagggagggagagataacgatggctgaaaggatatagggagaagaacgatggagaaggcctgcttagcggtgagatattttctgtgaaatacttcaacgacacagaaaaatcccagcggctgtcctgcttgaggataaggaagaagagagaaacagggaacacgacg

SEQ ID NO: 95798 - DNA, 1612 bp, Zea Mays
tgggttgtagtggctcacgtcttcatgtctgtgttagcgttcccctagccgcacctggtgtttggctaggttcttcgcgcggtgattccctgcgtttgatgaccacgccatccagttctctgcctcatcgtggccaacacaactcgagctggtgaatgtcatctggagcagcctcactatcgcgatctgattcccgagtcagctccgcttacgtttgggtgtttggtggtgaagaaatgaaagtcttgggagctgcatagaaaaagaacacctagaagaagtggtgtttgaagaagaagcctgccccaagtactgttgatccagtggtggagtctcatctaactgtagaaaggttttggatcttctcctgcgataaggcaagccccggtgtatttgccacctcccttgtgtttacaaaattttatcacttatatgctgcattaggtgacaggagttgattgattaaacacttgatgcattaccatccttgaaaggttgattaccacaccttgtcacccgttttataaaagctagagatgcttagtcttgttgatagattaagaaaaatatttttgatctatgactcatgtttttacaaaaaagaaaatgggcttgggataatgaaggcatcaagacgttgataaattcattatccaggcatggcccctctgtcaggcgccaaatttttgaaatagtttaaaatgggaccatacgttgagcaagaaaagtcgcccgtctgtgtcgattaaggaccgtaccgattgttggcctgctgatctaggaccttttatctggccacatacctcgtcatgggcaagcctgaacccggctattccatacatgaaaagacaatcgtgcactgggagtggagagatggcgagagtggcacgtaccctcctggcaaaggaccgcctaaaaggggtggcgtgctctcgggtggcgcagacctgttcatgtgatggaggatccgtgggaatggtagacatgtgtaaaagagttaagggaagcatatgtcgtgtggttggagatccccagctgggtattaatcgactcggatcgccgaacttctcggatatgaagactagatcttcgaccttcaacgtagataacaagtgaaattaaagttgataaaatgaagctagtttaggtcaagtgaatgatctagattaggcaaatgctagattcaggctagaagattcaggtaataacctaacttgtgaagtaaaacttggcttaaggatccattattagtaagcttgcttttctgcaaaaaggagtccttgataattgatgagattttccttgagtcctaaattcagcatacccttgatagtcttttctttagtcgggtaagtcttgctgagtaattgtgtactcagggttttatcccttgttgtttttgtaggagaagttttattcccttacccttgggttagttacttcatgcggaggacttgaagcttagaaggtttttatatttctcttatggaaaggcttcatccttccaattattgtaataagttatgcacttcgagtactatcaggacttgtaataaatacatctctttctaccatgtaaaacttgagttttggaatgtaaagtgtactttgt

SEQ ID NO: 95799 - DNA, 1047 bp, Zea Mays
aaaaagctcacgagaattgaacgaagtaaacaatatctcagaacattagaaaatcaacctaaatatccactcccgtcgtcctggactcgcagttcatccacgacccaccgaaccacaatggccacgttcctgggaagctcaccggcgctcctcgctcgtcccattgccaagccgcacatctcctgcgcgcagacaccgcgcccggcaattgcccagaaccagccgccgtccagcgagcagccggaaccacagaaacagcggcactccgtgcaagcgcagccacagcaggcggcggcggcggcgaggccgaagcacgcgggcgtcgcggactccactgactggatagcctcgtcgttgacgcggcggtccggaatcggtgcggggctggcgtgggccggcttcctggccgtcggcgtcgtgtcggagcagctcaagacacgcttcgaggtcgcgcagcagcaggccaacaccaaggacgtggagcaggagcacgaggtcgtgttgcccaacgggatccggtactacgagatgcgcgtcggtggcggcgacgtcccgcggccgggcgacctggtggtaaccgacctgcagggccgggtggccggcagcggcggggaggcgttcgtggacacgctcggcgacggcaagcggccgctggcgctggtgatgggctcccggccgtacaccaggggcatgtgcgagggtgttgagcacgtggtgcgctccatgaggccaggcggcaagcggcgggtggtcgtcccgccgggcctcgcgttcggcgacggcggcgccgacttcggggaggagcacgtccagatcccgcccggcgcgacgctcgagtacgtcgtgcaggtcgacaaggtgtccatcgcgccggcgtgagggcctgccgaggcgggagccggggcgaagctacattattcttagaggtgcaaatgcacccaaaaatatacaaaatctataaatttagttaagatttcaatacatatacatatgcatctttataataaattcttatgcacgcataagtcacgtgcgcctctcctcaaa

SEQ ID NO: 95800 - DNA, 2558 bp, Zea Mays
atgaagcgctcggccgacgcgatgactgagccggcgaagcctgtgttcctcaccaaggcggagcgggagcgcctcgcgctcgagcgccgccaggccgccgtctccgaccagcgccgcaccgcgctcgacctcctccagtccctgccccgggcccctcctccgccgcctcccagcggcgctcccccgtccggctccaaccccgctcctcgcgactcatccaactctcatcgcgattcctccgaccgggaccgggaccgggacagagacagagacagagacagagacagagacagagaccgggaacgccgccgcgacgacgattcccgccgcgaccgagatcgggatcgagatagggaccgcgaccgcgaccgcgaccgagatgactcctcccggcgcgaccgcgaccgagaccgagaccggcgcgaccgcgaccgtgaccgtgaccgggatatggagcgggagcgagatcgcgacagggagcgtggggatcgcggggaccgggagagggaccggctggagaagatggcggagcgggagcgcgagaaggagctcgacgcgatcaaggagcagtacctcggctccaagaagcctaagaagcgtgttatcaagccctctgagaagttccgcttctcgtttgactgggaaaacaccgaggacaccagccgcgacatgaacgcgctctaccagtcgccgcatgaggcccgactgctctttggccggggcttccttgctggcatcgaccgacgtgagcagaagaaggcggcagctgcgcatgagaaggagacccgtgcagagctgcggcgcaaggctggtgtggaggaccgtccagaggatgacgctgtagataagaagaaggccgccgctgctgaaatgtatgacgcttttgatatgcgtgtggacaggcactggtctgagaaggcgcttgaggagatgactgagcgagattggcgtattttccgtgaggatttcaatatctcctataagggttctcgcataccccgaccaatgcggaagtggagtgaaagcaagcttggcaccgagttgcttcgtgctattgacaaggctggatatgaaaaaccatcaccaatccagatggctgccattccgctaggtctacagcagcgtgatgttattggtattgctgagacaggttctggaaagactgcagcctttgtactccccatgttgtcttacattacccgattgccgcccataagtgaggagaatgaggctgagggtccctatgccgttgtgatggcacctactcgtgagcttgctcaacaaattgaggaggagactgtgaaatttgcaacctatctaggcatcaaagttgtctcaattgttggtggtcagtcaattgaggaacagggtttcaagattaggcagggctgtgagattgtaattgctacacctggtcggcttcttgattgcttggaaaggaggtatgctgttctcaaccagtgcaactatgttgtgctcgacgaggctgataggatgattgatatgggctttgagccgcaagttgttggtgtccttgacgcgatgccatcgagtaacttgaaacctgaaaatgaggatgaggaacttgatgagaagaggatttacaggactacttatatgttcagtgccaccatgcctcctgctgtggagcgtcttgctaggaagtacctccgaaacccagttgttgtgacaattggtacagctggcaaggccactgatctgatcacccagaatgtgatcatggtgaaggagtctgagaagatgccacggctccagaagatactcacagatctcggagacaaaacagccattgtgttctgcaatactaagaagacagcggacatgcgtgctaaggatctggacaagtcaggcttccgcgtcacaacccttcatggtgggaagtcacaagaccagagagagatcagccttgatggatttagaaatcgtcggttcaatgttcttgtggctactgatgttgcagggcgtggtattgatattcctgatgttgcacacgtgattaactatgagatgcctagttcagtcgacacatacacacatcgcattggaagaacaggtcgtgctggaaagaagggggtggcaacttcatttttaactttagagaacactgatattttctttgatctgaaacagatgcttatacagagcaacagtcctgtgccacctgaacttgcaaggcatgaggcatcaaaatttaagccaggctcgattcctgatcgacctccaaggcgaaatgatacagtctttgcaaatcattgaagcaatcttttggactattatgagctcaacttctaccatagagggaggaatctagattagtatttatgagagggtatatattgtatcagatcattgcagagatttatcaaccatggttcacatatcattttagtctgaagaagtgctgtttaatttattattattaccttttgtgtccctgttatgtggtttaatgtttgattttatagtttcatcttgcttggaaacatgtgtgtccctattggttgggtttcttaacatggatcttgtgtattcagaat

SEQ ID NO: 95801 - DNA, 2911 bp, Zea Mays
gcccaccagcccagaacccattcatgataaatctccgtttccagcaaaaaatcaggcccacgatccgatttccgtttctgccggatgaaacggcccaaacagggggcaagccggcaactccagatgtgaatagcgacgcttgcgccttgttttggctgtttccctaaaccgtcctccgcctcataatcgcaaaccctcctcccctctcgctgcatcggcgccgccgcgatgaagcgctcggccgacgcgatgactgagccggcgaagcctgtgttcctcaccaaggcggagcgggagcgcctcgcgctcgagcgccgccaggccgccgtctccgaccagcgccgcaccgcgctcgacctcctccagtccctgccccgggcccctcctccgccgcctcccagcggcgctcccccgtccggctccaaccccgctcctcgcgactcatccaactctcatcgcgattcctccgaccgggaccgggaccgggacagagacagagacagagacagagacagagacagagaccgggaacgccgccgcgacgacgattcccgccgcgaccgagatcgggatcgagatagggaccgcgaccgcgaccgcgaccgagatgactcctcccggcgcgaccgcgaccgagaccgagaccggcgcgaccgcgaccgtgaccgtgaccgggatatggagcgggagcgagatcgcgacagggagcgtggggatcgcggggaccgggagagggaccggctggagaagatggcggagcgggagcgcgagaaggagctcgacgcgatcaaggagcagtacctcggctccaagaagcctaagaagcgtgttatcaagccctctgagaagttccgcttctcgtttgactgggaaaacaccgaggacaccagccgcgacatgaacgcgctctaccagtcgccgcatgaggcccgactgctctttggccggggcttccttgctggcatcgaccgacgtgagcagaagaaggcggcagctgcgcatgagaaggagacccgtgcagagctgcggcgcaaggctggtgtggaggaccgtccagaggatgacgctgtagataagaagaaggccgccgctgctgaaatgtatgacgcttttgatatgcgtgtggacaggcactggtctgagaaggcgcttgaggagatgactgagcgagattggcgtattttccgtgaggatttcaatatctcctataagggttctcgcataccccgaccaatgcggaagtggagtgaaagcaagcttggcaccgagttgcttcgtgctattgacaaggctggatatgaaaaaccatcaccaatccagatggctgccattccgctaggtctacagcagcgtgatgttattggtattgctgagacaggttctggaaagactgcagcctttgtactccccatgttgtcttacattacccgattgccgcccataagtgaggagaatgaggctgagggtccctatgccgttgtgatggcacctactcgtgagcttgctcaacaaattgaggaggagactgtgaaatttgcaacctatctaggcatcaaagttgtctcaattgttggtggtcagtcaattgaggaacagggtttcaagattaggcagggctgtgagattgtaattgctacacctggtcggcttcttgattgcttggaaaggaggtatgctgttctcaaccagtgcaactatgttgtgctcgacgaggctgataggatgattgatatgggctttgagccgcaagttgttggtgtccttgacgcgatgccatcgagtaacttgaaacctgaaaatgaggatgaggaacttgatgagaagaggatttacaggactacttatatgttcagtgccaccatgcctcctgctgtggagcgtcttgctaggaagtacctccgaaacccagttgttgtgacaattggtacagctggcaaggccactgatctgatcacccagaatgtgatcatggtgaaggagtctgagaagatgccacggctccagaagatactcacagatctcggagacaaaacagccattgtgttctgcaatactaagaagacagcggacatgcgtgctaaggatctggacaagtcaggcttccgcgtcacaacccttcatggtgggaagtcacaagaccagagagagatcagccttgatggatttagaaatcgtcggttcaatgttcttgtggctactgatgttgcagggcgtggtattgatattcctgatgttgcacacgtgattaactatgagatgcctagttcagtcgacacatacacacatcgcattggaagaacaggtcgtgctggaaagaagggggtggcaacttcatttttaactttagagaacactgatattttctttgatctgaaacagatgcttatacagagcaacagtcctgtgccacctgaacttgcaaggcatgaggcatcaaaatttaagccaggctcgattcctgatcgacctccaaggcgaaatgatacagtctttgcaaatcattgaagcaatcttttggactattatgagctcaacttctaccatagagggaggaatctagattagtatttatgaggtacaaaacttcgatggttagaaatatctacttatgaggttgtaaaactatgacgattatctttggttttatttctgtttggaaactggcctcattgtcataactttaatatgttttggtggtgatttagctgtggacatgtgtagcttatcataattttgttctattctgcaagatttgacatggctggattttagtatctcatacatgttctataaatgctattttatatttggtagcatattgttccagaatcatccttttatcttttttttttgcagagggtatatattgtatcagatcattgcagagatttatcaaccatggttcacatat

SEQ ID NO: 95802 - DNA, 4484 bp, Zea Mays
gctgcttgttcttgtcaatagcgctcccaatcctgtcaccatcatcactagtccctcccgccccagctcctctgcctgtaaagatttcgttcgttcctctttcgaatctctgatcccgttctcggtcctcgattccgcctgcgaaagaaactcgtctttgctgcaatctatagaagtagcagggaggactttgtgcagagtttattttccttttcttcttcttcttttggtccggaggaacctagttcgccagtggttgcttgccactgacgaatcacgttcgggttgcgttctccgatccgtcccagcctaattctgggggcgcaggggaaggattcgggacggaaggaactagtttctgtgcttccttggattccacggcaaagcccggctgcgacgtcggcgtcgtctccaccgcattccggctacggttcccaagcaaccttgctgtggtggggatggtgtcgcaggctcccgtggcgggcgccagcctcgccgcgtcgctgtgcaagaagagcaaccgcgtcgcgcgggtgctcgcgtacgcgctgctcgagtggatcctcatcgcgctgctcctcgccaacggcgtcttctcctacctcatatcccggttcgccgccttcttcggcctcgcgccgccgtgcgcgctctgctcccgcctcggcgtcgacagcctcttcgagacccgcccgccgcaccaccgaggcgccgagcccctgcgccgcttgctgtgcgacgcgcacgccgccgagctgtcgcgcctcggctactgcagcgcgcaccgccggctcgcggacgccggggacatgtgcgaggactgcgccgcggcggcagcgcccgggaaggcgctgttgtcgtggatgggccggagcgagctgggtgagcgggacctcgcctgtgcctgctgcggtgtcgcgctcgagagcggcttctactcgccgcccttcttgctcaccacgtcggcgccgcgtggttcagattgtggcctcaagcaagaggaagaggcagcgatgccaaatggagacgtggtcgttgtctccaaggaaggtcctgtgatcgagctcttcgacgataagccgtttgtggaggatgactcaatcggcgtcttggctgccgaggttgttgccaatgttgagcggccggttgctcttgaatcaattgactcgttggtggtcaccatgggcaccgtgtcatctcaatccggtggcgaaggaaaggaagcagttgaccatggtgttgtaaggcagaacaacgtggacatggagaacacagttagtagcaatgaggagaaaattatgccatctgatgataaggtggatgtggttgatcggctgattgatgaacagattgttgccgtagtccttgtgccagcttgtatagaagctacacttgatggtggcataaatgcagacaaaaccgtggatgcctttgctgatcatcagtctcttgaggatgacagtggattggaagttaaggaccagaaaatatcatttgaagatgaggtatttgaaggtgagcaagctgaacaggttactcaacaacaggaactgtgtgctatgccaacagatcctagtgaccatgaatttgttgagaggttagatagaagtactgagttggagcattttccactggctgagtcaaagcataaaatgaactctatgccagtggaagcttctaagcacgttgctgtaactcagattgaggggaagcaggttcaacaagctgaggtaaatcaggagttggattcaataccaaaatgttccagggagcatgctgatgaagaacttcaaggagagagaactgcacaggctgggttggaacaagagtgtgactctgtgccaattgattatggggaacacggttcccttacttcatatgctcatactgatgatgagcaagatgaggcgatgcagaaagtcacttctgtaactcggattgaagagaagcaggttcaacaagctgaggtaaatcaggagttggattcaataccaaaatgttccagggagcatgctgatgaagaacttcaaggagagagaactgcgcaggctgggttggaacaagagtgtgactctgtgccaattgattctggggaacacggttgccttacttcatatgctcatactgatgatgagcaagatgaggcgaagcagaaagtcacttctgtaactcggattgaagagatgcaggttcaacaagctgaggtaaatcaggagttggattcaataccaaaacgttccagggagcatgctgatcaagaacttgaagtagagagaactgcacaggctgggttggaacaagagtgtgactctgtgccaattgattctgaggaacacggttgcctgttttcatatgctcatactgatgatgagcaagatgaggtgaagcagaaagtcacttctgaaacagcagatgttctacattatgcagcagacacttttaatgttaacacaaactcatggaaagaagatattgaagaggattcaactgaagctgctctaacagccatacatcaaatttgttacgaacctttgacgagcatagtcaagttctctctagatcatagtgtctccgaagaagacagagagcctgatacgccgactcatattgaaggtatatgtgattcacaggaactgctggattctaaagcagttgtttctgatgctaaatctgtagattcaagtgttgctactttgtctactgatctggaaagcactgaattggtgagtgtggatcaactaaaatctgctttggcttccacacgcaaatcattgaacaccctatattctgaacttgaaaatgagaggaacgctgctgctatagctgccgatgaaaccatggcaatgataaaccgcttgcaagaacagaaagctgcaatgcagatggaggcgattcaataccagcggcttatggaggaacagtcagagtatgaccaagaagcactgcagaggttgaatgaactagttgttaagagagagaaggagaagcaagatctggagagagagctcgagctgtatcgccacaaggttcatctctatgaggtaaaggtgaggaaattgtccaggcacaaggctgatgaccagaatggatcatcgtcaacttcatcgagtgctgaggatagtgatgacctttcacaaagtttctatgaaggtgatgaatcttcccatggtattaatggaagcaatgggagtattcctacagatgttgtgctacaagaaactgccaggcatcttgttacccttgatggctcactagctgattttgaggaagagagactatccatactggaacagcttaaagtgctagaagataaactttttgatcttgatgatgaagagtccgataacatgaagcatttctcagaagaaaaccatttaagtggtgcctcaaatggtttctctgatgatgatagctgctttaagctccatgacaagagaaagaatgtaacctacagaggaaagaaactccttccattgttcgacgatgctaccgtggaagctggaaacgtcccccaaggtaatgatgcacagcattcaacagaggtcacactggaccttgctagagagcaacataagcttgcaattgccaatgaaatcgatcaggtacacgagaggctgcatgctcttgaggcagatagggaatacataaaacagtgcgttaggactttgaagaagggagggaaagggtttgatcttcttcaggagatattacagcatcttcgggacctaagaaggattgagcaacgtgcaagtgcaaggaactctggggagctttcgcctcattacctacatcatcacacggattgaagatccctgcctatgtccagcgaatattgcttgaagatggaaatcatacaacaatgataaggggaaaaaaagattgccgactaagtagtattgtcattggagaagttttgttggttcctggagtggaaggagctcctcctggaacacccgtcacagtcggttcgaagataccattgggaaggcagatcacggagcaattctgccttccaaggtccaggattttttttgtggaccacttcccacgttctctttttgtgttggtttagttttcccggtgggttccaaacttttgcccaagggcaagagggtggttggtgagccgcccgggcccctgtggggctgtgtgtttgtggggggtgtggcggcaatcatggccttgtgcagaagctttagaattcattaacctgaagacatgccgatgccagctttgctgccagatatgttgggcttcactagtttttgttttcttctttttttctaaatcctttccctgtaaatcttctagctgtatgtaatgtgctttcggcctttggaatgatgaggtgttgggtgtgtgcatagcatgactgttgttttatgggtctttttttttctttcccttttgttctttttcgctgttattgttctggacattgcaatattttgatgcaagtgctgcttattagttattgaactctg

SEQ ID NO: 95803 - DNA, 1537 bp, Zea Mays
aatcccccccaacctaacccaatcccgtctcgccctagccgtctccatcccaccacctccccccgtccgctcgtccggccgcgccgcgccgtgcgcgacccaatctaccacgccacttacctcccgtcccgtctcgttctcgtcgcacctcgccacgcccgcagagagagggggcgcgctcgctcgagccgtgcgcgccagccagcgccatggcctcggaccaacaggccctcccggtcccggtcccggtccccgtcccgcccaaccctaacccgaccgcaccagccgacctgaccccgccctcggcgtccgccgcgcgcaagctccccatcaagcggcgctccccgcggccgtcgtcctcgcccccgtcctcttcttccccggcctcctccgacccgctccgcgcgcccggcggcggcggcggatccgaccagcagcagccgcccttcaagttccagcgcatctggtccgagtccgacgagctccgcttcctgcagggcctcctcggctgcggcacgcagggcctcgtcttcccgcgcgacctcaacgtcttctacgaccgcttctccgagtccatgccccagccctacacccgcgcccagctctcggagaagctccgccgcctcaagaacaagttccgcagcatgtccgcgcgcgtcgcgggaggcatagacccggcccgcctcgcgccgcacgaccgcgacgtgctccacctctgctccaggctgtgggaccccgccaacgccgccacctcgcccttcgcggccagcgccggaacgtcggggaacaagcgccgccgctccaacccgcgtggcacgcccccagacgcgtctggggatagcaactcccatgactacaatgggattagctcctctgctcccggtttgtttccggatggttccaacggcgaggatacgttttaccttgagcaagaaagcgggcagctgggcaatcatgaaggcgctgctcttgtagcagatagcaaattcgatgttgtggtgcaggagcagcctgaggccgtggttactctcccgaatgggaacaacggaattggcagtgagatgagtgcggagtgtaaaacggtggtgccgtgcagcaacgagcaccgaatggcaaatgctgtcctagatgtgtttgaggaatgcctgagggaggcaaagagtaacgggattatcaatggtggcaatgtggagagcgagctctccaagcggtggagagcacagaggatggatgagcttgatgtcttgagccggaggctgaggttgctcgtcgagtatgctgcagcggctgggcattgaagcttagattttggtggttttggtgatgtgcctcccaccatttgcccctttgttgtgtatagaacctaggttattgtgctatgctttgtaatgtcttcctcagctggacccttagaaagcctactatatttgcctatgtacccctcgtgtttaataatttgagcagcataataatctatggtgttagcactgttatttgcatgggttcttgctgttgatatagatgatagctccgttag

SEQ ID NO: 95804 - DNA, 1036 bp, Zea Mays
tataaaagatgtgcctgtccactgtgactccagagtccagaccatagcctgcagccttccatccacgaactcccgttctccatttccagccatggcggtgtcgatcgagctcaccaaggagtacggctacgtcgtgctggtgctggtggcctatgtcttcctcaacctttggatgggcttccaggtcggcaaggcccgcagaaagtacaaggtgttctaccccaccatgtacgccatcgagtcggagaacaaggacgccaagctcttcaactgcgtgcagagggggcaccagaactctctagagtggatgcccgttttcttcgtcatactgctgctgggcggtctgcagcacccgaccatcgccgccggtctgggcggcatctacatcgtcgcgaggttcttctacttcaagggatacgccaccggcgttccggacaaccgtctcaagattggggggctcaactacttggcgttgcttgggctgatcatttgcacagcatctttcggcatcaacctgctcatcagggagatgctctaaactttgggtttatatgtgagctccaggctgggttaaccgcacaagttactcatggtctgagcatcaaaactttgtgatactagtcgtttggggttttatagtggagttatcgtttctttctttgtctgtgtgttgttagcaaaagaagtgtgcgtctgcgtcttatagctgtgatggaataaggagacagatgggttgaagcgtgaatcgtacagttcttgctgcttgtcactctctgatctggtttcgttgtagatgagatggttgttaatggtttgtgtttgaggcacgatccgccttattttctaccgatctaaagccggggtgtaacaattttgaattattctggttttgggtttatgtttatgcgatgtattggctggtagcagttctgcattgactgcatatcaaccttaatcagctggtaacagttcttggacttctttatattattattatactagagagcaaaccacacacttcagagcatctccaagg

SEQ ID NO: 95805 - DNA, 2491 bp, Zea Mays
ataaaagatgtgcctgtccactgtgactccagagtccagaccatagcctgcagccttccatccacgaactcccgttctccatttccagccatggcggtgtcgatcgagctcaccaaggagtacggctacgtcgtgctggtgctggtggcctatgtcttcctcaacctttggatgggcttccaggtcggcaaggcccgcagaaagtacaaggtgttctaccccaccatgtacgccatcgagtcggagaacaaggacgccaagctcttcaactgcgtgcagagggggcaccagaactctctagagtggatgcccgttttcttcgtcatactgctgctgggcggtctgcagcacccgaccatcgccgccggtctgggcggcatctacatcgtcgcgaggttcttctacttcaagggatacgccaccggcgttccggacaaccgtctcaagattgggtaagtttgcttccgtagtgaggctttgcgtcagatgcagaagatgctgataaaattatgagatctccacgcacttgcagaaaacgtaaatcatatagcggagaattaacagagtttaacttgtttcggtttgttatgaaatatcagtctccaactctccatgaaaatgtagagtaccggtagtcgtatactcgtacaaatcgtctccaccaattgcactctacgcctttaaaagtgaggcacacgttatcacacaatttctttttctgccttgtttacgtggtacgaagcttctgctatattctatggtttcctgaatgctggtagtgggcaggtagccagtgctcgatagtcggtaacggtagttaacgatagcggaaccccattaaggtttatgaattcatttattgatgaattcatctgttgatgcatcaagtgactgttgaaatggcgcatgctttttagaaattttaattgagcctttgtgctgaatttctgcaccatagcgtccttctttttccccctcgaggccctagctagctacttgtctggtcaaactgtccagcctctcaatgttcacacaagtcattgctgtggcctgagactttgtggccggttacaccggtaggtgaattgtaattcacatgtttggaccacagctgatttgatttgctaggaggtcagtcaaccgctgttcagcatggtcagtgggaatggcaaattgtagtcctgtagggtttgtcctgacctaaccacttctggtttaggtagaatgtcctcagatgagtaatacaaggatggcgtgtgctaaacggttcctctgaaagtttgtggcttgcgatgcccactaatgatgtacattcggtcaactctcacctaatgatgtggagtagccttaaatgtctgttgattttattgcacactttttaagttgttcaatgtgcttctgttgattttattgcacactttttaagttgttcaatgtgcttctgttctcttggcactcaactttgtcaaaaaattctagttcaaataattcaggtcctgtttgttcatattttatggcagtaccttgctttgcagtattagcttcaccatttgtagctaacttgattgttcgagcatatggccatacaaaacactattttacgctgaatattgctttgtttatatagtggagtttaaaataggagatttggatgagtaagctgctgaagataaccttagacattgcaaattctaatcccacctggctgcctttattagtgactatcaggaagccctctgatttgtgttgcatgttgtggtccccacttgaacgagaatgttatctgaagttgtagcaaatgacatctgttagatcacacattcacacctcatcattgttgctattaattcatgccatctatcattagtagtggtcgcaagttcctactgattgagttgcttgtggtgcgtgctgcagggggctcaactacttggcgttgcttgggctgatcatttgcacagcatctttcggcatcaacctgctcatcagggagatgctctaaactttgggtttatatgtgagctccaggctgggttaaccgcacaagttactcatggtctgagcatcaaaactttgtgatactagtcgtttggggttttatagtggagttatcgtttctttctttgtctgtgtgttgttagcaaaagaagtgtgcgtctgcgtcttatagctgtgatggaataaggagacagatgggttgaagcgtgaatcgtacagttcttgctgcttgtcactctctgatctggtttcgttgtagatgagatggttgttaatggtttgtgtttgaggcacgatccgccttattttctaccgatctaaagccggggtgtaacaattttgaattattctggttttgggtttatgtttatgcgatgtattggctggtagcagttctgcattgactgcatatcaaccttaatcagctggtaacagttcttggacttctttatattattattatactagagagcaaaccacacacttcagagca

SEQ ID NO: 95806 - DNA, 1899 bp, Zea Mays
tgtttctatagtgtagtttgaatattagtatacgtgtgtgtacgagtaaactgctagactaatgctggaaagtgagagagagggcagctcgcttcctcgtggaatctctctgttcttagttctgttctacttctccaccaagtccctaacacgcgggtggcgggtccgccgccgccgccgttcgaagactcgaggctcgagcacctcgtctgctcgcccggcccctcctatccctcgcgcgactgtctccgccgacgaccataagccgcctgcctcatcgctggccacacaacgatccgtggcaaggaaagcacgaggacgtacagtagaattgtgaatcgccggaaaaacatctgttggcggcgtcatgaataagcggccccgcgacgaccactccttcgcctccgcgcccaagcgccagtatggcgcaggcggagggtatggcccgcagcagggttactcggaagagcggagcagcgcgcggcgggtggccgaccactacagcgcgcggtccaaccagacactcgaggaacgcgagaacagccccatcatccacctcaagaagctcaacaactggatcaagagtgttttggtccagttgtatgcacgcccgggtgactgcgttcttgatcttgcttgcgggaagggaggtgatttgataaagtgggataaagccaaggttggctactatgtaggggttgatattgctgaaggctcgataaaagattgcatgactcgctacaatggtgacacagatcaacaaagaaggaaaaggttcagtttccctgcacggcttatttgtactgattgctatgaggctcgtttggatgaatatttatatgaggatgctccgtttgatatatgtagctgtcagtttgctttacactattcatggtcaactgaagcacgcgctagacaagccttggcaaatgtgtctgcattacttcgtcctggaggcatttttattgggacaatgcctgatgccaatgtcattatcaaaaggcttcgagaatctgaagggttggaatttgggaacagtgtttactggattagctttggcaatgagtacgctgaaaagaaattccctgcatccagaccgtttggtatcaagtacaagtttcacttagaggatgctgttgattgcccagaatgggttgttccattccatctcttcaaattattggcagaggagtatgatctcgagctggttctgatgaagaacttccatgaatttgtacacgagtacttgcaaaaaccagagttcgccgagctgatgcggaggctgggtgccctcggtgatggaaggcaggaccaaagtacactgtcacaagatgagtgggaggtttcctatctctatctcgcgtttgtcctgcggaagcgaggccaaccgcctacccaacgaagagccagcaacgcaaacagagggaaaatgtttctcaccgagggtgacatcgaggttctcggtgtataagcatgagtatatcctggaagggcttgctaacagcttaccgattatatgctccacagaccacatagcataaaagaaagttgtaacattagtggctcacctgctactccatccgtttataaataaatgacaacgttgacttttttaaaaaaaaattgaccactagtcttatttaaaaaagttatcatttattttttgtaatttgttttatcacttaagttagtttgtgcttgacttaaaattttacattttgaataaatattttaaaatgaatattttgaataagatgagtggtcaaagttttcgaaaaaaaatcaacggtgtcatatatttgtaaatggaggtagtatttgtttctccaaacttttttctattgacaatgtcaacattttaaggatcagcagactggcaccacgcatatagctaatgaa

SEQ ID NO: 95807 - DNA, 2087 bp, Zea Mays
tgtttctatagtgtagtttgaatattagtatacgtgtgtgtacgagtaaactgctagactaatgctggaaagtgagagagagggcagctcgcttcctcgtggaatctctctgttcttagttctgttctacttctccaccaagtccctaacacgcgggtggcgggtccgccgccgccgccgttcgaagactcgaggctcgagcacctcgtctgctcgcccggcccctcctatccctcgcgcgactgtctccgccgacgaccataagccgcctgcctcatcgctggccacacaacgatccgtggcaaggaaagcacgaggacgtacagtagaattgtgaatcgccggaaaaacatctgttggcggcgtcatgaataagcggccccgcgacgaccactccttcgcctccgcgcccaagcgccagtatggcgcaggcggagggtatggcccgcagcagggttactcggaagagcggagcagcgcgcggcgggtggccgaccactacagcgcgcggtccaaccagacactcgaggaacgcgagaacagccccatcatccacctcaagaagctcaacaactggatcaagagtgttttggtccagttgtatgcacgcccgggtgactgcgttcttgatcttgcttgcgggaagggaggtgatttgataaagtgggataaagccaaggttggctactatgtaggggttgatattgctgaaggctcgataaaagattgcatgactcgctacaatggtgacacagatcaacaaagaaggaaaaggttcagtttccctgcacggcttatttgtactgattgctatgaggctcgtttggatgaatatttatatgaggatgctccgtttgatatatgtagctgtcagtttgctttacactattcatggtcaactgaagcacgcgctagacaagccttggcaaatgtgtctgcattacttcgtcctggaggcatttttattgggacaatgcctgatgccaatgtcattatcaaaaggcttcgagaatgtatgttactgtaaacaaccattgtcatcttgcattggttaactttgtcactgtatttgctggaagctgtgtgacaagtatataaactcttctgctatggtcagctgaagggttggaatttgggaacagtgtttactggattagctttggcaatgagtacgctgaaaaggtgaaatttggtaagatatttgtgatatttatcctttttctggtatagtaactgttccatttgtttcttttgataatggtgtagaaattccctgcatccagaccgtttggtatcaagtacaagtttcacttagaggatgctgttgattgcccagaatgggttgttccattccatctcttcaaattattggcagaggagtatgatctcgagctggttctgatgaagaacttccatgaatttgtacacgagtacttgcaaaaaccagagttcgccgagctgatgcggaggctgggtgccctcggtgatggaaggcaggaccaaagtacactgtcacaagatgagtgggaggtttcctatctctatctcgcgtttgtcctgcggaagcgaggccaaccgcctacccaacgaagagccagcaacgcaaacagagggaaaatgtttctcaccgagggtgacatcgaggttctcggtgtataagcatgagtatatcctggaagggcttgctaacagcttaccgattatatgctccacagaccacatagcataaaagaaagttgtaacattagtggctcacctgctactccatccgtttataaataaatgacaacgttgacttttttaaaaaaaaattgaccactagtcttatttaaaaaagttatcatttattttttgtaatttgttttatcacttaagttagtttgtgcttgacttaaaattttacattttgaataaatattttaaaatgaatattttgaataagatgagtggtcaaagttttcgaaaaaaaatcaacggtgtcatatatttgtaaatggaggtagtatttgtttctccaaacttttttctattgacaatgtcaacattttaaggatcagcagactggcaccacgcatatagctaatgaa

SEQ ID NO: 95808 - DNA, 917 bp, Zea Mays
ctcgctctctgctcgtcacctctgccgctctgcgcggtattgatttcctcggacaccgtgctccccgaccccgagcgcccatccagcagccagctaggagtaccgccgagtgcactctgtctctgcagtatccttcccggccgatctgcatttcactcgttccacaccgtcgttggccggcccatagctctccccctcctggttagtgtagtgagcgcagcgacgagtgcaacggtgagagtaccgagatggctgagggaagaggcagtgcaagggccatcggcgccatggcgttcgccgttgcctgctgctactgctgcgtcgccatcgccgacgcagccaccacctactacgtcggggacagcaacggctggtccttcagcagccccagctggcccaacggcaagcacttccgcgccggagacactctcgtgttcaggtacatcccctggatccacaacgtggtggccgtggacgaggacgggtacaacggctgcacgacgccgccggggtcgcggacctacacgtccggcgccgacagcgtgacgctcgccaggggggacaacttcttcatctgcacccggttcggccactgcaacctcggcatgaagctcgtcgtctatgccgcgtgatctgtcagagctagcgactggtggtggtattgttgactgggtgcgctcaatgatcggctgtgcttgctctcgagcgaactggtctgtttgatttgtgctatttcgtgtaggctcagtcagtcgcttggttctaatccgtaacggcttctactacttttacaatgttgttgtaacaatacaaacatccagctttaattgaagctaacggatatcgcatgtttgaacatttgctctccatgagaccatgacaaattgcttgacgcctgtacgggtcgagagcgagcc

SEQ ID NO: 95809 - DNA, 807 bp, Zea Mays
caccgagaactccatctcaattctcaactcacactcatcacccggccgccttctcgctcgagcacttccctttctgagctcatcgtgctgctgagacttgagagcggcatatatatggcggctcaggcaagaatgggcggcgctcgtggcagcagcggcgccgtcgtgcttgcgctggtcctcctctgcgtgctccttcatggcgagttcgccgaatcggcggtgtacacggtcggcgaccgcggcgggtggagcttcaacaccgccaactggcccaagggcaagcgcttccgcgccggcgacgtgctcgtgttcaagtacgaccccaaggcacacaacgtggtgcccgtgagcgcggcggggtacagctcgtgcagcgcgccgaggggcgtcagggcgctcaccaccgggaacgaccgcgtcacgctcaagcgcggcgtcaactacttcatctgcagcttccccggccactgccaggccggcatgaaggtcgccgtcaccgccgcgtgaggccgtaccggaccgtgccgagccgatcggccggacgggctatatatctggggctgctgcttctattattttcttctccaaagtaaagcgcatcgttgttcaattatagtcgtcgcgtacgtacgtgtgtgtgccgtagtcgttagcggattggcactatatacggagagagagaaggacagatcaagcaatgtattggcgtgtgtgttgatctatgcaacagaataaagcctcgttcgattgttgaggcgactttttaaaattttagcctttttaaaatttgtctttacattttta

SEQ ID NO: 95810 - DNA, 843 bp, Zea Mays
tgcactgagcactacagctctgctcactctcatcacttcgctccaagccagtgctagcccggccccttgtgtacgtgagagacggcatcgtaccgtagagcagcatccatggcggctcagggaagtggcagtgctcgtggcagcggcgccgccgccgcgcttgcgctggtcctcctctgcgtgctcctccacggcgagttggccgagtcggcggtgtacacggtcggcgaccgcggcgggtggagcttcaacaccgccaactggcccaagggcaagcggttccgcgccggcgacgtgctcgcgttcaggtacaacgccaaggcgcacaacgtggtgcccgtgagcgcggcggggtacaagtcctgcagcgcgcccaagggcgtgagggcgctcaccaccgggaacgaccgcgtcacgctgaagcgcggcgccaactacttcatctgcagcttcccaggccactgccaggccggcatgaagatcgctgtcaccgccgcgtgaggcccccggccgatcagccgcgccggcgacgacgaccgccggacacacgggctcgatcggtggccagctttttattatttttatttccctctccaaagtaaaagcgtcgcgtccttaacctgcgtgctggtaggcggtgttaggtgtgtggagaccggccggcactatagagaactaaatcgaatgatggtgtactcgatcactacgtactgacgtgtatgagtttgtgttgatgtggagaacaataaaggcatgtgtacgcgtttgtatatcctgtactcagttcatgtgcgatatatatatatgctagctatgcctgcttgagctacaataaaagaataa

SEQ ID NO: 95811 - DNA, 1082 bp, Zea Mays
atctcatctctctccccgacctcccagctctagagtctagacagccacaggcaggagctccacgagtccacgtgacctcagacctcacacattcacagtgtcacgctgcctcaacgtcatgtctctcctcgcctcccccacgccgttcggcgtgaccgccatccgccgccgcgtcgccccgcttcctctcctccctgctggcggtcgcgccgccctgcacgtggccctcgcgcgccgcggcggggtctcgtcccggacgcagcggcgcctcgaggaacgaggaggcaagaagcgccgcggtggggtcgtggcgcccgacgtggacgaggacgcggcggaggcgggggtggctgagtgggaaggggagccgctggggttcgaggtgtcgacggagcccatgccgcggctgccagacccggagacgcccgacttctgggagggacctcagtgggaggccctcggcttcttcgtgcagtacatgtgggcgttcggcgtcgtcttcggcctcattgcttgcggtgtcgctgtggccacttacaacgatggtgcaacagatttcaaagacacgcctgcttacaaggagtcccaatcacaggagttccctgaggagtcagaatcatcaagcgctgatgtgtttgaaggcaatccgactgaggtagcaccagctctcgagtaggactatcaaggaggcacgggagaaaagttgtctctcgattcaagctatagcctatagggcttcgccttcgcaatatagatgcaaaggtttggttgatgatgctaagaaaattggctggtaattattttgtactgaattttcccttagaattaaatatagatggctagtgtctagtggtgatatgatgggattcgtctgtattattcttccaaacagtggggggcaaaagaaagagagcaagcattgctgtctatcctgtattttgcattcatcatgcccctatgatggcttttggcacttagtccaggggaaatgtataattcaacacaaatacattctgtaccggcacaatccataattaaggaacatgtagcattatcagattaaggcctccttcgtgaaacaa

SEQ ID NO: 95812 - DNA, 759 bp, Zea Mays
atctcatctctctccccgacctcccagctctagagtctagacagccacaggcaggagctccacgagtccacgtgacctcagacctcacacattcacagtgtcacgctgcctcaacgtcatgtctctcctcgcctcccccacgccgttcggcgtgaccgccatccgccgccgcgtcgccccgcttcctctcctccctgctggcggtcgcgccgccctgcacgtggccctcgcgcgccgcggcggggtctcgtcccggacgcagcggcgcctcgaggaacgaggaggcaagaagcgccgcggtggggtcgtggcgcccgacgtggacgaggacgcggcggaggcgggggtggctgagtgggaaggggagccgctggggttcgaggtgtcgacggagcccatgccgcggctgccagacccggagacgcccgacttctgggagggacctcagtgggaggccctcggcttcttcgtgcagtacatgtgggcgttcggcgtcgtcttcggcgtgagtgcctccttccctccattagttcacggccacgcttgtgcgcacccgctgtgtgttctcgctgtccctacaccactagcctgggtattcagaagtcgaagcataaatctttttgccgcaagatatccacgctaatgggacacgtccatgactccattgtctctatgtagaactgccctgcatatagaaaatcagaaacgctaattagacaccatgagacaatccattctacacttcaaacattagcttta

SEQ ID NO: 95813 - DNA, 1216 bp, Zea Mays
gtctttctccccccacggcagaattccgattccggccgcctcctatacatagccagccagccttccaccctctcccctcccccaacacagagcagcgagccgcgcgcggaggcgaggcgttcgcacacctcgcccgcgccaccaccaccgctccgttgcgcccgccagccgtcacgcgtgacgtttcccggggggccgggggagagagaggcagaaggaggaggcacggagaggacgagacaggatgctcgggttcaggcagatgccgtggtcgtcggcgcaggagcaggagcaggcgccgtcggagcagctgtgcgagggggtgtcggccgtcgtggcggcgcgccaggggatggagaagccgctgacggctgtggcggaggcgttcgaggagctggcgcgcggcatggaggccgatggcggggagctccgcctcgctcccttcagcgactcctgcgctctcgtctccgtgctcttcagcagcctcgggatggccttcaggttcgccgagatcgagtacgtcaccaaggtgaacgatctcatcggtgccggcaagtcgtaccgcacgttgagcgacatcctcgacaaggacatccagaatgactgcgtgaagaagcagggaagccactcccggaacttacgcagggtccgtctcggcctcggcctcattaaagccctcttcgagcaattcctcgataccgaggggacattgtatgatgctgctacgatagcttacgggcaggtctgcgcgccgtttcatagctgggcgatcaggaaggctgttggtgctggcatgtacactcttccaactagggagcagttgatagtgcggctgaatgaaactgaaggagatgaggagatacattgatgcttctagtcctatcatagagtacatcgacaaccttttcctctcgaggaacattagcctagattggtgagctgatctgaactggactggactgaagatcaagtctgcagcttgttcacaaagccgttgttggtaccatcgatttattgttcatagttatttattcagccttgttgggtggtggatggatgctcccttttcttcctttgttgcacgcacgggtctcgtgcatgtgttgtacaactgcatgataattctagcatggacattgatgttcttgccgactgtccatatagaaactgatggataatgcaaacgactattcagatatccatgagttctctcgct

SEQ ID NO: 95814 - DNA, 1231 bp, Zea Mays
agtctttctccccccacggcagaattccgattccggccgcctcctatacatagccagccagccttccaccctctcccctcccccaacacagagcagcgagccgcgcgcggaggcgaggcgttcgcacacctcgcccgcgccaccaccaccgctccgttgcgcccgccagccgtcacgcgtgacgtttcccggggggccgggggagagagaggcagaaggaggaggcacggagaggacgagacaggatgctcgggttcaggcagatgccgtggtcgtcggcgcaggagcaggagcaggcgccgtcggagcagctgtgcgagggggtgtcggccgtcgtggcggcgcgccaggggatggagaagccgctgacggctgtggcggaggcgttcgaggagctggcgcgcggcatggaggccgatggcggggagctccgcctcgctcccttcagcgactcctgcgctctcgtctccgtgctcttcagcagcctcgggatggccttcaggttcgccgagatcgagtacgtcaccaaggtgaacgatctcatcggtgccggcaagtcgtaccgcacgttgagcgacatcctcgacaaggacatccagaatgactgcgtgaagaagcagggaagccactcccggaacttacgcagggtccgtctcggcctcggcctcattaaagccctcttcgagcaattcctcgataccgaggggacattgtatgatgctgctacgatagcttacgggcaggtctgcgcgccgtttcatagctgggcgatcaggaaggctgttggtgctggcatgtacactcttccaactagggagcagttgatagtgcggctgaatgaaactgatttctccgtgcagaaggagatgaggagatacattgatgcttctagtcctatcatagagtacatcgacaaccttttcctctcgaggaacattagcctagattggtgagctgatctgaactggactggactgaagatcaagtctgcagcttgttcacaaagccgttgttggtaccatcgatttattgttcatagttatttattcagccttgttgggtggtggatggatgctcccttttcttcctttgttgcacgcacgggtctcgtgcatgtgttgtacaactgcatgataattctagcatggacattgatgttcttgccgactgtccatatagaaactgatggataatgcaaacgactattcagatatccatgagttctctcgct

SEQ ID NO: 95815 - DNA, 693 bp, Zea Mays
attgtaagttgtaaccctaacttctcatgtctcaaccccgcgcctccacctccagtctccagccccaaggagtggcggcgacacatcgtcacttagctttgtcaccgttagagcccggaggactctccctcgaccctcgccgtcgaccgtcgccgcctcgccggctcactgtcattggctgcatccgaagccggcagctcacgacgcctcttgtcaaacttcaacgactgctatctatctggtactagagttttcttcccaaagcgaccaatcctcttgtgaaacttcgagtctttgatgaatactgtctaatgcgttgctgcctctgcctgagtgcctgctgtagtgctgctcatcgccttgttggttgccgttgtcggcgtgccccacggccacacgccccacttcctggagtcctgtttgcgtgtttgcgtagcgctcaaaatctgaaaggtcccagctcgcaatcgcaatggagtcttgccgatgaacatgatgtgctgactgttgttattgtgcttcaaactttagagaatttgttgttgtgcagcctgctatgtcttaccgaagacttatgtccttgttaactctgtgaagactatattgttagctcatcagtctatgtctaattgtcaatcatacacttatatattgtgaactgttctatttaaatttgtattattgcttgtgtta

SEQ ID NO: 95816 - DNA, 1005 bp, Zea Mays
atggcgggtgatagactggcacgggaggaggcggggatggtggaggtggggaatgcggtagtggtggtgacggcagaagttgaggtggtggtggtgaaggccgcgacagtggcggcagaggaggaggcagaagtggcggaggtggagatggcggcggcggcgatggtggaggtggcgaaggcgggggcggtgaaggaagccaccgcggtggtagtgatgggagccgcgacggtggcatgcgtgggacgaacgaccgatctccggcaggaagtaggaggagaggccgttgttgatgagcaggatctccttgagcgtgctggacatgttggcgacgctgaccgggaggcaaccgccgaaggcgttgtgcgcgaggacaacaccagacgccggcgagttgccgaagttgtccgggagctggaagcggaggcggttgtggttgaggaagatggcatcgagcaggcgatcgaagaggcagggcgggacgacgccctcaaagtcgttgaagcggaggtccaggaagcgcagcgccgggaggtccaggacgacgtccgggaatgggccgacaaagcggttgttgctgaggtcgagctcgtggaggaggcggaggcggcgaagcgcgcgggggaggacgtcgcagaagcggttggagttgaggtggagcagggcaaggtcggcgaggagggcgagctccggcgggaggaagcccacgatgtcgccatggttgaggttgacctcggcgacggcgagcgcaccgcggcggtcggggccggaggggagcggcgcgcaatagacgctcgtgtagttgcacacctccgggcctacccaatcggcggtgaggttgttggggtcggagaagatggcctgccgctttcgcgtcccgcaggcgccggcttgggaaccgccatgacgggtccacctccaccgccgccgtcggccacccctcagaagccgcggccgtcgcgccgaagaaggaggaggaggcagtggcaaggagcgccagaataa

SEQ ID NO: 95817 - DNA, 778 bp, Zea Mays
attaaaaaccatatacgaggccacccagggtacggcggcgctcggttccgtggcggggagtgttttccaggcggcggcgcggtagcgtgaaaccgggcgaccgagcaagcgacggccatggcgttctggcagacgcgcgattttctcttctgtggcatatgcggcaccctcctcaccttcgactccgtccgctccgcctcctgccctctatgcggcttcaagcgcgatgccaaagaaattgaagggaaagaaatacagtacacgatgaccgccgaggatattcgaagagggttaaagacacaaacggaggacgttgttgggcaaagaccagtgacaaataaagcctgtccaaaatgcgaccatccaaaagctgaattttacaacatacagatgcgttcagcagatgagggagagacgacgttctacatgtgtaaaggatgcggctgtaatttcaaagacgaatgaggagttatcctaccacttctacggatatatggcattggtgccgaagaaatttccagcgttgacagactagtactccctccgccctttttttatttatcatcgtctagttcaaaaatgaacggccgataaatattcgagaattgcaatctactccttgacattgttacattacatggatgcgcagatccatgcgttgtgcaaactttcttttgatggaacctgttttgtattttattcgagtgtgtagatgtctacttgcaacctttttacatttattccaaactataagacgtttaaaactttactcttttca

SEQ ID NO: 95818 - DNA, 1442 bp, Zea Mays
gtcgatgattataagggggaaaaaagaaattgatatgctttaaagaaaacatcccatcctcctgtctctcgggaataaaaagcatctgcttcttcatatatagcagaggttggttccgcagacgcagccaccactgggaggaatcgttgatcgtctggtggctacaaggtgagacaactgggttaccaatttttgtgtgttgcaacatctcccacattccagatacaggtgacatgcctagctgaattgtgaatttgtttctatctgtattttgtctgtgaactcgtccaacactatatgtgaacactatatgtgtatgtttcaggttgtagacaatttgagtttgaatgcagtttcagattttgttggggttaataactgcagtgcagtatgttagtttctagagaattatgtttctgtgttttagtgagctctgtgtatttttttgtcatgtctttccggagaataagtttgaggcggatcagaattccgacagagcttgtactctgtgcttatggacatgtgtaagcagatggagatcgattgccactctggagaaaccattgatctgcctcctcaccaacctgtttactgccccaagtatgggaaattttctattttgtcttatgggcgacatgagctacacgctgcaccaccatgaagttgttggaaagcacctctccattgttcagagatgactgatgagcaaatgatagcatttattgtacaccgtgtcacagcatcagctgtttttctgacagctttcccatcgctcccgaggaagtatgttaaggctctgctccatacctgggctagaggacgaggtgcaatgcctcttgtttcttttatgttccttcgagacttgtcattcaagtaggttcaaattgccttgatacttgcctcaagggtatctataaggcttatttggtgaactgcaaactgtccaaatctataagcggatcaaaacaacaacacattcaattccttggaaatttgtgtcagagaattgtatagtctggatccacaaagtgcgtatcagcatgcttttattttcatccatcaactgggggttatcctaagaggagctcttactgaaagggggccaaagttagtgaaggacaaaaggcagaaagaaagtagcaaatcatcgaaaaaacaagtgagaaatcttaccaaaaaaattatgattggcaacacattctgccttgagctttggaccagtgttgtgtgcggatgtagttccgaggaagaattatgacctctagcttatccgttgacacaaataataatacatggtgtggcatgccttgtacctagcgcgcgttacttccctgtgcgctttaggtgtgttagaatgcttaattgtattgctgaagccgctggtaccttcattcccatgtgctccttgctgcttgatatgcttgaaataaaagaacttagat

SEQ ID NO: 95819 - DNA, 1869 bp, Zea Mays
gacggttccccggccgttgctccgattgccacaggccggccatctcccttctttccggcaacggcaagggagaaggcggcgtcctttgcctcctcctctcactcctgtagcgtggagtcaataagaactttgcggccggcgaggggtggcagtcccgcggaggacgcggggcgcccgcccggccatgcgcgccccgccctctgccggcggcttcaactcgccgtggacgctcgccattcgcgcggcggcagaccaaggccggccccgccgcgccatcgctctgtacctcgcgtccctacgctcgtcctgccgcccctgccccttcgcactcgccgccgtcctcaagtctgtgccccgccttcccgagcacgccgttctccccgcggcggcctccctccacgcgcacctcctccgcctcggcctcctctcccacccctatccgcacgccgcgctctctcacctctactcccacctcctccccccgcaccacaaccacgcccgtggcctgcttgatgacgcgccaacgccgctgaaccgccactccctcgtctcgtccaattcgctcctcgcttccctcctacgcgcgggtgatatccctgccgcgcgcgccatgttcgaagcaatgcccgcgcgggacgttgtgtcgtggaactccatggttgctggactcgccaaggccggacacctggacgaggccatcgagatgttcgaccaaatgcccgagacgaacgtcgcatcctggaacgccctcgtgtccggattcatggcacaaggccacctagcccaagcgcaggagctgtttgagcggatgcccaccaggaacaacgtttcctggatcacgatgatctcagggtacgccaaggccggtgacgtccaagctgctgctaacctgtttgataggatgggcagtaaggacctttatgcatggaatgcgatgatctcatgctatgcacaaaatggctgcgcaagggaggcacttggcatttttaacagaatgttgaagccacatatttgggtggtacccaatgagaagactttttcctctgtgatctcggcatgttcacagctgggggacttaaggttcggcttgtgggttgagaatttcatgggctatgtgggggttgatctggatgatcacttgcgtacagctctggttgatttgtacaccaagagtgggcgaatggatagggcttttgatttgttcagaggattgagatcaagggatgtggtgtcttacagcgcaatgatagtgggctgtggaatgcatggcaagttaaatgaagctgttggcttgttcaaggagatgtccaaagcaaggattgatcctaatgcggtgacctttgtggggttgctatctgcatacagtcacgcgggactgctggaagaagctcgtgcttgtttcacttccatgacaagcagatacagaattaatccttcaatggaacactacactattatggtagacattcttgggcgctgtggaaagttggaagaagcattccagctggtcatgcagatacctgtatgcccagatgccagtgtttggggtgccttgcttcttgcttgcaggttgcacaacaacattgagcttggggaagttgttgcttccaagtgctttgaactggagccacaagagagtggatattacattctcttgggtaacatatatgcgcaagcaaagaagtgggacaaggttaagggtttgaggaagatgatggcagaaaggggtttgagtaagacacccgggagtagctgggtgcatgttgcatgaatccattctattgatcttgctcattttatcatttgggtcagttactcagatgacatattagcatgcaactcagattttgggcactaaatttgggaaga

SEQ ID NO: 95820 - DNA, 260 bp, Zea Mays
atcctaagagcatctccaacaatgcatcaaactagtgcctcaaattgaaatatggggctctacacaggaaaaactactccaacagtgccctatttcataaatttttgtcaaaaaactataggacaccctctcaagtgactcaaatatactataccctagttggctgccctataatctagatttagggctttactgttggagcgaggtattttgttggtgctctaaattctataaaatatacttatttttaaattataggg

SEQ ID NO: 95821 - DNA, 4159 bp, Zea Mays
ccgagatctaaagcacctctctcccgtcgtcattgcattctcccccctctgcccttctctctccctctctcgcgagtcccgagtcccgactcgcacctccagatccacctcctcctccctcttccagatccaccatctcttctccgttcctctccgcagctacagctggggagctcagcttagccgccgccgtggccgggcacgccgggccgggaggatgctgaccaagttcgaaacgaagagcaaccgggtgaagggcctgagtttccacccgcgtcggccatggatcctggcgagtctccacagcggggtgatccagatgtgggactaccgcatgggcaccctcctcgaccgcttcgacgagcacgacgggccggttcgcggcgtccacttccacgccacacagccgctcttcgtctccggaggtgatgattataagattaaggtctggaattacaagacacaccgttgccttttcacacttcacggacaccttgactacattcgcactgtgcaattccatcatgagtatccatggattgtaagtgctagtgacgatcagacaatccggatctggaactggcagtcacgcacctgtgtggctgtgctgactgggcataaccattacgtcatgtgtgcatctttccatcccaaagaagacctggttgtatcggcatcacttgatcagactgtacgtgtctgggatatcggagctctgaggaagaagacagtgtcacctgcagatgacatcctccgtctcacccagatgaacacagatctttttggaggtgttgatgctgtagtgaaatatgtcctggaaggccatgatcgtggggtcaactgggcctcatttcatcccactttgccactcattgtttctggggcagatgaccggcaggtgaagctatggagaatgaatgataccaaggcttgggaagttgatactttaaggggccacatgaataatgtgtcttgtgtgatgttccatgcgaagcaagacatcatcgtgtcaaactcagaagacaaaagcattcgcatttgggatgccacaaagagaactggtattcagacatttagacgggagcacgaccgtttctggattcttgctgctcaccctgaaatgaaccttcttgctgctggtcatgacagtggcatgattgtgttcaaattagagagggaacgcccagccttctgcgttagtggtgacactgtcttctatttgaaggatcggtttctccggttctttgaatactccacccagaaggaagttcaagtggctccaataagaagacctggatcagtcagcttgaaccaatcacccaggacgctgtcctacagcccaactgagaatgctgtcttgatttgctctgatgctgatgggggttcatatgaactctacattgttcccaaggattctgctggcaggtctgattacttgcaagaggcaaagaaaggagctggtggttctgctgtttttgtagcgcgcaacaggtttgcagtccttgagaagagtagcaatcaagttttggtgaagaatcttaagaatgaaattttgaagaaaagcccccttcccattgcgactgatgcaatatattatgctgggaccggtaacctgctgtgcaaaggtgaagacagggtggccatctttgatcttcagcaaaggttagttcttggtgagctccaaacacctgctatcaaatatgttgtttggtctagtgacatggaatctgtggcactactgagcaagcatgcagtggttatagctagcaagaagcttgtccataagtgcacactgcatgaaaccatccgtgtgaaaagtggtgcctgggatgagaatggtgtgttcatttacactacactgaaccatatgaagtactgtcttcccaatggagatagtgggatcataaagactctcgatgttcctatttacataacgagggttgttgggaacaacattttctgcttagatcgtgatggaaaaaacaagctgattgcagttgatgcatcagagtacattttcaagctcgcccttctcagaaaacgctatgatcatgttatgagtatgattaagaactcccagctgtgtgggcaggctgtgatttcttatttacaacagaaaggtttcccagaagttgctctacactttgtgaaggatgagaagaccagatttaacctagctctcgagagtggtaacattcaaattgcagttgcttctgcaaaggagattgatgacaaggatcactggtacaagttgggaattgaagccctgaggcagggaaatgttggtatagtggaatatgcttaccaacgaacaaagaattttgagaggcttgcttttctgtatcttattactggttacttggacaaggtgggcttcatgtgcaaaattgctggacagaataacaatttgatgggacagttccacaatgcattgtatcttggggatgccaagaagcgggttgagatcctggagaatgctggacagctacctcttgcttatgttactgctgtcactcatgggctcacagaaattgctgagaggattgcttctgaattaggcgagaatgttccttctctgcctgaaggaaaatcccactcactactgatcccccctgcacctctcacagcgtgtggtgattggccattgcttagggtagtgcgcggtatttttgaaggtggactggatgctactggaagggcagatcttgaggaagacgatgaagctgctggtgctgattggggtgatgaagacttggatattgttgatgtaagtgaggtggtggcaaatggtggtgatggtgttgatgtagaagagggtgagccaaatgaggaggatggtgaggagggtggctgggacctggaagatctggaacttccgcctgaaactgagactccaaaagctgttggcaatgctcgatctgctttattcgttgctcctacaccaggtattcctgtcagccaaatttggacccagagatcttctctggctggggagcaagcggcagcagggaacttcgacacagcaatgaggttgcttagccgccagttgggtatcaagaactttgttccactgaagcccttgtttattgatctgcacatgggcagtcatacatatatgtgtgcgtttgccgctgcgcctgttatatcagttgcagtagagaaaggttggaatgagtctgcaagtcctaatgtgaggggccctcctgcacttgttttcagcttctcacaaatggaagatagactcaaggctgcctacaaagccacaactgagggcaagttccccgaagcactgagacagttccttagcatcttgcataccattccagttattgtggtggattcgcggagagaagttgatgaggtgaaggaattaatcgagatagtgagggagtatgttcttggtctgaggatggaactcaagagaaaggaattgagggatgatgtgacccgtcagcaggagttggctgcttacttcacgaactgcaagcttcagagagttcatatgaggcttgtgctcgcaagcgctatggctctttgcttcaagcagaaaaactatgcaactgcagcacactttgcaaggatgcttcttgagaatagccctcaggaggcccaagcaaagaaggctcgacaggtgctgcaagcctgccaggacaaggacgattctcaccaactgaactatgacttcagaaatccattcgttgtttgtggtgctacatatgttcctatctatcgtggccaaaaggacgtttcctgcccatactgtggatcccgatttgttccttccatcgaagggcagctttgtaccatatgtgagcttggtgcggttggggcagatgcttcaggtctcctctgctctcctacacaatcgagataagccatggtagttagagcccccctatattctttctagtgtcttaagttccaagacttaatcatatattttaccagggagtttagtgattgtaaggaataagtattatacatgtttttatcaagttttttttttcttttttcgtgttctgttaccataatttttgtttgcctagagggtgctgtcatcacctgccgtatggtttagacttctgatcaactttggaagctatgctggaaattgatgtatgagatgtctctttcactctttaaaattctttttttggga

SEQ ID NO: 95822 - DNA, 573 bp, Zea Mays
atgccggatcggattccccaagcagccccaggtgatactgagcccactcccaccaagctccttcttcccttaatcaacgggcggccgcatccgatcggggatccaggcagccatgccttgttggccacacagatcccacctctccagtctccgctcgaattcgcggaccgacgagcacacaaacacatcatatgcaaactcgggagaaatgacggacagagactgctactcaccgacaactggacccgaggatccctcggaccccatggcgaacccgtccgcttcctccagcttcgagccgctgcaccctgctatcccttgagacgggaggaggggaggatgcgtgctggaagcgggcgtgctaaaccgagcagggaggagaaggaatataccaaggcccgccccagcgtgaggtcgtcctcggtgcgatgccccccaggtccgagtgggggactggggtctggggactggggagtagagcaagacaacaagaaaggaactgctctgctgcagagacaggggaaaggatacaacagagagacagggtcagaactcagaactaaaaataaatga

SEQ ID NO: 95823 - DNA, 2745 bp, Zea Mays
cgccaaacgagcacgggagttttttggggggttttctctccagtctcccgcacgccagagactccatctccgcccacacaacacaacaaagcacaccaccccaccccccgaaacggacgctacccctccccgcctcgtctcgctccgctccgctccggcccgttccggctctcgccaccccagccgagatgcggtcgccgccgcccccaccgtggcgcgccgggcgcctccattccccgctccccatgctcctgctcttcgtcgcggcgctggcggcgcgggcgggggccgacgacctcgcgagcgacgcgcgggcgctcctggcgttccgcgacgccgtggggcggcgcctgacgtggaacgcctcggacgtcgcgggggcgtgctcgtggacgggggtctcctgcgagaacggccgcgtggcggtgctgcggctccccggggcgacgctctcgggggcagtccccgcggggacgctcgggaacctgacggcgctccacacgctcagcctccgcctcaacgggctctccggcgcgctcccggccgacctcgcctccgccgccgcgcttcggaacgtcttcctcaacgggaacaggctgtccggcgggttcccgcaggcgattctcgcgctcccggcgctcgtcaggctctcgctcggcgggaacgacctgtcggggcccatccctgcggagctcggcagcctcacgcacctcagggtccttctcctggagaacaatcgcttttccggcgagatttcggatgtcaagctaccgccgctgcagcagttcaatgtctcgtttaaccagctgaacggatccatcccggcttcacttcggtcgcagccgcgctccgcgttcctggggacgggcttgtgcggcggacccttggggccttgccctggcgaggtttccccttccccggctccagcggggcagacaccgtcgctgacgcctgttcccagtagcggtggcggtaacggtagcggtagtggtagcggcgggaccatcggtggaaatgggggagaaagtggccacaagaacaagaagctctccggtggtgccattgccggaatcgctataggctccgccttgggcgccggacttctcctcttcctcctcgtctgcctctgtcgcaggtcggggggcaccaggacgcggtctctggagatgccgccacctgaagcgcctgctgctgctgctgctgctggcggcaggaaacctcccgagatgaccagcggcgctgctgttgcgcccttgaccacaataggccaccccaacgctcctatcggccagtcgacgtccggtaagaagctggtcttctttgggtcagcggctgccgtggcacctttcgatctggaggacctgctgcgcgcgtcggctgaggtgctcgggaaaggagcgttcgggacgacatacaaggcagtgctcgagtctggggcaactgtggccgtgaagcgcctcaaggacgtgactctatctgaagctgagttccgtgaacgcatttccgagattggtgagcttcagcacgagttcattgtgccactccgtgcttactactacagcaaagatgagaagctacttgtttacgacttcatgcccatggggagcctgtctgcagtcctgcacggcaacgtaagttctggcaggacaccacttaactgggatttaaggtcaagcattgctctagctgcagcccgtggtgttgagtacatccactcaacgacctcaacggcttcccatggtaacatcaagtcatccaatgtcctcctgggaaaatcatatcaagcacgtgtatcagagaatggccttaccactcttgttggtccatcatcttcatcgtctcgcaccaccggataccgcgcacctgaggttattgattcccggagggtttcccagaaggcagacgtgtacagctttggtgttctgttgcttgagctggtcacagggaaggcccccagccaggctgctctcaacgacgagggtgtcgacctgcccagatgggtgcagtcagttaaccgctcggagtggggttcactagtgtttgatatggagctcatgagacatcagactggtgaggagcccatggctcagctcgtgctgcttgctatggactgcacagcacaagtcccagaagcccggccgtcaatggcgcatgttgtcatgcggatagaggagatcaagaagtcaagcgtgaccccgaacattgaacaagttgatgatcaatcttcaagggctgaatcggaggcggcgccgaccaatccgtttgctacttgatatgagttgacctgagagagagaatctgctataactctagcctgcattcaatcgattcacacattcgatgaatcctatcttcgactgagtcgactgtttttttctgtgcatcttttagcctgttggatttaacggttaacctgatcgtcactaagcagcacgggtgttcggcagtcgcaccctgtgctgcggaaggtgattggtggtgtgtttagggaccagttttaaagtgtgagattgctcaattgctgtgctcattctagccttgatcaggttggttttagcttgtagctgctgctgctgcttgtcttccggctatccatgtgtaattactcaagcctcatctagcgtttggatttttttttcactttttgccggattaatctctcgtttggtttgccttagttgcttggcaatgtgatttcagtgggaccaaatatgtttttgggaaaagttttggtggtgtactgtt

SEQ ID NO: 95824 - DNA, 224 bp, Zea Mays
ttccctaaacagccatcaaaagattagtgacatggtatacatacatgtgagtaaattatttttagtactcagaaaaaaagataagcaaatgctcaaacaaaaccagaaacacttcctaacaagattacaagaaacacgctcccgattacagcactgtcactgtgacaagattattaccgcatgctgtgccagcggctcagtccgctgcactgcagtacatggac

SEQ ID NO: 95825 - DNA, 946 bp, Zea Mays
taacacagtatacataaatagagttagtgtttatttgactgctcgtgaattgtgtgtgttttaacctgctcgtgagtgtgctgtgcacgcagcaccaagtcgatgaggagcgacggcgggtacgaggtgatcaagaaggcgatcggcaagctgggcctccggcaccgggagcacatcgccgcgtacggggacggcaacgagcgccgcctcaccggccgccacgagaccgccgacatcaacaccttcgtctggggcgtcgcgaaccgcggggcgtcggtgcgggtgggccgcgacaccgagaaggaaggcaaaggctacttcgaggaccggaggccggcgtccaacatggacccgtacgtggtgacctcgctgatcgcggagacaaccatgctgtgggagcccagccactccaacggcgacggcaagggcgccgcggctccttgatttgattctgcggagactgagctctgtgtgtgagccggcctgcgtagatggcaaatgggactgaccctgtcagaaacttgagatgaccataataatagctgcagtgtgctcgttctggggttggataagacccaagaactttttttagctttcttcgaacaagtaatcatggtgctgaaccaacacagatgtgctactaaacacatctaacgagtcaaacgccgaagcatatcccaacgcacaaccccggttaatcttgttacccatggattgaatgagattgaaaaaaattaagaaagagtttgatttagggtttgttcgctttcctctcaatctatatggattgggtgggattggatgggtttaaatcccgaacaagttaaaatccttcatatttttttccaatcccatctaatccatatgggacaggaataaccgaacaagcccttagttgagatttaaacccacacaatctcactcaatccatgtggatttttttttt

SEQ ID NO: 95826 - DNA, 1742 bp, Zea Mays
ctctctctctctctctctctctctctctctctctcacacacacacacacactagcagcaatttcaaactgctggcgttttaattccttctccagttcctccctcgatgaccacggcatgccattgccagccacgtacaacgtactacaaggcacactaacccactgccaagcacctcgtctgatctgatctgatgctgatgcagggttggcggttccgggatggacgtcaggagcaaagccaggacgctgtccggacctgttgatgaccccagcaagcttccgaagtggaacttcgacggctccagcaccggccaagctccgggcgacgacagcgaagtcatcctttgccctcgggccatcttcagggacccgttcaggaaggggcagaacatactggtcatgtgcgactgctacgagccgaacggggagccgatcccgagcaacaagcggcacggggccgcgaagatctttagccaccctgacgtcaaggctgaggaaccatggttcgggattgagcaggagtacacccttctccagaaggacaccaagtggcctctcggttggccgctgggcggctaccctggccctcagggaccttactactgcgccgtcggagcggacaagtcctacgggcgggacatcgtggacgcgcactacaaggcctgcctctacgccggcatcgacatcagtggcatcaacggggaggtcatgccggggcagtgggagttccaggtcggtcctgccgtcggcgtctcggccggcgaccagctctgggtggctcgctacattcttgagaggatcaccgagatcgccggcgtggttgtctccttcgaccccaagccaattccgggggactggaatggcgctggtgcacacaccaactacagcaccaagtcgatgaggagcgacggcgggtacgaggtgatcaagaaggcgatcggcaagctgggcctccggcaccgggagcacatcgccgcgtacggggacggcaacgagcgccgcctcaccggccgccacgagaccgccgacatcaacaccttcgtctggggcgtcgcgaaccgcggggcgtcggtgcgggtgggccgcgacaccgagaaggaaggcaaaggctacttcgaggaccggaggccggcgtccaacatggacccgtacgtggtgacctcgctgatcgcggagacaaccatgctgtgggagcccagccactccaacggcgacggcaagggcgccgcggctccttgatttgattctgcggagactgagctctgtgtgtgagccggcctgcgtagatggcaaatgggactgaccctgtcagaaacttgagatgaccataataatagctgcagtgtgctcgttctggggttggataagacccaagaactttttttagctttcttcgaacaagtaatcatggtgctgaaccaacacagatgtgctactaaacacatctaacgagtcaaacgccgaagcatatcccaacgcacaaccccggttaatcttgttacccatggattgaatgagattgaaaaaaattaagaaagagtttgatttagggtttgttcgctttcctctcaatctatatggattgggtgggattggatgggtttaaatcccgaacaagttaaaatccttcatatttttttccaatcccatctaatccatatgggacaggaataaccgaacaagcccttagttgagatttaaacccacacaatctcactcaatccatgtggatttttttttt

SEQ ID NO: 95827 - DNA, 1730 bp, Zea Mays
caggctacagccgtggcgaaagcacacacggatcaatcacactcactcgcggccattgtcctgcccgtgcgtgctctgccttttcaggcgatcgaccaaccaacttctcgtcactgccatggctctgctctccgacctcatcaacctcgacctctcgggccgcaccgggaagatcatcgccgagtacatctgggttggcggttccgggatggacgtcaggagcaaagccaggacgctgtccggacctgttgatgaccccagcaagcttccgaagtggaacttcgacggctccagcaccggccaagctccgggcgacgacagcgaagtcatcctttgccctcgggccatcttcagggacccgttcaggaaggggcagaacatactggtcatgtgcgactgctacgagccgaacggggagccgatcccgagcaacaagcggcacggggccgcgaagatctttagccaccctgacgtcaaggctgaggaaccatggttcgggattgagcaggagtacacccttctccagaaggacaccaagtggcctctcggttggccgctgggcggctaccctggccctcagggaccttactactgcgccgtcggagcggacaagtcctacgggcgggacatcgtggacgcgcactacaaggcctgcctctacgccggcatcgacatcagtggcatcaacggggaggtcatgccggggcagtgggagttccaggtcggtcctgccgtcggcgtctcggccggcgaccagctctgggtggctcgctacattcttgagaggatcaccgagatcgccggcgtggttgtctccttcgaccccaagccaattccgggggactggaatggcgctggtgcacacaccaactacagcaccaagtcgatgaggagcgacggcgggtacgaggtgatcaagaaggcgatcggcaagctgggcctccggcaccgggagcacatcgccgcgtacggggacggcaacgagcgccgcctcaccggccgccacgagaccgccgacatcaacaccttcgtctggggcgtcgcgaaccgcggggcgtcggtgcgggtgggccgcgacaccgagaaggaaggcaaaggctacttcgaggaccggaggccggcgtccaacatggacccgtacgtggtgacctcgctgatcgcggagacaaccatgctgtgggagcccagccactccaacggcgacggcaagggcgccgcggctccttgatttgattctgcggagactgagctctgtgtgtgagccggcctgcgtagatggcaaatgggactgaccctgtcagaaacttgagatgaccataataatagctgcagtgtgctcgttctggggttggataagacccaagaactttttttagctttcttcgaacaagtaatcatggtgctgaaccaacacagatgtgctactaaacacatctaacgagtcaaacgccgaagcatatcccaacgcacaaccccggttaatcttgttacccatggattgaatgagattgaaaaaaattaagaaagagtttgatttagggtttgttcgctttcctctcaatctatatggattgggtgggattggatgggtttaaatcccgaacaagttaaaatccttcatatttttttccaatcccatctaatccatatgggacaggaataaccgaacaagcccttagttgagatttaaacccacacaatctcactcaatccatgtggatttttttttt

SEQ ID NO: 95828 - DNA, 1712 bp, Zea Mays
caggctacagccgtggcgaaagcacacacggatcaatcacactcactcgcggccattgtcctgcccgtgcgtgctctgccttttcaggcgatcgaccaaccaacttctcgtcactgccatggctctgctctccgacctcatcaacctcgacctctcgggccgcaccgggaagatcatcgccgagtacatctgggttggcggttccgggatggacgtcaggagcaaagccaggacgctgtccggacctgttgatgaccccagcaagcttccgaagtggaacttcgacggctccagcaccggccaagctccgggcgacgacagcgaagtcatcctttgggacccgttcaggaaggggcagaacatactggtcatgtgcgactgctacgagccgaacggggagccgatcccgagcaacaagcggcacggggccgcgaagatctttagccaccctgacgtcaaggctgaggaaccatggttcgggattgagcaggagtacacccttctccagaaggacaccaagtggcctctcggttggccgctgggcggctaccctggccctcagggaccttactactgcgccgtcggagcggacaagtcctacgggcgggacatcgtggacgcgcactacaaggcctgcctctacgccggcatcgacatcagtggcatcaacggggaggtcatgccggggcagtgggagttccaggtcggtcctgccgtcggcgtctcggccggcgaccagctctgggtggctcgctacattcttgagaggatcaccgagatcgccggcgtggttgtctccttcgaccccaagccaattccgggggactggaatggcgctggtgcacacaccaactacagcaccaagtcgatgaggagcgacggcgggtacgaggtgatcaagaaggcgatcggcaagctgggcctccggcaccgggagcacatcgccgcgtacggggacggcaacgagcgccgcctcaccggccgccacgagaccgccgacatcaacaccttcgtctggggcgtcgcgaaccgcggggcgtcggtgcgggtgggccgcgacaccgagaaggaaggcaaaggctacttcgaggaccggaggccggcgtccaacatggacccgtacgtggtgacctcgctgatcgcggagacaaccatgctgtgggagcccagccactccaacggcgacggcaagggcgccgcggctccttgatttgattctgcggagactgagctctgtgtgtgagccggcctgcgtagatggcaaatgggactgaccctgtcagaaacttgagatgaccataataatagctgcagtgtgctcgttctggggttggataagacccaagaactttttttagctttcttcgaacaagtaatcatggtgctgaaccaacacagatgtgctactaaacacatctaacgagtcaaacgccgaagcatatcccaacgcacaaccccggttaatcttgttacccatggattgaatgagattgaaaaaaattaagaaagagtttgatttagggtttgttcgctttcctctcaatctatatggattgggtgggattggatgggtttaaatcccgaacaagttaaaatccttcatatttttttccaatcccatctaatccatatgggacaggaataaccgaacaagcccttagttgagatttaaacccacacaatctcactcaatccatgtggatttttttttt

SEQ ID NO: 95829 - DNA, 1153 bp, Zea Mays
gtatagacatgtatacctttctactcatcttacttgtacatcaagccatacgacctatataatgaaaggtcctcgccccacaatagatgtgtggtgtttccctatttctctacaagttctacaataatcatgatttgtaactttttccgactgaatataacaagaacataccttgtaatggttaatacaaataacagatatcacactgttttcgttcctttttttttgccagctaatttgtgctgctaccttgtcttttcaatctccttatcaaggaaaatcaatattgtttctgtggcatggtttggtgcaatgccttctctgatcatcctcctcaaatatttgccagcttcctttagcctaccagctttcgcattaatactaattaacgtattaaaagtaacaacatctggcttcatgccacttctgatgatctgctcaaacaagcagcctgcttcttcaacctttccgacctttcccaactgactgatcaaagtgttatacatgacaatgtccatgtaaacacctttctttgacaaccgatcaataattgtcctagcaacatctgctttccccatcaggccgagaccttgaatgattagattatatgttgctacatcattagggcagagctgtccacccctctcatgaagaactgcccacacctgtttcaaatagcccttcttgacaaacgaggtcatcagtgaattgtatgtataacttgtccctttgtttcctagattcgtaaagatctcaaataacttgcaagcaacactcaacttccctttggctaaaaaaattgacaagtatgtattgatcatgtcagcatcaaaagtcttggggcccataccttccaccctctgccctctgtgcattgtaaatacaacagagctgttcaaactgtcagcatgtttagcaagatggtccaagtgtggtgatagtgtccaatcatccttgggatcactgtttgggatttcttcatcagtacctgtatgtcccacatggttaaccaaactcatcacatcctccatattgccatcaaaggaaaacaatggtgtcccatctttctctctgccgtgaggtcctctcaaggcaaccatcatgtttgatttccaccgaatggcatccggcaatacagtgctgtcccttataa

SEQ ID NO: 95830 - DNA, 1033 bp, Zea Mays
aaaacactgccacggttttcttccgaaccgaacgcattccaagcccgcccacgcccagggcgccacagctcgcgcggctcctctgctacctacagcgactgtcctgtcccatggggctctgcgcgtccgtgttgcaatggacggccaagcggcggcggcagcggcagcggcagcggcagcagcagcagcctgagccaaggcgcagcacgccgaaggccctatacgtcgtcaggaacggcgccggccagccgtccaggccagaggcgctcgtcgtctacggcccaccacacggctctggcggctcggggttacagtcacagaaggccggcgacggcgaggcggggagccggaagcgcgggcacgagtgctacgactgcatggacgtgctgggcaggaggctccacgcgccgccgcccaggctcccgtgcggcagcaccagaagcgtcgcgacggtggagccggtggtgacggccgggacgatgccggcgccggtgtccgggcccaggggcggcgccacggcggacgggaagaaggcggcaccggcggcagaggggtgcaggacaccgatgacgccacggaggacgccggtgtggcagcggaggatactgatggggacgcgctgcgagctcccgcggttcagtggggtcatactctatgacgagcacggccggcccctgcagagcagctcccagaacagagcaggccacctgacgagcagagcaagcagacacgaaaccaagggaaaaaagaaggctgccaggacaaccacaactctcagggatctcctgtagtcagttacctctcacatcacatgctattgcctcatttactggtagctaaaaatcgcgcctttgcaagtgctcccaggctcccagcaaactactgcgtttggtgttcccctcatgtaaagcgtgaaccattgaaggcatgcagattcagatactgaagcgttaatttctatccaaattacggtcagttggtcatcctattccaaggcattaatgtttatccaaagcatgagttgcttcacaga

SEQ ID NO: 95831 - DNA, 2781 bp, Zea Mays
tattgggccctcataccgggccccggtgccattctcaccgttctcgaaaccccgtgtacacgtagcagggccacgggccacctccctacggaggagacgaccccccatcccagaggtcgagggctcctctctctctaccatctccgttcgatcccatcgccccgccgccgccatggcgtttctcgcgcgggcgctgcggcagtccaactggcgcctgtcgtcgcgctgccccgccgtggctgcctcctgccgttggatctccccgaccgccgccgcgggttcgccggaggccggcgcagcggtggcgcctgccgacctggagctgcctccgccgcgggagcccgttggaggcgcccgcgtggagcttcctcccaacccggaggacgcgctcgaggtattcgtggatggccatgcggtgcggatccccaaggggttcaccgtgctccaggcctgcgaggtcgccggcgtcgacatcccgcgcttctgctaccatagccgactctccatcgctggaaactgccgcatgtgtctcgtcgaggtcgagaagtcgcccaagcccgtcgcttcctgtgccatgcccgcgctcccagggatgaagattaagacaaacaccccagtggcaaagaaggcaagggagggtgtcatggagttcttgctgatgaaccatccactcgactgcccaatctgtgatcagggcggcgagtgcgacctccaggatcagtctatggcatttggtgctgaccgcggtcggttcactgagatgaagcgttcagttgtggacaagaatttgggtcccttggttaagacagtgatgactcgttgcatccaatgtacaaggtgtgtaaggtttgctactgaggttgctggagttcaagaccttggtatgttaggtcgtggcagtggtgaagaaattggaacatatgttgagaaacttatgacaagtgagctatctggaaatgtcattgatatctgccctgttggtgctcttacatccaagccatttgcatttaaagctcggaactgggaacttaagggcacagagactattgatgttactgatgcagtgggatccaacataagaattgacagcagaggacctgaagttatgcgcgttgttccacgtctcaatgaggacattaatgaggaatggatatcggataagacacgattttgttatgatggtttgaagaggcaaagactaaatgaccctatgatccgtggtcctgatggcaggtttaaggctgtgacgtggcgtgatgctcttgcagttattgctgaggttttgcatcaagttaagccggaagaaataactggagttgctggaaaactttctgatgcagaatccatgatggcactgaaagattttgttaacagaatgggttccgataaggttctctgtgagggaaatggtcccaatcctccagcagacctgcgatctaactacctaatgaataccagcattgctgggcttgaaaaggctgatgtgttccttttggttggcactcagccaagggtggaagctgctatggttaatgccaggattcggaagactgttaaagcaacacaagcaaaggtgggctacattggtcctccagctgacttcaactatgatcatgagcatcttggcacaggaccacagacccttgttgagattgcagagggtagtcaccctttctgctcagtactgcaatccgctaagaaccctgtcatcattgctggagctggattatttgaacgagaagaccaagttgccctattctcaacgattgagactgtagccaagaagttcaatgtgatgagaccagactggaatggccttaatgtcttgttgctccatgctgcacaggcggcagctcttgatcttgggcttgttgctaatcctgccgagagcatcaagtcagcgaagttcctgtatctgatgggagctgatgatataagcctggaaaagcttccagatgacgcatttgttgtttatcaaggacaccatggtgacaagggtgtctatagggccaatgttatcctgccatcttcagcattcagtgagaaggaaggcacctacgagaatactgaaggatgcacccagtggaccatcccagctgttccgacggttggtgatgctagggatgactggaagatcatccgcgctctttctgaggttgctggggctcagctgccttatgacagcctctcagctgtgagggaccggatcagtacggttgcaccaaatctagtacatgtagacgagagggagacgcccacaatctctgcggaggttaagccgcctgtgaagcaacaagtcagctcgacaccattcaaagctgttgtggagaacttctacatgactgatgcaatcacccgagcttcaaagatcatggcccagtgcagtgcaaccttgctgaagaagtgaggttttgccaccatcaagctaatcttctgcaaacagtttcttagtcccttttttacctttgctgagtttcagtgtttcaccacctgttgcttgttttcttgagaggtttgtgtataatttggactgcctctaggtttccagagcagcaaaacttgatcagtacatttccgcgttgtgtgagaagcagaacatgctcaataagcttgttgctcacattgaatcatacaagtgccacaagcaaatgatttttgccttttgaatatgggaacatttgcccctctgattggttgcaatatgcaacttgcgaaagctagcataacttgcgaaagcaaatgatttgtgacagtctttgaccataactgaaagatgtgttt

SEQ ID NO: 95832 - DNA, 1468 bp, Zea Mays
aaccaccgctggcctgtagtgccgtccgtgcctgttgcctgccaacgcgcgtcgcggccggaatcatcgccaacctgccggtcggtacgttacaattacttacgtactgtaccctactactacacgcgcctcgcaaaaagtcgccctcttcctccactcgccgacacacacggcgcaaatccccacaaccccaagcgggcgggcggacttccacccaccttctcgcgcggcgacgtgctcggctcgcttccagccacctcgctcgccgcccgcctcggaatccccgccgcgagatcttgttccccggaggatggaggtgaaaacagtaaaagttagcaatctttcattaaatgctttgaaaagagagatcacagagttcttcagtttctcgggagatatagaatatgttgaaatgcaaagtgaatctgaatggtcacagcttgcttatgtcacatttaaagactcacagggagcagacactgctgttcttctctcgggggcaacaattgtggatcgtgctgtcattataactcctgctgagaactatcagctgcctcctgaagcacacaaacaattatcgggagcaaacgtctctactgaatcagcagtgaggaaggcagaagatgttgtgagcagcatgctggccaagggcttcgtcctcagcaaagacgcactcaacttggcgagatcatttgacgagcgtcacaacatcctatccaacgccactgccactgttgcatccctagaccgccagtatggcctgagcgaaaagatcagtctcggaagggccattgtcggcagcaaggtcaaggaggtggacgagcggtaccaggtctcagaactcaccaagtccgccttggctgccgccgagcagaaagccagcgtcgcgggctccgctatactgagcaaccagtatgtctcggctggtgcctcgtggctaacaagcgcgttcgatatggtaacgaaggcagcgggcgacatgacctcgatggccaaagataaggtggagagggccgaggaggagaggaaagccatcatgtgggaggagaggagtgggctggtcagcgagtacgcgaagatccatcttgacgagccctcttcgtgggagcccgcggttctgcctctggaatcagtggacgagcagaagctccaagctgtctgacacgcacagaccgagtgtctcgcacgaaattcttttgcagctcgtcctatatatagattgttctttttcgttgatgcactggattaaaacaagtgcgcttgtcggccagtgccgtgtaaatttctgagagttggtcttgtgttattaccaggttttgttcgtttcttttgttttggagagagtggtgctaccagcattactacactagactactctgtgtgaacggaatactactgtactttgtctcttctactactactacagaaacagaatacaacttccttcgttagattcagattaatacaa

SEQ ID NO: 95833 - DNA, 1582 bp, Zea Mays
cgcgttgctaccaccgcggcttccttctctacccttccctcgcgtcgccatcgcaagagtatctcaactccgcctcgagacctcccccctcgctggtctcagccatggtgaaatattcgacggagccgaccaaccccaccaagtccgctaaggccatgggtcgtgacctacatgttcacttcaagaacacacgtgagacagcttttgcccttaggaagttgtcactcaccaaggccaaaagttaccttgaggatgtgatcgcccacaagcaggccatccctttccgtaggtattgtggtggtgttgggcgtactgctcaggctaagtctcgccactcaaatggtcagggacgctggcctgtcaagtctgctagattcattctagaccttctcaagaatgcagagagcaatgctgaggtgaaaggacttgatgtggataccatctatgtgtctcacattcaagttaatcaggcttagaagcagcgacgcaggacataccatgctcatggacgcatcaaccataagtctatctaactaaagttgaagttttgctatgcgatgaactgttcttcatttggagcttaacattctgtttgcctacctggtccagcttacatgtcctccccatgccacatcgagctcatcttgtcggagaaggaagagccagtgaagaaagaggctgagtctcagattgcaaccaggaaggcttagagaaggggctctatcttctgtgattggcttagtacaagttttggctgattatttgttgtctcatactgtttacctgagtattgtttgcaagtgctttatcactgtccgaactgtgcatgcaattcactggtctagagaattgtccgtggattgtttcatatttgcgcgtatggctcatgtctgttgctttgctttaatctgtaccgaacattaagtgtagcattaacaatctgaagcgaacattaagagtagggttgtcctgcttctgcaattttagttgtcagtaaaatatctgtttctgaaagcacttgccattcctttttaatatcaggtgagctgaagtcaactaaggtgtatgagaaatgggctaaaaagatctcagggatggagccaccaacaaatccgctagagaggagagcgaacgcagggttgagcggaaaaaacagttcaactccatcctctcgaacatcatgtccaagtgtgactccaaggcgagcagctcagagcccacgaaagaagagtttgagcaagcgcaacagaggctggagagcagaagggccaagaggcgcaagtgatgctgctgccagccttcttgccctatgctgaacattgtctgaaccttttggtgtgacctgaatttaccagcatgcaagtgatggttctaagacccagttttagcgtgtcagagtgtgtgtcatatctcttgtcctctcacggtacactatgttgtatggttatcggttatcaccttgccgagagggaagctctatttgatttgaaagtatcatgacatattttaccgcgacaattatcattacacatttcttcaagttatgttgcaagaataaaaattggcttcagtttcaaaatta

SEQ ID NO: 95834 - DNA, 1282 bp, Zea Mays
cgcgttgctaccaccgcggcttccttctctacccttccctcgcgtcgccatcgcaagagtatctcaactccgcctcgagacctcccccctcgctggtctcagccatggtgaaatattcgacggagccgaccaaccccaccaagtccgctaaggccatgggtcgtgacctacatgttcacttcaagaacacacgtgagacagcttttgcccttaggaagttgtcactcaccaaggccaaaagttaccttgaggatgtgatcgcccacaagcaggccatccctttccgtaggtattgtggtggtgttgggcgtactgctcaggctaagtctcgccactcaaatggtcagggacgctggcctgtcaagtctgctagattcattctagaccttctcaagaatgcagagagcaatgctgaggtgaaaggacttgatgtggataccatctatgtgtctcacattcaagttaatcaggcttagaagcagcgacgcaggacataccatgctcatggacgcatcaaccataagtctatctaactaaagttgaagttttgctatgcgatgaactgttcttcatttggagcttaacattctgtttgcctacctggtccagcttacatgtcctccccatgccacatcgagctcatcttgtcggagaaggaagagccagtgaagaaagaggctgagtctcagattgcaaccaggaaggcttagagaaggggctctatcttctgtgattggcttagtgagctgaagtcaactaaggtgtatgagaaatgggctaaaaagatctcagggatggagccaccaacaaatccgctagagaggagagcgaacgcagggttgagcggaaaaaacagttcaactccatcctctcgaacatcatgtccaagtgtgactccaaggcgagcagctcagagcccacgaaagaagagtttgagcaagcgcaacagaggctggagagcagaagggccaagaggcgcaagtgatgctgctgccagccttcttgccctatgctgaacattgtctgaaccttttggtgtgacctgaatttaccagcatgcaagtgatggttctaagacccagttttagcgtgtcagagtgtgtgtcatatctcttgtcctctcacggtacactatgttgtatggttatcggttatcaccttgccgagagggaagctctatttgatttgaaagtatcatgacatattttaccgcgacaattatcattacacatttcttcaagttatgttgcaagaataaaaattggcttcagtttcaaaatta

SEQ ID NO: 95835 - DNA, 300 bp, Zea Mays
gatccaccagagtaacagaccacggacggacggacgcactaccggctgtggcacctctgcggctctgcccccaatccggtagaaaccgtgatctgctctaatggctagtgaaggtcacctccacagaagcgtatgttgttggagttgcctattgaacttcaaagtcagaacttatggtctttgtgatcaacttgttatattgtgaattgtgaacttgtggtctttgtgatatttgtaaatttgttgtattgtgaacttgttatattgacatatttccacattgatatggttaccgattgt

SEQ ID NO: 95836 - DNA, 118 bp, Zea Mays
cgcggaacgactgtacgtgtccatatcccctaataaggccctgtttcaatctcgtgagataaactttagcagttttttagctacttttagccatttacaatctaaacaggagagctaa

SEQ ID NO: 95837 - DNA, 82 bp, Zea Mays
ggtggttacaatggtcaattgtgctataatttgtcacctaaatacacgaggatttagtttatacactgatgcatattagggt

SEQ ID NO: 95838 - DNA, 4869 bp, Zea Mays
ggcggcgggcggcggctgcttctccgtctcctacttccccgcaaacttgtctcgtattcctagcgcagccggggaacactcccggcctccgcccgagcggagcggagcgtttcgtccgcgccgctgactccgaggagttcgtttcgccgcgctgtctccctgaatcctaatcgtccttttcgcgtttggctcgactgacgcgttgattcctgcttctttcgttggtctcccattctttttttacaagaactaaaaaaataaaaattctttgggttgggatggcatcacctggccaaatgacagcaagcaatctgttacggactgaaggctttcctggaaatatggtaaaaatatgtggtttaaatcctgcgagaagtcttggatcaagaagattgcggatgactcaacactccttccatcaacagcatctttgttgcccacgtctgcaaagagtaatgactcataatatccgattgttgtcatctcctggggccgtggcatccaaggggtttgacagcccattagttgagaaacctgatactgcatcggatgttaaaattattcacttgtaccgtataccatttcttcaagaaagtgaaaccatggagctgctcaggaaagtgaaggcgaaggtttctgctaatattgttgatatactgacagagcagtgcttcaacattcaattggacaattcactcactcctgagaaacttacaatgcttcattggctcttagcagaaacttatgaacctgagaagttgcagactaggagctttctggaggatgaagtatctagaaattcttgtactgtcattgttgaggttggtccccggatgacattttcaacggcgttctcgaccaatgctgtctcaatctgtaaatctctctcattagtagaagtgacacgattggagagatcaagaagataccttttgtgcctagagcctggtagtgacccacttgatgaaggtcagctcaaagaattcactgcattggttcatgatagaatgacagagtgcatttatcgcaataagctcacatcatttcaatcagatgtagttcctgaacctgtctgcattgttccagtcattgaaaggggagaagaagcattgaaagaaataaatgtgaagatgggacttgcttttgataaacaagatattgactattatacacacctttttagagatgatatcaaacgcaatccaactactgtggaactttttgatattgcacaatccaacagcgaacatagcagacattggttttttaatggaaagcttgtaatagacggagagaccatgccaaccactttgttccagttagtgaagagtcccctaaaagccaacctcaataactctgtcattggttttaaggataactcgagtgcaataaaaggattcccagtaaatcagctacgcccaacaattccggggttcacttcaccattatccattatcatgcgtgagctagatattttattcacagcagaaacccataatttcccatgtgctgttgcaccataccctggagccgagacaggtgcaggtggccgtataagggacacacatgccactggaaagggttcttttgtcgttgcttccactgctggttactgtgttggtaatctgcgaattgacaattcaaatgcaccctgggaagatccttcattttcttacccagtgaatctggcttctccattgcaaattcttgttgacgctagtgatggtgcatctgactatgggaacaagtttggtgagcctctaattcagggatataccagaacatttgggatgaggttgctaaatggggagcggcgtgaatggttgaagcctataatgttcagtggagctatagggcaaattgaccatgcacacatatcaaagggtgacccagaaattggcatgctagttgtgaagattggtggtccagcatacagaattggtatgggcggtggtgctgcctcgagtatggttagtggccagaatgatgcagaacttgatttcaacgcagtacagcgtggagatgctgagatggcacagaaattgtatcgcgtagtcagggcatgtgcagaaatgggagagagcaatcctatcatcagcattcatgatcagggcgcaggaggaaattgtaatgttgtgaaggaaataatatatcccaagggagctgaaattgatatccgttcaattgttgttggtgatcatacattgtcggtcttagagatatggggtgctgagtaccaggaacaggatgcactacttgtaaaacttgagagcagaagcctcttagaatcgctttgtgagagggaaagagtttcgatggctgtcattgggaaaattgatggcagtggaaaaattgtgttgattgatagcgctgctgtggagtattccaagctgaatgacctccctcctccaacccctgttgaagaacttgagcttgaaaaggttttaggagatatgcctcagaagaccttcgagtttaggcgtgtttctcaagtcacagagcccttggacattgcacctggggtaacactattagatgctctgaagcgagtattaaggctcccatctgtgtgttcaaaacgtttcttgaccactaaggttgataggtgtgtgacaggtcttgttgcacaacagcagacagttggtcctctccaactcccgcttgctgatgtggctgtgattgcacagacgtacacagacctaacaggtggtgcttgcagcattggagaacaaccaataaaggggttgcttaatcctaaggccatggccagacttgctgttggggaggccttgactaatcttgtttgggctaaggttacatcacttgctgatgtgaaagcaagcgggaactggatgtatgctgcaaagcttgatggtgaaggtgcagatatgtatgatgcagctgttgcattggctgactgtatgattgaacttggtattgcaatagatgggggaaaggacagtctttccatggcagctcaatgtgatggtgaagtcatcaaggctcctggaaatctggttatcagtacatacgtgacatgtcctgatataacattgacagtaacccctgatttgaagcttggtgaggatgggattcttctacatattgatctcgctaaaggaaatcgccgtcttggtggttctgctcttgcacaagcatttgatcaaattggaaatgactgcccggacattgatgatgttctgtacttgaagaaggtatttgaggccattcaagaattgctcagtcaacgtcttatttcagcaggccatgacataagtgatggtggccttattgtttgtgttcttgagatggcatttgctggtaactgtggttttaagcttgacatagacttagaagataggagccttattgaaggactttttgcagaggagcttggcctcattattgaagtacactcgaaatatctcaacattgtgaagcaaaagcttgaaatagcaggcatttctgctaatgttattggagaagttactaactcaccagaaatagaagtttttattgatggcaatctgcatctcaaggaaaaaacttcagatctcagggatctgtgggaggaaacaagcttccagcttgaggagttacaacgtctgaaatcttgtgtaaaacttgagaaagaaggattaaaatgcaggacatcaccatcatggtctctgtcttttaccccaaaattcacagatgggaaactgttgactgcttccttgaaaccaaaggttgccatcattcgtgaggaagggagcaatggggacagggaaatggctgctgcattccacgctgctggatttgaaccatgggatattacaatgtcagacctcttggctgggaagtcttctctcaaggagttccgtgggattgcatttgttggtggtttcagctatgcagatgtgctggattcagcgaaaggctgggctgcatcaatcaggtttaaccaacccctcattcagcaattccaggacttctaccataggccagacacgtttagccttggagtgtgcaatggttgtcagcttatggctcttcttggctgggtgccaggatcaggtgttggaggttctcttggtacaggtggagatatgtcccagccgaggtttattcacaatgaatctggtcgttttgagtgccggtttaccagtgtgtccattggcgattctcctgctattatgttcaaagggatggaaggttccaccttaggtgtttggagtgctcatggtgagggaagagcttttttcccagatgaaaatgttctagctactgttgtgaagtcaaatctggctcctgtgcggtattgtgatgattctaacaatattactgagacctatcccttcaaccctaatggttctccactgggtatagcagccctttgctcacctgacgggaggcacctggctatgatgccgcatccagagcgttgcttcatgatgtggcaatatccatggtatcccaaggaatggcaggttgagaagagtggccccagcccttggctgcgaatgttccagaatgctagagaatggtgttcatagtgcagggaagcttcctgctgcaaggatgtagtcatccaggcaccggctgctacgagtatatggatgattggtggttgtatggcccaattgatgacccctttttggcagaataaatgtgttttgaccatcaatacattatcttgtaataatgtatcgaatttggaattttgaaaatggagaaccgtctggtttccgaagtcggaaggcctcagatatgactccactagtttaaaacatttactagtggaaaagaaatgagtgggttaattaataatgcaaaaggtacattgggaagacactgtacctagggatgaaaacggacggaaacggacgg

SEQ ID NO: 95839 - DNA, 192 bp, Zea Mays
atgaacgtaagctttgttagactgagaccatcgtctgtcaacgtttggcgattcaaggtggtggagatgacgaccgaaggcggcagcaccggtggtgaggttgatcctaccacacatggcttcatccggtctaaagtcgagtatgaagccttagaagctcgtgaacgatgcttgcagatcaaggatgcatga

SEQ ID NO: 95840 - DNA, 3472 bp, Zea Mays
gacggccgtggccgtctaacacatccgtggggaaccgctcccttagttgggcctcctccggccatggtgcacagcgcgtacgatgctgtcgagctggtggctgacgtgccgggccacatcgaggccgtcgcctcccacgctgggaagctcctcgtcgcggtttccgacaccgaaggcttcctctggggctccgactgctccttgcgcatctactccgctccttccccctccgacggcggcggcgagatccggtgggacgggccctacgcgctcgagcggcaggagccgcggttctggcggcgcccgcccttagccatggaggtcagcgccagccgcgacctcctgatctcgctctccgagtggatcgcgctccaccgcctccccgggctcgagaccgtcgctgtcgtctctagcaagacaaagggggccaacgtctttgcttgggacgagcggcggggcttccttgccgtcggtcgacagaagcgactcaccgtcttccgcctcgacagtgggcgagaatttgttgaagtgaaggaatttggagtgccagatattctgaaatcaatggcctggtgtggtgataacatatgtcttggaatcaggcgggaatatatgataataaatagcatgaccggggcactaacagaagtgttttcttctgggaggatcgctcctcctttagttgtgcctctccttactggggaactgatccttggcaaggataacattggggtattcgttgatcaaaatggtaaacttattcaagacggcagaattatttggtcagacacaccagcttctgttgttatacataaaccatatgccgtggcccgcctgccacgacatgtcgagatacgctctcttaggccccccaatgcattggttcagacagttgtgctccgtgatgttcaaaagcttgtccaaactgaccactgtatacttgctgctctatctaactctgttcatggtttgttgcctgttcctattggagctcagatagtgcaattgaccgcttctggagaatttgaggaggcgctagcattgtgtaagctacttccaccagaggattcaaatttacgggcagcaaaggaaagctcaatacacataagatatggacactttttgttcgataacgggagttatgaggaggcaatggaacagttttcagattcacatgtggacattacttacgtgttatctctgtacccatctattgttctgcctcaaacaaatattataggtgatcatgacaagctgctggacatgccagaattagcaagggaatcctccgatgtgacagatgagatggaatcatactctttacagcttcaagaaccagatgataaatctccattggaggtaaagaaaatgagtcacaatgctctagctgcccttgtgaagtatttgcagaagaaaagaagtggcataattgagagagcgacggctgaagtaacagaggaggtggtctctggagctgttcaccacagcttaaaattatctgagccatataagtcaaagaagctgagcaagaaacgagctcagacacatacaagctctattgctagagaaatggcaactgtactggatacttgtctgcttcaagctcttattcttactgggcagtcatcaggggcaatagagttgttgaaaggactcaattattgtgacctgaagatatgcgaagagtttttgaaggaaaggagagaatatatggttttacttgaactctataaaagcaatgaaatgcaccgtgatgctctccaactactcaatcaattagttgaagaatcaaaatctgaaatggagaatacatattttaataaaaaatttaactctcaaatgatacttgaatatctcaggcccctttgtagatctgacccaatgctggttttagagtcttccttgtacgtccttgagcgcaacccatcagaaactattgagctctttttgtctgaaaatgttccagcagatttggtaaattcatatctgaagcagcatgccccaaatttgcagtcaacttacttagagctaatgctctcaatgaatgatactgggatcaaccctaatctgcaaaacgagctggtacaactgtacctttctgaagttctagactggtacaagattctgaaggaagagggaaactggacagagaagacatattccccaacacggaagaagttaatatctacgttggagagcaattcaggttacaatacagacgcacttcttaagcgccttccccaggacgctctttttgaggagcgagctatattgtatgggaaaataaatcaacacctcagagctctctctctctatgttcacaagcttcagatgccagagcgagcagttgcatattgtgaccgtgtttatgaagaaagagaacaacaaccgtccaaatcaaatatctattttaatcttctacagattcatctgaacccaagaaaagctgaaaaggaatttgagcagaaaattattccagttgcatcacaatactctggaatccaaaaggctagtgctactaagcccaaagggggtcgcgtaggtaaaaaggttgtagagattgagggggctgatgacatacgctttagccccagcggaacagatagtggccgaagtgatggtgatggagatgatgtaaatgaccgaggccctataatgttaaatgaagcactggaactgttgagccaacggtgggacaggataaatggtgctcaggctcttaggctgttaccaagagatactaaactccaggatcttgtatcatttcttgagccactattgcgtaactctagtgaacatcggcgcaattatttggttatcaaaaacttgattttgcgggcaaacttgcaggtcaaggaggatctgtataatcggtgtcaagctgttgtgaagattgatggagatagtacgtgttctctttgccataagcgtgttgcaaatagtgcttttgcaatatatccaaatggacaggctttggtgcattttgtctgctttaaagaatcacagcaaattaaggccgtcagaggagcaaactctgtgaaacgtagataatatggccgtgatccaggtacacccttgaacgggacactgacaaatcaatatcgaggtttggttgatgccagcttatggaattccctctctttggcttcacactggattttagtggactgcttcagaagtttttactggagtaatcttcactctcttcagagatcgagtttatagccgtgcgtgtgtgctcgctctctgttttctggccatcgtactggaaaactggaacccctttcttttggttttcatgtacagaatgtaaatgatactgtaaagtttcggttaacagattgatgatggtcttgattatagtgccgcaatgtgtgctccaaataggtttggacattattattattggatccatgtcattataattctctaagttttgaatggcgctattataattcgtatattcggaggt

SEQ ID NO: 95841 - DNA, 1461 bp, Zea Mays
ggaaaccctaaccacctagaccctgcagccgacgtcgccgccgtgtggtctgcgcctccacggtctgcgccaccaagctcctgatccgctgggctgacgccgccgcacaggctgtctgcttcacgagcaggagtcttccgccagccggccacctcattccgcacgccaggaggtcacgtaaggagcaggcttgggagccacgcctggcgccattctccgagccaagcgtgcccacgccgggatccagccctcgcctggccatcctctcctcggacggtcgcgcctgggcttcctcgccgagcgcccccacgccgggccacctcgggcaccggagcgccactaccaagggccgaccgaaccagcaccgggggcgagccatagtctggtgccaagcacccgcgccggccgagcgcgctcaccgaggagccgccgggtgggcttcttgcatcgcgccatggctgccatgccgcggtcggcgtccgtgcccgagacagcagtcggtgccatagccacctgccatggtccagtcctgcgccgcaccaagcgccatgggccgactggatcttgcccacaccggagatgctccaagtggcgcccgcgcaggggctgtatccctgctcccccacccctccccccaaccggccgtcgtggcggcaaccaccaccagccggacagagggccattaggccctcccatttggggaggaagatggggccaccccgtttgggcggtggccagtgaagatgatgcggtcgcgcgtggcatcaacggcgcgaggagctgtccacgacgggcagcgatggtcccaacgaccaccaaagtaggcggagatggggaacgacaagcaactgtcgttgtagtgggtcgaggaggcggtggtaccactagatcgacgtccatgggtgcggatgtagatgaccccgcgtcacccaccggcaccggtggtgacggggacacagtggggaggccgcactccaccaccgacagtggaaccaccactgtccatccatggagaacatagaagtgcacgttttgcacttgcacacggcgttcagggatggcatgcactggtggaagtgttgtgtcttgcccagcagcaaacgcctccaacctcgcatcatcaacaatgtgcagaactttgtgcatacgacgtatgcgcatggaaatggtttgcttcataccttgctgttgatttgcatatcactattgttgtttttgtcaagaatagcaagtgttcttccttcttcctctgatctttcttgggacagtgttgataacgtattaagagttgagtgctcaatagtagaatcagtggagagggagagacaaatgataggactgttatcttgtttattgcagagatcctctttatatacatatgtacaaaagggtctccaaggggtgtgacccttggataataactataacaaatggatggttggatgggccttgatcacgtgt

SEQ ID NO: 95842 - DNA, 3262 bp, Zea Mays
tctctctctcttctcctctcttctctaactctgcctctctgacgcaatgccgttccccaccgccttcaccgcgcggcggcggcggcacgagggcgccgcgggtcgttggtgcgggctcgtggtcctggttctgatggcgctcgaggctggcgcggcggcggagacgtcgccgtcggacgtggcggcgatgcgggctgtggcgaaggcgcttggcgcggacaagacgctgggatgggacgtcgccggcgacccctgctcgccgaagcggtgggacggggtgtcatgcgactcgtcgggccgcgtcaccgcgatccaggtcggtgcgcgcggcctcacggggaccctgcctccggaggtgggcgacctcaccgagctcacccgcctcgaggttttcgacaacaagctctccggcccgctgcccttgctcccggggctctcctcgcttcaggttttacttgcccataacaatagcttcgcctccatccccgccgacttcttcaaaggcctcaccgggctcaccgccgtcgccatcgactacaacccgttcgcgtcgtggacgctccccgcctccctcgccgcctgcgcctccctcgccaacttctcggccatcagtgccaacgtctctggcacgctcccggacttcttgggtgcgatgccggcgctccagcggctgtcgctttcctttaaccagctgtcaggacccgtaccggcgtcgctggccggcgcgccgctggtgcagctctggctcaacggcgcgcacctcaatgggtcgattagctttgtcagcaacatgacgtctctggagcaactgtggctgcattctaacgaattcactgggcccttgccggacttcgcggggtttgatgatctatgggatttgcaacttcgcgacaacatgctcacagggccggtgcctgagagtcttttcaagctgaaggctctgaagaacgtgaccctgacgaataatttgctgcagggtccgatgcctcagattcccaatggacttcatgctgatatcgaagcagatacagagcggttctgtgtgcaggaagccgggaagccgtgcaatccccttgtgagcctgctgcttgaggttgcggctgggttcatgtacccaaaggcacttgctgaggattggagggggaatgatccatgtatgtttccgggtgttacttgcatccaaggtaacattactgggctgacttttgccaacaagggtctcagtggtagtatctcaccggccattgggaagattagctcacttaaggtgctagatcttgctaacaataacatcactggtactgtgcctgaggaggttgccgtgttgcctttgctgacaaaaattgatttgtcaaacaacaatctctatgggaaacttcctacctttgcttccaagaatgtggcggtgaatactgctggtaaccctaacataggcaaggatgctcctgcaccaactgcaggaccaggtagtagcaacaacagtccatcgggaggaagcagtagcggaagcagtggtaacaatgggaatgggggctcctcttcatcttctgttggagtcattgctggctcagtggctggtacagttgctggactaggccttgttgctgcattaggattctattgttacaagagaaaacagaagcctttcggaagggtgcagagtccacatgccatggttatccatccgaggcactcaggttcagatgacatggttaaaatcacagttgcagggggaaatgctaatggtggtgctcgcgcaagtgagacatatagccaagcgagcagtggtccacgggacatccatgttgttgaaagtggaaatatggtcatttcaatccaagttctccgcaatgtgaccaacaacttcagcgaggacaacatccttggtcgaggagggtttggcactgtttacaagggtgaacttcatgatggcacgaaaattgctgtaaagcggatggaggctggtgtgatgggtaacaaggggctaaatgagtttaaatcagagattgctgttttgaccaaggttcgtcaccggaaccttgtttcgctgctgggctactgccttgatggcaatgagaggattcttgtgtatgagtacatgccacaggggacactgagccaacacctgtttgagtggtcagagaacaatttgcgaccattggaatggaaaaagcggcttagtattgcacttgatgttgcaaggggcgttgagtaccttcacagccttgcccagcagacctttatccacagagacttgaagccatcaaacatacttcttggtgatgacatgaaggccaaggtggcagactttggattggtcaggcttgcaccagatgatgggaagtgcgtctccatagagacaagacttgctggcacttttgggtaccttgcaccagagtatgcagttactggacgagtgaccacaaaagctgatgtcttcagctttggtgtcatcttgatggaactgattacagggcgcaaggcacttgatgagactcggccagaggatagcatgcatctagttacatggttccggagaatgcagctgaacaaggaaacattccgcaaagcaatcgaccctgttattgaccttgatgaggagacatatgctagcgttagtactgtctcagagcttgctggtcactgctgcgctagggaagcacaccagaggcctgacatgggccatgctgttaatgtgctctctaccctttcagaagtttggaaaccaactgatccagactcggacgacagctacggtattgacctgaacatgaccctccctcaggctctgaagagatggcaggcttttgaagatagcagccactttgacggcgcaacctcttcattcgttgcaagtttggataacactcagacgagcatccctacaaggcctcctggattcgcggagtcgttcacctctgctgacggaagatagacgggttagctgctagggcgtgccaaaccttgtgtgcttccgttgaaatagaaggctcacgcgatccttgtgttcattcttttagtctcttcgctcctaatctttcatgtccccttattcggctctgtactgccgtgtagctgctctttgatcctgtcccaaaaattgcctggaagttggaaaaaatttgctaaccggttatgtcatttgctaagattaaagtagaagtatgctagggttgttgggttgtatcggatgctgacaatttccaaatgaaggtgatcctgtattcgtcaaaaagtatggccctggcctgaagtttttcca

SEQ ID NO: 95843 - DNA, 716 bp, Zea Mays
atagaaagaaggttaagaaatagggagcgtaggatggagaatttaaatgaactcattcgtgagactgatagaaaatgtattagtgagcttcgtatggatagaagaactttctttattttgtgtgagatgcttagagatgttggtgggctaaaggccacacgcaatatgaccatagaggagatagtgactcattttttgtatacattggctcatcatttgaagaaccgaacaattggaaggtttttctttcgaagcggcgagacagttagtaggcagttcaacttatgccttctagctgttctaaagttgcaacatttgcttcttaagacccctgagccaattccagagaatagcactgataatacttggaaaaactttaagaattgtttgggtgcattagacggaaccgctatcaaggtaactgtgccaacacatctaaaaggaagatataggtcaaggaaagcggacattgtgacaaatgtattggggtgtttgtgcacccgatatgcaattcatctatatgctacctggttgggagggttcagcgcatgatggtcgtgtgctgcgtgatgctatcttgaggccaaatggattgtgtgtccctcaaggcgagttttatttcaataacttccatttggtttggtggtatagtgttttaagtgtgtatattaacttgaaaatatccttataggttgttattatcttgttgatgcggg

SEQ ID NO: 95844 - DNA, 641 bp, Zea Mays
caaaggggccgacggacgcctgctactgctagcaacggaacggagcgcaacgcaatcatgtcaggcgcgcaaggagctcagccgaagggcgccttcacggcgaccacctacacgtcggctgcggccaccggtggcggcgcggcccaggggcaggggcaggggcaagaggaccaggagagaaggcagactccgcggacggagctccggtcggccgaggacgagcgcgggctgcctgtcaggaagctggaggacgcggtcgaggatgccgcgggcaagggcgggccggtgttcggcgccggcacggaggacgggaagccggatctcggggtcaccggcaccggctgatgctagccggatgtgcttcttaatgtgctgcttagttaacgagcgagtcagaaagtgaaagtacaaggatgtgtccagcacacagtacgtacgatcagttatcgagttatacatcttagttgagatctttatacatgagaccacttctgtaaatttgtgtatagccacaaagagatgtgtgaattctccttgtacaggtttgaatggccctactatatcgagacacttgattgagagtggccttgtaatgggaattatgagatgtaggaacatgatcttcatatgtatgcacaaaa

SEQ ID NO: 95845 - DNA, 808 bp, Zea Mays
gttggttaggctgtcccagcaagggacgctaaagcgttcgatatgttatatttagcgtttctcgccgtccgctaccgcccccagcaagaaccggcaaatggttcgctaaaatatagcggcagctcgacgaccggtaaatgtggagtgttgttgttcatccgctatccgtccgcacagagctgttgcctggttcttatcgtcttcgccaacagcgtgccacaacacaactctgctacgccaccagctctgctgctgcgccaacccgttgagcaccacgccatggccgtcagggcggaggttccacgacgtggcgccgtgcgtggtctcgtccgcgacattcgtgtccagagcgtgccgattcggtccagcacatggaaggagcatcatgggcatggagtccatggtggcctccggcggcgcggtgctgttgtaggcagccctatccgccgggtatgatctgggcaacctgtatgctccaaagccacagccatacaggtgggtggaggacatgcactaggtgctcgatgatatgctgaaccggccacccagaaatcagttgtcgctgttaagccaaaacaaacgatgcttattgtgttttttgccatttttattaattgcaatcgttgaagcaccgctcagaacatggaagggatggaattgtatgctcggtctctcttgtaattgtacatgtaaattgcatgtcgtacgtgccaattcatggtacgtagtagatgctttcgtatcgaggttatgccttttatttctttggtacttatttcttagtaaatgaatatattctgttaattaa

SEQ ID NO: 95846 - DNA, 367 bp, Zea Mays
aaaatggggaagtgaaactttatccattagatgacatccatagatatctctacaagctttcacgtttgaaataggaagtttcaaacatgagtgtgtgattctacttgcttaatggattgtacctgtactgcctttgctttgaatgtaagttgcttactatggttttcggggctgcggaacacaatagcgcttcactctgatctaaatagcatccatatatgtacgtacatatggcaaccagacatgagacaacagtcatgttctggaaatattcatgttttctttatagaaaagagcgtttcttgaatggatgattggtgtgataatacctattgttatttctttgatttttttgtttagatgcaga

SEQ ID NO: 95847 - DNA, 265 bp, Zea Mays
agattttttgagtatgttcggcaaatggatctgtatccaaatatttcaatcgcttattggatattatttactgtgcttgtgactgtggcatcggcttagagaagttttttaaagttgaaattgttgaagaactattaaggtcaacaatgtctcaagatcgccttaacggattggctactttatacattgagaaaaattattagacgagattgatagcaacactattatcaatgacttcgcatcaagaaatattaaaaaaaaattt

SEQ ID NO: 95848 - DNA, 744 bp, Zea Mays
ttactggtaggatcgcgaacaaactagctagctgatggtttacactttaagtctttaaacccgatggtggatgattggctaggatgtccttgggtaggtttgcataggctacttgaatttggctaccaggaaaccagatcaaaactatacttcctgttcttgttttcagtagacagtagtgcctctatctatcagcattctgcaagtgtacttgctacaccattgctactgtgtactgtggtgagctgcagtctttttccaaatcaaaccggactgtttctctcttttcctaccttagtttttatacatatagaaaacagagacaagtgatcgtttttaaaaagcatcgctgttgtccattttgagtctacatccatgaacgttcttattatgcagggcgtgcagttccatccggagagcatcataactactgaagggaggctcatggtcaacaattttatcaagattattgaaggctacgaagcctcgaattgctctccgtgatttatctagttggaagcagcagcagccctgcgtggggcgggtgacaataagatgatgtaaaagcttgtaactacatagctcgaacatgtaaactcagatgtatatgttcggatgtcacaaactcacgacactcagagtccaactactgtacatggtcgcatgtggcgtgtcgatgtcaaatcaaatcattgaacttttagctcggtgaccgctatatttgtttttttacagtagttacca

SEQ ID NO: 95849 - DNA, 1216 bp, Zea Mays
ccgacgccgccctgtctcctcggctcctctctccgatccaatggcctacgccgcacgcctcgtagccaaggtccacctcgccgcgacgccgcaggccgagccgcgccacctctccagcttccgcgtaggagcactcagtcgatccacaaccgttcaacggcaaaagtttgttgctaaatctgctatctcggctgtggaaagtggtgatacatttgttggagtaaagcaaaatactagacctatcatagtcatagacaactatgatagcttcacatataatttatgccagtacatgggagaggttggagctaattttgaggtttatcgcaatgatgagatcactgtggaagaaattaagaagatttctcctagaggaatacttatttccccaggccctggtcagcatttctctgtactaattccattccttaatgctaacaaatgagatgctactgaacacagtcttaaaacctactgtattttttggcatgtctttatttaaaaaaaaaaatgaatggcaggcactcctcaagattcaggaatatccttgcaaacagttacagagcttgggccctcaataccgttgtttggggtttgcatgggtttacagtgcattggagaggcatttggagggaaggttgttcgatccccttacggcgttgtgcacggaaagggctcccttgttcattatgatgagaaacttgatggaactctgttttatgatattcctaacccattccaggctggaaggtatcacagccttgtaatcgagaaggatagtttcccgcatgataccctggaaattgttgcgtggacagatgatgggttgatcatggctgctcgccacaggatatacaaacatattcagggcgtgcagttccatccggagagcatcataactactgaagggaggctcatggtcaacaattttatcaagattattgaaggctacgaagcctcgaattgctctccgtgatttatctagttggaagcagcagcagccctgcgtggggcgggtgacaataagatgatgtaaaagcttgtaactacatagctcgaacatgtaaactcagatgtatatgttcggatgtcacaaactcacgacactcagagtccaactactgtacatggtcgcatgtggcgtgtcgatgtcaaatcaaatcattgaacttttagctcggtgaccgctatatttgtttttttacagtagttacca

SEQ ID NO: 95850 - DNA, 1112 bp, Zea Mays
ccgacgccgccctgtctcctcggctcctctctccgatccaatggcctacgccgcacgcctcgtagccaaggtccacctcgccgcgacgccgcaggccgagccgcgccacctctccagcttccgcgtaggagcactcagtcgatccacaaccgttcaacggcaaaagtttgttgctaaatctgctatctcggctgtggaaagtggtgatacatttgttggagtaaagcaaaatactagacctatcatagtcatagacaactatgatagcttcacatataatttatgccagtacatgggagaggttggagctaattttgaggtttatcgcaatgatgagatcactgtggaagaaattaagaatttgttgcttgttctacaggatttctcctagaggaatacttatttccccaggccctggcactcctcaagattcaggaatatccttgcaaacagttacagagcttgggccctcaataccgttgtttggggtttgcatgggtttacagtgcattggagaggcatttggagggaaggttgttcgatccccttacggcgttgtgcacggaaagggctcccttgttcattatgatgagaaacttgatggaactctgttttatgatattcctaacccattccaggctggaaggtatcacagccttgtaatcgagaaggatagtttcccgcatgataccctggaaattgttgcgtggacagatgatgggttgatcatggctgctcgccacaggatatacaaacatattcagggcgtgcagttccatccggagagcatcataactactgaagggaggctcatggtcaacaattttatcaagattattgaaggctacgaagcctcgaattgctctccgtgatttatctagttggaagcagcagcagccctgcgtggggcgggtgacaataagatgatgtaaaagcttgtaactacatagctcgaacatgtaaactcagatgtatatgttcggatgtcacaaactcacgacactcagagtccaactactgtacatggtcgcatgtggcgtgtcgatgtcaaatcaaatcattgaacttttagctcggtgaccgctatatttgtttttttacagtagttacca

SEQ ID NO: 95851 - DNA, 401 bp, Zea Mays
taccttggtactgttgccacaatggacaaaagaagagctacacttattataaatgcattggagaagagaaaccataacttgactatatactgaacacccatcatcactatgatcatactggtggaaacttggaattgaaagaaaaatatggtgcaaaggtaaattgttctgagaaggataaggacataatacatggtattgacatcattcttaaggagggtgacacatggatgtttgctggccattcggttcttgtactagaaactcctaggcatacagcaggtcatggctgctattattttgctggttgtggagctatatcgacaggtgacacattgttcaatctatcatgcagaaagctttttcaatggagcccttaatatattgatatgtgtctctca

SEQ ID NO: 95852 - DNA, 87 bp, Zea Mays
gagctcctcccgtgccggcctttagagatctgctacctccacatcgatgtctagggctcctccattgcctagatctaccatagtgag

SEQ ID NO: 95853 - DNA, 1306 bp, Zea Mays
gttgcatttgcgcagcaaaaaggaggaaaaagtgaggagaaagaagagaggaaacaggaaagagtacaactcggcggcgacaccaccgctcgcagcctcccgccgcgatggcgatgcgttcgctcgccaggctccaccgccaactctccccttctctcctccaccgccatagcacacggcgtgggtggcctcccgcttctgacgcggcctttctctggcgcgggctcgcctcgtcatcaccttccgcggccggtcgggagaagagctcgagacggactttggggtaccttctcggcgttgcggtcgccatggtcggcgcctcgtacgccgccgtaccgctataccgtcgcttctgccaggctaccggctacggcggcaccgtccaacgacgcgagagtgtggaggagaagatctcacggcatgctcgagacggaactacgacatcacgagaaataattgttcaatttaatgctgatgttgctgatggaatgccgtggaagttcatccctacacagagagaggtcagggttaaacctggtgaaagtgctcttgctttttatactgctgagaatcgcagttcagctccaattactggtgtatccacgtataatgttgctcctatgaaggctgcgatttacttcaataagatacaatgtttctgctttgaggagcaaacacttcttcctggagaacagattgacatgccagtattcttctatatcgatcctgagtttgagacagaccccaaaatggacggggtgaacaatatcgttctttcgtatacattcttcaaggtgaacgatagttaggaaacgtgccaacagcattgttgtattaggaaaacaacacttgaacaatccatatgcagatatgctgcggaatagcatctcatgtaacaccaagagttttttttggtagttagctcacgttagtctgtggagaattttgcaaataatctgtaacggtgtacccgatggccaagggggtcaatgtggctaccagttttcatatgcaatctcaagaatcctacaggacgaagtgattgcatctcatcatgaaatcaggggcggcgaggatttcccatccttgtgtagctgagcgcacctgcaatacagctgcaaaagcgaagcaagacaggtaaattggtctttcaggctttcgttatgtcagatcgtcgttagtcgtacgggcgggtgagggctataaaggatagggtcgtgtcttctcaaatgtggcattctattaaaactgcttctaaaaatattggtgtaatgtcattcgtttttttaataatattgattgatgc

SEQ ID NO: 95854 - DNA, 3215 bp, Zea Mays
atgggagaggccgtcaccgccgcggagctgctgtacggcatgccgttgatccggtcggtggccggggatggcgccggcgccggcgttgagaccgccggctgcggtgcgctgctcgtggagctcaagcaactgtggggggagatcgggaagagccgggaggagcgggagcggatggtgcgggagctggaggccgagtgcatgcgcgtgtaccgccgcaaggtcgacgaggccaccggcgagcgggccgctctgcaccagtcgctcgccgcgggggaggccgagatcgccgcgctcgccgccgcgctgggctccgacagcggccctcagctcaaggtacgcgccgtcgcgcgcgcggtctccttccttcaggtgaacaaatggaccatgtcgctgaccgagcgcgtgtcgtcggcaacagccctgctggaagagctgagggcggtgaaagcagagcggagcagacagttcgccgacgtccggtcagagatcgagaagatcaccgccgagatcgctgggaggagctacggctacgagggctccccccgggccagcgaggtgggagaacacgacctgacgatcaggaggctgaacgagtacagggcgcgcctcacgagcttccagaaggagaagtctgaccggctccacagggtcctggagcacgtgacggaggtgcactcgctgtgcgacgtgctcggcgaggacttcatcgcgatcgtgaacgaggtccacccggggctgcacgagacgtccgaccccggcaagcccaccagcatcagcgacagcacgctcgccaccctcgcccaggtcgtggcgacgctcgccgccgagaaagccaagcgagcgaccatgctgcgagaggccgtggtgcccttggtggagctgtgggagctgatggactcgtcggaggaggagcggcggagtttcaggaacgtggcggccgttctgaaccctgacaagctggatgctctgccctccggcgtcctgtcagtggcgacgataaagaagacggaggaggaggtggagaggctgacgaggctcaaggccggccggatgaaggagctcgtgctcaagaggcggctggagctggagagcatttgcaggagcatgcacgtggagcccgatgcgagcaccgtgccggagaaatccattgcgctgatcgactctggcctcgtgaacccttccgagctcatggccagcatcgacgaacagatagcgaaagccagggaggagctccagtccaggagagagatcatggagaagataaacaagtggctgctggcctgcgaggaagaggagtggctggaggagtacaatacggacgagaacagattcagtaccggcaggatcgcacgcctcaacttgaaacgcgcggagaaagcgaggcttatcatcaccaagattccggccgtgattgacagcctgatgagccgtacactcgcatgggagagcgaaagaaagaagccattcctgtacgacggggctcgcttggttgccgtcttggaggagcacaagcaagccaggctcaggcaggaagaggagaggaggcgactcagggagcagaagaagctgcgcaccctgctgagcgagaaggaggcgatgccgcacctgaagcggcccggcagcagcttcggcagggcggccgagccctgcaaagtgaaccggaaacgggttgacgcgggcaggctcgcgtcctccggtggcagtggcaccaccaccagcagcagcagcagcggtggtggtggtgcgagtgcaaccgagctcatcaggccgcgttcctcggcggcgggcgcgggacagtgcggcgagttcttcaaggattttttggagggttactcgtgtcgaaaatattctattgttattgttaaagaatatcttattcagagaattggtgagcttataccatctcttctcttcttctattctatctatctatcttccggcaccggcaggctacggtttgccgggcagggggcaggattcagatcttggagtggcgcgcctgccgtgcacgatttcgcatccgcgaccgcgcagagttgggttggacgggacgacggaggaggaggtggagaggctgacgaggctcaaggccggccggatgaaggagctcgtgctcaagaggcggctggagctggagagcatttgcaggagcatgcacgtggagcccgatgcgagcaccgtgccggagaaatccattgcgctgatcgactctggtaccagttcacagttcctgctttactgatcgactctggttcagatggcttcattttttctaacgctgacgaaattctaccaggcctcgtgaacccttccgagctcatggccagcatcgacgaacagatagcgaaagccagggaggagctccagtccaggaaagagatcatggagaagataaacaagtggctgctggcctgcgaggaagaggagtggctggaggagtacaatacggacgagaacagattcagtaccggcaggatcgcacgcctcaacttgaaacgcgcggagaaagcgaggcttatcatcaccaagattccggccgtggttgacagcctgatgagccgtacactcgcatgggagagcgaaagaaagaagccgttcctgtacgacggggctcgcttggttgccgtcttggaggagcacaagcaagccaggctcaggcaggaagaggagaggaggcgactcagggagcagaagaagctgcgcaccctgctgagcgagaaggaggcgatgccgcacctgaagcggcccggcagcagcttcggcagggcggccgagccctgcaaagtgaaccggaaacgggttgacgcgggcaggctcgcgtcctccggtggcagtggcaccaccagcggcagcagcagcagcagcggtggtggtgcgagtgcaaccgagctcatcaggccgcgttcctcggcggcgggctcgggacagtgcggcgagttcttcaagggcgtgaggcggctctcggcgccgccgttcaactacgtcgccgtgtccaagggccgcagcatgtcctcgtctctagctctgtcctaaactcgaaaccgcacaagtagcgaagacttgtcacgtgtgtgtatatagagtgccactgtaatttgtagccgtgttaccttttacacagatttttttggagggttattcgtctcaaaaaaattcctttgttattgttaaactatttcttgattagagaatttatgagtttatagtatctctac

SEQ ID NO: 95855 - DNA, 2612 bp, Zea Mays
aagcaaaagcccacagaacgagtgaggccaggcgacttcatactgctcgcctcgccgtctttcccccaatctgttgctcctccaagctgcgggcgatcgccgtaccccggccgccgcagggaaccccctcgccatggccttgcaggggaagaagctcatcaacaaccccgacgatgtggtgacggagttcatcgaagggttggtggagacttacccgggtctgcagtacctcgacgggttccctcagattaaggtcgttcttcgtgctgatgtcgagcgcggttcctatgacaaagttgcagtcatctcgggtggtggaagtggccatgaaccttcccatgctggatttgttgggccagggatgttgacagctgctgtttctggagatgttttcgcctctccacctgttgattctattttagctgctattcgagctgtaactggtcccatggggtgccttctaatagtaaagaactacactggtgatagactcaattttggattagctgctgagcaggcaaaatctgaaggctataagatggagatggtcattgttggagacgattgtgcccttcctccacctagagggatagctggtagaagaggtttagctggaacaattcttgtgcataaggttgctggggccgcagcagatgctggtttatctcttgcagaggttgccgcagaagcaaaacatgcatctgaggttgttggtacgatgggagttgcactttctgtttgcacattgcctgggcaaataacttctgatcgtctaggtccaaggcaaatggagcttggccttggaattcatggagaacctggagttgctgttgttgaactccagccagttgacgtagtggtagaacatgtccttaaacagatattgtcacaggaaactcagtatcttcctgtcacaagaggttgcaatgctgttctcctagtgaatggattaggagccactcctatcatggaacttatgattgcagcgagaaaagcagttcctgagttgcaattggtgtatggcattgctgttgacagagtctacactggcacacttatgacatcacttgatatggcaggattatctattaccattatgaagtccggcgaaagcattttgaagagacttgatgctcccactaaagctccagcttggcctgttggttctgaaggaaaccgtccaccagcaaagtttcctgttcctctaccaccatcaccttcaatgaaggatgacgagattcttgctccatctcaggagctgagcaagcaagggtgtatcctggaggctgttattgaagcaagtgctactgaaattatcaatctcatggatagcctaaatgaatgggacagtaaagtgggcgatggtgactgtggaagcacaatgtatagaggtgcaacagctattcttgaagatatgaaaaagcgttaccctatgaatgatgcagcgggaacaataaatgaaattggggcaacaatccgaagggtgatgggtggaacaagtggaatcttgtatgccatactctgcaaggctgcgtatgcaagcttaaagcagagctcaactgtcactgcgaataaatgggctgatgctttagaggcctccattgctgctgttagcaaatatggtggtgccagcgcaggataccgcacaatgttggatgccctaattcctgcttctgctgttctgaaacagagacttgaggctggggatgatcccgtgactgctttcatcgcgtcttctgaagcagcatcagctggcgctgaatccaccaaacaaatgcaagcgaaggctggacggtcatcatacatcgctccagatctcctggcctcaatccctgatcctggtgcaatggctgcagctgcatggtacagagctgctgcccttgcagtgaagaacaaagtgcacggttcaaagagctagtagcatacgcaatgcttcattgctagacccaaaatagactgacaggaaaaatcactggggcattttctcactccccttagatttggtttccgcttgtgcttttgcatgggccgagaaaaaaaatgacttccatattgtctcacccttctcacatcatacaaagagatgttcaaagagttcgtcgtccgtacaagttaagggaagctatgcttttgcactgccgtgatatctcagcatgctgtcagtgttggaatgaccattgtttaatttgcccgagtttcgttttaatggctgagcccatgctgtcagtggtgggaatgatcgttgtttattctgcccgagtcccgtttcaattgtgcgcatttcggtaggatgtttaacaaaaaaacgttgtctttgaccgaggggtagtttgcactactgttgacttgtaatgttttttatcttgatcaatggcttgctgcatggtttctttctttctgggcaagattctcgaatggaacctaagacgtctatttatcgaggttttgcatatcatgaccaaattatcttgaggaaaacttgttactcgtacttgcctttgtatgcctgaacatctaattgtttttgtggttccgcaatttgcactttgatagcccgtaaataaaatattcaaatggagagatgcctatttaaaaaaaaagaaaagcaactg

SEQ ID NO: 95856 - DNA, 784 bp, Zea Mays
aagcaaaagcccacagaacgagtgaggccaggcgacttcatactgctcgcctcgccgtctttcccccaatctgttgctcctccaagctgcgggcgatcgccgtaccccggccgccgcagggaaccccctcgccatggccttgcaggggaagaagctcatcaacaaccccgacgatgtggtgacggagttcatcgaagggttggtggagacttacccgggtctgcagtacctcgacgggttccctcagattaaggtcgttcttcgtgctgatgtcgagcgcggttcctatgacaaagttgcagtcatctcgggtgatgttctgtgttctgccttggcttctccaaactatgcttttgtactacttttcatgtgaatgtgatggtttctgcttcgaactatgcttttgttcttattttcacgtgaatgtcatggttaattcctatattacattaaatatatcctaaatgattgggaattctcctgtttcaactactagatatgataacttaaaataaatctgatggtagttcgcaagaagtggttgcgatgttagtaggattgcttcagtgtgatggttatcttcctgaccagaattggcgagatatagtgttcttttgctcagcttaccttacatttaaagttccacttattgagctagttgcctggagttatgattctttttatactaagtaccatgttgcactccgcttggagacatcactgctggaagagtaacagatggcggtgtattgcatggaccacttgcatgtcatggcaccatcat

SEQ ID NO: 95857 - DNA, 3220 bp, Zea Mays
tggaatgacatgggtgtttctttattacagtgtagtggagtatatatacaagagtttccaaggggtgtgtcccttggaaaataactatcacatagatggattagatcatatgtacaaaatattttgtaacagcaaacatgatccattaggtggacacgggcaactccacctgtcgctgacgatgatattatatatttccagagatgaggactccggcgcgtccctctcccagatcgcgctcgctcctggtacgtggttggcaaataagagcccgaacaaagcagcgcacgcctccgcctccctttcctccctcttctttttgttgagaagataataatccgccgacatctccggacgagcaggagcaggtttatcgtgctcgcaactcgcaaacgcacggtccgcctcgctcgccggccgcgcgcgtcactgccagactgcctcactgcgccgtgttttttgccccgggtcggccctagtaaaataaggagcactagacgtaagaaaacctgctaataaatttttatacgattttaaaacacttttacttattttagagctctactatagagtgggtccgagatgtggctgcacacaagggcacgggcaggcaccgcacagtcccgtgtgccggtggtccgcatatgcgtcgacgttcccgagagttctagatgccgctgaacccgtccgttcctttctcatgccttgccaatgccaccacagggccacaggccgccccgcgagaatctagaggggacgacgagagccacggccccgcgcgagtcgcgacgctacctagggcccggtggagataataaacgagataagcgacggcgaccggccgcggcccacccagaccagctgccatacggggcccgccacgcccgacccacgccgcgcgtctcttttagcggctccccagccgccactgtggcgccacgcggcctgacgctttgccgccgtccacacgtttgcctggaggaggctgtgtgggacccagtcgttccccgccacgtgggcccgtgcgcggccacgacccccgcccgccgcggcccggcaagagacgtttcggtagactctcccttgccgcctccgcctccacctcctacaggctacaggcctacagctgcgacctgcgagcgacggctataaaaccttcgcctccactcccagccgcgaagccctactcaacttctccttttcccccggcgattattccggccactgaccttcgttgcgtgccgctcgagaacccggttcgagaatcgacggcgcgcggctgcatgagagggtgatataaaatcgataaaaaggacgagcagcacgactctcatttttttgggggagggttgcggtggaagaggattgcgctggagagaacccaattttagggcggtgccggcgcgaccgttccgggatcgggagctttatctggggggcgcgagggatcacggccgcggcgacgaccgaccgaccggccggccaacccaaccccaccaccaccagtccccgcggcccgcgtcgaggaagaagaagggataggagacggagacggagacggagccggtggtcgcaaggatggccgggggcatgcaggcggcggacgcggcgggccggctgagcgcgctgctctcgctgctcgcgctgcgccggctcctcgccgtgctccagccgctggccctgctcctgctcctgcccttccggtggcgcgcgcggccggccggggccgtggccgcggccgtggcgtccgatgccgccacggcctccgcgccgggggccagcgggaggaaggggaaggcgtcgtcgtcgtcgtcggtggttctgcgggtgccggccgggtcccccatggtcgccgcgcggaggcaggcgtccgcgcgcagggagatcgccgtgcgccgggcgcgggaggccgggcgggagtacgagctcgtccccaccgctcgcggcgagacgctcttcacgcagtgctggtggccgcacccgccctccaccgttaaaccgagggcgctagttgttgtcatgcacgggctaaacgagcacagtgggaggtatgaccatttagcgaggcgattgaatggcatcggcatcaaggtgtacgggatggactggactggtcatggtggaagtgatggtctccatggatatgtgcaatctcttgatcatgctgtcagtgatttgaaaatgtacctcaagaaagtgttagctgagaaccctggtcttccatgcttctgcttcggtcactcgactggtggaggtatcattctgaaggctgcacttgatccagaggtagaaactctccttagaggtattgtcttgacatcaccagctgtccgtgttcagcctacacacccaatcatagcggtcatggcaccgatttttgccctcatcgcgccgaggtatcagttcacggcgtcccacaggaacggcccgccggtgtcgcgcgaccccgaggccctgcgggccaaatacacggacccgctcgtgttcacgggcgccatccgcgtgaggacgggctacgagatcctccgcctgacgtcgtacctgcagcagcacctgcaccggatcgcggtgccgctgctggtgctgcacggcgccgacgacctggtgaccgaccccaggggctcgcgggcgctgtacgagcgggcctcgtccgcggacaagtccctcaagctttacgacgggctgctgcacgacctcctgatcgagcccgagaaggacagggtgatggacgacatcgtcgcgtggctgagccccagggtctgacgccgccggcgcgttgcggtgctggccgtaggacgcgagcggcttttcgatcatctgcaggccaaggacgcctcgcctccggatggtgggtgatgacgcggtctggtctggtaggctgcggaccgagggagagcgggtgtgccttctcgcccccttggtgtgctgaactgctgagtgctgatacgatacgaggagcaggacaggagtacggagaactactactacctacggctatgggcgatggctttactcgcgcctcccggtgtgtcccgagattttttttcggggacacgtacgaattatgtaacggagttcgtttcgccgtgccacacgcacgagcggtgtccgatacacctatagaaaatgactttccatattgcgagttgtgtgatgtattcacacaattgtgaatcagagttgcaacttgcaacggattcttatcttctgctcttctcac

SEQ ID NO: 95858 - DNA, 4496 bp, Zea Mays
caccaccaccaccaccaccaccccgaacccgaatatgctgcccccagccgcgccggccgcgccctgatcccctcacccgatgcgccatccccgccgcctccccctcctccgctgccacgccgccgccggatccgttcccgcccggccaccctgcgctctcggcggcgacgggtcccgctgaccgccctgggcccggcccgctgcccccatcgtgcttgccccacccacctccgcctcgcgccggcgcggggtgcggcgacggccgctagggtttccggggctgtcgcctcgcggtcccctccccccgcggattcgcgcccttcccctacgggcgcgcgtcgcgcttagggtgtgcgtgggtttggacttctcctcagcttggcttgcggtcgcgcggtcccgaggagctccacggaagcttgatttgtcaggtgggggggtttcgaggcagagacgccgatctgcggctgccggcgccgcggcattgcgccgcttcctaagtccccgagtgtccggagcctccgattcggctggtctgggagctgggctgcgacgggtgctgccttcagctcctcttcggcatcactgtaagcgtttcagggttctcgcttctggctggggctacctgatattggagggaaacatgtcggagaacattgatctggtgctcgagttcctgcggaagaaccggttcgccaaggcagaggcagctctccgtggggagctcaccggacgcgctgattcgaacgacatggccacgcagaggcgcgttgctgagctgaaagaaggcgaggagcagcaggagggcttggtgggttccaatgtagggcccaagggtgctgcggcagcgaggagtgcggactcgtcgagggagttcatcgtgaaggagattgatgttggagccctgccgaatggttcggatgggaagaaggggtccgggattggccagcctcaggataacgtgggggatctgtatccttggaccttcagcattgcaaacagcactgcagaacagctagctgagctgctggtgtcggaggaggtgccaagacataggcgtggtgcggtgctggcagagaagagggatcgaggtgttgggaccgagcaacctggcccggtgctggagcaaaaagtctcttttggaagagggaaaggaaaagttgatgctgctgggaggactgagaacagtgaacagtgccattttagggataaaagtctagtaccagaaaaagaggagatgctgaatggttgcacagttaagacggtgcttccattccccacggaaaacccgtcatctagctacaatagcacacaccatgaaaatgagaggaaagaagtaaagaggagcagtaatgcagatggtgttggaaaaggagcaaaaggacatcttgatgaggggaacaggcaatactactttgaaaaatccctagatacagatctggtgtctgaccgatgcttcgatttacagcttgttggagatagtcagcgtgaggagcttccgaagttacctccagtgaggctcaagtccgaagataagctagtcaacatgaactgggaggaaaagatcaatcaccatggatctggggccaagcaatctagtgctgatcatgcttttatgattgggtcttatctcgatgttcccattgggcaagagataacatcttcaggtggaagacgtacaatcggcagtagttggttgtctgtcagtcaaggtattgcagaagatacctccgatctggtatctggttttgcaacacttgctgacgattcacttgaatatccaattggtgaatactgggattctgatgagtatgacgacgacgacgatgttggctacacccggcaaccaattgaggatgaaacctggtttttagcacatgagattgattatcctagcgacaatgagaaggcgactggccacacaagagggaacgatcgtcatgatcgccctacaaaggatgaagatgatgaccagtcatttgttgaggaagattcctacatatctggtgagcaatattttcatggaaagaatattgcacaaataggtacttctgagggcccaatggtccatgggattcctgataatgatatgatagctcagtatgatggccaacttttagattctgaagagcttaatttgatgcattctgaaccagcctggcagggctttgtatcacagaacagtgagctaggtatgctaggcaatgggaaattccttaatgattccgaacgacctcatcctgatgacctttttgtggaggatgatcagcatggctctgttaggtcaattggtgttgggataagcagtgatgctgctgacattggcagtgaggtgcgagaaagtctgattggaggtagcagtgaaggggatattgaatacttcaatgagagcagcttgagcgttagtggaaaaagacatcctcatcaggatactgaaaagaagagagtaggtgctaaaggagtaaaacatgaccaaatcatttacgctgctgatatccagaagggcaatctaccaccaggagcggctgatgtaggattttcttttcctccacctttgcattctgggaaaaatcatgagtctgatgctaaatctttgtggtcaaagaaggatgaaatgtattgcattaatgatcctgatgactgtcaaaatggcatggtatcagatgatatgcttgccacatggaggaaaaagaacagtgagtcttctctaaggagctctagagatgaaatgacgtctgatgttgttagatcaagaaattcaagtgcatcctatgacgaaacagaggacacatcgaatgctcggcaccacaaactagatgacgcacaagaagaagacactggaaccaacttggatgatgaggaagcagcagcgttgcaagagcaagtcaggcagataaaggcgcaggaggaagagtttgaaacgttcaatcttaagattgtgcatagaaaaaacagaactggctttgaagaagacaaaaacttccatgttgttctcaattctgtcattgctgggcgttatcatgtatcagagtatttgggttcagctgcattcagcaaagccatccaagcacatgatttacatacaggaatggatgtatgcgttaaaattataaaaaataacaaagattttttcgatcaaagtcttgatgagatcaagcttctgaagtatgttaacaagcatgatccagctgacaaataccaccttttgcgtctgtatgattacttctactatcgggaacatttgctgatagtctgtgaacttctgaaggcaaatctgtatgagtttcagaaattcaacagagaatcagggggtgaggtttacttcacaatgccaagactccagtcaatagctattcagtgtctggaggcgctgcagtttctgcatggtctcggtctaatccactgtgatttaaagccagaaaacatattggtaaagagctacagcagatgtgaaataaaagtaattgatcttgggagcagctgctttgagacagatcatctatgttcatatgtgcaatcacgatcttaccgtgcacctgaggttatactgggcttgccttatgacaaaaagatagatgtatggtcacttggttgtatattagcagagctttgcaccggaaatgtccttttccaaaatgattctcctgcaacattacttgctcgcgtgatgggcatcattggctccatagaacaagctatgcttgcacagggacgcgacacctacaaatatttcacaaagaaccacatgttgtacgaaagaaatcaggaaagtaacaggcttgagtacttgattccgaaaaagacatccttgcggcaccgattgcccatggctgatcaagggtttatcgagtttgttgcgtaccttctggaggtgaacccaaagaagcgcccaagcgcctcagaagcattgaaacatccatggctttcttttccttacgagccaatatcttcatgaggctaactgctattggatcctgtgtggctttagcatttgtctcaacacctaagcaccatgaaattttgatagatcaagacggaagattttctaccacgactgagccatggcatcagccgaaatcccaaacgcaaatgcagattcggttcgatcatgtcttggtgccacaatcagctggtcttaggcgccatgtaaaatcaatgcatgccatgtgttgtgcttgtaatataacttgttttttttacccttcatttccagccccgatgtaacaggccattttggttttctaggtacttggtgactcatttctagcaatagggctgtcatgttgtacatggtgtgatcattgttgagcggccccgtgccatgctgtgcacctgttacgcttctaacccaagtcatgaatgccgttcgtcgtgcttgtctttgaaggagcttaatggtcttgcatgccttttaggactgccaacgagtcgtatagagactgtatatgatgatgtataatcatgtatctagggaattctcaaaaaaaactagaaaa

SEQ ID NO: 95859 - DNA, 155 bp, Zea Mays
agattggagcaattctccctatgccatcagaaaatatattcatttcttgtatgtcactggctccacatgtcatatacacaaaaaaagaattatctatatgtcactcaataacacacaagtaacgagtataaaatatgatgacatacaaagaattt

SEQ ID NO: 95860 - DNA, 4059 bp, Zea Mays
cccaccgccccccgctatttatgcgtacttgcttgccgggagagtcgccggagagctgggcgtcctcctcccgttccagagcctcactgcttcgctccacccacccttaagcaagagtggtatctggtggttttgtttttcaaaagaagacagaaatgtcttccttgaggcctgcccagtcttctagttcatccagcaggactcggcagagctcccaggcacggatactagcacaaacaacccttgatgctgaactcaatgcagagtatgaagaatctggtgattcctttgattactccaagttggttgaagcacaacggagcactccacctgagcagcaagggcgatcgggaaaggtcatagcctacttgcagcatattcaaagaggaaagctaatccaaccattcggttgcttgttggcccttgacgagaagagcttcagggtcattgcattcagtgagaatgcacctgaaatgcttacaacggtcagccatgctgtgccgaacgttgatgatcccccaaagctaggaattggtaccaatgtgcgctcccttttcactgaccctggtgctacagcactgcagaaggcactaggatttgctgatgtttctttgctgaatcctatcctagttcaatgcaagacctcaggcaagccattctatgccattgttcatagggcaactggttgtctggtggtagattttgagcctgtgaagcctacagaatttcctgccactgctgctggggctttgcagtcttacaagcttgctgccaaggcaatctctaagattcaatcgctaccaggtggaagcatgcaggccttatgcaataccgtggttaaggaagtcttcgaccttacaggttatgacagggttatggcttacaagttccatgaagatgagcatggggaggtctttgctgagatcaccaaacctggtattgagccctatctaggcctgcactatccggccactgatatccctcaagctgccaggtttctcttcatgaagaacaaagtcaggatgatctgtgattgccgtgcaagatcggtgaagattattgaagatgaggcgctctccattgatattagcttgtgtggttcaactcttagagcaccacatagctgtcaccttcagtatatggaaaacatgaactcgatcgcatcccttgtcatggctgttgtggttaatgaaaatgaagacgatgacgaacccgagtctgaacaaccaccacaacagcagaagaggaagaaactgtggggtctcattgtttgccaccacgagagccccagatatgtgccgtttccactgcggtatgcctgtgaattcttggcccaggtgtttgctgtccatgtaaataaggagtttgaattggagaagcagatacgagagaaaagcattctgcgaatgcagacaatgctctctgacatgctattcaaggaatcatctcccttgagtatcgtatccgggagtccaaatatcatggacctcgttaagtgtgatggtgctgctcttttgtatggggacaaagtatggcggcttcaaacggctccaactgagtctcagatacgtgatattgccttctggctttcagaagttcatggggattccactggcttgagcactgatagcctccaggatgctggatatccaggagccgcttcccttggtgacatgatctgtggaatggcagtggctaagatcacgtccaaggacattcttttctggttcaggtcacatacagctgctgaaatcaagtggggaggtgcaaagcatgatccatctgatgaggatgacagcagaaggatgcaccctaggctgtcctttaaggctttcctcgaggttgtcaagatgaagagtttgccatggagtgactacgagatggatgctattcactcgttgcaacttattcttagaggtacactgaacgatgccttgaagccggcccagtcatctggtttagataaccagattggtgatctcaaacttgatgggctcgccgaactgcaagcggtgacaagtgaaatggttcgcctgatggaaacggcaactgttccgatcttggcggtagatggcaacggattggtcaacggatggaaccaaaaggtggcggacttgtcggggttgcgagttgatgaagctataggaagacacatacttacacttgtggaggattcttctgtaccaattgttcagaggatgctatacttagctctgcagggcagagaagagaaggaggttcgatttgagttgaaaacccatggctccaagagggacgatggccctgttatcttggttgtaaatgcttgtgccagccgtgacatgcatgaccatgttgttggggtgtgctttgtagcccaggatatgactgttcataagttggtcatggacaaatttacccgggttgagggggactacagggccatcattcacaacccgaacccgctcattcctccgatatttggcgccgaccagttcggatggtgctctgagtggaacgcagccatgaccaagcttactgggtggcacagagatgaggtgatcgacaggatgctccttggcgaggttttcgacagcagcaatgcttcctgccttctgaagagcaaagacgctttcgtacgtctttgcattatcatcaacagcgcattagctggtgaagaggcagagaaggctccaatcggtttctttgaccgcgatggcaaatatattgagtgccttctgtcagtgaacagaaaagtgaatgcagatggcgtcgtcaccggagtgttctgtttcattcatgttcctagtgatgacctccagcatgcgctacatgtgcagcaagcctctgagcagacagcactgagaaggctgaaggctttctcgtacatgcgacatgccatcgacaaacctctctcaggtatgctctattctagggaaacactcaagggcacagacctggatgaagagcagatgaggcaggttcgtgtcgcggataattgccatcgccagctaaacaagatactcgccgacttagatcaagataacattactgacaagtcgagttgcttggatttggacatggctgagtttgtgctgcaagacgtggtggtgtctgctgtaagtcaagtactgataggttgccagggtaaaggcatcagagttgcttgcaacctgccggagagatccatgaagcaaaaggtttacggggatggtatacggctccagcagatcctctccgacttcttattcgtttcggtgaaattctctcctgctggtggctctgttgatatctcttccaaactgaccaagaacagcattggcgaaaaccttcatctcatagacttcgaacttaggatcaagcaccaaggagcaggagtcccagcagaaatactgtcacagatgtatggggaggacaatagagaacagtcggaggagggcttgagcctccttgtttctagaaaccttctgaggctcatgaatggcgacattcgtcacctcagggaagctggcatgtcaaccttcatcctcactgctgaactcgctgctgctccttcagcagctggacattgaagccgtcactgcaaacaagtgccaaatgctgcccagctccctcagagttcattcggaaagcaacggtggttcgcggagaatgggaaatgctgcagcctgtaggatcaccgaatgcataagaaataagattgacttgtatggttgtttgttaggcggggaagttgtgcaggcatagtaagactccatacttctgctcttttctgcctgtaaccaactgttttctatcagttattaggctatctcatcagtttaattatacttatccctcatatttaaatttcactttgcaaacaatacaaaacagtgttttgatgaccatatggatgaactgcgaagacaatttttttaggctgtctctaatatttcatccatatggtcacccaaaatactattttgtacggtagactacactgttagtagtgtggagtttaaatatggggatgaataacctgttggagataaccttacctatcttcagcaaatcttctatcatatctcttattttaaa

SEQ ID NO: 95861 - DNA, 1485 bp, Zea Mays
cccaccgccccccgctatttatgcgtacttgcttgccgggagagtcgccggagagctgggcgtcctcctcccgttccagagcctcactgcttcgctccacccacccgtaggtctcctcctcctccttcctccccatgttgctcagcttgctttacccgtcacctgttcaccaccatgttcttcttcttggacacggactgtggcgagggtcttggatcgatcactggatgcctgcctggatcctccgttgcgtctctcctgcccccatctgggggcctggcagtggcaggctcctcgatcgggggcagctagagcgcgataggtttttttttttgtttgtttgtttctggaccaatcagcaggagacatgattgctccttctgtccttcaacaccacaagcactgatagttactagctcgttggattagggatgaacagaagctgcaaaagctggcgtttttttttcactacttgttcttctgcgtttctggttagcttcgacaccatacgcatactcgatggctgcggttggcaaacttagcatatgctatagttttagaaaatgggaagatgaacaccccgagaaccttttttcctgcgatttgctcatacacaaaatatagatacaaaaaaaaaaagcatcccctttctggtttctggggctgctgatgacgagcgactggataacgtctgttggctgtcgctattcagctgatctggtaccgtcagagggaggagaaacgggttctgcaagtccagtcccgtagcttttgttttcggttgcctgtggttctttcttgcatacttgcattatcggcatgctccatgtcggcaggggcggagctacacattcagtggtgcgggtgcagcacccacgtaaaattttaaatacagtaggagtaggggacaaaaaatcaattgcactcgcaagtcacaaggcaacatgcaccctcctccctcgtatttgctctagctccgccccctgcatgtcggagagaccaaatttcgacgcgaaagattgggaacgaaacggatgtggaatagtagtgcgctgctataggccctgtttggcacaactattgcttgttaaaaaagcagcttatctaaaaagccggtgaaaagcagtttctacttgttggctgcttttttatgtattctgagaagcagctgaactgataagttgctgcagaggctgtctgtttggcagaacttctgcttaaatttgtgaataagctgaaaataagttgtgccaaacagaaccataatctctagatcatggggagtaggaaatggggatccgttgatctgcatttccttggctgttagtattcatgtctttgtaaagtagcatgatgttttctgttgtttgttagcatcggattgtcccggtaagttctccatgtaatctacacaggcttgtaatctgatcttttttctatctatcaatgaaacgacacacggctcttctgggagttcgggaaaag

SEQ ID NO: 95862 - DNA, 2361 bp, Zea Mays
cgcaccccgactccaatcccggcaccaaccctagctcccgaagaggcagaacacaaaatcaacggaccaccggaacaggaagcaacagcagcggggcgccggtgccgtacccttcactcattccgcccctgaaagtgaaacgtacccagatctacaagctactccactcgacttccataaataccactcctgcgattccaccttgcagttggaccggccgttgttgctttgcttcttcgcaaaaaaaaaacaaaaaaacaaaataggcctgtcttgctccgatcaggcgtgttcttaggcttcgctgcccctaccgcgtcttcgccgggatcggtccatggccggcgccgagcgcgcggaggcggtcgcgctggaacaagggctcctcgatccggaggaatccaaccaagtagtatacactggagatggatcagtcgacttttctggaaatcctgttgtcaaggaaagaacgggtagatggaaggcatgtccattcatattaggtaatgaatgctgtgaacgactggcctactatggcatctccacaaaccttgttacttacttgacaaaaaaactgcatgctggcaatgcctctgctgctagcagtgtgactacatggtcgggaacttgctacctaactccacttattggagcaatcctggctgatgcatactgggggaggtactggacaatcgcaacattttccacagtatacttcatcgggatgacactgctgactctttcagcatcagttcctatgctcatgcctccatcttgtgaaggatccttttgcccagcagcaagcccttttcagtatactgtcttttttcttggtctttatctgattgccctgggtactggtggaattaagccgtgtgtctcatcctttggagcggatcaatttgatgatacagatccagctgagcgaatccagaagggctctttcttcaattggttttatttttcaataaacattggtgctctcatatcaagcagctttctggtttgggtgcaagacaatgtaggatggggactggggtttggcattccgactgtattcatggggctggcaatcataagcttcttctctggtacatcactttataggttccaaaaaccaggaggtagtccaattacacgagtatgtcaggtgattgttgcctctttgcgcaagtggaatgtgcctgtcccagaggatagctctctcttgtatgagctacctaatggggtatcaacaattgaggggagtcggcaaatagagcacacagatgaactcagatgtttagataaggctgctacagttaccgaagttgatgtgaaaacggctgacttcaacaacccatggcggatatgcactgtcacccaggtggaagaactgaagatactagtaaggatgttccctgtctgggcaacaacaatagtgttttctgctgtatatgctcagatgtcaacaatgtttgtggaacaagggatggtgcttgacccatccttgggctctttcaagatccctccagcttcactatctactttcgacaccctaagtgtcatcatatgtgtcccgatgtatgattacatcgtggttccgatagccaggagattcactggcaacgagaggggctttacagagttgcagaggatgggtattggcctggtaatttccatcatggctatgtcagtcgccgcagtcctcgaaatcaagcggctagcagttgccagggaagcacacctggtggatcagaatgtcccggtcccactgagcatattctggcaaatccctcagtatttcctgattggtctagcggagattttcacattcattggggcgctcgagttcttctatgaccagtcaccagacgccatgaggagcctctgcagcgcgcttaatcttctcactactgcgtttgggaactatctcagcacgttcattttgacaatggttgcgtactttactacgaggggaggtaaccctgggtggattcctgacaacttgaacgaaggccatcttgattacttcttcttgctcatcgctggcatcagttttctgaacctgattgtttatgtcctctgtgctggcaaatacaagagcaagaaggcagcttgagttgtgaaggccaggggctggatggcgtgctgcgcgccatgttatggtggacacttcagttcaaaatctgtatatatgtttcccgcattaaccaccctagctgaagcaaccatctgcaattgttgcaaagtttatattcttcattgtgctggactaagttgattatacattcgtgcttctactttgtgtatgtatatatctgacctaaagttgctgaacatagacaatttcacttgcctctggtatccagggttttgatt

SEQ ID NO: 95863 - DNA, 509 bp, Zea Mays
ttttaagaaggtgaaagaggtcgatgatccccctaaaaaccaaaagaaccacgcactaacaagatgtggttgtgatgcaaacatgtatgtcaagttgggcccggataagaagtaccatatcacttcaatggttgaggagcataatcatccactttgctcgcctaataagattccttttcttcgatcaaaccgtgttgtgagccaaagagctaagaatacattgtttacatgccacaaagcaagcataggtacctcacaggcattcagaatcctacaagttagtgatggtggatttgcacctctatatcagcttcaggacatttgcacctctatatcagcttcaggaacctgatagtcctcatcagttttggagtcaattgttcccatgtttttacatcagacatgttttcaatctgcataaggtgctgaacctgcgacacttaaggggacaaatcttgaatcctccacctgaaattttagaaatttcaggaaaaaattgaagttaacaa

SEQ ID NO: 95864 - DNA, 114 bp, Zea Mays
gtggtagaagttggcagacgtcatattaacaaggccatcagcaagcgaacaagcaaattggccgtgtcactgaaaatactgcagtcgaacaaacagtatgaaagctgcattgaa

SEQ ID NO: 95865 - DNA, 730 bp, Zea Mays
cacataaacacaaaagcaccacaattatatattcacaaaagcatcacaattataatatcattcataactagaacatttacagatagctagctagatcattcacaaaagctccagagatgatcaatcacaaaagcaccacagcgacatcactccatcttgaagcagttcaaaagcccacaactacatcactaatgtttcatatcactccagctattgttcaaaagcccacaactacatcactctagctgctccagagttgatcagtcacaaaagcaccaaagctacactaatgcttcaagcagttcaaaagccttcagacaaccactctagcttcttgtatcctcctattttaaggtacaagctttctttgtcgtgaacaccctagaaaaaagtacatcaaattagtatatttttgctacatttgcaaataaaaatacagttttgatgtgaaataaatcatagatgtaaaaagtactattctttgcatttagttactttcatgctccatatccataaaaacgccaaataatgcagtgtcattatcgagatctagcaaagccaagttctggaaaattgtacattagtctaaaaatacaatcataataaactaaaataaaaattgatgagatttcatcctcccaacagatacagataaatcatattagtaagtgtattagattatgctaagaaaaaaatcagcttctccttaaacagttatactcgataagat

SEQ ID NO: 95866 - DNA, 1164 bp, Zea Mays
ccccgttcgttgcgtagccaaatcgagatctccgtctcccccgtgacgaatcccacgcccacctctccccgacccggctggccgcagcaacagcgcatcgcaccgggaggcgggagccgaagaaccaaacaggagatggcgtcggcgctgtcctccctgcgctacggcgacagcctctcggtggtgggcatctccgccgcgacggccgtgctctgcgaggccatctcctggcttctcatctaccgcaccgccacctacgactccctccgcgcctccatcgaacgccactcacgcaagctggacgccatgaagtccggctccaactcctccggcgctgcctcctcctccgcgcaggccgcgtcgtcgcgggctaagaagatggaccgcgtcgagaccagcctcaaggacgccgcgcgggagctctcgcttgccaagctcaagtcgggcgccgtcgtcgccgccgtgctcttcgtcgtcttcggcctgctcaactccctcttcgagggccgcaccgtcgccaagctgcccttcgcgcccatcccgctcgtccagcggatgagccaccgcggactgcccgggaacgatcccaccgactgctccatggtcttcctctacttcctctgctccatgagcatccgaaccaacctccagaaactgctcggcttcgccccgccgcgcgcggttgctgcggccggcgggggtctcttccccatgcccgatccgaaagttaactgaggagaaaaatggaagacttattactgttgatgacaaatccttagcactagctcggactctgatcttctggggacttgagaagtgtctctgatgcatggaaatatgcacactttgaatggttatatctagattaaatctcggtatttcagcagtttaaatgaagggcaggtctggcgtagtggtgagagctgtcctcactcatcaggtctctccgcatttacggggaaagacttgcctcgatttatctcttctctagacccaactcggagtctccgacactaagtctgctctttatttcatcagtttatatgacttctctgttcgatttgttagagcaggaatcacatctacagttctgcaaaattttcatcaagggatatggagctataatctaatttttactgtcatgatatggccttacaactgaat

SEQ ID NO: 95867 - DNA, 1013 bp, Zea Mays
aaaccccgttcgttgcgtagccaaatcgagatctccgtctcccccgtgacgaatcccacgcccacctctccccgacccggctggccgcagcaacagcgcatcgcaccgggaggcgggagccgaagaaccaaacaggagatggcgtcggcgctgtcctccctgcgctacggcgacagcctctcggtggtgggcatctccgccgcgacggccgtgctctgcgaggccatctcctggcttctcatctaccgcaccgccacctacgactccctccgcgcctccatcgaacgccactcacgcaagctggacgccatgaagtccggctccaactcctccggcgctgcctcctcctccgcgcaggccgcgtcgtcgcgggctaagaagatggaccgcgtcgagaccagcctcaaggacgccgcgcgggagctctcgcttgccaagctcaagtcgggcgccgtcgtcgccgccgtgctcttcgtcgtcttcggcctgctcaactccctcttcgagggccgcaccgtcgccaagctgcccttcgcgcccatcccgctcgtccagcggatgagccaccgcggactgcccgggaacgatcccaccgactgctccatggtcttcctctacttcctctgctccatgagcatccgaaccaacctccagaaactgctcggcttcgccccgccgcgcgcggttgctgcggccggcgggggtctcttccccatgcccgatccgaaagttaactgaggtactagatcgatgtctctgcttcagtttccattgatgcccttgattgattgaagattgtgctaaacttcgagtgtacaagttaccaaggttattagatcatgatccttttggtcctgttgaaaattgcttgttagatttactagttaacaaagctacagcatggtgtttgttagattagatcgggccttttggatgcatgtgtgttgagtgattggtggtttcagattgattgggttgatttttgttagtgtgacccttcccgacggtttagc

SEQ ID NO: 95868 - DNA, 684 bp, Zea Mays
taacagaaatatcgcgggacccagatctatgattctttacctccaaaactcgactctgttacaaaatcacttgagggatcgagttgaggatagatcctggggagagagaggttcgcagacgacggctaacagtgccgcagttcttaactcgtcggactgggcctcaaccaccgcgcagcacccatccgacgacggcgcgcccacccgaagggacgcgcacgtcggcgggatggggatgcggggcggctcaggccggccatctccggttcattgaagccaaccgtgcgttagtaatctccaaaatcagtaaacagtgaaagaaagaaaaaaaagaaaaagagacagcgcgcaggaacggccgtactcgggcacgttcggccagtagctctgtgctctagcggctgcgcagacaaagaatcagagaaagaaacaagcgtgatgctccctggcggccgagtggagcagcggctgggggagaaagaaaattaaaaaaaaaaagggaatcagaggcggcacttgagcatagctcggccatgaggcccatgcagaaatgcatggatagctcctggcggccggcagtctgttagtggccatgcagccatgcaggaacgcaaggagaaatcctgacggccggctggctgtttgtggcggctgggatacaggagtagaatgtttagggttttt

SEQ ID NO: 95869 - DNA, 1635 bp, Zea Mays
atggcgagggaggcgagagggtttcaggcgggaaagttcgaggagttggaggcagaatggccctcggattgttcatctatttgcgcttctgccagtgcaagtggtgcacggttctgccgttccgcatcccgcccgcccaccgcgctcctttccatcgatggtgctccttccttcgacggcaaatctcatccggtcgcatcccgcccgcccgccgcacgccccagccggatcaatgttgtcttccccacgcgctgcgcccgcctgccatcgccagcgcgccccctcccgcgctccctccgcgcgaagacgaagggttgcgagaagacgaagggctgcgcgggggcggtctgcggtggggccagccactgcagcgcggaggcggcgggggaggttgagaaggtgagccggaaggaggcagtgtcgcggggcagggcgagggtcagcgccatgccgaggaccgggtcgggcgccgcggcgagggagaaggggatgggctccggcgggtctgcgtgggtggaggcggagtggacggcgagggcgcgggtgtcgagtaggaggtcaccggagtgcagcgtggagagggtgagcaccgcggaggtgtgtatggtggaggcggcgaagtcgagggcttcgcggaggcggtctgcggtctgcggcggggccagccactgcagcgcggaggcggcgggggaggttgagaaggtgagccggaaggaggcggtgtcgcggggcagggcgaggattagcgccgtgccgagaaccgggtcaggcgccacggcgagggagaaggggatgggctccggtgggttggcgtgggtggaggcggagtggacggcgagggcgcgggtgtcgaggaggaggtcgtcggagtgcggcgcggagagggtgagcaccgcggaggcgtgcgcgaggatgctgcagcattcgaacagcgccaacgagctgctcttgcgtcggaagctggaggagcagcagcaggctgccgaacttcagcacgccattgagctccagagccgccgcctcatgggtctccagctgctcgacctcaaggctcgcgcagctgcgacagcagcagcggcatcggcactgccaacaccagttgccaatgccttcgcgtccagccatcctttgagcaccatggcagtcgagtcgccactagagtccggagagcagctcaagctgagcagtgggtttgctctggaggggaagctcaacggtggcgacaaggaagaatctgcttgcgaggcgagccctgacgccgctgatagcgaccaaagtggagatcacaacttgccggatagcccatttgcgtcccctaccaagtctgccgcgctcgtgcacgacagtttcgccgccacggagcatgagaacaccgcgtcccttgttgggagcaagatcgacgtcggcagtaaccatctccgccccctgcgctggaaatcccttcgcccagctcctacttcttccccatgcgcaggtgcgttggaaaggcctctactctacttttccgtggcgccgattatgtccgtgaacattctgtcatccacgagtgaaatgattctctccgaatgcaatgagcaggctgtcctccgatcacggagccatggggatgtaaagttcagcattggaagcgagtga

SEQ ID NO: 95870 - DNA, 105 bp, Zea Mays
caccagatcaaatccttctcaaatattactatcgatcttattttggttcgatcttttatacatttttcagatccaaatatcagaaccccaaatatctacgatttt

SEQ ID NO: 95871 - DNA, 717 bp, Zea Mays
cggtcttgatgtggcgctggcggttgctgcggcggtgctgcagcgttgctgggtccagcgccaggatcaccaccggttcggcggacacgctcagggtcaaatgtggcccgagcgtccttgttgcggcatttcttggcatggcgacgtccatgtcgatgcgcaacacgtagaaggcgacgtgcgacagaatcagcacctcgccggcgacgacggccgccgttcaaagaccgaaggatgaagtgaaagaagtggacgccagtataggacacaaccagacgactcaacggagaagtggatacgtgttatcaagggtcaacctcccttgaatgtcggctgggagcagcagtaactgcttaaatcccgtaacatcttcaaccggtaaccctacttcgcgtacctcggcgatccgcagccggagacactggccttgtgcttgttccagcccaacaccgacccgccggacaccggatccgtgctcaccaacaccatattcgacgccctgcgcgaccccgacgaggacggcgccacggtggagaacgcgcgcgcgttcgtgtggggcctcgtgtcccacctccggtctctggccggcacgctgcgggcgcccggcaagtacgacgatgacctcaagcctggcaaggcgtcggagcgggcacttcgggctgttcgagaccagcctcaccgagacgtaccagacggggttgtccaggaacggctcgg

SEQ ID NO: 95872 - DNA, 1012 bp, Zea Mays
ggccaccgcgcttgcagaggattttatgctcccaacgagcagagagagatagaggcagagagtgagggagatccccaggccagggcacttgcaaaggatttatccctcccaacgagcaacgagagagagagagattttgcttttgcatggttcattggtttgcggcgtcaaagagctcgttaaatatggacgtcctggatcactcggacgatgaggaggagcagcaggaccggtgcggcaccagcagcggcagatcaggctccaggctcggcgcgcgggcgcggcggcagaagcggaggtcaggcggcagccgccagaacctgctgctcatggactgcgtcggcggcaacggggaccgcgcgttggaggacaccgtgccgctgccagactacgagctcttgtcccagtccgcccgcctccacgacgacgccaagaatccgcctccggcgctgctggttgcagaggaggagcagcagcagaaggcgccggccaagcaggggaaggcgtccccgccacagcctccgcccctgccactgccacagcggcagcagaagccggcggcgtggaggctgatcgagtacgtgaggtcaaggaacaggtcgggcggcgcagggccgggggtcggtgggtgcggcgcctggtctgacggcgactccaagagctccgaggacggcgaggacgggggcggcgaagggaagaaagataagaagaagaagcggtcgtcctggctgccggaccccgaccgccggtggccggtgcagggattctgttagcgcgttcatcgtcttcgcagtctagtaaaaccgtgttacgcctctgactcatgcgttggtttggttgcttcagtctcttcttttcatagtttatcatttttccgtgtgggtttgcaatgtcaatgcacggacataaatgaggaggacaaacccggcatgcttttgcgctgaatgtaggacttgtttgatatgcagttttgaaatcctacagttttaaaatgccatagtttgtaattgta

SEQ ID NO: 95873 - DNA, 988 bp, Zea Mays
ggccaccgcgcttgcagaggattttatgctcccaacgagcagagagagatagaggcagagagtgagggagatccccaggccagggcacttgcaaaggatttatccctcccaacgagcaacgagagagagagagattttgcttttgcatggttcattggtttgcggcgtcaaagagctcgttaaatatggacgtcctggatcactcggacgatgaggaggagcagcaggaccggtgcggcaccagcagcggcagatcaggctccaggctcggcgcgcgggcgcggcggcagaagcggaggtcaggcggcagccgccagaacctgctgctcatggactgcgtcggcggcaacggggaccgcgcgttggaggacaccgtgccgctgccagactacgagctcttgtcccagtccgcccgcctccacgacgacgccaagaatccgcctccggcgctgctggttgcagaggaggagcagcagcagaaggcgccggccaagcaggggaaggcgtccccgccacagcctccgcccctgccactgccacagcggcagcagaagccggcggcgtggaggctgatcgagtacgtgaggtcaaggaacaggtcgggcggcgcagggccgggggtcggtgggtgcggcgcctggtctgacggcgactccaagagctccgaggacggcgaggacgggggcggcgaagggaagaaagataagaagaagaagcggtcgtcctggctgccggaccccgaccgccggtggccggtgcagggattctgttagcgcgttcatcgtcttcgcagtctagtaaaaccgtgttacgcctctgactcatgcgttggtttggttgcttcagtctcttcttttcatagtttatcatttttccgtgtgggtttgcaatgtcaatgcacggacataaatgaggaggacaaacccggcatgcttttgcgctgaatgtaggacttgtttgatatgcagttttgaaatcctacagtttt

SEQ ID NO: 95874 - DNA, 2776 bp, Zea Mays
atgatgcgcgatcgagcgcgcgggctctgggcgctgctgctcgtcgccctggcggcggcgccctgggcggtgctggcgcaggggaacctgacgtcgcggtcggatctcgctgggctgtacgcgctgcggggctcgctcggcctgagggcgcgggactggccgcggcgtgcggacccgtgcacggcgtgggcgggcgtgggctgccgcgccggccgcgtcgtctcgctcaacctcgccgggctgcggcgcacgcggctgggccgcctgtccccgcgcttcgacgtcgacggcctgcgcaacctcacgcggctcgaggccttcaacgcctcggggttcgggctccccggctccatcccggcgtggctaggcgacgggctcgctcccactttccagtccctcgacatctccgcctgcgccgtctccggggagatcccggcctccgcgctcgtgggcctcggcaacctcaccaccctcaacttcgcaggcaaccaactgtccggtcaactccccggccaccgcgctctcgaggctaacgcggctcaggaccctcaacctctcgtccaatgcgttttcgggcgccctgcctgacgcggtctggtcgctcccggggctcagcgttctggacgtctctcgtaacaacctcaccggcgcattgcccacggcagggttcgcgctgccagccaatgcacaggtggtggatctgtcgtcgaacttgttctatagcggcgtgccagagacctttcgccggctgttcgcccagttgctgctggccaatatttctgggaactacttcgacggcaagctaggagtgtccgatggtggtggtgggcctggtggcaatgtttcgtttcaatcgaattgcttccttgacgttctgggacagcgtacccaggctgattgtcagcagttctatgccaagcgtggcttgccatatgatggtccagttatcccacccgcaccacagcctgcaccttcaccggcaaggaagaagaacaggaatctgaaatacatactgatcggggccattggtggaagcctcctgctgatagccggggttgcagccattgtgttctgctttgtgtgttctgtgagaacagggaggacggatggtcagagggaaagtggggcatcaccaagtgcaccagcaccatcggtagtgtcagctaccggcacagctgcagctactggtggcacacacccttctgcattgtccacaaacatggcgaaagtcggcgattcatttgcttacgaccaaattgccaatgccacatcgggatttggggaagagaggctcatcaagcatggtcactcaggtgatctataccatggtgtgctccaagacgggactgccgtggtggtgaagaggatcactttgcgcgtggctcggaaggatgcctatatggcagagttagatttgtttgctaaaggattgcatgaaaggctggttcctttcctgggtcactgccttgataaagaagaagaaaaggttcttgtgtataggtttgtccgaaatggtgacttgtcaagtgcactgcacaaaaagtcaagggaggaagatgaaggcttgcaatctttggactggataaagaggttgaagattgcaacgggagtagctgaggctctttgctatctgcatcatgagtgttctccaccgatggttcatagggatgtgcaagccagcagcatccttcttgatgataaatttgatgtacgccttggtagcttgagcgaggtgtgtcctcaagagggggaaggtcaccaaaatgttatcacaaagctgttaagattttcttcgacagcagatcaaggttcttctggttccccatctgcaacttgcccatatgatgtctattgttttggaaaagttttactggagctggtgacagggagacttggaatcagtgcatcaaatgatgcttccacaagcgagtggcttgatgccaccctgcggtacgtcaacatttacgagaaggagcttatgagcaagatcattgatccaacgcttatcattgacgaggaccatctggaggaagtctgggcaatggcgattgttgccaagtcctgcttgaatcctcggtcctctaaacgcccgccaatgaagtacatcctaaaagcactagagaaccctttgaaggtggtgagagaagacaatggcaatggctcgggcaggttaagagcaacatcgtcacggggttcatggaacgctgcactctttgggagttggcggcatagctcgtctgatatagggccttctagggaggacaacattctgaagcgctcagagacaatcaaatcgtctggcgggagcaacggggaccattcatcctcccgcaggaggcaatccaaggagatcttccccgagccgtccggctctcgtgacaccgaggattaagcatgaaggagaatctttttacgaatcatttttcggtaaggcgggagtccttatgaaggagggctctgttagaagctccgcttgctgcttctatagaattctttcgtccaaaaaagtcacaatggcttcacaccagcacaccggcgccatggtaatcatttttgggttaagtagcaatggtggcatgtacgttggtgtaccaatggcatgcagttggcgccagtgtaaaaatcttcacagttggaagtctggtgtctcttctgtccattttctcgtttctgctcctctcggttaaagaaagaatggcgagctgattctttttcttctcccttctgtaattgattgtttcattgttcatcatagaggaaatgttctttttattca

SEQ ID NO: 95875 - DNA, 2893 bp, Zea Mays
ttccctccgaattccagcgcttcggcctcctcgccaaccccatcgacacctgtaacgcggagtggacatgggccacggcggcggcggcggcggcggcaggaggaggcgctcgaggcgatgatgcgcgatcgagcgcgcgggctctgggcgctgctgctcgtcgccctggcggcggcgccctgggcggtgctggcgcaggggaacctgacgtcgcggtcggatctcgctgggctgtacgcgctgcggggctcgctcggcctgagggcgcgggactggccgcggcgtgcggacccgtgcacggcgtgggcgggcgtgggctgccgcgccggccgcgtcgtctcgctcaacctcgccgggctgcggcgcacgcggctgggccgcctgtccccgcgcttcgacgtcgacggcctgcgcaacctcacgcggctcgaggccttcaacgcctcggggttcgggctccccggctccatcccggcgtggctaggcgacgggctcgctcccactttccagtccctcgacatctccgcctgcgccgtctccggggagatcccggcctccgcgctcgtgggcctcggcaacctcaccaccctcaacttcgcaggcaaccaactgtccggtcaactccccggccaccgcgctctcgaggctaacgcggctcaggaccctcaacctctcgtccaatgcgttttcgggcgccctgcctgacgcggtctggtcgctcccggggctcagcgttctggacgtctctcgtaacaacctcaccggcgcattgcccacggcagggttcgcgctgccagccaatgcacaggtggtggatctgtcgtcgaacttgttctatagcggcgtgccagagacctttcgccggctgttcgcccagttgctgctggccaatatttctgggaactacttcgacggcaagctaggagtgtccgatggtggtggtgggcctggtggcaatgtttcgtttcaatcgaattgcttccttgacgttctgggacagcgtacccaggctgattgtcagcagttctatgccaagcgtggcttgccatatgatggtccagttatcccacccgcaccacagcctgcaccttcaccggcaaggaagaagaacaggaatctgaaatacatactgatcggggccattggtggaagcctcctgctgatagccggggttgcagccattgtgttctgctttgtgtgttctgtgagaacagggaggacggatggtcagagggaaagtggggcatcaccaagtgcaccagcaccatcggtagtgtcagctaccggcacagctgcagctactggtggcacacacccttctgcattgtccacaaacatggcgaaagtcggcgattcatttgcttacgaccaaattgccaatgccacatcgggatttggggaagagaggctcatcaagcatggtcactcaggtgatctataccatggtgtgctccaagacgggactgccgtggtggtgaagaggatcactttgcgcgtggctcggaaggatgcctatatggcagagttagatttgtttgctaaaggattgcatgaaaggctggttcctttcctgggtcactgccttgataaagaagaagaaaaggttcttgtgtataggtttgtccgaaatggtgacttgtcaagtgcactgcacaaaaagtcaagggaggaagatgaaggcttgcaatctttggactggataaagaggttgaagattgcaacgggagtagctgaggctctttgctatctgcatcatgagtgttctccaccgatggttcatagggatgtgcaagccagcagcatccttcttgatgataaatttgatgtacgccttggtagcttgagcgaggtgtgtcctcaagagggggaaggtcaccaaaatgttatcacaaagctgttaagattttcttcgacagcagatcaaggttcttctggttccccatctgcaacttgcccatatgatgtctattgttttggaaaagttttactggagctggtgacagggagacttggaatcagtgcatcaaatgatgcttccacaagcgagtggcttgatgccaccctgcggtacgtcaacatttacgagaaggagcttatgagcaagatcattgatccaacgcttatcattgacgaggaccatctggaggaagtctgggcaatggcgattgttgccaagtcctgcttgaatcctcggtcctctaaacgcccgccaatgaagtacatcctaaaagcactagagaaccctttgaaggtggtgagagaagacaatggcaatggctcgggcaggttaagagcaacatcgtcacggggttcatggaacgctgcactctttgggagttggcggcatagctcgtctgatatagggccttctagggaggacaacattctgaagcgctcagagacaatcaaatcgtctggcgggagcaacggggaccattcatcctcccgcaggaggcaatccaaggagatcttccccgagccgtccggctctcgtgacaccgaggattaagcatgaaggagaatctttttacgaatcatttttcggtaaggcgggagtccttatgaaggagggctctgttagaagctccgcttgctgcttctatagaattctttcgtccaaaaaagtcacaatggcttcacaccagcacaccggcgccatggtaatcatttttgggttaagtagcaatggtggcatgtacgttggtgtaccaatggcatgcagttggcgccagtgtaaaaatcttcacagttggaagtctggtgtctcttctgtccattttctcgtttctgctcctctcggttaaagaaagaatggcgagctgattctttttcttctcccttctgtaattgattgtttcattgttcatcatagaggaaatgttctttttattca

SEQ ID NO: 95876 - DNA, 100 bp, Zea Mays
taattatgttattcctagtctctcatatgtatcatcattttgaacacggtcacttctttcgtattcataaaggtgtattcataaattcaatgtaacatac

SEQ ID NO: 95877 - DNA, 741 bp, Zea Mays
agtgggttgaaagcttccttgtaatttatcgttgcattctcccaatcttatttctgatgagatgtgtgaatttgttgctaagcatgggctttcctcggctctctttcaccagatcccttacatgttttctttctttcttttggctcttggtcttggtccagtcttaagatggcgtcaagcaatggtcagacagaagctccagcaccatctgtccccaaaaatcccgctatggcatcatgccggaagaagaaaacagatgatgctaccttccttgaagatctgaaagaccacatggatgagttcattcatgcctctatggatgagcacaagacctgctttaagaagacaattcagaagatgtttgggatgtcgaaggctgttgcagagagatccgcggaagcaaacaaagctgaagttgaaagtgctttgccacttcagaccagtgtctcgcagtagaatttcatgttggtagtttcttgctcgtgccaatagttttataagggtttttgttgctgtgttttctgaaacgcataagcgtgtcagtagcatgttttcataaccggattgtagtgcttcattatctatagttttctgtacgtgtaaaatagaccagcgtaacagcgtagtttgcttcattctccgaagtcttgtatggctgtacacccaggcatctgggcatcatgaacccaactgattggctaaatgaaataaatctcctccatccaacagcaaccacaaata

SEQ ID NO: 95878 - DNA, 853 bp, Zea Mays
atccttctgactcgtccctggcctggtggtgcgagatctttccttctttcccacgctccaagaaagaaaaccagaggcgccccccgttagccaattccgtttgtttccgacggcacaaggaaaaacaaaaaaaacaagaccagactgagggctcctctcccgttccgatcgccaattcgtcttccaccgcctgcaacccttcttcccttctccgtcatcgtgacggcatcacgcgcgcgctctcctctcccacgagtccgtcagcctgctaagtcttaagatggcgtcaagcaatggtcagacagaagctccagcaccatctgtccccaaaaatcccgctatggcatcatgccggaagaagaaaacagatgatgctaccttccttgaagatctgaaagaccacatggatgagttcattcatgcctctatggatgagcacaagacctgctttaagaagacaattcagaagatgtttgggatgtcgaaggctgttgcagagagatccgcggaagcaaacaaagctgaagttgaaagtgctttgccacttcagaccagtgtctcgcagtagaatttcatgttggtagtttcttgctcgtgccaatagttttataagggtttttgttgctgtgttttctgaaacgcataagcgtgtcagtagcatgttttcataaccggattgtagtgcttcattatctatagttttctgtacgtgtaaaatagaccagcgtaacagcgtagtttgcttcattctccgaagtcttgtatggctgtacacccaggcatctgggcatcatgaacccaactgattggctaaatgaaataaatctcctccatccaacagcaaccacaaata

SEQ ID NO: 95879 - DNA, 1327 bp, Zea Mays
ccaaagcttccgtttctccattcacacaatcacaccactagttttccgaagtgccttccatcccgcacaatacggtgggggaggaggcgacgttcctggatcggagaccgccaaggacttacttcaaccagatcaaggggtacccgcgcagaagcactggatctgcctcaagaactacttcaaccagaagcgcggcccggcaatgtcgcttgcgcgccgacccctctcctcttgtgatcttatcgatatcccgttcgttctatgatgtgctcgcatgatttctcttgcttggcgatttcttctggtccatagttgtagtaacttgtacccggtaggccggtaggatcagggtttttcgtcgtggtgatgccatggtagtctttgttttggggaatggagttattcgttggattggatccatcgctagcaccagcgtggcaccaattagtgatgttattttcggtaagcgatcacagactcgtcatgttctcatccgatcagagtttgctgtatcgttggtagtagcatttatttacctcgtattgtctcaatcgcaaatggatgatggtgaacaggcgatttagcatgttctgatgttcaaaccctctctgtaattttagcaaacatggtgatgatgttctgttagaatccatttctgctagtgatagtattgtagtagccattttgttagatggtgatggtagagtttttttcctggttttcttttgggcgaactaatcatggggtaatgggggattgggaataggaaatttagcaagtctgtgtgttccaagtcagactgttcagcaaacatggtgttggtattgtgttctttgcaagcctgtgtgaaaaagttcctgtttagggctacctagtttggaaacttaggttgcaaattttttctcggaaataatgttgtattgctctggggcatgttagcttgtagccgtgttgcatgataagaaggaactcaatgacatggacttgtgctgccaagattccaagaatgtgtttatggaagagctgatgctttgaggtcttctagctggctctaaatactctcaacaatgtctgatcggtccagtggagttaggtttgtttcaagctccctagttatttcctccaaatttggattacaagtcatggtgaggaagtagtttgattttccatacttctgtgccaaggtcatatcatccatgtatcattgtctcataacccttacaccaccaataaatggcatcggtagaaccaatcttttacccaaggcacgcgcttggttttctcctgcaaacaaactatcaactaagcctcgatatagatctatctg

SEQ ID NO: 95880 - DNA, 677 bp, Zea Mays
tgaaccttttatattttatacagggatatagagatcatgtggtcaaggacttctgattttagtattgaagaccagagacctccagtatctactgcaaaaggttttgaaaccacattttctacacctgccaaactgattaaggcttagccatcttggaggactgatatcgttccatgatccaatgtgcatgatatttgtttttcgccaattgaaattgccaaagattttatgcaagcatagaccttagcttttgtacatgagtccaaaaagcggaaattcagagctttgagtcatgcagacaatttgacatcaaaagtttccccaacaataactattgattcttttgtaagctaacctggttcagcggttcaaggttctcccaattatcttacaccccaaagtaataaaggaatgactcagcctcagcctctttctcgcacaccatacaatagctcagttattcaaagatatattaaggttgcatgttgactttcttgcaattgatttttattcttagctatgcaatgtttcttatttgtcatcaactgtgtactagcatccaaatattacctttgggaggtaaaatgtttcatgcttatttggtctgttgttactacaaaacagcagacatgacgatatatacaataatggataggcaccaatagtaaatgcaaacg

SEQ ID NO: 95881 - DNA, 1001 bp, Zea Mays
cgtcatccatccctcgttttggcaaccggatcaccttccaatccaacccgcgtctataaatttcctggcacacgcgagcccggaaccggcaattcgtttatagcgagcacaccagcgaaccagagattcatcagagtggcgatggccccgagcgcgtcgatgctgttcctgagctaccaccagctccacaggccgacggaggtggggacgccgccgccgccgccgcgcagggaggcggctgcccccggtggcttctggaggaggatgagcgtgagcagcgtgctctcacccgctttgttgcagtggcggccggagggggaggcgacactgcacgagcgcgacgccggcgaggagatcaagtcatcggcgccggccgacgctgataaggagctggaaagcaagttcgaggaggcgctgcgcctcagctgctggtcttcatgagcatccatccatcatggggaacggagagacgcgagcgtgccgctgaatcgaagcgacctctcctctaaacagccgtcctgtatatcttcctccgtgtatcaaaatccatccttttgctttagatttttgtacatttgtaatcgtcacatccgctcaaatatgttatatatattttagtttggagcataagtctgtacaggtgcacaaatgcacaaacgaaatactggtcatcaatctggtatccaacggttcatatacagtttgcaaaatagtcgtccagtactcataatagttcctaggactgggcgttcggttcttcggttcggttcctcgattctggtagaaattcggttcttcggttcggttcctcgattctggtagaaattcggttcttcaaaaactagaaccgaaatagtaagaaaaaaaactagaatcgactagttcggttctcggttcttcgattcggttctccggttttaaccgaactgtaacagccactctaaaattctaaataacgacaacttttatgagaaatttcaacatctcctcacaaacaacca

SEQ ID NO: 95882 - DNA, 1626 bp, Zea Mays
atggagcacacaaagactggggcgatgtcccacactgttcctattccttgttcaggtcgaggaacactgtattgttcagcgttcctggcttctgaggggttagacccagtaggccagtaccgaaggttcccacggtcagggacgaccctgccgttggtggtcgcgatggtgcggatgacccgcaaggcatcgtcggggcgtcgccgcaagaggtaccacctcggtgacttggagccgaacggcaagacagcgaagtcgagcgaggggagcgaggttgaaacaaaagaagtgaatgaacaagatagcagtagaggccatgcaacattatccaagaagagccagaatcctcagccagataattcattggtgaatcaagtggaagaagacgcctcagatgatgaaaatcacgaggattctagaaagggacgctctaaattggagcgatggacaagccacaaagagatagaatatagtaatatcgatgatgataatacagagacatttccgaccatcaaagctgatgttgaagccgatgaggtgggtaaatctgaagtttctgctgcagttggcaattcagacatcaatagcaatgttgatactgggcaaacatctgataagagtgaccgacatctagacacagttgagaggctcaagagacgaagtgagcgtttcaaacttcccatgcctggcgagaaggatacgcctcaaagcaaaaaggtggataccgaagtgcagcctccccaaaatgaatctactgctgctgatatggaagtgaagcctgagcggccagctcggaagcggagatggactgggagttagttgaactagcataacgtttccacttttcagcagatttcatggcagatgcttgcgctttgccacgtttttcctcgtacagttgaaagttgaattgatgtatggttttactgtctagcatacacatgtacctgtaaacttagtttttttttgtgtggctgggaactggatactgtactaaaaccccatccattttcccactatgattctggtgacctcaatgtggcacaggagccactgtactccgggtaagttccgaggctgttatgggaagcagtggcctcggagtttcccagttgaatatctgggttcggcatgaactacattttgatgaagctggagtgcccctgctgcaaggttcttttgtttgaagttctggtggcctgaagcaccgggtcttgtaacaatcttgtgttggtgggagatacttgcaagatgtgatggttgaatgtttggcacgtgatgatgatgctgttttaggaaccaccaataggtgatagaaaccaggggctagagatttcagaactgacataatcacaaatttgtatgcttaatactatgttagtcatgtacattctgataaacgtataaatgtcgtgcatgatctaccggagtaaggtgtctaagactagtgtgtagagctccacggtgcactttttgggtcgagcaatacatatatatgtacctgtagagagtgttaggtagaaataacatgattgtttgcttgttgtaggtttgcggtgtatgtaactggttcgtgtagaattttgctaaccatagagttttgaatggcattatctaaatttattg

SEQ ID NO: 95883 - DNA, 1023 bp, Zea Mays
aggtcattgaaaggaagttcactgagtcagaattctattcgggaaattgaaagctctaacgacataatacctcatcaaatatcttcagagagacgccatgattcccggaatgagaaccttgttgagggcgattcagaaggatcacttgctgctaatgataacacgacagataaactgagtacagaagatcattttgatggtggtggtggtgatgatgatgatgccacattggttggtagtgttgaagtggatggtgatgatgctactttagaccccaacatgcctagtgatgcaaatgaggatgatgacctggttcactctgataaaaagcagaaacatatagctggggttgagcaacctactggacacaatggcagtgaacctgttgaattgagaactaatgaaaatagtaaagggatgtctggaagcagcaaagatcagcagaaacgccttgaattgggtgaagaggttcttcaagataggcaatcaaggagagtaaataatgcaagaaggcatcatgacgcagaagaacacaatcttcgccggaaagatgagtactcacgagatgtaaaatcagatttggaaagatcacatttaccctccagaggcagggaagatatccaccaatcttatgtaaacagagatcgtgttgacatgcggggtaggagttatgataaggtaagagagacagaaattttgccaaggagagatgatggtgttcacagccgacgagctaaagaagaagatttgaggctggagtacaatgttgaaggtggtgcaaggcatagaaataagatgaggcccattgataggaatgatagagatgaagatctttcacggaagcgtttggatgatggcgagtggaggggatctcggcaaagagagcgtggtgatgtggttttgaatcgccgtgaaagtttggacgattctcatatcaagagaaataaggacgatgagaacttgcggaggttgaagcctgaaaatgaagacatggtcatggcacatggtcatagagcaagagat

SEQ ID NO: 95884 - DNA, 1051 bp, Zea Mays
agctccgtagcgcacactccacgactcggcctcctcttcctcgcactattccgccgccgccgccgccgcctacaatcctccacctccccgggtcccgccgccgcgccgcgatggaggaagacgacgagttcggcgacctctacaccgacatcctcatccccactcagccccccacatccacgtccgcgttatccaaccctgttccagtcgaaaccctaccccgtccgcctccaaccctaatcctagccctgtggcggcggcggcggcggcgggggtggaggaagacgacgactggatcctaggagggagcgaccccatacccggggtcgacccgaccggcgactgggccgacgaggacgacgacgaaggcgaccctgcgccgcccgtgaagctgcccgccgctgataatgatctcgatccgctcatggggggtggtgcggaggattccgggccagccatccctgggctctcgtcgtcggcggcagctggtgcggccgggagcgaccaatgggacagcgatagcgaggacgacatccagatcgtgctcaacgagacagatggacgccgggggctcggggatgatgaaggagacgacgaagacggtgaggacctcgtcatcgtcgccgacggaccacacatcaccgggatcgacgagcaggattggggagaggacccagtagcggcaggggcagaaggagagcgaaaggacggaggtgatcctggtaagacggccgcggcacctggtggaaggatcgggtacagtggcggcggccaagggttccatcaacagcaccattccatgttcaaggtcagttatttgggccaagaagccgtacgatgcactctggccacccctacagagggagacgtcgtaaacccggttgcgactcgctatcctttagttgtactgtgttactttgtggaaatttcctgtcaagtttagtttctttttacaacccggtgcggaccattcccgatgtaactgtaaatgcattattaacatggtctataaaggaagaaaggaagaaatgaagaaaatttcaatgacatt

SEQ ID NO: 95885 - DNA, 2050 bp, Zea Mays
attcgcctctgcgcgcaatgcagtgatctccccccccctctctctctctctacctaactcttgtctgttgatgctgttcatcaggacctgtgctgagctttggagcagctagtaattaagcctagagcgctagcagtccttttggatttcggttcggaagcaaggcgtgccggactcccaaatcccaatcccaagcaagcagtgtgcagatggcaacgcagtggttctccaacatggtgatggacgagccgagctttttccaccagtggcagtccgacacgctgctggagcagtacacggagcagcagatcgcggtggcgttcggccagggggagccggtggaccacgccgtggcggcggccctggcgacggcgatgcccatgcagctgcagcagcccgcggcggccgagcagccgcaccaccgcccgcgcaaggcggccaaggtcaacaccagctgggactcgtgcatcacggagcagggctcccccgccgcggactcctcctcgccgaccatcctctccttcggcggccacaccgcgttcgccaaggcggagccgacgacgcaccagccgcccagctgcgccgggtactacggcgccgccgccgccgccgcgaaggcgccgaagcaggagatgatggacgccgccgcgatgccgccgttccagcaggcgcgcccggccaagcgttcctacgacgacatggccgcggtggccgaggccgccaacgcgccgtccgccaacacgcgcccggcctcccagaaccaggaccacatcttggccgagcggaagcgccgcgagaagctcagccagcgcttcatcgccctctccaagatcgtccctggcctcaagaagatggacaaggcatcggtgctcggcgacgcgatcaagtacgtgaagcagctgcaggaccaggtgaaggggctggaggacgacgcccggcggcgcccggtcgaggcggcggtgctggtcaagaagtcccagctgtcggccgacgacgacgagggctcctcctgcgacgagaacttcgttgccaccgaggcttccggcactctgccggagatcgaggcccgggtgtcggaccgcacagtgctggtcaggatccactgcgagaaccgcaagggggtgctcatcgccgccctctctgaggtcgagcgccttggcctctccatcatgaacaccaatgtgctccccttcacagcctcctccctcgacatcaccatcatggccatggctggtgacgacttctgctggtctgtcaaggatattgtcaagaagctaaatcaagcgttcaaatcatccttctgatgggtttagcttctgaccaaacttaatctaggccaacctttttttccattagccttaaggatttgaggctaatggtaatgttttcaggttcttccttgccttgcttccgaagagagttgcttgctgtcccccaacagtgcccccccaaagatagccatttccactgttttttgctgcatgggtgcagaggtttattacctagttacccaacatcctattttctctccctccagttttttacatggtttgatcctgtcactccatgtttttgggagggagcagattgtaaaaaaaaacaaaaaaagtgaccagcctttttctagggctttgctatataggccggggagctcctaattttcctctctcccctttgccagtatgtttgccctttcaccttgtttttccatgagaggattgtgtttgtcaaacacacaaaaaaaaccctacctttgccgtcctctcaatcttgatcacactgctcccaggaaagcttcaattgtggagaaaatggcgccatctttttttcagctctgagggggactttgcaagccttgatttggaagtactgtaggggtgccacttccttttttttttgagggtcctacaggttggccaccacttgatggaccctttgcttatagttccacatgtgagctttgttgtcacaggatcaatgtgtagttgttgctgtttactctcacacaagcataaaaataaataaatgtgctagtttgttacctttcatg

SEQ ID NO: 95886 - DNA, 1523 bp, Zea Mays
aaagcagaaatcattcacgcatcggtccaccgagccacaccacaccaccgtctcgcggagaaactcctccaaaacccccaaaccctttcaatcggcggcaatggcggcgccggtggccgacgatgcctcggcatccccaggctacgtcctccgctccacacttgaggggcaccgccgcgccgtatcaacagttaagttctccccggatggccgccttctcgcctccgcctccgccgacaagcttcttcgcgtgtggtcttcctccgatctcacccccgttgcggagctcgagggccatggagagggtgtctcagacctctctttctcccccgacggccgcctccttgcctccgcctccgatgatcgcaccgtccgcatctgggacctcgccgtcggcggaggggcccgcctcgtcaagacgctcacgggccacaccaactacgccttctgcgtctccttcagcccccatggcaacgtcctcgcctccgggtcctttgacgagacggtgcgcgtgtgggaggtcaggtccggtaagtgcctccgcgtgctgccggcccattctgaacccgtcaccgccgtggacttcgatcgcgagggcgacatgattgtgtcagggagctacgacgggctctgccgcgtctgggactcggccaccggtcactgcgtcaaaaccctcatcgacgacgagagcccaccagtgtcctttgccaagttctcccccaatggcaagtttatcctcgcggcaacgcttgacagcaccttgaggctttggaatttctcagctggaaagtttctgaagacatataccggacatgttaacacaaagtactgcatcccagcggcgttttctatcacgaatagcaagtatattgtcagtggctccgaggacaaatgtgtctacctatgggacctccagtcaagaagaatagtgcagaaactggaaggccatactgatactgtcattgcggtctcatgtcatcccaaggaaaacatgatcgcatccggggcgcttgacaatgacaagaccgtgaaagtttgggtccaaaaggaagaagattgatgagcggcctggttacgctcttatctacattggctgtcatgtggactgactaatggtaagcaaaatatgcagcttcccaagcaactaaagtttgctgcagtggagaatgtgatgctcctggcatgtgtaactgagtgagtgctatattgtctattcagcagctcggcgatgatattagtgaactcaagtgttctgtagagctattcctgggaggctgggatcatgtaagaaagactcaacacaacaatgcttgaacttcatttgttgtgtttctgattccctaatctttgatgcggagctgtttttgttattatatccatattagctcaatattttgaagtctgtacgctgggttacaggttcaattgctggtcatagatgctgaagtatattagctgaccctgtgtcatggttcattgatttattttttttaagttgttgcacatagaaggaagaaaaaaaa

SEQ ID NO: 95887 - DNA, 1002 bp, Zea Mays
acaacatcaggtgttgcaaaccacaacggggacaagagcagcacacaagcctgacgatgaccgcatcaggatacttctagtactcatcaccatcatcaccttcctcaccctcatcaaactcagcaccaacctcctcgtagtccttctcgagcgctgccagatcctcacgggcctcagagaactcgccctcctccataccctcaccgacataccagtgcacgaaggcacgcttggcgtacatgaggtcgaacttgtggtcgatgcgggagaacacctccacaacactggtggagttggagatcatgcacacagcgcgctgcaccttggccaggtcaccaccaggcaccacacttggaggctggtagttaatgccgcacttaaagccagttgggcaccagtccacaaactggatggtgcgcttggtcttgatggtggccacagcagcattcacatccttggggaccacatcaccacggtacatgaggcagcaggccatgtacttaccatggcggggatcgcacttggccatcatggaggatggctcgaaggcgctgttggtgatctcggccacagacagctgctcgtggtaggccttctcagcagagatgactggagcataggaggaaagcatgaagtggatcctcgggtagggcaccaagttggtctggaactcattcacatccacgttaagagcaccatcgaacctcagggaggcagtcagggatgagatgacctgggacacaagcctgttgaggttggtggacaggacactgttgtatggctcaaccactgaggtcgaaacttggggggatgggtacacagtgaaaccaagcttagacttcttgccgtagtcaacagacagacgctccaggaggagggaaccaaggccagagcctgttcctccgccaacagcgttgaagacgaggaagccctggagaccagtgcagttgtcggcaagcttcctgatgcgatcaaggcacaggtcaacaatctccttgccaa

SEQ ID NO: 95888 - DNA, 508 bp, Zea Mays
ctcgtcaccctcgtcgccatcctcgccctcatcgaactcagcaccgacctcctcgtagtccttctcgagcgccgccaggtcctcacgggcctcagagaactcaccttcctccataccctcaccgacgtaccagtgcacgaaggcacgcttggcgtacatgaggtcgaacttgtggtcgatgcgggagaacacctccacaacactggtggagttggagatcatgcacacggcacgctgcaccttggccaggtcgccaccaggcacaacgctaggaggctggtagttgatgccgcacttgaagccagtcgggcaccaatccacgaactggatggtgcgtttggtcttgatggtggccacagcagcattcacatccttggggaccacatcaccacggtacatgaggcagcaggccatgtacttgccatggcgtgggtcgcacttggccatcatggaagatggctcgaaggcactgttggtgatctcagccacagagagctgctcgtggtag

SEQ ID NO: 95889 - DNA, 2379 bp, Zea Mays
ggaagcgcaatcacaggcgttggcgactcaaactcgcttgcttcaacagatctgcgatctccttgatgctcaggatcgccattgggcagtgctcgaacagacagtgtccaatgacgtcacccccatcgaccccgacgaggtgctcgacaaccaccgcgtcggcgagctcatcgccaccttcacgtctgcggccgatgctgccttctccagcaccgccgacgtcgagtgtggtgcggtccgtagctacgcggctaccaacaccgagatcgacgccgtggaggctgctgcggcaattcgcgtcagcgcgctggagtcgtggcgtccgcgagtcgagtcccacgcatcggtcaacctcttcgacagcggcgacgactccaacgagctgcgctacgaggagcccgtcaccgccgacaactggggcggactcttcgatggcgatggcgctgccaacgcggagatcgccgacgactgggacaaaccctccaccgcttccaccgacgagcccagcctcgtccacgtgctccgccacggccctccgctgctcgtcgagagccgcctccatgcactccgcgtggcgcaggagctgggcgcccgtccacgtgctggtgggcgagctcgtgtgcttaccggagaagatgatggcgaccaccagccccgtgacctcgggctcggtcgtgccacgctcgtccctgtacctggcctccatcaggatctgcagcacgtcgtcgtccccggctcggatggaggagcgcctacgcgactggacgacctcggcgaagatactctcttcgatggcactgacatcaccaagctgcctaccacctgttcgacttcggggctcacagccgaactcgccatggcacactacggctcgcatctacctagtgataagggaggttctgttgcgttgtggcagtcggcgcgatcgctggcgctcgcgtgccagcaggcgtcctctacgcgcggcacgccggccatggccagcatggggaagatgagcgtcggggacctcacggaggctgacctcaaggggaagcgcgtcttcatgtgcgccgagatccacgagccacccgacgagaaccagaacagcaccaacgacatcctctccacctcgtgcgacactgccgtgcacgtcgtgaagcggtgccaacgcctgtttccgctcgcggactcgaccggcgcgttcgacgcggccgtggcggcgcgagtaacccagatggtcgtgccgtcgccagccaggaacgcaacgcccacaagctcctcaccggagagcacgacgtgctggttctcgtgcgacaacaagagcagcaagcagctgcagctgcagcgtggcgggccatcgttggccgagcgacagcagccaagggcgatgctagcatgccgagcgatcacggaaagggtgaagcggcccaaagaagaggagcaggcgacatcagtgccagaggtggcagtcgtcgccgacgtcaagggcaaggagtacaactcggtggagaggttgaccagggtgaactgccgttctgatttcatcatctggaggagtctgttcgacgcgtgctgcaggctgtgcaagttgtttaactgccaggagctcaagctcacagatagccggtctgcattgaccttgattgatgctcaagtggtgtttgagaaaatgcagcaaagtgctacctcggttagtgtcccgcaggatgccttcaacatgttctgcagcaagactagttctagcaagcaggtggccagagccatcttcatcaatcctgagcatgatctgtaccccgagatcttccacctagagcagctcatctcagggaaggaggacacaactaacaacttctctcgtggctactacactattggaaagggaatggtgctggtagctaacaacttgggtgacgaccttcttgctcgccgcagtgagatcaagcaaccatggcctccacctcaggagttggcgtgcttgggtttgaacatcatggttgtcttggtgttccttgctaccagtgacctacatgcagtgacctacatatatgctcagtctttatttgggatcctggtggtgttgcgaacagcagcttgggggcaagccgcacctcaaggagagggaaatgtcaggtacccagcccatatggtatttgccggcccagttagctgacaatatataaggagcagcaacaattaaagatggatatgcaaaaacaatagaaccgttcttcttcttcgtcaagcatcgttgttctctactaatgtcttcgtcttagttctatactgttgtcttcctcatccatttctgcttcctctgctgtaactgctactagttcttagttgaatcaatacatatcgtcagtaggtcgctgacacaaaccctatgttatgggtaaa

SEQ ID NO: 95890 - DNA, 2204 bp, Zea Mays
gtctggctccccgtgaccgatctcgtaatctcatccgcacccgcctggccgccttgcctagccttgcctgctctcctcatgccctggccgccgcctataaaagagcgaggcggaggggcaggcgccggccgttcttctctctccttcttcctcggtcctctcctctccgcatttcgggcggccacttgtggcggcgtagctagcgtactacagctccctgcatggtgatggaggggcgcacgggctcactctacggccgcctcaacaagagcagcacgcgggggttcctcgcctacaccgccgccggggctgcctgcgcggctgtcctcgcctgcttcgtgctctccgccgcggactcgccggcatctgcggcgcgcaacgatggcgagcgcctccgcctgtcctcgcgctcaccgcgcgtctggcccgacctcgcgttcaactggcgggtggtggtcgccaccgtcgtcgggttcctcggttccgcgtttggcaccgtcggcggcgtcggcggaggcgggatcttcgtgcccatgctcaacctcgtcgtcggcttcgacaccaaatccgccgccgcgctctccaaatgcatgatcatgggggcctcggcgtcatcagtttggtacaacctccaggtgtcgcacccgaccaaggaggcgcccgtcatcgactacaagctcgcgttgctcttccagcccatgcttatgctcggcataaccatcggcgtagagctcagcgtcatcttcccatactggctaatcactgtcctcattataatcctcttcgtaggcacctcgtcgagatccttctacaagggcattctgatgtggagggaggagtccaggattctgatggagacacgcgggcgagaagagcaatccaagtctacctgcgctgcaagtgatgtggtcattgatcccagttatggggagcccctcctgactcaacctcagcccaagaagtctgcatgggagactttcatgttcaatctgaggtggaagaatatccttgtgttaatgtctgtctggtcattgttcttggtgctgcaagttctcaagaataattcaaaatcatgcagctctttctactgggtgataaacgttctacaggttccagttgcggtaagtgtgttcttgtgggaggccatgcagttatgtagggagagtcatgcacgacgtatgaatgggaacctggaatgtgtgtgtgaggcctctattgagtggtcaccagcacaactgatcttttgtgccttttgtggccttctcggtgggactgttggtggccttcttggatctggtggtgggttcatccttggcccacttcttcttgagcttgggtgcataccgcaggtggcaagtgcaacagcaacattcgtgatgatgttctcctcctccctctctgtggtggagttttacttcctgcacagattccccctgccttttgctggctacctcatcttcatttccatattggctggattctggggccagtgtttggttaggaagatcgtgcatgtgctcaagagagcatcgcttattgtcttcatcctctcctctgttatcttcgtcagtgctcttacgatgggtgtcgttggaacccagaagagcatttcgatgatcaacaatcacgaatatatggggttcctcaacttctgcgagtaactcaaacaccatcagactgtcgatccgtccgggagaatccaggccaatgcctaattgacctcatctccctcaaaatctagaagaataaagtcgccgagtatgtgcacaagttagctcctcgccaacatgtgcgcatttagaccgacagagtcgctgtagtgaattcagctcgtgttagctcctggctaacgagctgaccatacggctttagttttgtgaagtgggcgcgatttcgtcatgtcatgcatgtgttagctcctggctaacctgcaaatgcgtgtgttggtgcaggtttttgtcacgtctgcgtcagctcctggctgaccagcagttgtttgtcgttcattctctgcgtcagctcctggctgaccagcagttatttgttgttcattcttgcgctagcaccaggctaggctgcaaaactgcaaatatttgttgcatggaacattgtaaatatcagtcaattcccattctgtttgtgcaagccgagtgcgtttcaagccgtatttccgtgaaaatcagaacatgttcgctgcggcttcc

SEQ ID NO: 95891 - DNA, 1906 bp, Zea Mays
gtctggctccccgtgaccgatctcgtaatctcatccgcacccgcctggccgccttgcctagccttgcctgctctcctcatgccctggccgccgcctataaaagagcgaggcggaggggcaggcgccggccgttcttctctctccttcttcctcggtcctctcctctccgcatttcgggcggccacttgtggcggcgtagctagcgtactacagctccctgcatggtgatggaggggcgcacgggctcactctacggccgcctcaacaagagcagcacgcgggggttcctcgcctacaccgccgccggggctgcctgcgcggctgtcctcgcctgcttcgtgctctccgccgcggactcgccggcatctgcggcgcgcaacgatggcgagcgcctccgcctgtcctcgcgctcaccgcgcgtctggcccgacctcgcgttcaactggcgggtggtggtcgccaccgtcgtcgggttcctcggttccgcgtttggcaccgtcggcggcgtcggcggaggcgggatcttcgtgcccatgctcaacctcgtcgtcggcttcgacaccaaatccgccgccgcgctctccaaatgcatgatcatgggggcctcggcgtcatcagtttggtacaacctccaggtgtcgcacccgaccaaggaggcgcccgtcatcgactacaagctcgcgttgctcttccagcccatgcttatgctcggcataaccatcggcgtagagctcagcgtcatcttcccatactggctaatcactgtcctcattataatcctcttcgcacctcgtcgagatccttctacaagggcattctgatgtggagggaggagtccaggattctgatggagacacgcgggcgagaagagcaatccaagtctacctgcgctgcaagtgatgtggtcattgatcccagttatggggagcccctcctgactcaacctcagcccaagaagtctgcatgggagactttcatgttcaatctgaggtggaagaatatccttgtgttaatgtctgtctggtcattgttcttggtgctgcaagttctcaagaataattcaaaatcatgcagctctttctactgggtgataaacgttctacaggttccagttgcggtaagtgtgttcttgtgggaggccatgcagttatgtagggagagtcatgcacgacgtatgaatgggaacctggaatgtgtgtgtgaggcctctattgagtggtcaccagcacaactgatcttttgtgccttttgtggccttctcggtgggactgttggtggccttcttggatctggtggtgggttcatccttggcccacttcttcttgagcttgggtgcataccgcagggggctgagaagaagagcacagtcggttggggaaaggccggcgtgcgcgccatctgggagaagagtgctcggtggcccagcaacaacgacgtgcaaaagaagggcaccagggtaggcgatgggggccgccatggagggagcaccacagggggcagcgtgctgggggaggccggcggtgggaggcaccgacgggaaggggggcgtccagtgcaaagcactaggcgcgcggtagcgcgggtcggcggcaggctggcggggaagacgccagggagtggagggggctcatcggtggcagcaggccaaggcggcggtgatgacgcgagcacggcgggatccgacggcgttgatggcgtggactcgctggtgatgggtggaatccggcgggacgacgcggatccggacggcggcgggaaggcacggggcaggggtggggcgcacgtggcacggggcggccgccctaggagcaaaaaccagagcgtaaaatgcttcccgcacctgagcgggcatgagaaatttatcgatttctcgcccttttcgctcgagaaattgaaccctggttga

SEQ ID NO: 95892 - DNA, 1770 bp, Zea Mays
cgcttcctccctcagacccaccacactgcttcagtgcttcagctcatcgtgtgccgagaatcgcaaagttgtttttcctttctcatggagcggcggccgggcgcttgctccgtcgaaggaccacagcaatccgtgcccactgcccccctcccctgatcgtgcaaggctcatgtcgttttcgcaatgccagctctcgtgtctgcggcaccaccagtccaccacctcagctttcgctccggccggcttctctctcactctctctctctcaacttcagcttttgagctcgctgctggctgctgccgaagcaatggccggcggggggggcctttatggcctcagcgcattcaatgacctgatccacggttgtacactgctgtacatcacctcctgcccggctgcccccccctctatctctctccctcgctttcttctctgaaccgacactctctctctcgtggtcgcggagtacgtacgtacagtacgtgctctactcgtattgattctgaacaaccacaggcacaaggaacccctgcccatgtgaacagtgaccatgttggtggcgctgctgtccgtccatcctctgtgatcgatataaaccgggcaccctacctactgttgccgacctcatttcagacagtggctagctagctaggcgacgttcagtgaagctccgagccgagctctcatggaactccagctctaccactccaccacaaccctcctcctgccgctgctgctgcttcttcttctcctgctaccctcttcttcttcctcctcctctcacggcctgcgctctgccgacggtaaaaaaaaacatctttcgttcgcctgcctaaaaacctctagtagtcccactcctatcccctcacctctatgccttcgattcgtagacgttgtttacgcaagtgcgccgctttcttcttgattattgcaggtagtagagcgccgcattaccggctcaaggatccgcgtccaccaaaggtcagtgccgtcatctcgagtccatctccatctctctctctctctgtctctgtctctgtctctgtctctgtctctgtctctgtctctcaaccccgccaaccaattgcaattgcttgtgctgttgggcaaatgccgggtgcagcagatcggcgacggcgagggggcggcgacggcggagtcgctgatcgggtcgaggccgccgcggtgcgacggcaagtgcgcgccgtgcgggcggtgcgaggcggtgcaggtgccggtggcgccgcgggccgacagccgcgggggcgagccccggcgccgcggagggctgttcggcagcgccgaggagagctacaccgactacaagcctctcaactggaggtgccgctgcgcggaccggcgagcactggacccgtgatcgatccggatgctgcgattgcgatcccctcgtcaggtctccagctgctgctgctgatgagcccattggtgtactgtacttacgtgttttttcttttctttggaggaactgttgctggtgaatggtcgatcgatccatggccaggaggattgtttggcaaacgttctcgtctctattctgtagctaggcttttggatttttggtagtggtaggcagctaggcataggcttcggcaatttgtctggtgatcgataatcacttgaaaaacctgctgcttagactgcttgctttgacattaatctgggtgtggctataggttctacagtatttcaggtcaaccgaatatgttactctctgtctcactcactattttaaaatacactttataaat

SEQ ID NO: 95893 - DNA, 1625 bp, Zea Mays
cgcttcctccctcagacccaccacactgcttcagtgcttcagctcatcgtgtgccgagaatcgcaaagttgtttttcctttctcatggagcggcggccgggcgcttgctccgtcgaaggaccacagcaatccgtgcccactgcccccctcccctgatcgtgcaaggctcatgtcgttttcgcaatgccagctctcgtgtctgcggcaccaccagtccaccacctcagctttcgctccggccggcttctctctcactctctctctctcaacttcagcttttgagctcgctgctggctgctgccgaagcaatggccggcggggggggcctttatggcctcagcgcattcaatgacctgatccacggttgtacactgctgtacatcacctcctgcccggctgcccccccctctatctctctccctcgctttcttctctgaaccgacactctctctctcgtggtcgcggagtacgtacgtacagtacgtgctctactcgtattgattctgaacaaccacaggcacaaggaacccctgcccatgtgaacagtgaccatgttggtggcgctgctgtccgtccatcctctgtgatcgatataaaccgggcaccctacctactgttgccgacctcatttcagacagtggctagctagctaggcgacgttcagtgaagctccgagccgagctctcatggaactccagctctaccactccaccacaaccctcctcctgccgctgctgctgcttcttcttctcctgctaccctcttcttcttcctcctcctctcacggcctgcgctctgccgacggtaaaaaaaaacatctttcgttcgcctgcctaaaaacctctagtagtcccactcctatcccctcacctctatgccttcgattcgtagacgttgtttacgcaagtgcgccgctttcttcttgattattgcaggtagtagagcgccgcattaccggctcaaggatccgcgtccaccaaagatcggcgacggcgagggggcggcgacggcggagtcgctgatcgggtcgaggccgccgcggtgcgacggcaagtgcgcgccgtgcgggcggtgcgaggcggtgcaggtgccggtggcgccgcgggccgacagccgcgggggcgagccccggcgccgcggagggctgttcggcagcgccgaggagagctacaccgactacaagcctctcaactggaggtgccgctgcgcggaccggcgagcactggacccgtgatcgatccggatgctgcgattgcgatcccctcgtcaggtctccagctgctgctgctgatgagcccattggtgtactgtacttacgtgttttttcttttctttggaggaactgttgctggtgaatggtcgatcgatccatggccaggaggattgtttggcaaacgttctcgtctctattctgtagctaggcttttggatttttggtagtggtaggcagctaggcataggcttcggcaatttgtctggtgatcgataatcacttgaaaaacctgctgcttagactgcttgctttgacattaatctgggtgtggctataggttctacagtatttcaggtcaaccgaatatgttactctctgtctcactcactattttaaaatacactttataaat

SEQ ID NO: 95894 - DNA, 1497 bp, Zea Mays
cgcttcctccctcagacccaccacactgcttcagtgcttcagctcatcgtgtgccgagaatcgcaaagttgtttttcctttctcatggagcggcggccgggcgcttgctccgtcgaaggaccacagcaatccgtgcccactgcccccctcccctgatcgtgcaaggctcatgtcgttttcgcaatgccagctctcgtgtctgcggcaccaccagtccaccacctcagctttcgctccggccggcttctctctcactctctctctctcaacttcagcttttgagctcgctgctggctgctgccgaagcaatggccggcggggggggcctttatggcctcagcgcattcaatgacctgatccacggttgtacactgctgtacatcacctcctgcccggctgcccccccctctatctctctccctcgctttcttctctgaaccgacactctctctctcgtggtcgcggagtacgtacgtacagtacgtgctctactcgtattgattctgaacaaccacaggcacaaggaacccctgcccatgtgaacagtgaccatgttggtggcgctgctgtccgtccatcctctgtgatcgatataaaccgggcaccctacctactgttgccgacctcatttcagacagtggctagctagctaggcgacgttcagtgaagctccgagccgagctctcatggaactccagctctaccactccaccacaaccctcctcctgccgctgctgctgcttcttcttctcctgctaccctcttcttcttcctcctcctctcacggcctgcgctctgccgacggtagtagagcgccgcattaccggctcaaggatccgcgtccaccaaagcagatcggcgacggcgagggggcggcgacggcggagtcgctgatcgggtcgaggccgccgcggtgcgacggcaagtgcgcgccgtgcgggcggtgcgaggcggtgcaggtgccggtggcgccgcgggccgacagccgcgggggcgagccccggcgccgcggagggctgttcggcagcgccgaggagagctacaccgactacaagcctctcaactggaggtgccgctgcgcggaccggcgagcactggacccgtgatcgatccggatgctgcgattgcgatcccctcgtcaggtctccagctgctgctgctgatgagcccattggtgtactgtacttacgtgttttttcttttctttggaggaactgttgctggtgaatggtcgatcgatccatggccaggaggattgtttggcaaacgttctcgtctctattctgtagctaggcttttggatttttggtagtggtaggcagctaggcataggcttcggcaatttgtctggtgatcgataatcacttgaaaaacctgctgcttagactgcttgctttgacattaatctgggtgtggctataggttctacagtatttcaggtcaaccgaatatgttactctctgtctcactcactattttaaaatacactttataaat

SEQ ID NO: 95895 - DNA, 1494 bp, Zea Mays
cgcttcctccctcagacccaccacactgcttcagtgcttcagctcatcgtgtgccgagaatcgcaaagttgtttttcctttctcatggagcggcggccgggcgcttgctccgtcgaaggaccacagcaatccgtgcccactgcccccctcccctgatcgtgcaaggctcatgtcgttttcgcaatgccagctctcgtgtctgcggcaccaccagtccaccacctcagctttcgctccggccggcttctctctcactctctctctctcaacttcagcttttgagctcgctgctggctgctgccgaagcaatggccggcggggggggcctttatggcctcagcgcattcaatgacctgatccacggttgtacactgctgtacatcacctcctgcccggctgcccccccctctatctctctccctcgctttcttctctgaaccgacactctctctctcgtggtcgcggagtacgtacgtacagtacgtgctctactcgtattgattctgaacaaccacaggcacaaggaacccctgcccatgtgaacagtgaccatgttggtggcgctgctgtccgtccatcctctgtgatcgatataaaccgggcaccctacctactgttgccgacctcatttcagacagtggctagctagctaggcgacgttcagtgaagctccgagccgagctctcatggaactccagctctaccactccaccacaaccctcctcctgccgctgctgctgcttcttcttctcctgctaccctcttcttcttcctcctcctctcacggcctgcgctctgccgacggtagtagagcgccgcattaccggctcaaggatccgcgtccaccaaagatcggcgacggcgagggggcggcgacggcggagtcgctgatcgggtcgaggccgccgcggtgcgacggcaagtgcgcgccgtgcgggcggtgcgaggcggtgcaggtgccggtggcgccgcgggccgacagccgcgggggcgagccccggcgccgcggagggctgttcggcagcgccgaggagagctacaccgactacaagcctctcaactggaggtgccgctgcgcggaccggcgagcactggacccgtgatcgatccggatgctgcgattgcgatcccctcgtcaggtctccagctgctgctgctgatgagcccattggtgtactgtacttacgtgttttttcttttctttggaggaactgttgctggtgaatggtcgatcgatccatggccaggaggattgtttggcaaacgttctcgtctctattctgtagctaggcttttggatttttggtagtggtaggcagctaggcataggcttcggcaatttgtctggtgatcgataatcacttgaaaaacctgctgcttagactgcttgctttgacattaatctgggtgtggctataggttctacagtatttcaggtcaaccgaatatgttactctctgtctcactcactattttaaaatacactttataaat

SEQ ID NO: 95896 - DNA, 1380 bp, Zea Mays
cagtgagcatggtgcgtgtcccgcgggcgacgagcttcaactctacggcggtagggaaggcactcccctcgtcatagacaagggcacactatttagcgccaccacattcggctaccggccgccacgagggcgcctccgtgcagaaaattggcgttttgcggcaaagcacttcatcaagaaacaccctgaagacgtggttgttcactgcagtgggtgcaactcagcagctcgaacctttgatggagttgatgtgatggggagaagattggcagacgaggtggcttctattgttgacagtagaccggagctttgcaagatttcctttgttgcgcattcattgggtggactaattgcaagatatgctattgcattattatatgagagcgagacacaaaaagattctcatgaaaagtttgagaaccatgctgttgactattctagtaaccagcacagcaaagggaaaattgttggtttggagcctattaacttcatcacttttgcaacaccacacctcggtacaatatcacacaaacagataccacttcttcgtggttccaacaaattagaaaagatggcgtatcgtttgtcttggattgctgggagaagtggaaaacatctcttcctgaaagatatggaagatgagaaaccaccacttcttctacagatggttactgattatggtggtctccatttcatgtcagctctccgctctttcaagcggcgtgttgcttactccaatgtttgtaatgactttatcgttggctggaggacatcatcaattcgtcgtcaacacgagcttcctgagccccgaagttttataaacaacaatagatatccacacattgtatatgtggaagggccaaaagttgaggatgttgattttttggatgcgatgatttacgaggcaaaaacgactagtgaaatggaagaggtgatgctcaaaggtctgaatagagtttcatgggaaagggtagatgttagcttcaaaaaaagtagacaaaggattttcgctcatagcactattcaggtcaagacctatttcttgaactccgatggagctgacgtgatcaaccacatgatcgaccattttgtttattaagatgggtgtactaagttggtaccaagttctctttgtcgatcgattctcggccaaagaggaacatgtgggaaatgttcttgttttgaagacaggattagagttatactgaaggagtagaacccactgtaaagtgtaaaggggtatcttatctctacccttcttgataattttgggccgtttaggttcttttcttcccttttcagaattcagaatctcagttgttttgtacccatatactggaccagaatttgttctccaaatacaaagatatttgctgcgta

SEQ ID NO: 95897 - DNA, 1455 bp, Zea Mays
atggtgctgccggcattgcccaacgcccatacagtcctcctcctcttcgcctccatggcgtggtcccaggaggaggcgtctagccgcatagccgagccccacgcatcctcgtacatgacggctcgaacgagtgtggatcgaagagaccgggtgggagcagagcagctggtgagagccacaggagatgatggagcgttctgtgtcaccttctgcatcgtggatgaactaggaatccagggtggattcatttactggagatcacactgccccaagggctatcctgaaagtgctccttcaatctctgcggacataccatatctcccaaaaatacagtggtcaaaaagctcaagatcaaaacatgttctttggcgactccaagcggtgacggttgctgcatcctgttgcatattgacgcatgccagcccgactccttaccagagtgcgagaacaccccagctgcagcggagccttccattccgtgtgcctcagagactggctgcgcttcgtcaccacgaccaggcagtacggccgttcgatgcccctgttcgggaactctgccccttaccgcagcgttcccgtggccgtcaagatcaccggccactaacaccaaacttccaagttttggtcggcgtttacaaggtcaggcaggcgatcgtaaccacccattttaaggtcaccttcgattttgttccatgtcacagagaagggaaaaagaaagaggagactagcagccagctaggatgtgccgtgcccgtgcgtgaaaatgcagcaggcatggaaagccagcaggcggatgactctgactcacatggatctagggcgcctagcatacatactttactgcaggaccgcagagcgctgaatagaagcacctgctgcgcaagcgcaagtccaaaagactcccttgcaagtcttggtctggaccgtggacggcttccagaatccagactccctgcacggcgtgcacgcgcctacataagaaaaaagatccgtggccccagcacccgcggccgagtcagagccccagtcccagagggagggggaaatggcgagcggggacgggaagaagcagagcagacggcagcggcggcggcggcagctgtgggcggcgtgcctcccgcggccggggtgcttcacggtgtccgccgccgacgagggcccgtcggctcacggtgccggcgagggggagagcaagcccaagcccacgcatctggtcgtcacggtcaatgggatcgtcggaaggtgatttacttctggggttctttctgcctttatcctgttttatttgtcctactttccctgcttatcaacgagctggagctcaattcgccaagccagtttgggaaaaaggcacggcacgatgatcgtgggactaactggtgggcagtagccctgaatccagtaggacacgacgcatcactgttaagtaatatgaacacagcagctgtagcctaa

SEQ ID NO: 95898 - DNA, 1263 bp, Zea Mays
ctctcctgcttccggttcagctactgctgctagcgaagtttggccacatctgatgtcaagagcatggcgcatgcacatactttctgcttgcttttacatagcatactatagtttatgcatgctgctcatgtagacatgtgcatctggtgttcggaactttctcaaacggccgtgggtgtttgcaggtgggggcaccaccggaggtgtcggcgaggctgacggagatagcgcaggaggtggaggcgcggcagcgcacggcgctcggcggcctggccgctgcgacggagccggagctggaccagttcatggaggcgtaccacgagatgctggtgaagttcagggaggagctgacgaggccgctgcaggaggcgatggagttcatgcgaagggtggagtcgcagctgaactcgctttccatctccggaaggtcgctgcgcaacatcctttcatctggctcttctgaggaggatcaagaaggtagcggaggagagaccgagctccctgaagttgatgcacatggtgtggaccaagagctgaagcaccatctcctgaagaaatacagtggctatctaagctcgctcaagcaagaactgtcaaagaagaagaagaaagggaagctccccaaggaggctcgccagcagctccttagctggtgggatcagcactacaaatggccttacccctcagagactcagaaggtggcactggctgagtctaccgggcttgacctgaagcagatcaacaactggttcatcaaccagcggaagcggcactggaagccatccgaggagatgcaccacctgatgatggacgggtaccacaccaccaatgccttctacatggacggccacttcatcaacgacggcgggctgtaccggctcggctagccaccggtatctcgcttccatttcacaccccacggcctagctataaagactaatggttccaggtgtctgaagtactgaagacaggggggctagctatctaatgtttgtgccgcacgcatgagctgtaaggaggccatgcttaattattctgttgccgttgctactctatctatatgcgcctatgcctccgtgcatgaactatgctttaggtggttgctgctccacactgtggtggtgtgcttttgcttttgtgtggtcgtattgtatgcgtaacctgacagatggatccctgattgctacatgtttgaataatttgcatgatctagctagtttctgcctaatctaatggtacggctcatgtcttgtcaggtggatt

SEQ ID NO: 95899 - DNA, 1458 bp, Zea Mays
atggaggagatcacccaacactttggagttggcgcaagcagccacggcccatggccacggccagcaccaccatcatcaccaccaccaccacccgtgggcatcctcccctcagcgccgtcgtagcgccgctgccgccgcaaccgccaagcgcaggcctgccgctgaccctgaacacggtggcggccactgggaacagcggcggtagcggcaacccggtgctgcagcttgccaacggtggcggcctcctcgacgcatgcgtcaaggcgaaggagccctcgtcgtcgtctccctacgcaggcgacgtcgaggccatcaaggccaagatcatctcgcacccacactactactcgctcctcactgcctacctcgagtgcaacaaggtgggggcaccaccggaggtgtcggcgaggctgacggagatagcgcaggaggtggaggcgcggcagcgcacggcgctcggcggcctggccgctgcgacggagccggagctggaccagttcatggaggcgtaccacgagatgctggtgaagttcagggaggagctgacgaggccgctgcaggaggcgatggagttcatgcgaagggtggagtcgcagctgaactcgctttccatctccggaaggtcgctgcgcaacatcctttcatctggctcttctgaggaggatcaagaaggtagcggaggagagaccgagctccctgaagttgatgcacatggtgtggaccaagagctgaagcaccatctcctgaagaaatacagtggctatctaagctcgctcaagcaagaactgtcaaagaagaagaagaaagggaagctccccaaggaggctcgccagcagctccttagctggtgggatcagcactacaaatggccttacccctcagagactcagaaggtggcactggctgagtctaccgggcttgacctgaagcagatcaacaactggttcatcaaccagcggaagcggcactggaagccatccgaggagatgcaccacctgatgatggacgggtaccacaccaccaatgccttctacatggacggccacttcatcaacgacggcgggctgtaccggctcggctagccaccggtatctcgcttccatttcacaccccacggcctagctataaagactaatggttccaggtgtctgaagtactgaagacaggggggctagctatctaatgtttgtgccgcacgcatgagctgtaaggaggccatgcttaattattctgttgccgttgctactctatctatatgcgcctatgcctccgtgcatgaactatgctttaggtggttgctgctccacactgtggtggtgtgcttttgcttttgtgtggtcgtattgtatgcgtaacctgacagatggatccctgattgctacatgtttgaataatttgcatgatctagctagtttctgcctaatctaatggtacggctcatgtcttgtcaggtggatt

SEQ ID NO: 95900 - DNA, 136 bp, Zea Mays
cccgcgggtaacccatgggtacccgctaacccgatgggtacgggtttgggcaaaatctcaaacccgtcatgggtacgggttttttaatgggcatagatatttttcacgggtacgggtttgggacggcaaaacccag

SEQ ID NO: 95901 - DNA, 2164 bp, Zea Mays
accagctgatcaacagctagcttcattcctctgcctctctctccctccttcgccaactggccatctctgttgtctctcgctagctagctcgctcgctcgctcgccagtcaccacacacacacacacacactgtgtgtctgtgcctgacgccgccccccagtttcaaacgaacgacccagccagaaacgcgcgcgcgccaaagctacgtgagtgacgtggcagcatggtgagcatgatcgccgacgagaagccgcagccgcagctgctgtccaagaaggccgcctgcaacagccacggccaggactcgtcctacttcctggggtgggaggagtatgagaaaaacccatacgaccccgtcgccaaccccggcggcatcatccagatgggcctcgccgagaaccagctgtccttcgacctgctggaggcgtggctggaggccaacccggacgcgctcggcctccgccggggaggcgcctctgtattccgcgagctcgcgctcttccaggactaccacggcatgccggccttcaagaatgcattggcgaggttcatgtcggagcaacgtgggtaccgggtgaccttcgaccccagcaacatcgtgctcaccgccggagccacctcggccaacgaggccctcatgttctgcctcgccgaccacggagacgcctttctcatccccacgccatactacccagggttcgaccgtgacctcaagtggcgcaccggcgcggagatcgtccccgtgcactgcacgagcggcaacggcttccggctgacgcgcgccgcgctggacgacgcgtaccggcgcgcgcagaagctgcggctgcgcgtcaagggcgtgctcatcaccaacccttccaacccgctgggcaccacgtcgccgcgcgccgacctggagatgctggtggacttcgtggccgccaagggcatccacctggtgagcgacgagatatactcgggcacggtcttcgcggacccgggcttcgtgagcgtcctcgaggtggtggccgcgcgcgccgccacggacgacggcgtcgtcggcgttgggccgctgtcggaccgcgtgcacgtggtgtacagcctgtccaaggacctgggcctcccggggttccgcgtgggcgccatctactcgtccaacgccggcgtggtctccgcggccaccaagatgtcgagcttcggcctggtgtcgtcccagacgcagcacctcctggcgtcgctcctgggcgacagggacttcacgcggaggtacatcgcggagaacacgcggcggatcagggagcggcgcgagcagctggcggagggcctggcggccgtgggcatcgagtgcctggagagcaacgcggggctcttctgctgggtcaacatgcggcgcctgatgcggagccggtcgttcgagggcgagatggagctgtggaagaaggtggtcttcgaggtggggctcaacatctccccgggctcctcctgccactgccgggagcccggctggttccgcgtctgcttcgccaacatgtccgccaagacgctcgacgtcgcgctccagcgcctgggcgccttcgcggaggccgccaccgcggggcgccgcgtgcttgcccccgccaggagcatcagcctcccggtccgcttcagctgggctaaccgcctcaccccgggctccgccgccgaccggaaggccgagcggtagccggtccccgtccgcgccgaccgcacgtgctcagctcagcagcttcacagctcaccaccagtcaccaccaccaccaccaccaccacctggggtggaggcgtggagcaagcaatgttcatagaaaccacggtcacgtactatacaatactactaccgtaccacaccacacggcagcatcattagcagtaggagattagtagtaatcattaattccttattgggttcttgtaatttcgtatataccacgccgccatttttccttggggccaggccagccgataggtgcccgagggccactgcactgcactgctgtattaggtaggagcaggagtggtgggtagcgaatccaccttccagcagcaggcatcacatttgtgtatttttcgactgggtctcccggttgttttgggtcactctgtatcattgttacgacgattgtattactgctcggtaaataaatttcacatctgaaaacgttataaa

SEQ ID NO: 95902 - DNA, 375 bp, Zea Mays
gcgatgacggtggcggctctgcaggcgatggatgcgctgtcgcggtggaggaccatgctgcgggactctctgcggcgaagccaggggaacacggacggcatggtcaccatcctcggctccttcgaccaccgcctctctgcgctcgaggccgcaatgcgccccacccaggtgaggacgcacgcgatccgaatggcgcatgagaatatcgatcggaccatcaaggccgccgacggcatcctctcccagttcgatctcgctcgccggacgtttagccgaaatcagggtgaattggataaagttttcttgtggcatcctgtggatctgagggaatctgaattaatgtgcaaaaaggtcaggtttagatttcggacttaa

SEQ ID NO: 95903 - DNA, 2404 bp, Zea Mays
agtctggaccgagaccccggatcgccacgctccttacgccgccgccgttgcccacgagccgggatgctccgcggcgccatctcccgcctcggtgctcgcctccgcctccacgccgacccctctccggcctctcctcgcctccgcgtcctctccacccgccgcggtaaacgctcctcccccaccctgtcgcccgcggactgcgatgacgagggacccctgcgcggcctcttcgtgctatcccgcgaccccgagtgcccaccgcggctgctggtggtgcagccgcgcctccgccccggaagcctcctcgagtccaagctcgccgaggcactcaacctcgccaactccctcgaggagcgccgcgacggcttctaccacagcgagttcggcgccaagggcgcgccgccgcacctcgtcgtccagaaccccgcctcccgcggtcgctcacacgctgatacatattttgggcctggaactgtggataatgtcaagtgctacctgagtgcaacggaatcagaggaagatgtggatgcagtttttgtcaatgcgattctctctggaatccaacagagaaacttggagtcagagttggcagctctcatgtacatgaagactaggcttgtccgtgtacgtggcccaggtggacgactaacttttggtccaagtggggaggctgaggttgtcagtgcaagagggagaggtagtggggggaggggattcatgagtggtgctggtgaaacagagcttcaactacaacggaggagaatccaagaacgccgtgtgagcttgttagctcaaattgaagatgtacgccgcactagagcgatacaacgttcaagtcggaaaagacatggtggctcgtttggtcaagagcttgtaactgttgcagtcgtcggatatacaaatgctgggaaatctacgcttgtgagtgcactttctgaagctgatttatacagtgatgacaggctgtttgcaacagtagatccccggttacgaagtgtgattcttccatcagggagaaaagcacttcttagtgataccgttggcttcatctcagatttaccagtacagcttgtggaagcatttcatgcgaccctagaagaagttgttgaagcagacatgttagtggtaggttttcttttcttcttgaagtctggagttgagcatgacttatgatgtacttttgatttccttatttagcaacaaagttttcttcagccatctgtgttttagttatcagatgatgttctagttctaagatatgaattgtttagagaacaagagaaaaggactgaggtctcgttttatcttatacgcattagtgcagcatgtgttggattcaagtgcatctaatcttgaagagcatcgatctactgtattgcaagtactgcagcagataggggtttctcaggagaagatcaacaatatgattgaagtttggaacaagattgatcttgtggacgagaatgttaaatctgatgggattgacgatgaagtcttcctgaccgaaggtgaacaggaggatgacatattctctgaagatgatgctccatcagaacaaacatcttttgattctgtagatgtagatgacggagcagattcagaatatttatcagaagaaaattctgaagatagcaatgaactgccatctaaaaagtcatttgctgagccaactgagatgggagcaatgaaagagttgtcatcaaaagaatgttttggagaacttcgtgtcctagatacaaatggacacactttcccacaaccagcttccacttgtcatgtaaaaacttctgctgtgacggggacaggattgcaagagttgttagcattgatagagaggaaactgactgaacaacaaactgtcgtgcaaagaagctatggacctttcgacagaaaatggagacctacctctatggattgtgaaaaggctgcagagccgtaggtatgggattcctccttcccctcttctatatgggattcatccttcccctcttctatatgctgctgagatcagtagcagtaaccagtttctgagtttgcatccctagagatggaaaccacacaatgtgtttgaatatgcgcttgtgcatgatgtatgatgtatcattcaaagagtatcttgatattctttctgcagaacatgaagaaactgtaggaagggaccgtatgagttttgatcaatgtcagtcactttaacagacattttgtactcatgcttcatgttgctagatagcatcttatctttatcttatattctgatgagtatgttggttgctgtagatgtatttatgttgctccttttgtatggccttattttgttcattccctctaatcgattttctgtacctttattttggtcgcatggtggggctaatgatgtctccaacaagaaccagtaaagggtctc

SEQ ID NO: 95904 - DNA, 1957 bp, Zea Mays
agtctggaccgagaccccggatcgccacgctccttacgccgccgccgttgcccacgagccgggatgctccgcggcgccatctcccgcctcggtgctcgcctccgcctccacgccgacccctctccggcctctcctcgcctccgcgtcctctccacccgccgcggtaaacgctcctcccccaccctgtcgcccgcggactgcgatgacgagggacccctgcgcggcctcttcgtgctatcccgcgaccccgagtgcccaccgcggctgctggtggtgcagccgcgcctccgccccggaagcctcctcgagtccaagctcgccgaggcactcaacctcgccaactccctcgaggagcgccgcgacggcttctaccacagcgagttcggcgccaagggcgcgccgccgcacctcgtcgtccagaaccccgcctcccgcggtcgctcacacgctgatacatattttgggcctggaactgtggataatgtcaagtgctacctgagtgcaacggaatcagaggaagatgtggatgcagtttttgtcaatgcgattctctctggaatccaacagagaaacttggaggttgcctggggaaagtcggttttggatcgtgttgggcttataattgaaatattcaatgctcatgctgaaacaaaagaagcgaagttacagtcagagttggcagctctcatgtacatgaagactaggcttgtccgtgtacgtggcccaggtggacgactaacttttggtccaagtggggaggctgaggttgtcagtgcaagagggagaggtagtggggggaggggattcatgagtggtgctggtgaaacagagcttcaactacaacggaggagaatccaagaacgccgtgtgagcttgttagctcaaattgaagatgtacgccgcactagagcgatacaacgttcaagtcggaaaagacatggtggctcgtttggtcaagagcttgtaactgttgcagtcgtcggatatacaaatgctgggaaatctacgcttgtgagtgcactttctgaagctgatttatacagtgatgacaggctgtttgcaacagtagatccccggttacgaagtgtgattcttccatcagggagaaaagcacttcttagtgataccgttggcttcatctcagatttaccagtacagcttgtggaagcatttcatgcgaccctagaagaagttgttgaagcagacatgttagtgcatgtgttggattcaagtgcatctaatcttgaagagcatcgatctactgtattgcaagtactgcagcagataggggtttctcaggagaagatcaacaatatgattgaagtttggaacaagattgatcttgtggacgagaatgttaaatctgatgggattgacgatgaagtcttcctgaccgaaggtgaacaggaggatgacatattctctgaagatgatgctccatcagaacaaacatcttttgattctgtagatgtagatgacggagcagattcagaatatttatcagaagaaaattctgaagatagcaatgaactgccatctaaaaagtcatttgctgagccaactgagatgggagcaatgaaagagttgtcatcaaaagaatgttttggagaacttcgtgtcctagatacaaatggacacactttcccacaaccagcttccacttgtcatgtaaaaacttctgctgtgacggggacaggattgcaagagttgttagcattgatagagaggaaactgactgaacaacaaactgtcgtgcaaagaagctatggacctttcgacagaaaatggagacctacctctatggattgtgaaaaggctgcagagccgtagaacatgaagaaactgtaggaagggaccgtatgagttttgatcaatgtcagtcactttaacagacattttgtactcatgcttcatgttgctagatagcatcttatctttatcttatattctgatgagt

SEQ ID NO: 95905 - DNA, 2050 bp, Zea Mays
agtctggaccgagaccccggatcgccacgctccttacgccgccgccgttgcccacgagccgggatgctccgcggcgccatctcccgcctcggtgctcgcctccgcctccacgccgacccctctccggcctctcctcgcctccgcgtcctctccacccgccgcggtaaacgctcctcccccaccctgtcgcccgcggactgcgatgacgagggacccctgcgcggcctcttcgtgctatcccgcgaccccgagtgcccaccgcggctgctggtggtgcagccgcgcctccgccccggaagcctcctcgagtccaagctcgccgaggcactcaacctcgccaactccctcgaggagcgccgcgacggcttctaccacagcgagttcggcgccaagggcgcgccgccgcacctcgtcgtccagaaccccgcctcccgcggtcgctcacacgctgatacatattttgggcctggaactgtggataatgtcaagtgctacctgagtgcaacggaatcagaggaagatgtggatgcagtttttgtcaatgcgattctctctggaatccaacagagaaacttggagtcagagttggcagctctcatgtacatgaagactaggcttgtccgtgtacgtggcccaggtggacgactaacttttggtccaagtggggaggctgaggttgtcagtgcaagagggagaggtagtggggggaggggattcatgagtggtgctggtgaaacagagcttcaactacaacggaggagaatccaagaacgccgtgtgagcttgttagctcaaattgaagatgtacgccgcactagagcgatacaacgttcaagtcggaaaagacatggtggctcgtttggtcaagagcttgtaactgttgcagtcgtcggatatacaaatgctgggaaatctacgcttgtgagtgcactttctgaagctgatttatacagtgatgacaggctgtttgcaacagtagatccccggttacgaagtgtgattcttccatcagggagaaaagcacttcttagtgataccgttggcttcatctcagatttaccagtacagcttgtggaagcatttcatgcgaccctagaagaagttgttgaagcagacatgttagtgcatgtgttggattcaagtgcatctaatcttgaagagcatcgatctactgtattgcaagtactgcagcagataggggtttctcaggagaagatcaacaatatgattgaagtttggaacaagattgatcttgtggacgagaatgttaaatctgatgggattgacgatgaagtcttcctgaccgaaggtgaacaggaggatgacatattctctgaagatgatgctccatcagaacaaacatcttttgattctgtagatgtagatgacggagcagattcagaatatttatcagaagaaaattctgaagatagcaatgaactgccatctaaaaagtcatttgctgagccaactgagatgggagcaatgaaagagttgtcatcaaaagaatgttttggagaacttcgtgtcctagatacaaatggacacactttcccacaaccagcttccacttgtcatgtaaaaacttctgctgtgacggggacaggattgcaagagttgttagcattgatagagaggaaactgactgaacaacaaactgtcgtgcaaagaagctatggacctttcgacagaaaatggagacctacctctatggattgtgaaaaggctgcagagccgtaggtatgggattcctccttcccctcttctatatgggattcatccttcccctcttctatatgctgctgagatcagtagcagtaaccagtttctgagtttgcatccctagagatggaaaccacacaatgtgtttgaatatgcgcttgtgcatgatgtatgatgtatcattcaaagagtatcttgatattctttctgcagaacatgaagaaactgtaggaagggaccgtatgagttttgatcaatgtcagtcactttaacagacattttgtactcatgcttcatgttgctagatagcatcttatctttatcttat

SEQ ID NO: 95906 - DNA, 2138 bp, Zea Mays
agtctggaccgagaccccggatcgccacgctccttacgccgccgccgttgcccacgagccgggatgctccgcggcgccatctcccgcctcggtgctcgcctccgcctccacgccgacccctctccggcctctcctcgcctccgcgtcctctccacccgccgcggtaaacgctcctcccccaccctgtcgcccgcggactgcgatgacgagggacccctgcgcggcctcttcgtgctatcccgcgaccccgagtgcccaccgcggctgctggtggtgcagccgcgcctccgccccggaagcctcctcgagtccaagctcgccgaggcactcaacctcgccaactccctcgaggagcgccgcgacggcttctaccacagcgagttcggcgccaagggcgcgccgccgcacctcgtcgtccagaaccccgcctcccgcggtcgctcacacgctgatacatattttgggcctggaactgtggataatgtcaagtgctacctgagtgcaacggaatcagaggaagatgtggatgcagtttttgtcaatgcgattctctctggaatccaacagagaaacttggaggttgcctggggaaagtcggttttggatcgtgttgggcttataattgaaatattcaatgctcatgctgaaacaaaagaagcgaagttacagtcagagttggcagctctcatgtacatgaagactaggcttgtccgtgtacgtggcccaggtggacgactaacttttggtccaagtggggaggctgaggttgtcagtgcaagagggagaggtagtggggggaggggattcatgagtggtgctggtgaaacagagcttcaactacaacggaggagaatccaagaacgccgtgtgagcttgttagctcaaattgaagatgtacgccgcactagagcgatacaacgttcaagtcggaaaagacatggtggctcgtttggtcaagagcttgtaactgttgcagtcgtcggatatacaaatgctgggaaatctacgcttgtgagtgcactttctgaagctgatttatacagtgatgacaggctgtttgcaacagtagatccccggttacgaagtgtgattcttccatcagggagaaaagcacttcttagtgataccgttggcttcatctcagatttaccagtacagcttgtggaagcatttcatgcgaccctagaagaagttgttgaagcagacatgttagtgcatgtgttggattcaagtgcatctaatcttgaagagcatcgatctactgtattgcaagtactgcagcagataggggtttctcaggagaagatcaacaatatgattgaagtttggaacaagattgatcttgtggacgagaatgttaaatctgatgggattgacgatgaagtcttcctgaccgaaggtgaacaggaggatgacatattctctgaagatgatgctccatcagaacaaacatcttttgattctgtagatgtagatgacggagcagattcagaatatttatcagaagaaaattctgaagatagcaatgaactgccatctaaaaagtcatttgctgagccaactgagatgggagcaatgaaagagttgtcatcaaaagaatgttttggagaacttcgtgtcctagatacaaatggacacactttcccacaaccagcttccacttgtcatgtaaaaacttctgctgtgacggggacaggattgcaagagttgttagcattgatagagaggaaactgactgaacaacaaactgtcgtgcaaagaagctatggacctttcgacagaaaatggagacctacctctatggattgtgaaaaggctgcagagccgtaggtatgggattcctccttcccctcttctatatgggattcatccttcccctcttctatatgctgctgagatcagtagcagtaaccagtttctgagtttgcatccctagagatggaaaccacacaatgtgtttgaatatgcgcttgtgcatgatgtatgatgtatcattcaaagagtatcttgatattctttctgcagaacatgaagaaactgtaggaagggaccgtatgagttttgatcaatgtcagtcactttaacagacattttgtactcatgcttcatgttgctagatagcatcttatctttatctt

SEQ ID NO: 95907 - DNA, 337 bp, Zea Mays
gatatctgggcaatctctcttaagctttggtcggcattgtgcacagcttaatggtgttccaattgaagtcatccagagagctgacattgttttggaggacattcattccaagaaacctaagaggcatgtgattagtgagaaattaacatcaacagacaagagcagtaccaggtgcatgacttggtgtgcaatgatatttaacgacaaaaaatatctattctgatgttacatatagaccggtggaaaatatgttttaactaaatgtaataatctttgttaaatttcaggatgtagagactaaaccgatggccttcgatacacaaaaaggtgacctgaa

SEQ ID NO: 95908 - DNA, 84 bp, Zea Mays
gataatcttatgtaatttatatatacttttctatctctgtcgtaacttgtatttgggaattgccacttttaaaacaaataaaac

SEQ ID NO: 95909 - DNA, 285 bp, Zea Mays
atgaagtttgccaaatccatcttggcgacctccattcatgctagaacaagtgtgcatagttctgtgcttgttttcctcgctgatgcggttgagaagcaaccaagggaggagttccacgtgagatggggaggagcagcccctggtcgagtaggtggcgacagtgcccatgctcacatgtatctgccacgcagccgcgtcgccggtccagccacgttgccggtctcatcacgccgcgttgggcacctgagcgcacaacagcgagtcgcatggcaccggacgacatga

SEQ ID NO: 95910 - DNA, 1447 bp, Zea Mays
gagctcacttcctcatctaatctacatgtctagaattatatgttgatggtttcttatggtattgactggctgtcttgtaattgctggctatagaatgcaggtgatcaacaaacagaaggttcatctcagccagaaaggaattcaatggaggaggggaacagaaagatttcgcccaaaatacaaagcaaggaagattcttctgatggtgatggtactaaagaggactatgttcatatccgggcaaagcgaggtcaagccactaacagccacagcctcgcagaaagactgaggagaaaaaagataagtgagagaatgaagcttcttcaagatcttgttcctggatgcagtaagatcactggcaaggcagtcatgctcgatgagattatcaactatgtacagtcattgcaacgacaagtggagttcttgtcaatgaaactttcaactgttaaccctgaacttggctttgacattgagcagatcatatccaaacaaatgatgctttcacaagacagacatcttgctttctatggagtcgatccaggatcaagcagccttactgctccattcaaccaaggaatcgtgcagccagcaatgatgtgcaacatttctaatcctgccgatgttttgcacggaactattcatgacgtgtcaacaatgaaccagataccttccatgtgggaaggacttcagagcatgcctcagatgaacttcaaccctggtgtggcagctgatagcggcaccaacaactctggctccatgaagatcgaacagtgagctgctgtatagtagcttcgaaattgttgtgtgaatcactgaatcatcgtaaagcgctctcgagatgaagctttttttgtatagctggaggcctgaccatttatgctggattcctgcggttgctcccatactgtgcggcacattgtttatggtatggcatatggatcgtgtacagctggagctgaagaactgattccactgtaaatttctgttgtgctttggcctgcgaaaattgggatggaaacctagtagcatccatgaaattcaaggacagaagcttgttgggattgggacttgggaccacgtgctgaatactgatgggcctaaacgtactagacgagtactaatagaatcgtagttgtaggtaaaaaaatgcagagtttgaaaccagtggttttgtcagaaattccatggagtttgctatatttatttatgatatcaaaacagaaactgaatggccgctggcactgggctgcaagtctccaacctggttctttccttttcctttgttttttttctaaagatttatctgcaaacttcactgcaccggtgttatctttttttttctaattagagtttcgaggttgataaaatgggcagaattctattcagaaaagaagggattatgggatatttgaacgtactaaagctaataattatgtgctaagattag

SEQ ID NO: 95911 - DNA, 1830 bp, Zea Mays
gtaacaaacaccacttagcagcaggctcttgcgtccgtcttgcccttttgcttccgcctcctgcccttaaaatctttcaccaccccctcccgtcgcggtcaaattggcgatcctcgtttggggagggccaagaaaccagagctctctctccgatgcccaccaacgtcaggtgattgaggaacgttggtgtttctggataattggagatgtactcaggccagcaatctgatcaaggtcctagtgcaaatagtggcagagaattctccgaggcaaattggaattcttacacaatgcatcaaaagatagcttatagtggacaacatgggtttggaccttacggcatgggcttagaagataggctggggttgtatcaatcttcatctggtacattaagtcatgacatccaaatgagtgatgagcatagcggaggtgtgaagaagaggaaaggagtggaggactgtgtcacattgttgcctaatgcaggtgatcaacaaacagaaggttcatctcagccagaaaggaattcaatggaggaggggaacagaaagatttcgcccaaaatacaaagcaaggaagattcttctgatggtgatggtactaaagaggactatgttcatatccgggcaaagcgaggtcaagccactaacagccacagcctcgcagaaagactgaggagaaaaaagataagtgagagaatgaagcttcttcaagatcttgttcctggatgcagtaagatcactggcaaggcagtcatgctcgatgagattatcaactatgtacagtcattgcaacgacaagtggagttcttgtcaatgaaactttcaactgttaaccctgaacttggctttgacattgagcagatcatatccaaacaaatgatgctttcacaagacagacatcttgctttctatggagtcgatccaggatcaagcagccttactgctccattcaaccaaggaatcgtgcagccagcaatgatgtgcaacatttctaatcctgccgatgttttgcacggaactattcatgacgtgtcaacaatgaaccagataccttccatgtgggaaggacttcagagcatgcctcagatgaacttcaaccctggtgtggcagctgatagcggcaccaacaactctggctccatgaagatcgaacagtgagctgctgtatagtagcttcgaaattgttgtgtgaatcactgaatcatcgtaaagcgctctcgagatgaagctttttttgtatagctggaggcctgaccatttatgctggattcctgcggttgctcccatactgtgcggcacattgtttatggtatggcatatggatcgtgtacagctggagctgaagaactgattccactgtaaatttctgttgtgctttggcctgcgaaaattgggatggaaacctagtagcatccatgaaattcaaggacagaagcttgttgggattgggacttgggaccacgtgctgaatactgatgggcctaaacgtactagacgagtactaatagaatcgtagttgtaggtaaaaaaatgcagagtttgaaaccagtggttttgtcagaaattccatggagtttgctatatttatttatgatatcaaaacagaaactgaatggccgctggcactgggctgcaagtctccaacctggttctttccttttcctttgttttttttctaaagatttatctgcaaacttcactgcaccggtgttatctttttttttctaattagagtttcgaggttgataaaatgggcagaattctattcagaaaagaagggattatgggatatttgaacgtactaaagctaataattatgtgctaagattag

SEQ ID NO: 95912 - DNA, 124 bp, Zea Mays
gttgtctctaatctagcagcaggtcttgagtttgattcacaattcttgcagatttcattttttagccaaaccacactttttctttgccctccgctaccgccggacagggatgagggcaaaacag

SEQ ID NO: 95913 - DNA, 342 bp, Zea Mays
atgccgccacaccatggcatgccggatctcggcatgcccttggagacatgttgtgtcaataggggaagagaatcaaggatctgtcgtggcgcacccagttctattatgttacaggaagtaattgttatacccccatgggttgcactttccatccgccctcagcctggtgtgtgggaatatgtgagggtcaatgtcatcaagctcgctgttgaggagctgagggcccctgagtacctgcaattcaaggaacaacttatcgaagaagggttgagactgagagaacttaccatcagagagttcttgagatacttgaccaattggaagaagtatgtatgctcctaa

SEQ ID NO: 95914 - DNA, 2446 bp, Zea Mays
gaacctttttaagctctcccatggagtctgacctcatagcttatatagcaaaacaatagaagtagaacaagcacagaactgttaagctccgcaggctgcagctcgtccccaatgtcgtctgcttctcttgcatcttctctcttgtgcagcagcagtgcttctactagtagaagcgcaaccgtgccaagagtaaccaggacccctcttttttccaagaaccagtacaaaccgcctcttcggcctcttaggagtagttcagtagtaaggcgatcgttgcagcaggagcaagaggagagggtgggcccggcgtcctctgtctctgtggcctccggcgagcgacaggaggaggcgacggcgtcgcatcatgttggaggggtggatgaggccaaggcgtcgggccatgttggagaggcagataaaggaggccaaggagaaggcgacggcgaggagaagaggagcacagacgagcagcaggaggtggactggaagtcagacgaggagttcaagaagttcatgggcaatccctccatcgaggccgccatcaagttggagaagaagcgcgccgacaggaagctccgcgagctggaccgcgagcccgacgccaaccccgtcgccggcctgttccggggcttggtgaaggaccagctggcccgcgagaagcagaggctggagctggcggagcagaccttcaaggcactcgacctcaacaagctgaagagctgtttcgggtacgacacgttcttcgccgtggacgtccggaggttcggcgacggcgggatcttcatcgggaacctgcgtaagcccatcgaggaggtgcggcctaagctggagaagaagatctccgaggcggctggaacagaggtcaccctctggttcatggaggagaagaacgacgacatcacaaagcaggtctgcatggttcagcccaaggcagagatcgacgtccagctcgagatcaccaagctgagcacgccgtggggctacctcagcgccgtggcgttggcggtcacgaccttcgggacgatcgcgctcatgagcggattcttcctcaagcccggcgccacgttcgacgactacgtctctgacgtgcttcctctgttcggcggcttcctcacgatactcggcgtctctgagattgcgactaggctgacggcggcgaagtacggtgtgaagctgagcccgtcattcctcgtgccgtccaactggacggggtgcctcggcgtgataaacaactacgagtcgttgctgcccaacaagaaggccctgttcgacataccagtcgcgcgcacggccagcgcgtacgtcacgtcggtggtgcttgccgtctcggcgttcatcgtcgacggcagcttcaacggcggcgagaacgccctgttcgtgcggccggagttcttctacaacaacccgctgctgtcgttcgtgcagctggtgatcgggccctacgcagacgagctcgggaacgtgctcccgaacgcggtggagggcgtgggcgtgcccgtggacccgctggcgttcgcggggctgctgggcatcgtggtgacgtcgctgaacctgctcccgatcgggcggctggagggcgggcgcatcgcgcaggcgctgttcgggcgcggcacggcggcgctgctgtcgttcggcacgtccgtcctgctgggcgcgggcgccatcagcggcagcgtgctgtgcctggcgtggggcctcttcgccaccttcatccgcggcggggaggagatcccggcgcaggacgagatcacgccgctcggcaacgagcgcctcgcgtgggggttcgtgctcgccttggtctgcctcctcacgctcttccccaacggcggcgggacctactctgcctccttcctcggcgacccgttctttagaggcggcatctagacggaatcatctccttccgtgcagtgtgcgtgtgtttataaagtttttagtaggctaataaccacactactaaccacttgagacgccacggcactcgacctgcagtccgccgatcccgaaacagatcgttgatgtcgccagaactgcatatcgatcgccctctgcagggcctacacccactgtacaatcggacaacaataggtcgacgatcctcgccgcaccgcctgtccaggttttccctccctcgccactgttcatgcctgctattcatgatctggcacgcgcgggggagtgcggccagcagcacgcgtgatggcccgtggaagagttatttgctactatgatactcagtttggaatggctaggcattcagtctttttaaaactttggtttggtttatcggttttaaaaaaaactttggttacgataggaaccaatcggttttctagaaaatgaagaactgagaagttcggttccggttttttactttggtttttgtgtaaaaaccgaacaccaaacttatactcaggacaacacatacaataaatttacattatagatt

SEQ ID NO: 95915 - DNA, 1260 bp, Zea Mays
ccccgtcgcctgcccgttcccccgtttctaattttatgaccgtcgaaaaccaaaatttagataggccacccaaatccaggtgcaaatcccaacctccctccctcccaggccccctccccacctccacctccaggcaccactggtcccacctcctcacctgcgaggatgctgctcgtgagtcaggcagcgaacggctccctctccgcgcggcggctgccgtcgaagccgccggggccgtccaccaccaacccctacccgctcttcgccaaccctcgcctcctgcgccgccgcctggcgctctccggcgctggcgccgaccaagccccgcgccgcgccgcgccgaccccagccgccgcgggcgagggcccctccgcctcctccaccgaggacccggtccttgtccgcgtcgccgacgacggcgtgccgctcgagggcgtcatccagattgagaagcccggggatgcggccgccgagtccaagctcgtctcctacgcgaagctgggtcttctggccggcggggacgtgttctgccttctgctgttctctgcgattggaaggttcagccatggcctgcccgtcctcgacgccgagacgttcaagacggccgaccccttcattgctgggtggctgctgagcgcctaccttcttggcggatttggcgatgatgccaaagggcgcaatggcgtcggaagcgcggttatcaccgcagctaaatcatgggctgttgggataccgttgggacttgctatccgagcagtgacgtctggtcatcttccaccaactccttttatcttggtaaccatgggaagtacaggggtcttgttaactgcatggcgtgctttggtatcacaactgttttccaaccagcaaaagcagcaggatgatgtctaccggcgtggaagtccttttgagctttttgagctactcacatcgctggtgcggaggtggtgacatctgaaggctgaagcctatagaaggtaagaagggcattgttccgctctggtatccgcaatcatcaggttcagccatctgtgtctattgtgtaagtacaattttgaaggtgaagaagagcaggctaaaacctagtttggagcatttgccgaacccaaaaaaaatgtttggcaataacacgcccgcgatgttggtttagtatattatattatattcataagatgtactcatattcctgatcttccacttgtaaaattgtatccagcttaacaaatcctaatcgataagaccgttgcctcttgttcaaca

SEQ ID NO: 95916 - DNA, 917 bp, Zea Mays
cgaaaaactacgcgcccaagcagcgccacgcggcctccccgccgcgcaccacgagccactcgctcgctcccccgtcctagtagtggctagtgcgcgcgcaacacacacggacgcgcgcgctccgtactcgggagtcgggcctcgactcggcacgcgtccgcggctccgcgcccaggccagggtgtgttgtgtcttccagtctccacgctcctgagaccacatctctctctccatggcgacggccatctcgttcccgcgcgcgccgctggtcactccccgcgcgtgcaccccccgccggcttgtccacgtgtcggcggcgcgcgcctctcccccgcgcggaggagggcgcgtcggtcgccgctccccgacggtccccgctgtagcgggagcctcctcctcctcctccggcttggctccggacacaagcgtgccggcgtgggacgctctcggcggcgtctccgtcctcgccgcgggaacaggcaacgctgtggcgctgacggacctgtgggactccgccgagggggtggccgtggttgcgctgctgaggcatttcgggtgcttctgctgctgggagctggcctctgttctcaaggacgccatggcggagttcgactcggcgggggctaagctgatcgccatcggcgtcggaaccccggagaaggctcgcatcctcgccgaccggattccgctggcagattccgaaaggtggatggctgaatggaatttttttcttcagtatagtaaatggagaaagtaatgttgacactttgttgataaattgaatggcttgtatatagtcccacagcattacaaatttccctgtcgacagtttgttgacaaactggctgagttgtatagctacacaacattatttctgtttttctaattgttatacacgtgcttataaatttctctga

SEQ ID NO: 95917 - DNA, 1725 bp, Zea Mays
cgaaaaactacgcgcccaagcagcgccacgcggcctccccgccgcgcaccacgagccactcgctcgctcccccgtcctagtagtggctagtgcgcgcgcaacacacacggacgcgcgcgctccgtactcgggagtcgggcctcgactcggcacgcgtccgcggctccgcgcccaggccagggtgtgttgtgtcttccagtctccacgctcctgagaccacatctctctctccatggcgacggccatctcgttcccgcgcgcgccgctggtcactccccgcgcgtgcaccccccgccggcttgtccacgtgtcggcggcgcgcgcctctcccccgcgcggaggagggcgcgtcggtcgccgctccccgacggtccccgctgtagcgggagcctcctcctcctcctccggcttggctccggacacaagcgtgccggcgtgggacgctctcggcggcgtctccgtcctcgccgcgggaacaggcaacgctgtggcgctgacggacctgtgggactccgccgagggggtggccgtggttgcgctgctgaggcatttcgggtgcttctgctgctgggagctggcctctgttctcaaggacgccatggcggagttcgactcggcgggggctaagctgatcgccatcggcgtcggaaccccggagaaggctcgcatcctcgccgaccggctgccgtttcctatggactccttgtacgcggaccccgagcgtaaggcttacagcgtgcttggactgtaccatggtctgggccggacgctcttcagtccagctagtgcaaagatatattcgaggctcgactacatcaagaaggcgacggagaactacacgctggaaggcacgcccgccgacctcaccggcgtcctgcagcagggtggaatgttcgtgttcagagggaaggagttgctgtactcgtggagagaccaaggcacgggtgaccatgctcctctggacgacgtgcacagcgcctgccgcaaaattcccagtcgcttgacctgatggaacggattccggcagcacatgaacccgtcccagcattcaggcgctgctatctaggaaatgccatatcggatagagagaccaaaactgctatacatctgcttccaaattggttcgtcctgaacgtgtaaaatccacacatgacatatgtacacaagatgctttttttcccacagaaaactaagaacagtgtatcccgtcgcgatccagtcctccccttgcacgcgtacctctccacgagccaccaaagcaaactggcaaaaactctagagttcctctccttccaaatggtgcaagagatgagatgcttacgggacaggagccaccagtccagtagcgatgtcgtgttggtcagtagcagatgctgcataccatcgatcctgagcgcgtatgtatatgttccatattctgcagcctagctttaaatctttcaacccacggacgcactgagtctaacatatgacatcatgtatgtcacaagtctgtagcctagctttaaatctttcaacccacggatgcactgatccaggctgacctatttatgaaccagttggatgttgccataaagtttaaaccataccctgtgtataaaactcggtatgatttgtctgttgaatatactggtttcttttgtactatgcgtttatgacacctatatatagatgtcgcctcatcatttatttacatgagtttgcttgctactttgttgtccgaga

SEQ ID NO: 95918 - DNA, 1048 bp, Zea Mays
cgaaaaactacgcgcccaagcagcgccacgcggcctccccgccgcgcaccacgagccactcgctcgctcccccgtcctagtagtggctagtgcgcgcgcaacacacacggacgcgcgcgctccgtactcgggagtcgggcctcgactcggcacgcgtccgcggctccgcgcccaggccagggtgtgttgtgtcttccagtctccacgctcctgagaccacatctctctctccatggcgacggccatctcgttcccgcgcgcgccgctggtcactccccgcgcgtgcaccccccgccggcttgtccacgtgtcggcggcgcgcgcctctcccccgcgcggaggagggcgcgtcggtcgccgctccccgacggtccccgctgtagcgggagcctcctcctcctcctccggcttggctccggacacaagcgtgccggcgtgggacgctctcggcggcgtctccgtcctcgccgcgggaacaggcaacgctgtggcgctgacggacctgtgggactccgccgagggggtggccgtggttgcgctgctgaggcatttcgggtgcttctgctgctgggagctggcctctgttctcaaggacgccatggcggagttcgactcggcgggggctaagctgatcgccatcggcgtcggaaccccggagaaggctcgcatcctcgccgaccggctgccgtttcctatggactccttgtacgcggaccccgagcgtaaggcttacagcgtgcttggactgtaccatggtctgggccggacgctcttcagtccagctagtgcaaagatatattcgaggctcgactacatcaagaaggcgacggagaactacacgctggaaggcacgcccgccgacctcaccggcgtcctgcagcagggtggaatgttcgtgttcagagggaaggagttgctgtactcgtggagagaccaaggcacgggtgaccatgctcctctggacgacgtgcacagcgcctgccgcaaaattcccagtcgcttgacctgatggaacggattccggcagcacatgaacccgtcccagcat

SEQ ID NO: 95919 - DNA, 1182 bp, Zea Mays
atggcccataccatacgcaaggctcatagccacaatctagaaaactattcgttcgttccttcttctgtctactgggcagactctgttcaaagcttgcttcgatgttcatggccaatcaaaggacagggtgtgtgtccagcaagtcattggggagatctactaggaagtcaaggtatggcggcagccatacctagccatatcagatccttcgtacctgcatggctgcatgtgtgtgcctacatgttgcagcaatatatgagattgcttcatctatcttttacaatcgtggaagctagagcaatgcttatgcaacgtttgcaataccagtccaaacttgaaactgagcatctaggtcatcataaggatgaccttggagttcaattacgaggagacaccttgaaagatgctacagaagcattcccattcacgcgatgggaagcagcttctgttatgcccataacagaaattgagattgagaagcatcctatccaagtaactgaagttgcagttgtggacaaatcggtcatcgaagaggagctgcccaagggtcatgctgagacctcaaatgttttgcaagaggcctttgatgatgacatagacgattggttcgaggaggctgatcttgctggccacccaactatccacataggtgacgaggaagacgtgtcttttagtgacttggaagaggatgacgtgaaatgatttatagttgcaattgcaatttgcaaagggagaaatcgacctgtgtattggaaactggacacctctgctgtaaaagaaaatggaggtgaaagttgttcgtagacacctctgctgtgcaagaaaatggagaggtgaaagtttttcgtgaatgggattgggtgtacattgaaaactgagcggtgttgttcgcgaaaagggtgtacattgaaaactgagcggctttgttttgcactcaagctgctagggtgaacgcaatgtgatccactcaagatatgatggggtgctacattttactagctttacagtttgtaatttgattcatactcttgtgtacataagcattcgtgatgttctaaggtcagacaataaagttccatgtgttacaataaaattttttctgttatttggtcaaagaattgcaatataatagtatgttgtattgcagtgtttgatttcaggaataaactagtctagtatctt

SEQ ID NO: 95920 - DNA, 927 bp, Zea Mays
gatgctgagcttctatctaccccacagatcgtggaagctagagcaatgcttatgcaacgtttgcaataccagtccaaacttgaaactgagcatctaggtcatcataaggatgaccttggagttcaattacgaggagacaccttgaaagatgctacagaagcattcccattcacgcgatgggaagcagcttctgttatgcccataacagaaattgagattgagaagcatcctatccaagtaactgaagttgcagttgtggacaaatcggtcatcgaagaggagctgcccaagggtcatgctgagacctcaaatgttttgcaagaggcctttgatgatgacatagacgattggttcgaggaggctgatcttgctggccacccaactatccacataggtgacgaggaagacgtgtcttttagtgacttggaagaggatgacgtgaaatgatttatagttgcaattgcaatttgcaaagggagaaatcgacctgtgtattggaaactggacacctctgctgtaaaagaaaatggaggtgaaagttgttcgtagacacctctgctgtgcaagaaaatggagaggtgaaagtttttcgtgaatgggattgggtgtacattgaaaactgagcggtgttgttcgcgaaaagggtgtacattgaaaactgagcggctttgttttgcactcaagctgctagggtgaacgcaatgtgatccactcaagatatgatggggtgctacattttactagctttacagtttgtaatttgattcatactcttgtgtacataagcattcgtgatgttctaaggtcagacaataaagttccatgtgttacaataaaattttttctgttatttggtcaaagaattgcaatataatagtatgttgtattgcagtgtttgatttcaggaataaactagtctagtatctt

SEQ ID NO: 95921 - DNA, 562 bp, Zea Mays
tcctgtccatttcaattcaagcacgcacccgaggaaaagcgccccattgaacagaagcaaccaacccaggccaacccgaaccccagaccaaactgcccccttccgcctcgccgccggcgatcgcctgagatgtcgtggctcgcccgctctctcgccacatccctcaacatccccgacaactccggcgctgacgatgacccggatgcctcccacaccccttctccctccgcgcgcatcccgccgccgccgccgctccccactcaccctccgcattcgggcgcggcggagggcgtcaaggaggaccttaccgagctctccaaaaccctaacgcgccagttctggggcgtcgccaacttcctcgcgccaccgcccggggagacgttgccgtcaccctcgcactctccccaatcagcggggggtcaatccgccgatgcgaggacaccacccgagatcgccgggatccggaacgacttcgctgagatcggtgggaggttcagaagcgggatctcccggatctcaggtcacaaggccgtctctgggttctctaagatggcctctagtt

SEQ ID NO: 95922 - DNA, 1353 bp, Zea Mays
atggacgtggggaggcgcctttcgctggcccgcgtgccagcagtggccgcgctgatggttatgctgtcgctgagttcgtccttctgcgtgtcgtcgtcggcggcgagggcggtcgccaggcctggcgccgcggagcagctgcagcggcaccccgtggtgctgatcccgggagcgggcggcaaccagctggaggcgcggctgacggagggctacgagccgtccagcctggtgtgccgggtgtggccactcgtgcgcggccgcggtggctggttccgcctctggttcgacccctccgtgcttgtcgcgccgctcaccaggtgcttcgccgagcggatgacgctctcctatgacgccgacgccgacgactaccgcaacgcgcccggcgtcgagaccagggtctccgacttcggctccacctccaccctccgcggaggacctcgaccccaatctcaagtacccaaagcaaccatttccattcgctcagcttattatatatgctacggtgagttccaagtgctcctcacggggtacatgaacactctggcgagcacgctggaggaggccggctacgaggaaggccgcgacctgttcggcgcgccgtacgacttccggtacgggctggccgggccggggcacccgtcgcagcggaccgccgagagcaacctctggctgctgccgacgcccagcgtgttcggcaacaccacgctggtgctgtcgcgggcccacaaccgctcctactccgccaagaacatgacgcagttcctccgggacatcggcttcgaggaaggcgtggagccgtaccgcgcgcggatacggccgctcgtcgaggccctgccggagcccggcgtgcccctgacgtgcctcgtgggcaccggcgtcgacacggtggagagcctcgtgtacggcgaccgcggcttcgacgaggcccccgagaaggtggtctatggcgacggcgacgggacggtgaacctggccagcctcataggcccgatcaaggcgtggtcggactcgccggcgcaggtcgtcgaggtggtggagctgcccaaggtgtcgcattccggcatgctcagcgacaagagcgcgctggagcagatcataaggatcatcgattctatcaacctgaacgccacgagctatcatcattcctcttagaatgttttgctttagtagacaactaacgatgatttcttttcacttaaatcggcgacagcagctagttttttttatttggaaaaaagtttattgttttttctgtaaggattatcgggatttgctttagctggtgcctattagagttctctatgtatttcttaatcgttatgaataaatttttttgggaaaaagtacatttaa

SEQ ID NO: 95923 - DNA, 1857 bp, Zea Mays
cggttttttgtaaaccgtgctccacactccatagcagcggccagtacttttccccaactctgcccagaaatttgaaatccttttcgcttccctcttcacagacctccgacccctgagccccccctcgatggcggatccgccgcctgtgcttactctcctggtgaagaagggcccctgcaaggggaataccctgcagcgctgcgccggcaccgaggcgctccgtgtcggccgcgttgccaagggcaacgacctctccgtgggcgacgcgggcgcgtcgcagaggcatctctccgtcgagttcctcccgccgcctgcggcccggtggaccgtcaccgatctaggctcctcgaacggcaccctcctcaacgctacgcctctcgtggccactatccccgctccgctatccgacggggatctcatcaagatcggggagacaaccgtgctcgccgtctccatatcgaccgatgcaggcccgggaccgggccccgtcgcgacaaggcgttccaggcgaaacgcagcggcggcggcggatgaacagggcccggctgttcctcgcagggctggacggaggaaggctggtgcgacggaagcccccgaagctgggaatgaagtggaggaggaagctgcattgccgactcgccgaggcgggcggaggaagaccgttgagcccgctagggtagagacggaagcggaagatgaagaggaggaagcggcaataccgcgccgtggcaggtcgaggaaggctgcagccacggtcgtccttcctccacagccgcaaaatacgaggtcaacgagagctgctgcaaggaaaggtgacgtattggggtgcgaaaacgatgaggggaaagtgatgaggaccggaaggggacgaggacgggttacaaggtcaagtgcaaggaatgatacaggtgttactcaggaggaagaggagggtgaggtggctgtggccagagatcgggaagggacagctgccgggggcaaggatgaggtggtgccggcggctgggagagttcaagcaaagaggagcagaggaggcagaggccgaggaagggctacgacggcaagtacaaggaaggctgaggatgcggttgctgagaacgatgaaaatgagcaagaggaaagggatatggctgatggcagagaacgaggggggagtccattgagggtgttggccgtgaatgatggttctgaagtggataaggtggcaactgaggacaagttggatggaacttcaaaggcatccatggaagatgagaagatggaggatttgacattgacagagagggcaataaaggggagtgccaatgttaagcatgctcctgctgacaatggtggtgtggaagaagaggaggtgaagaatttgagcaagggagaggaaactgaagtatatcaggaattgagggaaaaggtttcaccagggtcaaagcctgatggtgttggagaagtggaaaagaatgaaaagagggaagctgttggtgccagtggagagagaggccatgttggggtcggggagcccaaaggaagacacagattggagaatatgacactgggggagtggtttgttcagatcgagaaataccttctagcaaagaatgaagaagctgctgaaaaggcgatagctgaagtgcaagagaaacatcggtggttttgtgaacatgttaaaaccctcaagctcaaaaagagtcttgctccttgagattccatggtacattcagctataactaaaacattgtcctgttattacaatattatttattttcatggtttttaagaatcaattgcaattttgcaagtgcccctaatatatttgttatgcatgaaccttgctatactgcaaagaaatattcttgtaagaaa

SEQ ID NO: 95924 - DNA, 2655 bp, Zea Mays
atgcactatgcctccttgctcgctggcttcactgcattgcatgccagccttgctgcaccactagttttgctgagccgtatctgcacgtcaacctggtgccgcgccccacatgttgtgctcccaattgctggttccactgtttgggctgtgcatgagttgaagctcagagctggcactgttgttgtagctggtagagcaagagcaatcgttattgggattggttctaatactgcaatgggaagtatacgtgatgctatgctaagaacagaggatcctcacccctcgatttatatggtgattattctgctcacagttaaaaatctcacaatattacaggaagcaacgccgttgaagaaaaagcttgacgagtttggtacttttttggcaaaggtgatagcaggaatctgcatacttgtttgggttgtaaatatcggacatttccgagatccttctcatggtggctttgttaggggtgccatccactattttaaggtggctgttgctcttgccgttgcggctattccagaaggtctcccagctgtggtaacaacgtgcttagctcttggtaccaagagaatggctcgcttgaacgccattgtcaggtcacttccctctgtcgagacattaggatgcacaacagtcatttgcagtgacaaaactggtacccttacaacaaacatgatgtctgtgtcaaaggtgtgtgttgtgcggtctgtgcaccagagaccaatgactgatgagtactccattagtgggacaacatttgctcctgatggttttatttatgatgctgatgggttgcagttagagtttccccctcaatcaccatgtctcctccatcttgctatgtgttcagctctttgcaacgagtccactctacaatacaatcctgataaaaaatcttatgaaaaaattggagagtccactgaagttgctctgcgtgtgctggtggagaaggttggtcttcctggttttgactcaatgccttcatccctcaacatgctaactaagcacgagcgtgcatcatactgcaaccattattgggaaaaccagtttagaaagatatctgttttagagttctcccgagaccgcaaaatgatgagtgtcctctgcagtagaaaacaccaagaaattatgttttcaaaaggtgcccctgaaagtataatggccagatgcacacatatattgtgcaatgacgatggttcttcagtaccattgactatggacattcgtaacgagttggaagctagatttcaaagttttgcagggaaagacacgctaaggtgcttagcattagcattaaaacggatgccagctggtcaacaaagtatttgttatggtgatgaggccaacctcacatttataggattggttgggatgcttgatccaccaagagaagaagtttgggatgctatccactcttgtatgtctgcagggatccgtgttatagttgttacgggggataacaagtctacagcagaatcgctgtgtcggcaaattggtgcttttgagcacttgaatgacttttcagggtattcctatacagcatcagaatttgaaggattgcctcctttggaaaggacaaacgcattacaaaggatggttctgttttcaagagtggaaccttcccataagaagatgcttgttgaagccttgcaagcacataatgaagtggttgctatgactggagatggtgtcaatgatgcacctgctctaaagaaagcggatataggaatagcaatgggatcaggaactgcagttgctaagagtgcttcagacatggttttggcggatgacaactttgccacgattgttgcagctgttgcggagggaagggccatatataataacaccaagcagtttatccgatacatgatctcatcaaatattggggaggtggtttgtatttttgtggcggcagtgcttgggatgcctgacacacttatacctgtccagctactctgggtgaaccttgttactgatggattacctgcaactgcaattggtttcaataagcctgatggcaacatcatgtcagtcaagcctcgaaaggttaatgaagctgtggttagtggatggctctttttccgttatttggtcattggagcttatgttggtcttgctactatagcgggttttgtttggtggttcgtttattctgataatggccctaaattaccatattctgaattgtgtgtatttactggaactattgttccatggcctgctgtcaactttgattcatgttctacaaggcagacttcatattcttgcagtatatttgaggatcgtcatccatcaactgtttcaatgactgtgcttgttgtcgttgagatgtttaatgccttgaataacctaagtgaaaaccaatctctgcttgtcattcatccatggagtaacctgtggcttgttgggtctattattctgaccatgcttcttcatgtagcagtcctgtacattgaaccactatcagcccttttctctgtctctccattgtcgtgggttgagtggaaaattgttctttatctatccttccctgtaattttgattgatgaggttttgaaattcttctcaaggagaagcccacgaggtcgaagattccctttaaggttgtggagacgtgagatacttccaaaagagtcgagagacaattga

SEQ ID NO: 95925 - DNA, 234 bp, Zea Mays
atggactatctccagtgcttcctcaagaagaaacaatttccaatttcatatatgctttactgttctttttttgatatggaaattcatacccaggttatctttatgatactggcagcaaatgcagctgtgggtgtgattacagaaacgaatgctgaaaaagctcttgaggttctcacttctaaacaatgccctaatgttgtgtttagctctgaggatattgttcctgctgtatga

SEQ ID NO: 95926 - DNA, 107 bp, Zea Mays
agttgtatcttttagagattttctagaaagcaatttggaggctttccatcttgagaagccaagcacgccgtctccgtgggagccaaggccgtcaccaagttcaccag

SEQ ID NO: 95927 - DNA, 1449 bp, Zea Mays
atggacgtgttgccgcctctgcagcacgccctgtcgctgccgaccccgcccagccatgcatttggagtttacaatgtggagacatggtttatccaccggacggcgaggtattatgcacaggctttggagttcttgatgtttcctgtttgtgtaaactcaaacgccgaggattttattgaagcaataaaagggccagatgctattattgttggctatatcagacagtttgtcatcaagcctttgtttggattcctttttggcactcttatggagtactaagctacactgaagaatttgggcttaagagtgaggttttgaaggtgactcttgcaactgacgtcgtgaactgagtgtgaatatctactggatgggcaagcaagtttccaaccccatgccctcccatcgattctgctgcctgatccggctagagtttattaggactcgcaactacctcggagttcactgctgtaaatatgggtaacaccctaccagtgcacgatatgtcggaatccacagcagccataggatctcccaacaaggaggatcttgcaacaatgacattgatcaagaattggatgttggaaattatggtttggcattgttacttctcttactcctgtttcatgtcccaatctgagctgactcgtgttggtaatcatgtaatttttccttcgtgcttctattcttcctatacgctttaggcatggcatgttgtgcactaacattttgattaacaatacaacacatggtcatacatatggtattgttgcactatttttttgttgcaacgcacgggtattcaaccagggcatctcagattgggagtgggaggaggatgaggagatgatttggtgctaccagggacaggccccatctcctagaaatggatcttcctcctttgcatgggcaacttgtgcatcgggctactcttcaccaacagaaaaccatcactgagaaagagcagttagcaagtggtgttgtcgtgttgcgactcaaaagggcttgcctatgggcatccacataggagccatccccaaatgctgactgaccaaatgttcggtatgggagccacaaatagcagcacgatgggaatgcagcagcagcagcaaggggtatacgggaacatgcaggcaggtgcccagaacgtgcaaagtatggcgggccttcagaaccagacccagaatcccaacttcactcagcagattcaacaaaaccaacaatgattcaacactaacggtcatggaggttgaaagatgagcaatatagccatcgttttgctatttgtctgttggtctttactcagcttatccgtgagactgatagtagccccaggttgatagccttcgtttttctgtaaatcaatgtagatgcatcgccattagcgagatgcaggtcaattatatacgttgtaactgtgtttcggatatgtgaatcgtgttacgtgcgttc

SEQ ID NO: 95928 - DNA, 1077 bp, Zea Mays
atgaacctgatccaagctgcagctatgcaaagagtatcccctagatctactactaacaagcgcaagaagagaacatcaccaaaagttggtcgtcttagagcaaactggaatagtggactagaaaagggtttagttgaaattcttcaagaccacaacaatgactgttataagggccaaaatgggtggtcatcggaagcatggaatagaattgtcaagttattccatgagaaattcccttatgtcacatttacaaaatgccaaatccaagataaagagaaagagttaaagagagactacaaggctctaaagaggcaagacaacaaaagtaacgagagacttaagaagtttcggactaaatctttcccactatttgaggctttaggagagctacatgatgggaatattgctgagggaaccatgaattttacttctattgagccttctcgacctccagtcacacaaccttgtcaaggtgctgctacacatccttctcaagctgcttttatgctcacacagccttctcaaccgtctttcacacaaccttctcaacccgctttcacacaaccttctcgaattgcttacacacaaccttctcaagccgctttcgcacagccttctcaagccgctttcgcacaaccttctcaagccgctttcgcacatccttctcaagctacaatcacacaagccatttctaatgaagatgatgacctcagagtattagatccaatagcccctacatcagtgagcaaaagggcaaaaaatgttggtgctggtagttcaaggacaagaattgacaagcgtggacaagatgggaaggtggttgagatgatggaaaggtttctagagatgaaagaaaaacaagatgaggtggagaaaagggcaacaactaatgcaaatgaggatgatttccctattacaacatgcattgctattgtggatggaatggaagagctttctgatgatgagaaggttgatgcttatgatgtgtttaaggatgcccaaaacagggccattttcatgactgccaaagatgctacacgcataaaatggttgaggaagaagattgctagaacatga

SEQ ID NO: 95929 - DNA, 799 bp, Zea Mays
ggataagaaaaaatggatcaactaattaggatgagaagagaagaggaggacgaggagttaatgctctttcttttccctgctctttatttaattagtaatagagggagagagaaaagagcaaggcatgcttctattctatctggcaaggagagacttaatgagattctcgaaggacatgagaagaattgtcttgtcgcattccgtatggagcctagtatattcaaagatatagcatcatttcttagagaagaacacatcctacgtgatacaaggggtgtaactgtggaagaaaaattgggaatgttccttttcatgttgtcccataatgctagttatgaggatttacaacatgaattcaaacatagtggtgaaactatccatcgacacatccagtcatttttccatataatcccatctctcatgtatagatttgtgaagcctgccactggaatttcagttcattggaagattagcacggatgaacggttctttccttacttccagaattgcattggagctattgatggaacacatgttccaattaccatttcagcagaaaagcaagctccctataggaatagaaaaggcacactaagtcaaaatgtaatgttggtttgtgattttgacttgaactttacttttatatcatctggttgggagggatcagctacagatgctagggttctaaggtctgcgctacttggaggattccatgttcccgagggaaagtattatcttgtcgatgggggatatgctaacacaccatcattcattgcaccgtaccgtggtgttcgatact

SEQ ID NO: 95930 - DNA, 80 bp, Zea Mays
gggtggcctcctgacttccttgtctttacaaagatggatgaaagcagcacgaaagggaagccgtaatgttctgttcctgc

SEQ ID NO: 95931 - DNA, 2115 bp, Zea Mays
caagaggacagcaaccggcggccctcgcagccgcgcctcacgcgccacggaatatccctccagttccacggggggccacggcgtcagaactcagaaggccgcagggataagagagagcgggtcccgtccgagccgaggcagcccattcgccgtccgccccgcctcttcctgccgccgagcgccacgaggcccacgcccgcgatggcgactatcacgacgccgctccgctccgctctgttctctccggccgcctcgtccgcgggccgccaccgcgggggccggcgccgcgcgccctcctccgtgcgctgcgacgcctccccgccctcgcacgccgcggccgcctcgctcgacccggacttcgacaagaaggcgttccgccacaacctcacgcgcagcgacaactacaaccgcaaggggttcgggcacaagaaggagacgctcgagctcatgagccaggagtacaccagcaacgtcatcaagacgctcaaggagaacggcaaccagtacacctggggccccgtcaccgtgaagctcgcggaggcctacgggttctgctggggcgtcgagcgcgccgtgcagatcgcgtacgaggcgcgcaagcagttccccgaggagcgcatctggctcaccaacgaaatcatccacaaccccaccgtcaacaagaggttggatgagatgggtgtagaaatcattcctgttgacgcgggtatcaaggatttcaatgtcgtcgagcaaggtgatgttgttgtgttgcctgcatttggagctgctgtggaggaaatgtacacgctaaatgagaagaaggtgcagattgttgatacgacatgcccttgggtttcaaaggtctggaatatggtcgaaaaacacaagaagagtgaatatacttcaattattcatggaaagtattcccatgaagaaactgttgccactgcttcttttgcaggaaagtacatcattgtgaagaatatggcagaggcaacctatgtgtgtgattatatacttggtggccaacttgatgggtctagctcaacaaaagaggagttccttgagaaattcaagaaagctgtttctccagggtttgatcctgatgttcatcttgatatggtgggaattgcaaatcaaacaacaatgcttaaaggagaaactgaagaaattgggaagcttattgaaaagacgatgatgcaaaaatatggagttgaaaatgtaaacgatcacttcatggccttcaatactatttgtgatgccactcaggaaagacaagatgctatgtatcagctggtgaaagagaaagttgaccttattcttgttgttggaggatggaattcaagtaacacctctcatctgcaagaaatcggagaactcagtggaattccatcatactggattgacagtgaacaaaggattggaccaggaaacaggatcagctacaagttaaatcatggtgaactggttgagaaaaataactggttacccgaggggcctattaccattggtgttacttcaggtgcctcaactccagataaggttgttgaggatgctcttcagaaggtatttgagatcaagcgtcaggaaattttgcaggttgcataaattttaagcagagatttggtgaagagctgaatagttttggcttggcaaaggttactagaaacgttgcacaggcaaatgtttgtacagtagctaaggatgtaacgagttgggcacgaatactaccacgagtcactatccttgtgctggaatttacagtacggtggaaactaaaatggtgttatcattggcccgaataacatttgcatcagcctttctaaagtctaactttttgccacttaaattgatgtcagggaagacactcagatgtgtaagttaaagaatgcacagttcctatgtgtaaaaagcttagttccgaggaggagatggcgccccttcctttcccgcctgaccgttcctatcccctgaccctctcctctacccccgacgcctcttcaccttcctccaccaaccccacgccggagaccactccgatcccggcggccaatcacctctccttccccggcgtcggcggggccctctgtttgtggtcggtccaaggcgcagcggtggtgtgacgacagcgca

SEQ ID NO: 95932 - DNA, 390 bp, Zea Mays
atgtccctctcgcacaccattggattggaggagcagcagccatcaacaccgccggctcgcaagttgcaaccaccgaaagcccagccctcgggtacagtacagtacagtacagtcgctgctcacctctccagcaatccgcggaccagtccagccgatccacccggcacctgtcgcaggtggcgccccctctaccagaatgccgacgatttcgtctcctgctcaaaacaaccagtcgggcaggcgttcagtgccacacgggaccttgccactctgggtagtactgccccccgtacacgctctggccaccaaatgtccaaacaggcatgcagcttcctccatgatatttctgtaaacagcaatgcaaatcgctcaacggttcggttctactaa

SEQ ID NO: 95933 - DNA, 1392 bp, Zea Mays
gtttcgttcgatcgatcgatccatgcatcagcatacattgctttcgatcgtactacaagctacgtacctagctatagccagtggaccggcggtacaaccactactgcgaccagatgcagatggtggtgaacttcttcgactcggtgatggggttcggcgcggcgacgccgtacacggcgctggcgcagaaggcaatgtcgcggcacttccggtgcctcaaggacgccatcgcggcgcagctgcgggccacgtgcgagctgctgggcgagaaggacgccggcaccagctcgggcctcaccaagggcgagacgccgcggctgcgcgccatcgaccagagcctccgccagcagcgcgccttccaccacatggggatgatggagcaggaggcatggcggccccagcgcggcctccccgagcgctccgtcaacatcctccgctcatggctcttcgagcacttcctccacccgtacccgagcgacgccgataaacacctgttggcgaggcagaccgggctgtccaggaaccaggtctccaactggttcatcaacgcccgtgtccggctatggaagcccatgatcgaagagatgtatcagcaggagtgcagggagctcgacggctcctcggccggcggcgggggccccgagtccgtcaacgacccctccggcgccgacgactcgcactccccgaccaccaccggcgcagcgcagctcccgcaacagcaacatcacctcggcacggtgcctggggtgatgccccacaagcccgacccgggcgccgccggtccctcggctgcggacgcggcgttcgtcgggatcgaccctgtggagctccttggcggtggcgcggacgacttgtacgggcggttcgagcccggggtgagggtgcgctacgggcccgctgcggcaggcgctgctgccggcgacgtgtcgctgacgctgggcctgcagcacgccggcgccggcaacgccgccgggcccgacagcaccgggcggttctccttgagagactacagcggttgttgatgcttacacatcgcttacatcacctttattcatggctcatgcatgcgcccatcatgcatttggaagagcaaggatcgacgaaagaaagagagagagagaaaagagtaaccagagaagagatagagggcgctagacaaagagagatgagcatctagaaagagaaaaaatgcatggtgcctggaggtgatgaatgggatgggatatatgaatatgagattatcacaaccaccttcgtcgtcttcttcccagatgattcttaatttacttagctagaagattaattccttttgctaggcattgttgttggggggttaaggataattaatttgtatacagcaaaggaagataggaagtgtataattgtttagtc

SEQ ID NO: 95934 - DNA, 3047 bp, Zea Mays
actactatagcctagctagagccagctgcttgcctcgccctcccctttgcgcgtcgtcgcgctcctcgccgtccccctctctcggaatcggaaggcgatcgatcgcacaaggctgcgtctgcgtgctcggccgccgcccgacccgaccggacaaggaggggagggggcaaaaaaaatatatagttagtcacacgcacgcagcacaggagggaggagagggattgagggataaagaaatttcgggagacaaggagagagagacagagatggagaggagcggctggactcggaggcaggcctttcactactcccgcacccagataacgatgtggtagctagttcctcttaggctaaggaaggaggtcgtggccgggatcccgccgatgatgatgacagtggcgccgccggcatgggcgtagcggcgccaccgtacgagaccaccacgtacgtgagccaacgcaccaagatcaacatcgcagcgatctccgccgccgccgccaccagggcggctaccgcggcttctatgtcccactcgcagggattccaccagggcagcgccggcgtctacggctactcctcggatggcttcgaccgcccggacgactccggccaccaggaccatcatcagcagcagcagcacgtggcgcagcagagccgccgcgacaagctgagggtgcaggggttcgacccggccgccggcggcggccacggcctgctccccatcgagggcgacgagcatggcgggcccgggtccatgtacgagcacgcggcggccgcagctggggcctccaacatgctctccgagatgttcaacttccccgcgccgccgtcggggccctccgccaccgagctgctggccagccagatgggcgccaactaccgcttcggggggctacggcagcagcagcagcaggggcccggaggggtggtggctggcttgtccggcgacggcggttggttcgtcggggccggcgcggcgggtcgtgctgctggcttggtcctcggtggtggggccaacatggggtcgttaggtgaaacgtcgtccccgaagcagcagggcagcatggctgggctggccaccgacccggccgccgcgatgcagctcttcctgatgaacccgcagcagcagcagcagtccagatcgtcgccgccgtcgccgtcggacgtccaggtccagcaccacgaggcggcgttccaggcgttcggaaacgccggggccccgtttggcggcggcgccgggaccggcgtcgtggaaggccaggggctgtccctgtcgctgtcgccgtcgctgcagcagctggagatggcgaagcaggccgaggagctgagggtccgggacggcgtgctctacttcaaccgccagcagcagcagcagcagcagcagctgccgatggcattgcacggccaggtcggcgcgctggggcagcagctgcacgtcggctacggccccgccggcgtcgcgggcgtgctgcgcaactccaagtacacccgcgcggcgcaggagctcctcgaggagttctgcagcgtcgggcgcgggcagatcaagggcggcgggcgaggggcctcggcgtctaaccctaacaacaacccgggcaacaagggcggcgcctccagctccggcgccgccgcgcagtccccgtcgtccgcgcccaacaaggagcccccgcagctgtcccccgccgaccggttcgagcagcagcgcaagaaggccaagctcatctccatgctcgacgaggtggaccggcggtacaaccactactgcgaccagatgcagatggtggtgaacttcttcgactcggtgatggggttcggcgcggcgacgccgtacacggcgctggcgcagaaggcaatgtcgcggcacttccggtgcctcaaggacgccatcgcggcgcagctgcgggccacgtgcgagctgctgggcgagaaggacgccggcaccagctcgggcctcaccaagggcgagacgccgcggctgcgcgccatcgaccagagcctccgccagcagcgcgccttccaccacatggggatgatggagcaggaggcatggcggccccagcgcggcctccccgagcgctccgtcaacatcctccgctcatggctcttcgagcacttcctccacccgtacccgagcgacgccgataaacacctgttggcgaggcagaccgggctgtccaggaaccaggtctccaactggttcatcaacgcccgtgtccggctatggaagcccatgatcgaagagatgtatcagcaggagtgcagggagctcgacggctcctcggccggcggcgggggccccgagtccgtcaacgacccctccggcgccgacgactcgcactccccgaccaccaccggcgcagcgcagctcccgcaacagcaacatcacctcggcacggtgcctggggtgatgccccacaagcccgacccgggcgccgccggtccctcggctgcggacgcggcgttcgtcgggatcgaccctgtggagctccttggcggtggcgcggacgacttgtacgggcggttcgagcccggggtgagggtgcgctacgggcccgctgcggcaggcgctgctgccggcgacgtgtcgctgacgctgggcctgcagcacgccggcgccggcaacgccgccgggcccgacagcaccgggcggttctccttgagagactacagcggttgttgatgcttacacatcgcttacatcacctttattcatggctcatgcatgcgcccatcatgcatttggaagagcaaggatcgacgaaagaaagagagagagagaaaagagtaaccagagaagagatagagggcgctagacaaagagagatgagcatctagaaagagaaaaaatgcatggtgcctggaggtgatgaatgggatgggatatatgaatatgagattatcacaaccaccttcgtcgtcttcttcccagatgattcttaatttacttagctagaagattaattccttttgctaggcattgttgttggggggttaaggataattaatttgtatacagcaaaggaagataggaagtgtataattgtttagtc

SEQ ID NO: 95935 - DNA, 177 bp, Zea Mays
atggcgctgaccaacttcatcgtgacggtggctgtggttggcgcgggggtgctcctcttcaccaccgacatccgcaggtccggcgccctcttccgccgcaacgcgcgccagctccagcagtggctccaggaggacacgacctccgccgcgtccaagtggaatgagaggttaacttga

SEQ ID NO: 95936 - DNA, 1141 bp, Zea Mays
cgccatctgccgggctctcttcttaactcgctatcgacaacgcatcgaacagtcccgcgcgcacactcgcacgcactcgacgctcattcactgagccatttactcagatcaccaactccagatctcaatggcgcactcgcgcagccaccaccacctcctcctgctccccgcgcccatggccacggcgtgcttgctcctcgccaccctcctcgcgctctgcgccgcgccggcgccgacccacggcgcgcgcgtcctcatgccgggcggcgcgggcgcggtgaccaaggcgcagcagggtggcaccggcagcggcagcaacgcgacggcggacgagtacctggcgccgcacaaccaggcgcgcgcggcggtgggcgtggccccgctgcggtggaacgcgggcctggcttcggcggccgcggggacggtggcgcagcagcggcggcagggcgggtgcgcgttcgcggacgtgggggccagcccctacggcgcgaaccaggggtgggcgagctaccgcgcgcgccccgccgaggtggtggcgctgtgggtggcggaggggcggtactacacccacgccaacaacacgtgcgccgcggggcggcagtgcggcacgtacacgcaggtggtgtggcgcaacaccgccgaggtcgggtgcgcgcaggccagctgcgccacgggcgccacgctcacgctctgcctgtacaacccgcacggcaacgtgcagggccagagcccctactagctagctgaggtcatcaggtcgtagcgacggagcccaactgccgccgccggcggcagcggagtacgtaggttcatcagtcttctctagttcggtcacggaaaggctgttttgtggtgtgatccggtggtgttcttggtgttgttgacaactgctttggtttggtgtatcagcttttgttgccgggtaaaacgcctgtgagctgtgatgtgatgcttcatcctcgtggactcttctgtggcctgtggatgcgtgttggctctcttgaatcttgattcatcgcatatagtacttaaactttttagaaaaaatgtatagtacaccacatgggatttgctagaaagagtatttagctaagagctctgacgatgttcgctggtttttttttttttttttttttttttt

SEQ ID NO: 95937 - DNA, 1039 bp, Zea Mays
ctctaaagttaacatccacatacttttactgatttatatgtgtgcctatgctgcaacagttttttttgtcaaaaaataatgggtttttacgctggtttatatgtgtgcctatgctgcaacacatccaattctaactaaatatacataaagaatttgctgagtagcagcagcacgcgagcacctcatattttattctcattgtttctacttcgttaattcattgacccatgtctctgtcttggtatattctggagacagatccccacgtccagagttacaagaagatcaagcttggctgtggctgctgctgtgttgcctcctcttgttggaccgaagagagggaggggagaagcagctggtgtgcagacttctactcaggtggtcttttattctctatggggcttctaggatacatcttctccaaaagcaccataagtcttgtcttgggcattacaccagggctagccactctgctacttggcactcagtctgaagttctggaggagcggcagatccagcttcctgcttatcttggctcaggcaggcaaattgaacagggatttgtttggcttccaaatggtttgttggtcctaaaatagtcagaatcacatggcatctgtgctataggtaatctgatcttctaactcaagtttgcattcagtttagactttaggttatgttagttataacaaacttgaaacgacatattaacaaggaaatatcatattaacagttcatgttacatttgcagatatggacctcggtggttttctccacattaggaaagctggaagagccttttgaactcattttttttgctaacagtggtgttatggtgaaacagagttttgtgtgtatgtaccaacagctaaaatgtaaacacgacattatcatagttgagtacaggaataattatctcttatatcttattgcaaaatctgaaacagttctcctgtagatggttatcttgcattttacgctacaattatctcagatcacttgtatcttacaccaatttatgaaatttattgatgcgttt

SEQ ID NO: 95938 - DNA, 213 bp, Zea Mays
aacggaagatgcaagcgcgaaggcatggtggtggacacaggtggccgcgccgagagcaaaggcgccagtccaggtggagacgagccgctatgggtcggagtgtgggactgctgagttgcccttgtacgcgtgcgcccagtagtcatcgaactcgcccattttcatcctccctttctcgttccctgggtgtgcatgttccaagcacaagagcgc

SEQ ID NO: 95939 - DNA, 2855 bp, Zea Mays
agacccctccggtttctctctctaccgggtcgaagtcgaagcccctctcctctctccccgcctcgtcctctcccctacaggatctagggtttgcttcgctcggccttcgtccttcttgggccgagccctaattcttctgtcccgccaccaagcaagccgagcccccggtttggttcgcctccgctgcgccccgcttcctccccgtacggattcttggattctattggcttctatcttcagcatgggtgagccaaacagcaatgataatgcaatggtgcatgacaatgagatgatcgatggcaatggggtgatccatggtagtgagatgattcatggtagtgtgatgatacatggagatgagatgccccatggcaatgagatgatccatggaaatgagatgatccatgggactgagatggttgaaggcagtgagatgatccatggtcatgagatggttcaggttaatgatctcatccacggtaatgagatggttgccgttaacgtcatggttaatggtgatgagatgccccatgttaatgaattcatcaatactgaggtgaccccgcggagacgtcggaagaagaagtcgctagtttgggagcacttcactatagaacccatgccaggggggaactcaagagcatgttgcaatttatgcaagcaaacctttgcgtatagttctggttcaaaaatcgcaggcacgagccatctgaagagacacatcacgctaggctcctgtcctgttatgaaagatcaagaccgcaggctaacactgccgctagcagggggccatgccactgataatgatggtgagggtacagtagagcgtcctactaagaggcgttacagatacactggttatgcaaatgctacttttgatcaggaacggagctcctcttatttggcgaagatgataattttgcatgactacccacttcacattgttcagcagtcatcctttacgaagtttatcgagagtctgcagcctcgtttcagggttgtagatgtggagacaatggaaggagaggtgtatgctgttttccagaaagcaaaagaaaacctgttacaagcattcagcactatgccaggaaggatcagcctcactataggactctggacaaccagtcagactcttggctatgtttctcttgctgggcagtttattgactccgattggaaagtgcaccgaagaatgctcaacttcatgatggtgtcttctcctcattcagagaatgcacttagtgaagctattagctcgagccttttggagtggaatatgaaggacaggctattcactatcacattggataatgattgctcttcccatgatatttacagtgcaaatcttagggatcacctgtccaataagaacaacctcatgcttaagggacagctgtttgttgtgaggtgttatgcacatatcctcaatgtagttgctcaggatgtaattgcttcaattcatggtgtgatttacaacatccgtgagagtatcaagttcataaaagcttctccaaatcgtgaggagaagtttgctgagattgctctgcagctggagattcccagtaccaagactctctgtttagatgttacaacccagtggaacacaacttatttgatgctgctggctgccttggactataagcaggcgttttctacactggagacatgtgatgataattacaatgaatctccttcagcagaggactggaagaaagttgaggctacctgtaattacctgaaactgctatatgactctgcacatagtgtcatggcttcagcaaatcctactgcaaacatctttttccatgaagcttggaaaattcagcttgagctagccaatggcacagaacatgaaaatcccatcttcagcagtattgccaaggatatgcatgagagatttgacaaatactggaaagattgcagcctggtattagccattgctgttgtcatggatccacgtttcaagatgaagcttgttgagttcagttactctaaaatttatggtgctgaggctatgaaatatgttaaggttgtcaatgactctctgcatgagctgtataaggagtatgtggcacaaccactccccttgactcctgcttatgttgaagctaataatgtggctgctaacgcaagtgtgaaccagggaaatccttcttccactggtgatggtcttcttgattttgatatgtacctttctgagattcaaagtacccagcctgcaaaatgtgatctggagcagtacttggaggaatccctcactccacgtatccaagagtttgatatccttaattggtggaagcttaacacactcaagtttccaaccctgtcgaagatggcccgggatatcttggccatcccaatgtcgatggttagcagtggcagctccatattctctgctggaactgggaaccgcatgctcgatgactacagaagctctcttcgtccggagactgtggaggcacttgtctgtgcaaaagactggctccagtattcaccgcctgcaactgaggtgctaggttctgagatgatcaaggcagaagcattgtagcttgccgatactgcttccatgatgaagcacaaataagattgtgttattttttagtgtagttaaccgtaggcatattttaggcagcaattgcagacatatatctcttctggcattgatcttatagttgtaatttgtcatgtcgaactcagtttaactcattatagtgtgtattgagtttagctgtggtctgagggatgtctaagggattgaggtggtaaacttatttccagattctgtctattgttggctcgggcattcaggtgatacacttatttccagattttggttattgttggtgctgctgttt

SEQ ID NO: 95940 - DNA, 2823 bp, Zea Mays
agacccctccggtttctctctctaccgggtcgaagtcgaagcccctctcctctctccccgcctcgtcctctcccctacaggatctagggtttgcttcgctcggccttcgtccttcttgggccgagccctaattcttctgtcccgccaccaagcaagccgagcccccggtttggttcgcctccgctgcgccccgcttcctccccggattcttggattctattggcttctatcttcagcatgggtgagccaaacagcaatgataatgcaatggtgcatgacaatgagatgatcgatggcaatggggtgatccatggtagtgagatgattcatggtagtgtgatgatacatggagatgagatgccccatggcaatgagatgatccatggaaatgagatgatccatgggactgagatggttgaaggcagtgagatgatccatggtcatgagatggttcaggttaatgatctcatccacggtaatgagatggttgccgttaacgtcatggttaatggtgatgagatgccccatgttaatgaattcatcaatactgaggtgaccccgcggagacgtcggaagaagaagtcgctagtttgggagcacttcactatagaacccatgccaggggggaactcaagagcatgttgcaatttatgcaagcaaacctttgcgtatagttctggttcaaaaatcgcaggcacgagccatctgaagagacacatcacgctaggctcctgtcctgttatgaaagatcaagaccgcaggctaacactgccgctagcagggggccatgccactgataatgatggtgagggtacagtagagcgtcctactaagaggcgttacagatacactggttatgcaaatgctacttttgatcaggaacggagctcctcttatttggcgaagatgataattttgcatgactacccacttcacattgttcagcagtcatcctttacgaagtttatcgagagtctgcagcctcgtttcagggttgtagatgtggagacaatggaaggagaggtgtatgctgttttccagaaagcaaaagaaaacctgttacaagcattcagcactatgccaggaaggatcagcctcactataggactctggacaaccagtcagactcttggctatgtttctcttgctgggcagtttattgactccgattggaaagtgcaccgaagaatgctcaacttcatgatggtgtcttctcctcattcagagaatgcacttagtgaagctattagctcgagccttttggagtggaatatgaaggacaggctattcactatcacattggataatgattgctcttcccatgatatttacagtgcaaatcttagggatcacctgtccaataagaacaacctcatgcttaagggacagctgtttgttgtgaggtgttatgcacatatcctcaatgtagttgctcaggatgtaattgcttcaattcatggtgtgatttacaacatccgtgagagtatcaagttcataaaagcttctccaaatcgtgaggagaagtttgctgagattgctctgcagctggagattcccagtaccaagactctctgtttagatgttacaacccagtggaacacaacttatttgatgctgctggctgccttggactataagcaggcgttttctacactggagacatgtgatgataattacaatgaatctccttcagcagaggactggaagaaagttgaggctacctgtaattacctgaaactgctatatgactctgcacatagtgtcatggcttcagcaaatcctactgcaaacatctttttccatgaagcttggaaaattcagcttgagctagccaatggcacagaacatgaaaatcccatcttcagcagtattgccaaggatatgcatgagagatttgacaaatactggaaagattgcagcctggtattagccattgctgttgtcatggatccacgtttcaagatgaagcttgttgagttcagttactctaaaatttatggtgctgaggctatgaaatatgttaaggttgtcaatgactctctgcatgagctgtataaggagtatgtggcacaaccactccccttgactcctgcttatgttgaagctaataatgtggctgctaacgcaagtgtgaaccagggaaatccttcttccactggtgatggtcttcttgattttgatatgtacctttctgagattcaaagtacccagcctgcaaaatgtgatctggagcagtacttggaggaatccctcactccacgtatccaagagtttgatatccttaattggtggaagcttaacacactcaagtttccaaccctgtcgaagatggcccgggatatcttggccatcccaatgtcgatggttagcagtggcagctccatattctctgctggaactgggaaccgcatgctcgatgactacagaagctctcttcgtccggagactgtggaggcacttgtctgtgcaaaagactggctccagtattcaccgcctgcaactgaggtgctaggttctgagatgatcaaggcagaagcattgtagcttgccgatactgcttccatgatgaagcacaaataagattgtgttattttttagtgtagttaaccgtaggcatattttaggcagcaattgcagacatatatctcttctggcattgatcttatagttgtaatttgtcatgtcgaactcagtttaactcattatagtgtgtattgagtttagctgtggtctgagggatgtctaagggattgaggtggtaaacttatttccagattctgtctattgttggctcgggcattcaggtgatacacttatttccag

SEQ ID NO: 95941 - DNA, 1363 bp, Zea Mays
tcgatttcaaaactttggcacagagggacacgtcaagcatagctctcctcctccctctttttaaagagaagggaaccaaaagcaggacgagagacgggcagcagcagcggcctgacctgcgcaaaaccccgccgctctcatcttgccaaaaccccaagaagccgcagggggacggaactccctccccagctttttccccagaggaagcaaccgcagaggaggagaagctgcgcagaaggggaagcggcggcggcggcggcggcggcgtgtaggctgcgcagagagagagagagagagagaggccggcagggagggagcgtaagctttttggcagtggtggttctggaatgcagcagcaacacctgatgcagatgaaccagaacatgatggggggctacacctctcctgccgccgtgaccaccgatctcatccagcagtacctggacgagaacaagcagctgatcctggccatcctcgacaaccagaacaatggcaaggcggaggagtgcgaacggcaccaagctaagctccagcacaacctcatgtacctggccgccatcgctgacagccagccgccacagaccgcgccactatcacagtacccgtccaacctgatgatgcagccgggccctcggtacatgccaccgcagtccgggcagatgatgaacccgcagtcgctgatggcggcgcggtcctccatgatgtacgcgcacccgtccctgtcgccactccagcagcagcaggcggcgcacggacagctgggtatggctccagggggcggcggtggcggcacgaccagcgggttcagcatcctccacggcgaggccagcatgggcggtggtggtgctggcgcaggcgccggcaacaacatgatgaacgccggcatgttctcgggctttggccgcagcggcagtggcgccaaggaagggtcgacctctctgtcggttgacgtccggggtggaaccagctccggcgcgcagagcggggacggcgagtacctcaaagtcggcaccgaggaagaaggcagttagttaagacgctgtaagactggcatcggctcgggcacaccggcatgtcatagcagcaggattagcaggtagctttgaggaacgaggagggtagtagtgtagtgtaatggtagcactagctagctagtatgtggccggtaaggaggtaggtttgttccatggaacctggaggtggtagtgaccagcatgcatgcatgcgtgcatggtcacttgttttggatgtatttgcaggttctctcccaaatgtagtatgaaacgttgctggtgacctgtttgcgcgaacactctatgcagtgttgatgatctttaacaaaaaaaaacgctttactgttcca

SEQ ID NO: 95942 - DNA, 1387 bp, Zea Mays
gcatagctctcctcctccctctttttaaagagaagggaaccaaaagcaggacgagagacgggcagcagcagcggcctgacctgcgcaaaaccccgccgctctcatcttgccaaaaccccaagaagccgcagggggacggaactccctccccagctttttccccagaggaagcaaccgcagaggaggagaagctgcgcagaaggggaagcggcggcggcggcggcggcggcgtgtaggctgcgcagagagagagagagagagagaggccggcagggagggagcgtaagctttttggcagtggtggttctggaatgcagcagcaacacctgatgcagatgaaccagaacatgatggggggctacacctctcctgccgccgtgaccaccgatctcatccagcagtacctggacgagaacaagcagctgatcctggccatcctcgacaaccagaacaatggcaaggcggaggagtgcgaacggcaccaagctaagctccagcacaacctcatgtacctggccgccatcgctgacagccagccgccacagaccgcgccactatcacaggtacgtactgctaatgccagctcatcgtcggcttgcttggcccttgctacactcaaaagcgctttcgtcattagcgaaataagggttgcgtcgctcatctcacttggcatgtcatgtcatgtctgcagtacccgtccaacctgatgatgcagccgggccctcggtacatgccaccgcagtccgggcagatgatgaacccgcagtcgctgatggcggcgcggtcctccatgatgtacgcgcacccgtccctgtcgccactccagcagcagcaggcggcgcacggacagctgggtatggctccagggggcggcggtggcggcacgaccagcgggttcagcatcctccacggcgaggccagcatgggcggtggtggtgctggcgcaggcgccggcaacaacatgatgaacgccggcatgttctcgggctttggccgcagcggcagtggcgccaaggaagggtcgacctctctgtcggttgacgtccggggtggaaccagctccggcgcgcagagcggggacggcgagtacctcaaagtcggcaccgaggaagaaggcagttagttaagacgctgtaagactggcatcggctcgggcacaccggcatgtcatagcagcaggattagcaggtagctttgaggaacgaggagggtagtagtgtagtgtaatggtagcactagctagctagtatgtggccggtaaggaggtaggtttgttccatggaacctggaggtggtagtgaccagcatgcatgcatgcgtgcatggtcacttgttttggatgtatttgcaggttctctcccaaatgtagtatgaaacgttgctggtg

SEQ ID NO: 95943 - DNA, 2078 bp, Zea Mays
ataccagcgccgttaaatttccaacgcccctgcccgtccggccgtccccacactagactagaccgaccgccaccattgcccccgtgtcttaacacggggcgaaaattcctttcgagatctcgcttctctaagcttccgcggcggcacggtgatgactatgacccccgctccggtggcgaacggcgcagcggccggcgctggcgggggcatgaagcggcggggcggtaggttgtggtacgcggccgccggtgccctcctcgtggccctcctcgccgtggccgtgagctaccgcagcttcccgggcgtcccttcctccccctcgtcacctggaagctgcggctgccctgctgcgaggaagtacacggggatggtggaggactgctgctgcgactatgagacggtggacgccatcaacgaggaggtcctgcatccaatcctacaggaactcgttaagttgcccttcttcaggtacttcaaggttaaattgtggtgtgactgccctttttggcccgatgatggaatgtgcaagcttagagattgtagtgtttgtgagtgtccggagaatgagttccctgaaccattcaggaaaccttacaatggactttctccagatagtatgatgtgccaagaaggaaaaccccaggctgccgttgataaaactcttgacagcaaggttttcaaaggatgggttgaaactgacaatccgtggacatctgatgacgagactgataataatgagatgacttacgtgaatcttcaactgaatcctgaacgatacactggctatactggtgattcagcaagaagaatatgggacgctatttacaaagagaactgtccaaaatatccctctgaagaactgtgccatgagaagaaggcattgtacaagcttatttcaggattgcactcctcaatttcagtgcatattgcttatgattaccttcttgatgaatctactaactcatggggacaaaatcttcctttgttgtatgaccgcgtcctgaagtacccagaacgtgtccagaatctgtacttcacctacctgtttgttcttcgggccgtgacaaaggcagcaaattatcttgagcaggctgagtacaataccggcaatcctgaagacgacttgaaaacagaatctcttgtgaagcagttgctttacaattccaagttaagatctgcatgtccattgccttttgatgaagccaaactttggcaaggcgaaaatggtcctgagctaaagcaagagattcagaagcaatttagaaacattagtgcaattatggactgtgttggatgcgagaagtgccgactgtggggaaagctccaagttcatggtcttggaactgcactgaaaattcttttctctgttgatggggacagccatatgaatcagccattgcagctgcagcgaaatgaggtcattgcattgttcaatcttctgaacaggctctcagagtctgtcaaatttgtacatgaaaaaggatcatcaattgaagaagtcattgaggaacagatcccttcaacggttcaaaagagtgtttccatgccgaatcttaaactggacttcctctgagatgtatgagagtaatttgtagttatacaagattgcaatgacatgctggaagattaacatagacatgtacggatataacgaaagattaacatgtgctggaagcagtttcatacatacttgtgttgcagctgtatttaagagaatgagagatacagatacttttgagctaaatgcgatgacacagttaacatagcccccccgcacctcaaacttttccgtgtatagggttcctccgctgtaaatcaaaggatgtcacccctctgcactcgccatgatcaagagaatattctcgctcaacttgatcacctgaccacgaaacaggtagcgagcaaattttttttgtccatctcactattcgtccgtaggaaaaggaataacgcatttcttgactggcttttctgtaaagtatggcgaagtgctgggtgtacagttgttacaatcggtacagcccagagcagagaaaaggttaaataatacgccggggattcagtagctggataagatg

SEQ ID NO: 95944 - DNA, 471 bp, Zea Mays
gtccccacactagactagaccgaccgccaccattgcccccgtgtcttaacacggggcgaaaattcctttcgagatctcgcttctctaagcttccgcggcggcacggtgatgactatgacccccgctccggtggcgaacggcgcagcggccggcgctggcgggggcatgaagcggcggggcggtaggttgtggtacgcggccgccggtgccctcctcgtggccctcctcgccgtggccgtgagctaccgcagcttcccgggcgtcccttcctccccctcgtcacctggaagctgcggctgccctgctgcgaggaagtacacggggatggtggaggactgctgctgcgactatgagacggtggacgccatcaacgaggaggtcctgcatccaatcctacaggaactcgttaagttgcccttcttcaggtacttcaagatagtatgatgtgccaagaaggaaaaccccaggctg

SEQ ID NO: 95945 - DNA, 102 bp, Zea Mays
ctcggagttttgatgacttataaacgtgtgatttttcagcaacggcctggcaccgatggtactccaaagtactcaaatagctggcatgtagtgaaggaaact

SEQ ID NO: 95946 - DNA, 1328 bp, Zea Mays
acgacaaatcgacgatcgccgcttctcttggccattgtagagggagagagagagcgcgagcgacctaggtcagtcggtttcggttttgggcgtcagcttcagctatccgcgaccgcgacgatgggtctgcgcgtggccgccaccgcgccagctccggccggcgtgcgcgtgctcggcagagtcatcggcaaagaggtgcaggcatcagcatctgttgtttgccaattgatggcagccgggcatctgattttggcctaatgaagatagacgacactggaagggtaatttcattcagtgagaaaccaaaaggagacgaattaaaggcaatgcaagttgacaccacagtgcttggcttatcaaaggaggaagcagaaaacaaaccttatatagcttcaatggggatctatatttttaagaaagacatactcctaaaccttctaagatggcgttttcccactgcaaatgattttggttctgaaataattcctgcttcagcaaaagaaatcgatgtaaaggcttatcttttcaatgattactgggaagatattggaactattaagtccttctttgaggcaaaccttgctcttgctgaacagcctccaaggttcagtttctacgatgctgacaaaccaatgtatacatcacggagaaacctaccaccatctatggtcaacaatagtaagatcactgattcaatcatttcccacggatgtttcttggataactgcaggatagaacatagtgttgttggagttcgttctcggataggctccaatgtgcacctcaaggatactgtaatgcttggcgctgattattatgaaactgccgtggaaagaggagagctgcttgcagaaggaaaagttcctattgggattggagagaatacaacgattcaaaagtgtatcatagacaagaatgcgaggatagggaagaaagtggtaatctccaactctgaaggtgtagatgaagctgatagaacttccgaaggcttctacattcgatctggcatcactgtcgtactgaagaacgcgataattgctgatggattggtcatatgagctgaaaaggtctcacaggacgggtatttgccgcacaaaatatcaataggagttctttgttagttttacaataagatgctgtatagcagtcaacaggttattcttgtctatacaagatacctttgtctacaaatcttgtctcaccatgttgtattcgactcaaacaatgttgcagtcatggacattgtccgtttcaaattttcttccttgcacatttacacaaaccttttcaatttttatttcttgctaaacaataaaagctgttgttct

SEQ ID NO: 95947 - DNA, 2130 bp, Zea Mays
cccgtccccctccgcccacagactccacgcctaccccgcactcactgacagccccgccgcactccgtgtagagtccacatctcagtgaagcgaacccgtgggtttgtgtagctgagagctttttacgcgtcgctgcctttgtcttcccttcttccgctgatccgtctccatgcggctgccaagcgctgctggaaagtttaaaaacgcacggggagcttggagacttcacgacaaatcgacgatcgccgcttctcttggccattgtagagggagagagagagcgcgagcgacctaggtcagtcggtttcggttttgggcgtcagcttcagctatccgcgaccgcgacgatgggtctgcgcgtggccgccaccgcgccagctccggccggcgtgcgcgtgctcggcaggggcgccgcgcgcgtgacgccgcgaccgtgggcggctgtcggcggcaggagacgcttctccgtgcggatgtccgtcgcgaccaccgaggccaccaccaccatcgccgtgggcgcctcggaggaccaggcgctggaggctaggaactccaagacggtggtggcggtcatcctcggcggtggcgccgggaccaggctcttcccgcttaccagacgcagggccaagcccgcggtgccaattggcggcgcgtacaggctcatcgacgtgccgatgagcaactgcataaacagcgggatcaacaaggtctacatcctcacgcagttcaactcgcaatccctcaatcgccacctctccagagcctacgatttcagcaatggcgtggccatcggagacggattcgtcgaggttctagcagcaacccagaggcctggaacggaggggaaaaggtggtttcagggtactgctgatgcagttcggcagttcgactggcttttcgatgatgcaaaatctaaagacattgaagatgtgctgattctttctggtgaccatctctaccgtatggactacatggactttgttcagagtcatcggcaaagaggtgcaggcatcagcatctgttgtttgccaattgatggcagccgggcatctgattttggcctaatgaagatagacgacactggaagggtaatttcattcagtgagaaaccaaaaggagacgaattaaaggcaatgcaagttgacaccacagtgcttggcttatcaaaggaggaagcagaaaacaaaccttatatagcttcaatggggatctatatttttaagaaagacatactcctaaaccttctaagatggcgttttcccactgcaaatgattttggttctgaaataattcctgcttcagcaaaagaaatcgatgtaaaggcttatcttttcaatgattactgggaagatattggaactattaagtccttctttgaggcaaaccttgctcttgctgaacagcctccaaggttcagtttctacgatgctgacaaaccaatgtatacatcacggagaaacctaccaccatctatggtcaacaatagtaagatcactgattcaatcatttcccacggatgtttcttggataactgcaggatagaacatagtgttgttggagttcgttctcggataggctccaatgtgcacctcaaggatactgtaatgcttggcgctgattattatgaaactgccgtggaaagaggagagctgcttgcagaaggaaaagttcctattgggattggagagaatacaacgattcaaaagtgtatcatagacaagaatgcgaggatagggaagaaagtggtaatctccaactctgaaggtgtagatgaagctgatagaacttccgaaggcttctacattcgatctggcatcactgtcgtactgaagaacgcgataattgctgatggattggtcatatgagctgaaaaggtctcacaggacgggtatttgccgcacaaaatatcaataggagttctttgttagttttacaataagatgctgtatagcagtcaacaggttattcttgtctatacaagatacctttgtctacaaatcttgtctcaccatgttgtattcgactcaaacaatgttgcagtcatggacattgtccgtttcaaattttcttccttgcacatttacacaaaccttttcaatttttatttcttgctaaacaataaaagctgtt

SEQ ID NO: 95948 - DNA, 2227 bp, Zea Mays
cgacgtgtggacgtcaggcctcgcgccggatagcgtaccgactggcgagccagtgaaagaagaccccgtccccctccgcccacagactccacgcctaccccgcactcactgacagccccgccgcactccgtgtagagtccacatctcagtgaagcgaacccgtgggtttgtgtagctgagagctttttacgcgtcgctgcctttgtcttcccttcttccgctgatccgtctccatgcggctgccaagcgctgctggaaagtttaaaaacgcacggggagcttggagacttcacgacaaatcgacgatcgccgcttctcttggccattgtagagggagagagagagcgcgagcgacctaggtcagtcggtttcggttttgggcgtcagcttcagctatccgcgaccgcgacgatgggtctgcgcgtggccgccaccgcgccagctccggccggcgtgcgcgtgctcggcaggggcgccgcgcgcgtgacgccgcgaccgtgggcggctgtcggcggcaggagacgcttctccgtgcggatgtccgtcgcgaccaccgaggccaccaccaccatcgccgtgggcgcctcggaggaccaggcgctggaggctaggaactccaagacggtggtggcggtcatcctcggcggtggcgccgggaccaggctcttcccgcttaccagacgcagggccaagcccgcggtgccaattggcggcgcgtacaggctcatcgacgtgccgatgagcaactgcataaacagcgggatcaacaaggtctacatcctcacgcagttcaactcgcaatccctcaatcgccacctctccagagcctacgatttcagcaatggcgtggccatcggagacggattcgtcgaggttctagcagcaacccagaggcctggaacggaggggaaaaggtggtttcagggtactgctgatgcagttcggcagttcgactggcttttcgatgatgcaaaatctaaagacattgaagatgtgctgattctttctggtgaccatctctaccgtatggactacatggactttgttcagagtcatcggcaaagaggtgcaggcatcagcatctgttgtttgccaattgatggcagccgggcatctgattttggcctaatgaagatagacgacactggaagggtaatttcattcagtgagaaaccaaaaggagacgaattaaaggcaatgcaagttgacaccacagtgcttggcttatcaaaggaggaagcagaaaacaaaccttatatagcttcaatggggatctatatttttaagaaagacatactcctaaaccttctaagatggcgttttcccactgcaaatgattttggttctgaaataattcctgcttcagcaaaagaaatcgatgtaaaggcttatcttttcaatgattactgggaagatattggaactattaagtccttctttgaggcaaaccttgctcttgctgaacagcctccaaggttcagtttctacgatgctgacaaaccaatgtatacatcacggagaaacctaccaccatctatggtcaacaatagatagaacatagtgttgttggagttcgttctcggataggctccaatgtgcacctcaaggctagatctcttcctttgttgcctggagtatttcattacacagatatagagaaacaagtattagttgtcatagatttggtccaatgttctgtagttagcggctaatgtatcttttcatcttttttccctgcaggatactgtaatgcttggcgctgattattatgaaactgccgtggaaagaggagagctgcttgcagaaggaaaagttcctattgggattggagagaatacaacgattcaaaagtgtatcatagacaagaatgcgaggatagggaagaaagtggtaatctccaactctgaaggtgtagatgaagctgatagaacttccgaaggcttctacattcgatctggcatcactgtcgtactgaagaacgcgataattgctgatggattggtcatatgagctgaaaaggtctcacaggacgggtatttgccgcacaaaatatcaataggagttctttgttagttttacaataagatgctgtatagcagtcaacaggttattcttgtctatacaagatacctttgtctacaaatcttgtctcaccatgttgtattcgactcaaacaatgttgcagtcatggacattgtccgtttcaaattttcttccttgcacattt

SEQ ID NO: 95949 - DNA, 2094 bp, Zea Mays
cgacgtgtggacgtcaggcctcgcgccggatagcgtaccgactggcgagccagtgaaagaagaccccgtccccctccgcccacagactccacgcctaccccgcactcactgacagccccgccgcactccgtgtagagtccacatctcagtgaagcgaacccgtgggtttgtgtagctgagagctttttacgcgtcgctgcctttgtcttcccttcttccgctgatccgtctccatgcggctgccaagcgctgctggaaagtttaaaaacgcacggggagcttggagacttcacgacaaatcgacgatcgccgcttctcttggccattgtagagggagagagagagcgcgagcgacctaggtcagtcggtttcggttttgggcgtcagcttcagctatccgcgaccgcgacgatgggtctgcgcgtggccgccaccgcgccagctccggccggcgtgcgcgtgctcggcaggggcgccgcgcgcgtgacgccgcgaccgtgggcggctgtcggcggcaggagacgcttctccgtgcggatgtccgtcgcgaccaccgaggccaccaccaccatcgccgtgggcgcctcggaggaccaggcgctggaggctaggaactccaagacggtggtggcggtcatcctcggcggtggcgccgggaccaggctcttcccgcttaccagacgcagggccaagcccgcggtgccaattggcggcgcgtacaggctcatcgacgtgccgatgagcaactgcataaacagcgggatcaacaaggtctacatcctcacgcagttcaactcgcaatccctcaatcgccacctctccagagcctacgatttcagcaatggcgtggccatcggagacggattcgtcgaggttctagcagcaacccagaggcctggaacggaggggaaaaggtggtttcagggtactgctgatgcagttcggcagttcgactggcttttcgatgatgcaaaatctaaagacattgaagatgtgctgattctttctggtgaccatctctaccgtatggactacatggactttgttcagagtcatcggcaaagaggtgcaggcatcagcatctgttgtttgccaattgatggcagccgggcatctgattttggcctaatgaagatagacgacactggaagggtaatttcattcagtgagaaaccaaaaggagacgaattaaaggcaatgcaagttgacaccacagtgcttggcttatcaaaggaggaagcagaaaacaaaccttatatagcttcaatggggatctatatttttaagaaagacatactcctaaaccttctaagatggcgttttcccactgcaaatgattttggttctgaaataattcctgcttcagcaaaagaaatcgatgtaaaggcttatcttttcaatgattactgggaagatattggaactattaagtccttctttgaggcaaaccttgctcttgctgaacagcctccaaggttcagtttctacgatgctgacaaaccaatgtatacatcacggagaaacctaccaccatctatggtcaacaatagatagaacatagtgttgttggagttcgttctcggataggctccaatgtgcacctcaaggatactgtaatgcttggcgctgattattatgaaactgccgtggaaagaggagagctgcttgcagaaggaaaagttcctattgggattggagagaatacaacgattcaaaagtgtatcatagacaagaatgcgaggatagggaagaaagtggtaatctccaactctgaaggtgtagatgaagctgatagaacttccgaaggcttctacattcgatctggcatcactgtcgtactgaagaacgcgataattgctgatggattggtcatatgagctgaaaaggtctcacaggacgggtatttgccgcacaaaatatcaataggagttctttgttagttttacaataagatgctgtatagcagtcaacaggttattcttgtctatacaagatacctttgtctacaaatcttgtctcaccatgttgtattcgactcaaacaatgttgcagtcatggacattgtccgtttcaaattttcttccttgcacattt

SEQ ID NO: 95950 - DNA, 1755 bp, Zea Mays
gccgaagccctgggtgcgctatccgcgaccgcgacgatgggtctgcgcgtggccgccaccgcgccagctccggccggcgtgcgcgtgctcggcaggggcgccgcgcgcgtgacgccgcgaccgtgggcggctgtcggcggcaggagacgcttctccgtgcggatgtccgtcgcgaccaccgaggccaccaccaccatcgccgtgggcgcctcggaggaccaggcgctggaggctaggaactccaagacggtggtggcggtcatcctcggcggtggcgccgggaccaggctcttcccgcttaccagacgcagggccaagcccgcggtgccaattggcggcgcgtacaggctcatcgacgtgccgatgagcaactgcataaacagcgggatcaacaaggtctacatcctcacgcagttcaactcgcaatccctcaatcgccacctctccagagcctacgatttcagcaatggcgtggccatcggagacggattcgtcgaggttctagcagcaacccagaggcctggaacggaggggaaaaggtggtttcagggtactgctgatgcagttcggcagttcgactggcttttcgatgatgcaaaatctaaagacattgaagatgtgctgattctttctggtgaccatctctaccgtatggactacatggactttgttcagagtcatcggcaaagaggtgcaggcatcagcatctgttgtttgccaattgatggcagccgggcatctgattttggcctaatgaagatagacgacactggaagggtaatttcattcagtgagaaaccaaaaggagacgaattaaaggcaatgcaagttgacaccacagtgcttggcttatcaaaggaggaagcagaaaacaaaccttatatagcttcaatggggatctatatttttaagaaagacatactcctaaaccttctaagatggcgttttcccactgcaaatgattttggttctgaaataattcctgcttcagcaaaagaaatcgatgtaaaggcttatcttttcaatgattactgggaagatattggaactattaagtccttctttgaggcaaaccttgctcttgctgaacagcctccaaggttcagtttctacgatgctgacaaaccaatgtatacatcacggagaaacctaccaccatctatggtcaacaatagtaagatcactgattcaatcatttcccacggatgtttcttggataactgcaggatagaacatagtgttgttggagttcgttctcggataggctccaatgtgcacctcaaggatactgtaatgcttggcgctgattattatgaaactgccgtggaaagaggagagctgcttgcagaaggaaaagttcctattgggattggagagaatacaacgattcaaaagtgtatcatagacaagaatgcgaggatagggaagaaagtggtaatctccaactctgaaggtgtagatgaagctgatagaacttccgaaggcttctacattcgatctggcatcactgtcgtactgaagaacgcgataattgctgatggattggtcatatgagctgaaaaggtctcacaggacgggtatttgccgcacaaaatatcaataggagttctttgttagttttacaataagatgctgtatagcagtcaacaggttattcttgtctatacaagatacctttgtctacaaatcttgtctcaccatgttgtattcgactcaaacaatgttgcagtcatggacattgtccgtttcaaattt

SEQ ID NO: 95951 - DNA, 1910 bp, Zea Mays
cgacgtgtggacgtcaggcctcgcgccggatagcgtaccgactggcgagccagtgaaagaagaccccgtccccctccgcccacagactccacgcctaccccgcactcactgacagccccgccgcactccgtgtagagtccacatctcagtgaagcgaacccgtgggtttgtgtagctgagagctttttacgcgtcgctgcctttgtcttcccttcttccgctgatccgtctccatgcggctgccaagcgctgctggaaagtttaaaaacgcacggggagcttggagacttcacgacaaatcgacgatcgccgcttctcttggccattgtagagggagagagagagcgcgagcgacctaggtcagtcggtttcggttttgggcgtcagcttcagctatccgcgaccgcgacgatgggtctgcgcgtggccgccaccgcgccagctccggccggcgtgcgcgtgctcggcaggggcgccgcgcgcgtgacgccgcgaccgtgggcggctgtcggcggcaggagacgcttctccgtgcggatgtccgtcgcgaccaccgaggccaccaccaccatcgccgtgggcgcctcggaggaccaggcgctggaggctaggaactccaagacggtggtggcggtcatcctcggcggtggcgccgggaccaggctcttcccgcttaccagacgcagggccaagcccgcggtgccaattggcggcgcgtacaggctcatcgacgtgccgatgagcaactgcataaacagcgggatcaacaaggtctacatcctcacgcagttcaactcgcaatccctcaatcgccacctctccagagcctacgatttcagcaatggcgtggccatcggagacggattcgtcgaggttctagcagcaacccagaggcctggaacggaggggaaaaggtggtttcagggtactgctgatgcagttcggcagttcgactggcttttcgatgatgcaaaatctaaagacattgaagatgtgctgattctttctggtgaccatctctaccgtatggactacatggactttgttcagagtcatcggcaaagaggtgcaggcatcagcatctgttgtttgccaattgatggcagccgggcatctgattttggcctaatgaagatagacgacactggaagggtaatttcattcagtgagaaaccaaaaggagacgaattaaaggcaatgcaagttgacaccacagtgcttggcttatcaaaggaggaagcagaaaacaaaccttatatagcttcaatggggatctatatttttaagaaagacatactcctaaaccttctaaggtatgtcaattcaacttactggagctcacagagtttcattaaaatatctatgtgattatccaggcaaaagggaattaggatcctccattttatgttcaaatattctattcagttaactgcacaattactcgtttaccttaagccggactatatcatcgttaggtcagatggcgttttcccactgcaaatgattttggttctgaaataattcctgcttcagcaaaagaaatcgatgtaaaggtacgtccgtacgtgtacctatgaatttaacatattggattccaagtagcaattacactgtttaagcatggttgcatagttcaaggaaacaggatcgcatcactttgctatttgcattcctgctaacaaacagtcggaaatttaatatgccatgccccatgcagaacattcgacaaaaaaatggcatgcatgctagtatgtaagaactttttcagcaacatcttcacttgttaagttacagttgcgctgcaaatcttgcactatttgaagacaggcatatcaccatcttagttatgtattcatcctgcctcataatcttgtcccaaaatcttgacttgatattatgatggacatttc

SEQ ID NO: 95952 - DNA, 1712 bp, Zea Mays
ataaaccagagcagcagagcgctctgtatcgttggttccgcctagggttttagcttctgccgccgtaacctcacctcccggcccttgtcgccgcaagtccgcaacctcaccatccttcgaatcccatacgaatccctagcccgcaacccgccgggcgacgagcggcggagcccgcagccaacatggaccggtaccatagggtggagcgggcgcggaaccagtcgaccatcgaagagaacgagatccgcatcaccgcgcagggcctcatccgcaactatgtctcatatgctaccttcctcctccaggaaaggagaattaaagagattgttttgaaggccatgggacaggcaatcagtaagtctgttgctgttgcagagattatcaagaaaagggcccctgagttacaccaggataccaacatcagctctgtcagcatcactgatgtctgggaacccatagaagaaggacttgtcccattggagatgactcggcatgtttctatgatatcaattactttgtcccccagagagctggacaagcacactcctgggtaccaagctccagcatatgttgaacatcccaggcaacagcaggtgccaccactgcagcgccaacctcgcagaccatcaggacaacaattccagcagctggagtatgaagattcctatgcacggggtcgaggaagagggaggggccgtgggcgtggaaggggttgggctagaggtggctatggtggatatggaaacaatcaaggtggctataaccaaggtggtgggtattacgacaatcaaggtggatatggtggctatgatgatcaaggtgggtatggtggtggatatggctacaaccaaggcagatatggaaactatcaagaaaatggtggatataaccgaggtagaggaggtggtatgcgaggaagaggcaattggggttaccgtggaggctatgaaggaggcaggggtggtggctatgaaggaggcagggtcggcggcggctatgaaggtggcaggggtggtggctatgaaggaggcagggtcggcggcggctatgaaggtggcaggggtggtggtggtcctggtggaaggggatatggtggccgaggaaggggtagaatgggtggcggcggacgagcgaactaagtgcatgcagacttctggcgtttccttcaatgcatgccttatcaatatatcagggaaaatacgagcattttatgttggaagcagttcagttacgtgtgaggtctgttgtttttttccctgggcgcgaggtttggttgtgagcataatgcatatgcaagttttatcatgtaagtcatctttcaattttcctgctgcagaggttgttttccactttttcccatgatcgttgatgctgagcatgctgccctatgttcatgcctgcagtattaactgatggcaactcttgccctgagttaaaatgttaattctatttgtgcagtttcctttcgtcagttatgcatccatcattccatcaagattggcgcattatattattattatccaacattagcaaatagcgcacatgaaaatattgtgcatacatgttctgtatggcgtgcgcactcgtcgttcacacatgggtttgcaaaattatcgagcacaacccttattttgattacattcatattttcccccttttcagagcaaatacgcatggaagaaaataaatatcaaattaaaaaaatgagaaca

SEQ ID NO: 95953 - DNA, 245 bp, Zea Mays
caaatcatagtaaataatggagttagagtatttgatgtttatagaaatttttctttctatgtaacacatgcatatgtatataaatatacacatacaagtcaataaattccttaataactagaaagaatatatataaaataatgaaaatacttcttcattctggtattttgatttgtgcatttaatctaagtgtgaaattcataacaaaatttgaattcaaattgaagaatttaaaataaaaagaa

SEQ ID NO: 95954 - DNA, 2411 bp, Zea Mays
gagcgccacgccaccaccaccccagctcactcgtgccgtgcactcgacccgtcccccctccctccactcgatccacccgccaagacctcccattgccgccgccgagccagccagggggggagaagagaggccagccgcgtcgcggcgggcggaggaggaggacgagcgggagagccgagccgagccggccgggcaggatgttcgggcgggacccctggggcgggccgctggagatctccaacgccgactcggcgacggacgacgaccggagccgcgacctggaccgggcggcgctgatgcggcagctggacgagacgcagcagagctggctcctggccgggcccggcgaccaggccggcaagaagaagaagcggtacgtcgacctcggctgcgtcgtcgtcgaccgtaaggtcttcatgtggaccgtcggcaccatcctcggcctcggcgtcttcatcggcttcgtcatcatgatcgtcaagctcgtcccgcacaagcgccccccgccgccgccgcccgaccagtacacgcaggcgctgcacaaggcgctcatgttcttcaacgcgcagcgatccggcccgctgccgaagcacaatggcgtgagctggaggggcaactcctgcatgaaggacggcctctccgacagcaccgtccgccggagcctggtcggaggcttctacgacgcgggggacgccatcaagttcaactaccccatggcatggtccatgaccatgctcagctggagcgtgatcgagtacagggccaagtacgaggccatcggcgagctcgaccatatcagggagctcatcaagtggggaacggactacatcctcaagaccttcaattcgtctgccgacacgatagacaggatcgtcgctcaggtgggtgtaggtgacacctctaaaggcagcagtcagcctaacgaccattactgctggatgaggccagaggacatcgactacaagaggccggtcaccgagtgccactcctgctcagatctagcgtcggaaatggctgccgccctggccgcagcttccatagtgttcaagaacagcaagacctactccgacaagctcgtcaagggcgccaaggccctgtacaagttcggcaggctgcagcgtgggcgatacagccccaacggatctgaccaggccatcttctacaactccaccagctactgggacgagttcgtgtggggcggtgcgtggatgtacttcgccacggggaacaactcgtacctcaccgtcgccacagccccgggaatggcgaagcacgctggagcatactggtttggaagtccaaactacggagtgtttacctgggatgacaaacttccaggagctcaggttcttctcagcaggttgcgactcttcctaagtccagggtacccttacgaagaaatactgaggacattccacaaccaaaccgacaacgtcatgtgctcgtatttacctgtattcaattcattcaacttcaccaaaggaggattaatacagctcaaccatggaaggcctcaaccgcttcagtacgctgtcaacgcagctttccttgcttctttatacagcgactatcttgaagcggctgacacgcctgggtggtactgtggaccgaacttctacaccatagaagtcctccgcaagtttgccaggtcacagcttgactacatccttggaaagaacccattgaagatgagctacgttgtgggtttcggaaacaagtacccgaagcgccctcaccacagaggtgcgtcgatacctcataacggcgtcaagtatggatgcaaaggaggttacaaatggagggacacgaagaaggcaaaccctaacatccttgttggagcaatggtggctggccctgacaggcgtgacggctacaaagatgtccgcacgaactacaactacacagagcctacccttgcagcaaacgctggcctggttgcagcactgatttctatatctgatatcaaaaccggacggttcggcatcgacaagaacaccatcttctctgcgatccctccgatgtttccgacaccaccgccgccaccatcagcatggaaaccatagagagacagacctctgaatatccgccccccccccccccccccccccccccaaaaaaaaaagcatcaacacagggaagtggagcaaacatatgatcagttggtacagcaaaggccaggaacaggaaagcggacagcataagcttatagagcttctatttctgtaccagtgtgacagatcagtataaaatcctctgtcatacatagaccagaagttgtgtgcatcgcgtgaaagctaatttttggggtcttgttgctgtgggcattcctgctcatgtgtgaagttattttttgtagaaattgtacctttacaaattgttataggagtgacttttcatagtagtaaagcatt

SEQ ID NO: 95955 - DNA, 403 bp, Zea Mays
acaaataaaaagtgtttaaaaccttgggtcacctctgaggtcctaaagccaaatctgaagtgtagtggatttattgatgtgtcacacatacatatgctccgtgttgaaaaattattggccaatgccgaaacacatatgggtaaatatccttcctttgattatattactgtaacaccaccatatctggaggtcaactacagcacactactcggccaccttgcaaggtcgccattggttggaaaagattgcttcatcctagtcgagtacccactgaaaacagatatggctggatcatgcggataccttataaaggtgaggtttcccttccgctttaactccattcaagtcttgatatatgatgtaatatatgggctggccaacttggtcagagaaaagaagaaga

SEQ ID NO: 95956 - DNA, 1444 bp, Zea Mays
aaaaatctctcgcatgagaaggaacgggcgcgtcgcgccactcctcgctcatggcgtcctccactctgccagccttccccttccgtccgtctcttcccggacttacgtccccggatcctgctaagcttaaccacgtatctgtttgaagacccgttcgccgtcttcccgttgcggcctccgcggcaccgtcgggcgccgccgccgcggcgacggagcgcaagcgcttccgggagcgctacgggctcaacccagacgacttcgaggaagatgcagaggaggatccaagggaagagagcagggacaggcggagccgcggagacagcagcagtctgggagaggggagcaaactgtggaagctgcagttactccagcgaaggtggcggagcctcgggagactcacaaatcacaatcaatacgtaatgcagttacttcagttgtcttcaaaattgttcattagctccgttcatgggctattttgctgcgaccaacttcacaggacatggttgttgcggcatctcaacacttgatgctagtggccaagggttttttacctaggcacatgggtggcagtctaggcttaggatcgattgtcattagtgcttgagttctgccatgtggtattttccttttcttaggttgtgtgcatcccgttatacagaggtcggaaatgtgtttttttttcaagactttgtatcacctcgatgtatggacttgaaaattcaataaagcttcctttattatcgaagaaaaaaaatgcttttcacaaaaatcgtccctggtttacatgattttctgataattagaactggcatatatatggggtctcttccacatctatttttgaaacttagttaagtggttatctcatgctgaaacttagttagtggctggtactggatccgttggaatcgaagctatgagccgtggatgttcagaggttgtccaaaaactcatgctgaaactttagtcataataagacctggtgtgtaaaattatacagatttgtgggtggtgcataacagcatgagtatttctttataacacctcattttttacatctttatgggcccttacactgtactcatcattgatggtagcacgtgaaatttcaatattttcttatgaagcaatcagtatatgcagatcctggaaaaacaaatatgggtcgtcaaggcaaactacttgtgatgttttcatatattcaagtaaggactactgcatacatgctaactgttcatcattcatgcaaacaagcacatcaagtgcaatgtattcatgatgacattttcaagggttatctagtattataattaaggaacagagctaggtgtgtgtaggcggaactcttcttccatgtatttttcccatgattgttgcatgaggatctattttaggaaatgggcttagtatttttttttgaatggaatgagcttagtctttctca

SEQ ID NO: 95957 - DNA, 556 bp, Zea Mays
agcgcaagcgcttccgggagcgctacgggctcaacccagacgacttcgaggaagatgcagaggaggatccaagggaagagagcagggacaggcggagccgcggagacagcagcagtctgggagaggggagcaaactgtggaagctgcagttactccagcgaaggtggcggagcctcgggagactcacaaatcacaatcaatacgtaatgcagttacttcagttgtcttcaaaattgttcattagctccgttcatgggctattttgctgcgaccaacttcacaggacatggttgttgcggcatctcaacacttgatgctagtggccaagggttttttacctaggcacatgggtggcagtctaggcttaggatcgattgtcattagtgcttgagttctgccatgtggtattttccttttcttaggttgtgtgcatcccgttatacagaggtcggaaatgtgtttttttttcaagactttgtatcacctcgatgtatggacttgaaaattcaataaagcttcctttattatcgaagaaaaaaaatgcttttcacaaaaa

SEQ ID NO: 95958 - DNA, 1311 bp, Zea Mays
tctcatgcgacgtgaattttaaatttgaacttacaagtacgaatttggtttaccgaatctcacctcatacaatacaattcagtaagattccacggaaacattcatgctcaaattaacgaatactgaatcgaacaagacaagacacaaccgcagagtgtcctgatcattagaacccccaatcccacccatcggatcgaattggaacccctcatttcatttcacaattcacaaccccggcgttgttcctcccatcacaactcgatcacctcctgaggctggtggcgattggcacgatgacaagcaggacgaggagcagcaggattatgatgccgatgcagagacacttgcggctgcttctctggtactccttggccttgcccagctccttgttgccgccctgcacgtagtgggaggcgttggcgacgtggctctcgatgtcgtcgagcttctccccctgcgtctccaccatgacggccatgtcgaggaacacttggtggagctccaggaggctgcgttccacctcgcgcgccgcgtcacggcggtcctggatctcgtgcaccgcggcgagcacggcgcccttgccgtgctccgcgacagcggcgcccaggagctcctcgccgcggccgtcggagatgatgcgctcgatcacctcctcctcggggacctccccggtgagcgtgtagtagcgccgctccacggtctccttgtactcggacatcatccgctgccgcagcgcctggaagtcgagcatgaggtccttgagcttcttccggagtcccgaggtgacggcggtgcgcgtgcggtccagcggcgtgccctcgcggcacccagcagaaagcctccgctgcgcggcgttggcgcggtccagagactcgagcctagcgcggatgtcgcgggcgcggcggagcacggcgacgatatcggcgttgacgcggccgcggtgcgcgcggagggcgtccacctggcgcagcgacttgccctcctcgttggcggcgtgcaggcggtcgagcgcgtcgcggatggccgccatctccgccttcaccgcctccgcctcctggaagaacccgcgcaggcgctcgtccgtgacgccgccggcgcccgcctccgggagctcgatcccgtcgcccgccgcctccaggtccttcatcgccgccttcttcaggtcgacgtagctcatgaaggacttggtcatgaggtcgttcatagtgccgatcactggattgcctttgcagctctctccgtgtagggctactgggatagatgtttgcggtggtggaacgaatcggcggggaaaaggaagagcgaccgggg

SEQ ID NO: 95959 - DNA, 1788 bp, Zea Mays
ttttattatgatgtgacacagaagaaaatgcaacgggcagtgcaggccgtcaggtcacacggcaatgttcttaaatatgctgttctacaacacatcagcgctcccaagccagcaatgcttcctgctgccttttctcgtttcatgtcagtttcatctgctcgcctagaggatcgtggatttgaaactgccactgtagcagatgtcttgaagtctaaagggaagagtgctgatggatcttggctctggtgcaccacagaggatagcgtctatgacgctgtcaaatctgtatgtcctcacttcccgatgatcgtattaactccttcagagtcaatggttatgcatcaaatgataaggctacctttcggtaccttaaactttttgcagatgactcagcacaacgtgggagctttggtggttgtcaaacctggacagaataaatcaatcgctggcattgtcactgagagaggtgatgaacaaatttctgtactcttggcatctaacttttggcctgtggctgtgcatcatagtacttttggcatcaaagagtctcaactctttagagcactttatagtagatacaacagaaattgcatcaagttaaagtatacgtgtaagtaacataggatcttcttcacatggcacaatcatagctgccacttcacactgaatttcctattagagatgtataggctaactgacatcacttgttgtattcttgtatcacaagatgtactcagctacacacacgcgtcgcggtacaaacactgccgagcatggaggttgaaactgggccaacttcaggcacatcacatgatgatttctttttcactatgccttgctgcactgttcgcacgttacatcttggacttgaatgtgaccaagtagtatccatatacagacgatcactcgatcagcatacatagatggtatttttgagattagaaccaatacttgacagatcttgcattctgaaaacggaaacgtaagcgtggcaatcttttaagacatgcataagatcatagtgccatgaggctaacatctgagacttggtgttttcagattatctccggaaaatcatagtgcagggaaggtcttccaagtcaactaaggttggcgacatcatgactgaagagaacaaactgatcacagtgaatcccgacaccaaggtcctgcaggcaatgcagctcatgacagaaaaccgcgtcagacacatcccggtgatcgacggcacggggatgctggggatggtctccatcggcgacgtcgtgcgcgcggtggtggccgagcacagggaggagctgaaccggctcaatgactacatccagggaggctactaggacggcgtgtgcagcgacgaccccctccgatcccgccagtcagtgaagtccgcctttgaaatccaataactcggaacaatgatgatgacgaaataggccgtgttttcttggacaatgatgttaagttcggcaaggttttcctttctctttttttattctactgcgtggtctatgtgtatattgccaaaggcatgcgtgagccatgcgcccggtgctggggcgcagagaccatctgatggtggaaacaccggaaataagagcgtgccgctgtgtgtttcctttgaaggaataaaaatggtgttcgtgttgtgcattgcttattgttgatgttcgctttggattaaggccttgtttatgaacggtacggattcagtgcagtactgtacgtgcagaactgggaaggctttactttatgaattacatcttctgtttttagcttcatcatgaaata

SEQ ID NO: 95960 - DNA, 1128 bp, Zea Mays
tatttccttgtctctgtttttctttgtactggactccccctacttctgacaagaagaaaatgcaacgggcagtgcaggccgtcaggtcacacggcaatgttcttaaatatgctgttctacaacacatcagcgctcccaagccagcaatgcttcctgctgccttttctcgtttcatgtcagtttcatctgctcgcctagaggatcgtggatttgaaactgccactgtagcagatgtcttgaagtctaaagggaagagtgctgatggatcttggctctggtgcaccacagaggatagcgtctatgacgctgtcaaatctatgactcagcacaacgtgggagctttggtggttgtcaaacctggacagaataaatcaatcgctggcattgtcactgagagagattatctccggaaaatcatagtgcagggaaggtcttccaagtcaactaaggttggcgacatcatgactgaagagaacaaactgatcacagtgaatcccgacaccaaggtcctgcaggcaatgcagctcatgacagaaaaccgcgtcagacacatcccggtgatcgacggcacggggatgctggggatggtctccatcggcgacgtcgtgcgcgcggtggtggccgagcacagggaggagctgaaccggctcaatgactacatccagggaggctactaggacggcgtgtgcagcgacgaccccctccgatcccgccagtcagtgaagtccgcctttgaaatccaataactcggaacaatgatgatgacgaaataggccgtgttttcttggacaatgatgttaagttcggcaaggttttcctttctctttttttattctactgcgtggtctatgtgtatattgccaaaggcatgcgtgagccatgcgcccggtgctggggcgcagagaccatctgatggtggaaacaccggaaataagagcgtgccgctgtgtgtttcctttgaaggaataaaaatggtgttcgtgttgtgcattgcttattgttgatgttcgctttggattaaggccttgtttatgaacggtacggattcagtgcagtactgtacgtgcagaactgggaaggctttactttatgaattacatcttctgtttttagcttcatcatgaaata

SEQ ID NO: 95961 - DNA, 1461 bp, Zea Mays
ctttttcttcgaaaaaaagagataaataaatcagtcacaaccaccgttaatttacattttaatcaatttattattataaaaaaacgtatactcagttaccttagaattattcgactcataaagaaaagaaaaaaaaaggaaaagcgaaagaggagacagggccatctggataagaccggcggcacatgacttcacggctccccacacgcagaggctcgtcgcttttattaaatcagcgctcgtcgccacgcaccctcgcctccccagcgtaacaagtgtccttcctccatcttcctcctccactccactcccaagtccccaccacccccaaccccgtctctccactgcggcgcaggcttcgcttcggctccgctcggctcgagcagaagaaaatgcaacgggcagtgcaggccgtcaggtcacacggcaatgttcttaaatatgctgttctacaacacatcagcgctcccaagccagcaatgcttcctgctgccttttctcgtttcatgtcagtttcatctgctcgcctagaggatcgtggatttgaaactgccactgtagcagatgtcttgaagtctaaagggaagagtgctgatggatcttggctctggtgcaccacagaggatagcgtctatgacgctgtcaaatctatgactcagcacaacgtgggagctttggtggttgtcaaacctggacagaataaatcaatcgctggcattgtcactgagagagattatctccggaaaatcatagtgcagggaaggtcttccaagtcaactaaggttggcgacatcatgactgaagagaacaaactgatcacagtgaatcccgacaccaaggtcctgcaggcaatgcagctcatgacagaaaaccgcgtcagacacatcccggtgatcgacggcacggggatgctggggatggtctccatcggcgacgtcgtgcgcgcggtggtggccgagcacagggaggagctgaaccggctcaatgactacatccagggaggctactaggacggcgtgtgcagcgacgaccccctccgatcccgccagtcagtgaagtccgcctttgaaatccaataactcggaacaatgatgatgacgaaataggccgtgttttcttggacaatgatgttaagttcggcaaggttttcctttctctttttttattctactgcgtggtctatgtgtatattgccaaaggcatgcgtgagccatgcgcccggtgctggggcgcagagaccatctgatggtggaaacaccggaaataagagcgtgccgctgtgtgtttcctttgaaggaataaaaatggtgttcgtgttgtgcattgcttattgttgatgttcgctttggattaaggccttgtttatgaacggtacggattcagtgcagtactgtacgtgcagaactgggaaggctttactttatgaattacatcttctgtttttagcttcatcatgaaata

SEQ ID NO: 95962 - DNA, 1458 bp, Zea Mays
ctttttcttcgaaaaaaagagataaataaatcagtcacaaccaccgttaatttacattttaatcaatttattattataaaaaaacgtatactcagttaccttagaattattcgactcataaagaaaagaaaaaaaaaggaaaagcgaaagaggagacagggccatctggataagaccggcggcacatgacttcacggctccccacacgcagaggctcgtcgcttttattaaatcagcgctcgtcgccacgcaccctcgcctccccagcgtaacaagtgtccttcctccatcttcctcctccactccactcccaagtccccaccacccccaaccccgtctctccactgcggcgcaggcttcgcttcggctccgctcggctcgagcagaaaatgcaacgggcagtgcaggccgtcaggtcacacggcaatgttcttaaatatgctgttctacaacacatcagcgctcccaagccagcaatgcttcctgctgccttttctcgtttcatgtcagtttcatctgctcgcctagaggatcgtggatttgaaactgccactgtagcagatgtcttgaagtctaaagggaagagtgctgatggatcttggctctggtgcaccacagaggatagcgtctatgacgctgtcaaatctatgactcagcacaacgtgggagctttggtggttgtcaaacctggacagaataaatcaatcgctggcattgtcactgagagagattatctccggaaaatcatagtgcagggaaggtcttccaagtcaactaaggttggcgacatcatgactgaagagaacaaactgatcacagtgaatcccgacaccaaggtcctgcaggcaatgcagctcatgacagaaaaccgcgtcagacacatcccggtgatcgacggcacggggatgctggggatggtctccatcggcgacgtcgtgcgcgcggtggtggccgagcacagggaggagctgaaccggctcaatgactacatccagggaggctactaggacggcgtgtgcagcgacgaccccctccgatcccgccagtcagtgaagtccgcctttgaaatccaataactcggaacaatgatgatgacgaaataggccgtgttttcttggacaatgatgttaagttcggcaaggttttcctttctctttttttattctactgcgtggtctatgtgtatattgccaaaggcatgcgtgagccatgcgcccggtgctggggcgcagagaccatctgatggtggaaacaccggaaataagagcgtgccgctgtgtgtttcctttgaaggaataaaaatggtgttcgtgttgtgcattgcttattgttgatgttcgctttggattaaggccttgtttatgaacggtacggattcagtgcagtactgtacgtgcagaactgggaaggctttactttatgaattacatcttctgtttttagcttcatcatgaaata

SEQ ID NO: 95963 - DNA, 699 bp, Zea Mays
agaacatgattagcataagaccagtacctggtgacgatatgacctatataagtgccgaaaggatgcttggacacaacttaaccggtgaaccgttatgatgccagaacaaactgatcacagtgaatcccgacaccaaggtcctgcaggcaatgcagctcatgacaggtaacctggttgcccgtgttcttctgtcagaaaaaatactactagaatcgtgagagcactggaaaattggttatgatccgctgtaccaatcgtctgcgcagaaaaccgcgtcagacacatcccggtgatcgacggcacggggatgctggggatggtctccatcggcgacgtcgtgcgcgcggtggtggccgagcacagggaggagctgaaccggctcaatgactacatccagggaggctactaggacggcgtgtgcagcgacgaccccctccgatcccgccagtcagtgaagtccgcctttgaaatccaataactcggaacaatgatgatgacgaaataggccgtgttttcttggacaatgatgttaagttcggcaaggttttcctttctctttttttattctactgcgtggtctatgtgtatattgccaaaggcatgcgtgagccatgcgcccggtgctggggcgcagagaccatctgatggtggaaacaccggaaataagagcgtgccgctgtgtgtttcctttgaaggaat

SEQ ID NO: 95964 - DNA, 888 bp, Zea Mays
ttttattatgatgtgacacagaagaaaatgcaacgggcagtgcaggccgtcaggtcacacggcaatgttcttaaatatgctgttctacaacacatcagcgctcccaagccagcaatgcttcctgctgccttttctcgtttcatgtcagtttcatctgctcgcctagaggatcgtggatttgaaactgccactgtagcagatgtcttgaagtctaaagggaagagtgctgatggatcttggctctggtgcaccacagaggatagcgtctatgacgctgtcaaatctgtatgtcctcacttcccgatgatcgtattaactccttcagagtcaatggttatgcatcaaatgataaggctacctttcggtaccttaaactttttgcagatgactcagcacaacgtgggagctttggtggttgtcaaacctggacagaataaatcaatcgctggcattgtcactgagagaggtgatgaacaaatttctgtactcttggcatctaacttttggcctgtggctgtgcatcatagtacttttggcatcaaagagtctcaactctttagagcactttatagtagatacaacagaaattgcatcaagttaaagtatacgtattatctccggaaaatcatagtgcagggaaggtcttccaagtcaactaaggttggcgacatcatgactgaagagaacaaactgatcacagtgaatcccgacaccaaggtcctgcaggcaatgcagctcatgacagaaaaccgcgtcagacacatcccggtgatcgacggcacggggatgctggggatggtctccatcggcgacgtcgtgcgcgcggtggtggccgagcacagggaggagctgaaccggctcaatgactacatccagggaggctactag

SEQ ID NO: 95965 - DNA, 608 bp, Zea Mays
gctgcagtgacaagaggagcattgtcgcctctacaacggctacagtgttaacggagggagactccagtggtatgcgctgcaaatagcctaagtgcttcctcactgtgacttctgcagatgatggccacatgtgcttggctgcttgcaaataagcaaatggcaccgtgctttctgctgggctgaacacaccatatttcttcataagcatgattagttaaatactgagttacttttcatgttgtaatttcagtttcaaggtttagtactaacctttccgttttcattgcagacatcttgatcatttctgagattaaactgatgatgctgatgctcgtttagttatcttggtttggagatatatcagatatgggtgatcagaatcatggacgctttctccctctactgctctatctacatcttttgctgctaataattcagtttgctatgatagatatagcctccaagaagcaagcactccttgcttttgcctctgcagtctaccatggcaacaagctgaattggagccaaaaatatcccaatgtgatcatggcatggacatgctgaaaaatctcacaattataccagtcactgtcgattcattggcataa

SEQ ID NO: 95966 - DNA, 2146 bp, Zea Mays
atgcccagacgacctaatcatcttgctccttgcaccctctgctgtttgcttcctgcctgctgccactgcatctcacatctgcctctttctgcctggatgaccattggtgttgccgaacatggcctctggatgtgtataagggtgcatttggttaagctgcgagctatgaaaaaactgttattatataagttggattatggtggaatggaggacgcacgtcctggacatcaggaggcctgctctcatcttcccaagatctctagcaaggaaacacatccaaagatagcacaagttcttctggaacgacaaaaatatgatatggcacttcttgtgctaaagtgcacagggcatggaagcttctctgctacagaaaactttaaaaaagatgacatttcatctcttagtgaggcagtgactgtggttcgtgtcagaattgaatgtcgcctcctaacagaagcgtttatgtatcataggagctactgctctaaggtgaaagagcaacactcagcagatatgacacatgctgaggatgcattaaaaaactcttgggtttatcatgttgagatgatggtgaccgaattttgtgctatctgcattaaaaggaatttagttgataaaatgattgatctgccctgggattctgaggaggagaaacatcttcacaagtccctctttgactctgctcatgaaatgcccatgaaaccaaatggtagtctgcttgttgtctactaccttcggcgttatcggtatttggaggcatatgaggttgaccgtagtcttcaaaaatttgagcaaaagatattggaaaatacaactgaagagattgcttcaaaaatcagagcaattgctcgatggagagaaagtttagttgttaaatgccttgacatgcttccggaggtccagagagagaatgtgaaagccatcaacagtggagaacaaagtcaatttgctcgaactgctcaattatcttctccagctcatgtgggcaaatcacaaagtcctgtcatggacttgagcacaacttttacgacttctcttcaaaataagtcaagcctcctccgaaaaaacaatgcattgactgattctggtggtctgatccgaagcagccgctcagaatttggtagaaaggtcccatctgttctggataccagggcatcaccccatgggccacctacatccaatatgagatcaagtgcaggggatatgttccccacagtgggccagagagttgagagtccatttttgaggggggcgaaagatatcagttctagaaaaggagaggagggtttcaaaaaagggattaaatatggtgatcacgatccagtgcctatgtatttgaacttaagttctggtgatacacctatgaaagactaccgaacgagtttgctgaagactgcagttaacaaaaccactatttttcaaggaaaagattctgttggaaaaggagagctccactttggttcacgtgccgagaagcctttcatcttaaatggaactggtgtaggtcaaaatggcctcgctaaggtgtctggatatgctggttttcgtgaggattacaaagtaccaactaaggagaacatcttgagctctagcaagagatcttcaatcgatggagcagaagccagcaaaggtgtgtcaaggtggagatccgacgagtctagtgaagacgaagaagagagaacaaacagggagagcggagcttctcttgttactagaaggcgacctagattttcgagaagatgatatatccacgtcctcatggatctttattaattgtttgcagggcgaggattttttttgaatatctccacagttattaccctaatgtaacaaaaaaaacgtttcatcggaaaagtgtatgtgataatcatgcataattttacactgccaaggccgagatgtgtagttcaggtgtcacacaggatgctataaaacaaaaatgagatggcataggcatgttgtattcagatagttcagttcgcgtagttgtaaaccggtgcaatagtagttgtaaaccggtgcagtagcaaaatactaccttctgtggacatgagtttgagtttgtctttttagatttgcttttaagttaatcactattgactttgatctgttatacctgatattttataagattttacaatacaaa

SEQ ID NO: 95967 - DNA, 1029 bp, Zea Mays
ccaggggtaaaaatcttgattttttgtcagaataaatagtttcatatcctttgctgctcgacagttgagcattgtacttgcatatagaatttcattttgttaggggtatacctcaacatcgttggcttgttatctggtgtgcttttaatgttttgttcctatggaatcaatgatcttttttcttagttcaagttttcgactgggtgcaggcagttaaagaaatacttgaagagaagacaaggaaacgatctagtccatgtatgaacggcgctagttttaccttggagaagtcaaatatgcacaacgagttacacgcagctctccaagaagctgcggtgctgatgtctgaacagcagcaggctgatccggcgaacggcagtggcggtgatatttgctcggcataggtacctcacagtgaagctgaagcagtcgaacgccaaactgaagtttgtggcaaaataaccagcactgcagtcctgaactcctgatctcacattgagatctgtaaacatggtgccaacaagtggaggaagtttgtacatacgctctctccggcctttacactactattctgctggcaaggccgtcagggatcgtttctaccttgctatcgctgacgaggaaatgaagacaactgaacagttgagctgtggcgcttgcacgcaccatgttttctccgctgaacaagtgcgcatttttgagctttcgggcattcgtgctgttaactttttaccattctatatgtcgacttctaccaaaaggtctagcgtttttaccctgactgaacacagggaaatttgtctgactgaactgagaagggccaacacacaagttagcgcgtcaccgatgtctgaattagagttggacttccggtcactggaaaacagaaccaatagaaataacagaaattattcaacaatctggtgccatgataagctctacacatatacacaatccagattcaaaatcactgatcagttaaaaaacgattcacaacagcaggtggatcatcttggattcggcgtttaa

SEQ ID NO: 95968 - DNA, 1932 bp, Zea Mays
ctgtgttcaagcgcgatcatcatgattcgtgatgacgaggcagaggtacctctccagccagcctccaggacgacaaggcgacgacctgggatctgacaattccaaattccaacgcgctaagctgccaacgtcgccgcagcggcagcacctcaaacgtacgtcgccgcagcagctcagacgtgcgccgctaccacgtgtcctgccgcacgccccgcgtcagcggcatctgtaaagccgcttgtcgccgccccggcgcccaccccgcccccgcgcttttattccccacttcaccgcatctccccctcgtctacgatgccgttgcgcacctcttctctctcgccgccccgagacccccacgcttccctctccgcccccgaactgtggcgcctccccccgccgccgcagcgatgccactcgcggcagagcccgacgacgctcatgaggaaagggagaatcagcagctgctaattacgacgaagggagggcccgggcttgagggactggtggtggggagctactgccacgatgtgctaatccggggcgggcgcatagtgggggagacgctcggcggggctgcggccttcgtgtccaacgtgctcgacgccgcttcgccccagggcgccgcgctcaacgagacatccccctttgtcgttgtggccaaggtgggtcacgacttcatctacgcccgcgcgccggcgtccgcgcggcatccgcctctgctctgctcgtccccaaccacctccttccacgcccagttctcggagaccgccgcctcggcgcacgcccccgaccgggagctccggcgcgtgcgcgcctgcgacccgatctaccccgccgaccttcccgaccgccgcttcgcctacggcctcgctgtcggcgtcgccggggaggtgctaccggagacgctcgagcagatgatcaggctctgccgcacggtgctcgtggacgcgcaggcgctgatccgggcgttcgacggtgacggcgccgtcggtcacgtggcgcttggcgataccccgtacgcgcggcttctgccccgagtggcgttcgttaaggcgtcgtcggaggaggcgccatacgttggggtggaaacgacgaggcggcagtgctgtgtgatcgtcacggaggggagggacggctgccggctgtactgggacggtggggaggcgcacgttgcgccgttccccgccgtacaggtggaccctactggcgccggagacagttttctcgcgggctttgcagccggattgctgtgggggttgtcggcgacggacgccgcgctgctggggaacttctttggcgccgctgctgtatcgcaggtcggcgtgcccaccttccatcccaagatgttgcaggcagttaaagaaatacttgaagagaagacaaggaaacgatctagtccatgtatgaacggcgctagttttaccttggagaagtcaaatatgcacaacgagttacacgcagctctccaagaagctgcggtgctgatgtctgaacagcagcaggctgatccggcgaacggcagtggcggtgatatttgctcggcataggtacctcacagtgaagctgaagcagtcgaacgccaaactgaagtttgtggcaaaataaccagcactgcagtcctgaactcctgatctcacattgagatctgtaaacatggtgccaacaagtggaggaagtttgtacatacgctctctccggcctttacactactattctgctggcaaggccgtcagggatcgtttctaccttgctatcgctgacgaggaaatgaagacaactgaacagttgagctgtggcgcttgcacgcaccatgttttctccgctgaacaagtgcgcatttttgagctttcgggcattcgtgctgttaactttttaccattctatatgtcgacttctaccaaaagaaaacagaaccaatagaaataacagaaa

SEQ ID NO: 95969 - DNA, 1659 bp, Zea Mays
taactaactcgttgagtggccctgtttctcggacgtaaggcctttgctgctccacacatgtccattcgaattttaccgtgtttagcaagggcgaaaagtttgcatcttgatgatttagcttgactatgcgattgctttcctggacccgtgcagctgcggtggcatgggaggccggcaagccactgtcgatcgaggaggtggaggtagcgcctccgcaggccatggaggtgcgcgtcaagatcctcttcacctcgctctgccacaccgacgtctacttctgggaggccaaggggcagactcccgtgttccctcggatctttggccacgaggctggaggtatcatagagagtgttggagagggtgtgactgacgtagctccgggcgaccatgtccttcctgtgttcactggggagtgcaaggagtgtgcccactgcaagtcggcagagagcaacatgtgtgatctgctcaggatcaacaccgaccgcggtgtgatgattgccgatggcaagtcgcggttttcaatcaatgggaagcctatctaccactttgttgggacttccaccttcagcgagtacaccgtcatgcatgtgggttgtgttgcaaagatcaaccctcaggctccccttgataaagtttgcgtccttagctgtggtatttctaccggtcttggtgcatcaattaatgttgcaaaacctccgaagggttcgacagtggctgttttcggtttaggagccgttggtcttgccgctgcagaaggtgcaaggattgctggagcgtcaaggatcattggtgtcgacctgaaccccagcagattcgaagaagctaggaagttcggttgcactgaatttgtgaacccaaaagaccacaacaagccagtgcaggaggtacttgctgagatgaccaacggaggggtcgaccgcagtgtggaatgcactggcaacattaatgctatgatccaagctttcgaatgtgttcatgatggctggggtgttgctgtgctggtgggtgtgccacataaggacgctgagttcaagacccacccgatgaacttcctgaacgaaaggaccctgaaggggaccttctttggcaactataagccacgcactgatctgccaaatgtggtggagctgtacatgaaaaaggagctggaggtggagaagttcatcacgcacagcgtcccgttcgccgagatcaacaaggcgttcgacctgatggccaagggggagggcatccgctgcatcatccgcatggagaactagatttcgctgtctagtttgtgatctggcctgggcttggggttaataaaagaggcaatgctagcctgccctttcgatgaggaggtacatacacgctggcgatggaccgcgcttgtgtgtcgcgttcagtttggcttttgccaagcagtagggtagcttcccgtgtcggtaattatatggtatgaaccatcaccttttggctctacatggtatgaacgtaagatacaaattccaactacctctagctcgcttgtgtggtatctgtatcagtattcatgtgtttgtttgcttatgtgtttgtttgcttgtatttgctggtgcttgtatcgcgggatgcaatgagttgttgtttggttgttgtcaaccaggctctatgtgtgtgtgcgaggtgtgtgtttggtta

SEQ ID NO: 95970 - DNA, 1804 bp, Zea Mays
aaaccacggtccacggaccacggctatgttccactccaggtggaggctgcagccccggtttcgcaagccgcgccgtggtttgcttgcccacaggcggccaaaccgcaccctccttcccgtcgtttcccatctcttcctcctttagagctaccactatataaatcagggctcattttctcgctcctcacaggctcatctcgctttggatcgattggtttcgtaactggtgagggactgagggtctcggagtggattgatttgggattctgttcgaagatttgcggaggggggcaatggcgaccgcggggaaggtgatcaagtgcaaagctgcggtggcatgggaggccggcaagccactgtcgatcgaggaggtggaggtagcgcctccgcaggccatggaggtgcgcgtcaagatcctcttcacctcgctctgccacaccgacgtctacttctgggaggccaaggggcagactcccgtgttccctcggatctttggccacgaggctggaggtatcatagagagtgttggagagggtgtgactgacgtagctccgggcgaccatgtccttcctgtgttcactggggagtgcaaggagtgtgcccactgcaagtcggcagagagcaacatgtgtgatctgctcaggatcaacaccgaccgcggtgtgatgattgccgatggcaagtcgcggttttcaatcaatgggaagcctatctaccactttgttgggacttccaccttcagcgagtacaccgtcatgcatgtgggttgtgttgcaaagatcaaccctcaggctccccttgataaagtttgcgtccttagctgtggtatttctaccggtcttggtgcatcaattaatgttgcaaaacctccgaagggttcgacagtggctgttttcggtttaggagccgttggtcttgccgctgcagaaggtgcaaggattgctggagcgtcaaggatcattggtgtcgacctgaaccccagcagattcgaagaagctaggaagttcggttgcactgaatttgtgaacccaaaagaccacaacaagccagtgcaggaggtacttgctgagatgaccaacggaggggtcgaccgcagtgtggaatgcactggcaacattaatgctatgatccaagctttcgaatgtgttcatgatggctggggtgttgctgtgctggtgggtgtgccacataaggacgctgagttcaagacccacccgatgaacttcctgaacgaaaggaccctgaaggggaccttctttggcaactataagccacgcactgatctgccaaatgtggtggagctgtacatgaaaaaggagctggaggtggagaagttcatcacgcacagcgtcccgttcgccgagatcaacaaggcgttcgacctgatggccaagggggagggcatccgctgcatcatccgcatggagaactagatttcgctgtctagtttgtgatctggcctgggcttggggttaataaaagaggcaatgctagcctgccctttcgatgaggaggtacatacacgctggcgatggaccgcgcttgtgtgtcgcgttcagtttggcttttgccaagcagtagggtagcttcccgtgtcggtaattatatggtatgaaccatcaccttttggctctacatggtatgaacgtaagatacaaattccaactacctctagctcgcttgtgtggtatctgtatcagtattcatgtgtttgtttgcttatgtgtttgtttgcttgtatttgctggtgcttgtatcgcgggatgcaatgagttgttgtttggttgttgtcaaccaggctcta

SEQ ID NO: 95971 - DNA, 1536 bp, Zea Mays
gcaatggcgaccgcggggaaggtgatcaagtgcaaagctgcggtggcatgggaggccggcaagccactgtcgatcgaggaggtggaggtagcgcctccgcaggccatggaggtgcgcgtcaagatcctcttcacctcgctctgccacaccgacgtctacttctgggaggccaaggggcagactcccgtgttccctcggatctttggccacgaggctggaggccgcctgaaatttcttgattttgccagtatcatagagagtgttggagagggtgtgactgacgtagctccgggcgaccatgtccttcctgtgttcactggggagtgcaaggagtgtgcccactgcaagtcggcagagagcaacatgtgtgatctgctcaggatcaacaccgaccgcggtgtgatgattgccgatggcaagtcgcggttttcaatcaatgggaagcctatctaccactttgttgggacttccaccttcagcgagtacaccgtcatgcatgtgggttgtgttgcaaagatcaaccctcaggctccccttgataaagtttgcgtccttagctgtggtatttctaccggtcttggtgcatcaattaatgttgcaaaacctccgaagggttcgacagtggctgttttcggtttaggagccgttggtcttgccgctgcagaaggtgcaaggattgctggagcgtcaaggatcattggtgtcgacctgaaccccagcagattcgaagaagctaggaagttcggttgcactgaatttgtgaacccaaaagaccacaacaagccagtgcaggaggtacttgctgagatgaccaacggaggggtcgaccgcagtgtggaatgcactggcaacattaatgctatgatccaagctttcgaatgtgttcatgatggctggggtgttgctgtgctggtgggtgtgccacataaggacgctgagttcaagacccacccgatgaacttcctgaacgaaaggaccctgaaggggaccttctttggcaactataagccacgcactgatctgccaaatgtggtggagctgtacatgaaaaaggagctggaggtggagaagttcatcacgcacagcgtcccgttcgccgagatcaacaaggcgttcgacctgatggccaagggggagggcatccgctgcatcatccgcatggagaactagatttcgctgtctagtttgtgatctggcctgggcttggggttaataaaagaggcaatgctagcctgccctttcgatgaggaggtacatacacgctggcgatggaccgcgcttgtgtgtcgcgttcagtttggcttttgccaagcagtagggtagcttcccgtgtcggtaattatatggtatgaaccatcaccttttggctctacatggtatgaacgtaagatacaaattccaactacctctagctcgcttgtgtggtatctgtatcagtattcatgtgtttgtttgcttatgtgtttgtttgcttgtatttgctggtgcttgtatcgcgggatgcaatgagttgttgtttggttgttgtcaaccagg

SEQ ID NO: 95972 - DNA, 1927 bp, Zea Mays
acgcgcgcgctccgagccgcagatccgagctagcgcggcgcatccgacggccacgacagcgcagtgccgtcctccgccgccaccgcttggcgattgtccgcaccccaccagtccaccacctcccccacgagcgaaaaccacggtccacggaccacggctatgttccactccaggtggaggctgcagccccggtttcgcaagccgcgccgtggtttgcttgcccacaggcggccaaaccgcaccctccttcccgtcgtttcccatctcttcctcctttagagctaccactatataaatcagggctcattttctcgctcctcacaggctcatctcgctttggatcgattggtttcgtaactggtgagggactgagggtctcggagtggattgatttgggattctgttcgaagatttgcggaggggggcaatggcgaccgcggggaaggtgatcaagtgcaaagctgcggtggcatgggaggccggcaagccactgtcgatcgaggaggtggaggtagcgcctccgcaggccatggaggtgcgcgtcaagatcctcttcacctcgctctgccacaccgacgtctacttctgggaggccaagactcccgtgttccctcggatctttggccacgaggctggaggtatcatagagagtgttggagagggtgtgactgacgtagctccgggcgaccatgtccttcctgtgttcactggggagtgcaaggagtgtgcccactgcaagtcggcagagagcaacatgtgtgatctgctcaggatcaacaccgaccgcggtgtgatgattgccgatggcaagtcgcggttttcaatcaatgggaagcctatctaccactttgttgggacttccaccttcagcgagtacaccgtcatgcatgtgggttgtgttgcaaagatcaaccctcaggctccccttgataaagtttgcgtccttagctgtggtatttctaccggtcttggtgcatcaattaatgttgcaaaacctccgaagggttcgacagtggctgttttcggtttaggagccgttggtcttgccgctgcagaaggtgcaaggattgctggagcgtcaaggatcattggtgtcgacctgaaccccagcagattcgaagaagctaggaagttcggttgcactgaatttgtgaacccaaaagaccacaacaagccagtgcaggaggtacttgctgagatgaccaacggaggggtcgaccgcagtgtggaatgcactggcaacattaatgctatgatccaagctttcgaatgtgttcatgatggctggggtgttgctgtgctggtgggtgtgccacataaggacgctgagttcaagacccacccgatgaacttcctgaacgaaaggaccctgaaggggaccttctttggcaactataagccacgcactgatctgccaaatgtggtggagctgtacatgaaaaaggagctggaggtggagaagttcatcacgcacagcgtcccgttcgccgagatcaacaaggcgttcgacctgatggccaagggggagggcatccgctgcatcatccgcatggagaactagatttcgctgtctagtttgtgatctggcctgggcttggggttaataaaagaggcaatgctagcctgccctttcgatgaggaggtacatacacgctggcgatggaccgcgcttgtgtgtcgcgttcagtttggcttttgccaagcagtagggtagcttcccgtgtcggtaattatatggtatgaaccatcaccttttggctctacatggtatgaacgtaagatacaaattccaactacctctagctcgcttgtgtggtatctgtatcagtattcatgtgtttgtttgcttatgtgtttgtttgcttgtatttgctggtgcttgtatcgcgggatgcaatgagttgttgtttggttgttgtcaaccagg

SEQ ID NO: 95973 - DNA, 1861 bp, Zea Mays
acgcgcgcgctccgagccgcagatccgagctagcgcggcgcatccgacggccacgacagcgcagtgccgtcctccgccgccaccgcttggcgattgtccgcaccccaccagtccaccacctcccccacgagcgaaaaccacggtccacggaccacggctatgttccactccaggtggaggctgcagccccggtttcgcaagccgcgccgtggtttgcttgcccacaggcggccaaaccgcaccctccttcccgctcatctcgctttggatcgattggtttcgtaactggtgagggactgagggtctcggagtggattgatttgggattctgttcgaagatttgcggaggggggcaatggcgaccgcggggaaggtgatcaagtgcaaagctgcggtggcatgggaggccggcaagccactgtcgatcgaggaggtggaggtagcgcctccgcaggccatggaggtgcgcgtcaagatcctcttcacctcgctctgccacaccgacgtctacttctgggaggccaaggggcagactcccgtgttccctcggatctttggccacgaggctggaggtatcatagagagtgttggagagggtgtgactgacgtagctccgggcgaccatgtccttcctgtgttcactggggagtgcaaggagtgtgcccactgcaagtcggcagagagcaacatgtgtgatctgctcaggatcaacaccgaccgcggtgtgatgattgccgatggcaagtcgcggttttcaatcaatgggaagcctatctaccactttgttgggacttccaccttcagcgagtacaccgtcatgcatgtgggttgtgttgcaaagatcaaccctcaggctccccttgataaagtttgcgtccttagctgtggtatttctaccggtcttggtgcatcaattaatgttgcaaaacctccgaagggttcgacagtggctgttttcggtttaggagccgttggtcttgccgctgcagaaggtgcaaggattgctggagcgtcaaggatcattggtgtcgacctgaaccccagcagattcgaagaagctaggaagttcggttgcactgaatttgtgaacccaaaagaccacaacaagccagtgcaggaggtacttgctgagatgaccaacggaggggtcgaccgcagtgtggaatgcactggcaacattaatgctatgatccaagctttcgaatgtgttcatgatggctggggtgttgctgtgctggtgggtgtgccacataaggacgctgagttcaagacccacccgatgaacttcctgaacgaaaggaccctgaaggggaccttctttggcaactataagccacgcactgatctgccaaatgtggtggagctgtacatgaaaaaggagctggaggtggagaagttcatcacgcacagcgtcccgttcgccgagatcaacaaggcgttcgacctgatggccaagggggagggcatccgctgcatcatccgcatggagaactagatttcgctgtctagtttgtgatctggcctgggcttggggttaataaaagaggcaatgctagcctgccctttcgatgaggaggtacatacacgctggcgatggaccgcgcttgtgtgtcgcgttcagtttggcttttgccaagcagtagggtagcttcccgtgtcggtaattatatggtatgaaccatcaccttttggctctacatggtatgaacgtaagatacaaattccaactacctctagctcgcttgtgtggtatctgtatcagtattcatgtgtttgtttgcttatgtgtttgtttgcttgtatttgctggtgcttgtatcgcgggatgcaatgagttgttgtttggttgttgtcaaccagg

SEQ ID NO: 95974 - DNA, 1132 bp, Zea Mays
gcaatggcgaccgcggggaaggtgatcaagtgcaaagctgcggtggcatgggaggccggcaagccactgtcgatcgaggaggtggaggtagcgcctccgcaggccatggaggtgcgcgtcaagatcctcttcacctcgctctgccacaccgacgtctacttctgggaggccaaggggcagactcccgtgttccctcggatctttggccacgaggctggaggtatcatagagagtgttggagagggtgtgactgacgtagctccgggcgaccatgtccttcctgtgttcactggggagtgcaaggagtgtgcccactgcaagtcggcagagagcaacatgtgtgatctgctcaggatcaacaccgaccgcggtgtgatgattgccgatggcaagtcgcggttttcaatcaatgggaagcctatctaccactttgttgggacttccaccttcagcgagtacaccgtcatgcatgtgggttgtgttgcaaagatcaaccctcaggctccccttgataaagtttgcgtccttagctgtggtatttctaccggtcttggtgcatcaattaatgttgcaaaacctccgaagggttcgacagtggctgttttcggtttaggagccgttggtcttgccgctgcagaaggtgcaaggattgctggagcgtcaaggatcattggtgtcgacctgaaccccagcagattcgaagaagaatttgtgaacccaaaagaccacaacaagccagtgcaggaggtacttgctgagatgaccaacggaggggtcgaccgcagtgtggaatgcactggcaacattaatgctatgatccaagctttcgaatgtgttcatgatggctggggtgttgctgtgctggtgggtgtgccacataaggacgctgagttcaagacccacccgatgaacttcctgaacgaaaggaccctgaaggggaccttctttggcaactataagccacgcactgatctgccaaatgtggtggagctgtacatgaaaaaggagctggaggtggagaagttcatcacgcacagcgtcccgttcgccgagatcaacaaggcgttcgacctgatggccaagggggagggcatccgctgcatcatccgcatggagaactagatttcgctgt

SEQ ID NO: 95975 - DNA, 985 bp, Zea Mays
ctagaaatcctaatgattcagcagcacacctgtccgcctagccgcctacgcgtacacagaaaacaatttttttgtccacacacgcgcgcgctccgagccgcagatccgagctagcgcggcgcatccgacggccacgacagcgcagtgccgtcctccgccgccaccgcttggcgattgtccgcaccccaccagtccaccacctcccccacgagcgaaaaccacggtccacggaccacggctatgttccactccaggtggaggctgcagccccggtttcgcaagccgcgccgtggtttgcttgcccacaggcggccaaaccgcaccctccttcccgctcatctcgctttggatcgattggtttcgtaactggtgagggactgagggtctcggagtggattgatttgggattctgttcgaagatttgcggaggggggcaatggcgaccgcggggaaggtgatcaagtgcaaagctgcggtggcatgggaggccggcaagccactgtcgatcgaggaggtggaggtagcgcctccgcaggccatggaggtgcgcgtcaagatcctcttcacctcgctctgccacaccgacgtctacttctgggaggccaaggggcagactcccgtgttccctcggatctttggccacgaggctggagggtatgttctattccccgatttacttcactatgttgctgactatatatgtgctgtgtttatattttgcatatttattatgtttttgcgtctgagtttatgggtatggttggtggtctttgtttactgttttactagatgcatgtggaagagtcagaagaaatagtttttgtttgaaatggtataccaacggttggatattatctgtgtggacatcagatgttctgggttactggcagtggactttgacagatttatctatgattctttcattagcagtttcttcagctaatttactcttactattttttcagtatacaaaggcacgtacagc

SEQ ID NO: 95976 - DNA, 1862 bp, Zea Mays
acggcacggcacgcgacttgactcatctctccggccaggtagttggagtcgcgagcccactggtggttgcagtgttagatccgtccgcctgagccagagccagagcgaaggagtcaatctcacggcacgcgccatgtccgacgagtcgccgccgccagctccggcggccgagaagagtcagcccgccgagcaggcggcaggaggctggggcggatggggactctccatcttctcagagatctcccgcaacgcggtggaggttgctaagagtgccatcgccgacattcagcaaccgccggagcaggacacggtaccgggtagtggcgagaaggatcaagagaaggaaccggagggggaggaggaggaggaggagagacgcaaggcggctctggacaagttggagaaggccggtgaggactcaatcctgggccaggggctgaaggcctttgatagctcggtggagaccatcacgactggtacttggcaagctcttgggaccgcatggaggagtggttcactatttgttcaaaaattggaaaattcagcttcaagcttggccgaaaccattcagcaaggagaactgcctgcaaaagcatctgcgatagcaccgaccattttagagacagggaagtcatttacagcaaaaggaatggaagtgcttgaacgtgttggaaaggagacaatggagtttattgttgaagaaactggtatggaagttgataaaggcagtaccggtgaaggtgaccagcagacagaagaggaacagtttgaagaagtctcatttgacagatgcttctatatttatggggggcctgatcaattagaggagctggaagcattatcaagccactatgcattgttgtttaataggaaaaaggggaaacttaattctgaccagaaaacatattacgatggaaagcttaaagaaatagagcagatttttagtcttagcaccaatgctgatgaagatggaccagaatctgacaaagggaagaagactgaatcagctgacactgatactgacgctgagatgaagaagttatgtgaatatagtgttcgcaaggctgctaagatggctgcagggttcaccactgccttgggtgggctttctccaaacgagattatgaaacgaaccactagtaggcttgagaccattcactcagagggtgttcatagattatcggagatgtgctgccttgcagtttctcagcttctggtgctaggaaagtcagtaatatcttctgccaataaatcaaagaatgaggacggtgaaaatgatgttaagattgattggcccgaagatgccatttcaaaagccaaaataatcagatggaaggcgcaatccatctctgtggatatggaaaaggtgtctactagtttcgctacaggtatctcggatgtcgctgaagcttatgcggcagctatgcaaagtgctctcgccgacaagcaggacgacctcccaaatcagaagtctttacaggagaaggttaagtccatatccatccatctcaactccgatcagaccagcgctgtcagcaagctacaagatgccctgcggtacctggcctacgtcgtcgtatgcgcttcaatgccaagtgtgtgattgtggtgtgttccctgtctgagcatttgcctcaatcgttggccatctatgtacatttgcgtacacggggatcccttcaggcttcagggttgcagaattaggtacctcactaggacgtgttggttagttgtgatgttttgtactccattgctcttggaaagttgttgctctctttgtttttcctctgagaacaatctgatgtttaatatacatacaagtgaactgatgtgttcaatttaccgttgatggcttactgctc

SEQ ID NO: 95977 - DNA, 1221 bp, Zea Mays
tggtggttgcagtgttagatccgtccgcctgagccagagccagagcgaaggagtcaatctcacggcacgcgccatgtccgacgagtcgccgccgccagctccggcggccgagaagagtcagcccgccgagcaggcggcaggaggctggggcggatggggactctccatcttctcagagatctcccgcaacgcggtggaggttgctaagagtgccatcgccgacattcagcaaccgccggagcaggacacggtaccgggtagtggcgagaaggatcaagagaaggaaccggagggggaggaggaggaggaggagagacgcaaggcggctctggacaagttggagaaggccggtgaggactcaatcctgggccaggggctgaaggcctttgatagctcggtggagaccatcacgactggtacttggcaagctcttgggaccgcatggaggagtggttcactatttgttcaaaaattggaaaattcagcttcaagcttggccgaaaccattcagcaaggagaactgcctgcaaaagcatctgcgatagcaccgaccattttagagacagggaagtcatttacagcaaaaggaatggaagtgcttgaacgtgttggaaaggagacaatggagtttattgttgaagaaactggtatggaagttgataaaggcagtaccggtgaaggtgaccagcagacagaagaggaacagtttgaagaagtctcatttgacagatgcttctatatttatggggggcctgatcaattagaggagctggaagcattatcaagccactatgcattgttgtttaataggaaaaaggggaaacttaattctgaccagaaaacatattacgatggaaagcttaaagaaatagagcagatttttagtcttagcaccaatgctgatgaagatggaccagaatctgacaaagggaagaagactgaatcagctgacactgatactgacgctgagatgaagaagttatgtgaatatagtgttcgcaaggctgctaagatggctgcagggtatgtgtatccttcattaccatgtggattcacaactagtatgttggtacttatatttagttttgtcaagtattgatgaaatcatgtcaatttatagagaaccattttagcatgtagttgactagatagatagcaactttttaataaaatgcaatgtatacatgatgaaaacaacattacttaactttttgtgagaca

SEQ ID NO: 95978 - DNA, 990 bp, Zea Mays
tgacaactttaagaggttttgcccttggatcagcatgtcatcatgttcattttaaataagagaagcaacagagttccaaaaattgtatttccaacatctatgtacgatgaacgccgtctcagtcaaccaagtcatgggttcaaaatagcctctcctgcctcagtttactccactacaccccacaaaggtggaagactggcagtgggtctacctttatatgttacaaaagggaactaccaaaaccataggtacagcatgtacattatatttgaaccagataaagtctacatcagttgataaggttcctatggagaaaagaggatagtttttttttctgcacatcattatcttaagaagaggggtccaaaatagaccaacaatcaagggtcagcctaaagtaacttgccttctcatcttttcttcaatgttctctgcctctttggccaggtcaaccgtcgctacaaggtcttcaactcttaatccagaggggccgtgtaccgtgtccccatcaaattgcaaatgctgggtcgttcaattgcacatttgacgcataccatgtgcaagcccgattacaaaaacagtacactagcttagcgttccacattgttgatattcggaatatatggggttcggcagaaaagatattgtatatgaccaggccatgggctgcacgtgtatgctcgattgttatttggctaattcacttggaccaatccatagccattcaacattcatgcgtaccatggagcctcttctttgccagcatttgaggggctggatcgaattcaaaccctcctacatctcatgtttaaacagttaatcacagcctctgctttggataaaagggaaaaaataatagacacaatcaaagattttaaacctgtttcactagcatccatagcagccatatcatgtgttggtcgtgctacggttccttcgtttttttgtgcagctggaaatatgataacaagattaaatggacatatgtga

SEQ ID NO: 95979 - DNA, 829 bp, Zea Mays
ttgtatttccaacatctatgtacgatgaacgccgtctcagtcaaccaagtcatgggttcaaaatagcctctcctgcctcagtttactccactacaccccacaaaggtggaagactggcagtgggtctacctttatatgttacaaaagggaactaccaaaaccataggtacagcatgtacattatatttgaaccagataaagtctacatcagttgataaggttcctatggagaaaagaggatagtttttttttctgcacatcattatcttaagaagaggggtccaaaatagaccaacaatcaagggtcagcctaaagtaacttgccttctcatcttttcttcaatgttctctgcctctttggccaggtcaaccgtcgctacaaggtcttcaactcttaatccagaggggccgtgtaccgtgtccccatcaaattgcaaatgctgggtcgttcaattgcacatttgacgcataccatgtgcaagcccgattacaaaaacagtacactagcttagcgttccacattgttgatattcggaatatatggggttcggcagaaaagatattgtatatgaccaggccatgggctgcacgtgtatgctcgattgttatttggctaattcacttggaccaatccatagccattcaacattcatgcgtaccatggagcctcttctttgccagcatttgaggggctggatcgaattcaaaccctcctacatctcatgtttaaacagttaatcacagcctctgctttggataaaagggaaaaaataatagacacaatcaaagattttaaacctgtttcactagcatccatagcagccatatc

SEQ ID NO: 95980 - DNA, 258 bp, Zea Mays
agaaaaaaaagatcaccggatgttagaatcgatacaccattttcaactagtacaacagataagcatgttggaaatttcccttataccaatgcaaagttacaaaaagcaaatgtatacctaactaaattcaccatccctgtcacaaaaagatggccaaactacatgtggctcgtgcccagcacaagttagatttttcataccgtctcatttgacctaatttccaacagtatatataacgcagtatatgtatagcggccc

SEQ ID NO: 95981 - DNA, 933 bp, Zea Mays
tggattaagtagcgctgattcaactgctctccgagcatctttctccgaacccatcgtcgtctgaacaaaatccaagaaatcacaaccgatcaccgctccgtcgcacctgcgattcctgaaatgctcaccgggcagctgcccgctcccgcatttggccaccacagataagaaatgatacgacgatgctcgccaggatcatcttctgcgtcgtcgtcgccgccgccgtcctcgccgtcgtcctccttgccaccgtctccccgctgccgcaccggtcgggcagccgcaagggcgctgcaggccagcgcaccttcacggtgtacatccatcccacggcatcgacagccgtgcggcaggagcaagcccaagggcgccggcaagaagcgagcgcgctggtgttccaccaccggatgacggcggggccggagagcgcgtcgagggccgtcggcgcggcctctgggtttctgctcccggcgggcgagcggggtagtgccgtggcgtcggtgttcgacacggtgcacctgacgttcgacggcagcgccgggctgtccggcagtctctgcgtcgaggcgagcaacgagaaggcgcgccgggccgcgagacgccggcacggcggggaggaggaggaggtgctgcgagtggtgggcggcactggcgcgttctcgttcgcgcgagggcatgccgtcctgcgggggcagtggtcccgccccggcgccacggcggcggcgcttcttcttgagctgagcattttctctgctgagagtgatcagctgatcgcccattagaaaagaaaagaaaagaatcggagcgatcagtatgtcataataaacgatccagtttttgtcttttttttcatttgtgatttgaattggcaacgtgtttttttttaaaaatgtacatccttcgttccaaattaattataagatattttgaatt

SEQ ID NO: 95982 - DNA, 1540 bp, Zea Mays
gctcctccctttctacagccgccagcggccatggaggcgtttcgcggcggcgcgcggcatcccggcggcgggcgcgggttcctcccggtggcgcggtcctagcagcgaggtctcggtttggctagggggcgagcaggaccgacccggctcgggcggcaccagccacggcgcgggtgggcgatcgctgccccgccacgcggccccagtggcacggttgcaggccaaggcacgggcgccccctagtgcacgagcgcacggcctcaacagcacgcaggcgcgcgacccccggcgcataggcgtggcctcagcgacggcacgggcgcagtccccgcggcggcacgcgtgcgcggctgtgggcgcgtccccgcggcggctcgcgggcgcggcccgtcgtctgtgagcgcggccccggtggcacggcggtctccgtccccggccccagcgcgcgcgcggagcgcgactccccggcggcgcgcgagaatagttcgtcgttcaggggcgcgggcgcggcacccggcctcacatggcgcaggcgcgcgacccagcgtgggcttggccagccaggcgcgtccctgtgcgggcacgcggcctcgccacaggcgtgcggccccggccaggtcccggcgcggtctcgacgctcggtgtgccgctgttaggcgggcgaggcctcgacggcacgggtgcggctggcatggccccgtccggccgtgggtgtccccggcgtgggcacgggcccagcagccccggtggcgtggcgtggccccaacagcccaagcggagcgggcgcgagactcctctggcgcaagttctggcgggcagcgctaccaccgtctgtccgcaagattgcagcacacatgtgtgcaagaacagcgccattgcagatgaggaccgacagatacataacaaaactgagtaagcataaatcgcataccatttttaatctttgttgtctccaacgcaagtgaggaagcaatgcaatcatgcatgatttaggccatgctctcacttctgacttatccagtgcggttggccattgttgatgtgacgcaagtacatcggtcatccatcatcgtgattaaggctagaaaattgcctctgcagcatcatgtcgctgagaactgctctagcgacagcgtagtccgttctcttctgccgattaactcagtggagaatcgcgtgctgataacgtgttataactcggtggtaacgagacacgaaaatgtagagagaaagtgacagttatcctttattattgcagggagtcctgattatatacatgtgaaggggtgtatcccaagggatatgtcccttagggagaatctgtcgtaccctttggattggtcacatatacaatatacaatattttgtaacagctttgacaagacactccaaagatagatgaggacgaaaattatgttttattttttttatttactgatttgtcgttatacacacaaatgtgaaggtatgtttctatagatgtacatatttagagagcagttgctcattgataaagtggtctataacacttcttgatcaa

SEQ ID NO: 95983 - DNA, 4577 bp, Zea Mays
atgggcgttgatgctgctgcctctgctcggctgctgccggcgatgggggtgacatggcggtttggaccacaggcgattcacgaaggacttcatgtcccattattgcagatgaggttcactaacagcaaactgttgatagtgaacctttctcagcagcgcgccatggccataggtggattattgggtgggccggggcgctgcacagttgtgtctatggatgagataaaaagaacagttccttgctggagtgtatcatcaccttttgtcaatattggcatttaccgctcctcacccaaacagctacgatcggattcagccagatacttggagtggagcttatctatgctggggaaagagaacagggaggctccattaagaatcgcatgcccacctggtgtgcctcttgatttagtcagcaacttcgagatcaaatccttcgatggttgcgcaaatccgcacttgggtcttgctgcggtcgtagctgctggcatcgatgggctaagaagacaccttaagttacctgagccaattgaatcaaactcttctgatcactcttcaaaactgaaaaggctaccgcagaacttgcaggaatctgtagaatcgctttctgtagataaggttttgcatgagttaattggtgataaacttgtcacaactgctatagctatacggaagcaaggaatcaaatacagcaatttctcagatttgtgccagaagcaagaggctgttaaagaagtgcttggatctttagcaaagtttgcatgtgttttattccctaatattcctgaagcctacttggatcgctggtgcgacgtttacagctttggtgtcatattatgggagctggcaacgcttagaatgccatggagtgggatgaatccaatgcaggttgtgggggcagttggtttccaggatagacgacttgatattcccaaggaagttgatcctctggtagcaaggatcatattcgaatgctggcagaatgaccaacaacgcacgggcatatacctagtacaccttaaggctggagcgagggcgtccaccactcaccgtgcccccgctccagcccccgcccgcaacgtcttcctcccggcaatcccgcccccgcccacgccgtcccttcccttccctgcatcccgcccgcgccgtccctccctgcaatcccgcccccgccagcgtcgtgtccccgccgcacatctttcccacctctttctttcccttgctctgctaacgcgccgccggtccgtcggttgccgcctatcctgcttgctcgcgcgaccgctgttcatggtgatggtggatgaaggcggcaaaggagaggcgcagccgcctggattagacccaagaacccgccgatctgcggcgaccagggcgaccgacgacatggatggcggtggccgaggagaggagtgggagggggcccccccggctacgtgctctcgctcccggcggcggcgctgcccctgcccgtcgtcgtctcctgcctggacgccaccgtccggcgcaaggggcgcaaccatatccgccaccgtggccatccgtcgggctggccccgccgccccggcccccggtccacacactcccacgcctgcagaggagaggtcagcgaagagggtcaggatgtgcctgcagtgcggcgcggcggtgacgccgcagtggaggtcggggccgatggggcagggcacgctctgcaacgcctaccgggttcggctcaaggtggccggggtactgcgggatcagggccggttgctgccggagtaccggccgctggcgagccccaccttcgagccgtcggagcacgccaacaagcacagccaggtgatgcagctccaccggcagcggaagagccagggccagcaccaccctctgcccgcggagcatccgcgagccatggacgtcctccagtttccccagcggtggcaggcctacacggcgctccggagcgccggcaagagcgtcgagataatcttcgtgtcgttggaccgcgacgaggccagcttccgggaccacttccagggcatgtcgtggctcgcggtaccgttcgacgctgctggcctactacggcagaagctgtgcgcgcgcttcgccatcgagcgtatcccggcgctgatccctctgtcagcgtcagcgacgccgtccagcgggctgggatgtggagaggacgcggtgaggctggttggcgagtatggagtagatgcgtacccgttcagtgcgcagaggaggagggagctggagagcatggacgatgccaggagaggaggaggccggcttcaggagcttcttggctgcgaggagagagactatgtcatcagtgcagatgacataaagattcctatagctgaccttgctggcaagacagtcggcctgtactttggagcacactggtgcccaccttgccatgtcttcaccaaacagctcaaggaggtgtataacgagctgaaaatcttgagaccggtaagcttcgaggtcatcttcgtctcgatagaccgcagcaagggggaattccaagcaagcatgagttcaatgccatggcttgccatcccttattctgacgctgtaaggaaaaagcttacaagaatcttcgttgtcaagggtatcccaggactcctgatacttggtctggacggtaaagctctaaaaacagatgtccatcgccccgagctcctccccacctacgaaggctccaggtgtaataaaataaaaggtatcaaggcgcctaggatcacgcctaaaaacgtcatcagatttagcagctatactgataccttttattttattacacctgaagcttggtactggtctgagtatctttatctcaaaaaggaatccctcactgttgttatctcagatgtgaaatgcgatgacctaaaagaggagggcaaggtacaacaaactaaaaggggaaacagtattcacgaccattctagttcacactcaattcggtcgttttctgcattaacggagtcaggcccaggcctaacctcagttcatccgagcagccgaacacgcccgccgccattctacgccctgctgcccaggtcggacggaccctttgccggagacgagcacacgccacagcaggaattatcgggcgtagagcagcgcgaagcgagagatccaatggcggcggcggaggggcagtgggtgctcatggcaacggggcggacgccgactaacattgcggtgatcaagtactgggggaagcgggacgaggcgctcatcctccccatcaacgacagcatcagcgtaacgctcgaccctgaccatctctccgccaccaccactgtcgccgtcagcccctcattcccttccgaccgcatgtggctcaatggcaaggagatctcgctattaggaggaaggtttcagagctgcctcagagaaatcagaaagcgtgctcgtgactttgaggacaaggagaagggcgtcaagatcaagaaagaggactgggacaagttgcatgttcacatagcctcgtacaacaacttccccactgctgctggtttggcctcttcggctgctggccttgcctgtttcgttttcacccttggaaagctgatgaatgtgaaagaagattatggagaactttcttcaatagcaaggcagggatctgggagtgcatgccgcagtatatatggtggttttgtgaaatggtgcatgggagaaaaagatgatggaagtgacagtattgccgtgcagcttgctgacgaaacacactggaatgatcttgtaattattattgcagtggtcagttcaaagcagaaggaaaccagtagcaccagtgggatgcgagatagtgttgaaacaagtcctctcttgcagtacagggcccagacagtggtgccaggtcgggtgttgaaaatggaagaagctatcaagaaccgtgactttgaatcatttgccaaattaacttgtgcagatagcaaccagtttcatgctgtatgcttagacacgagccctcccatcttctatatgaatgacacgtcacaccggataattagccttgtggaaaaatggaaccactcagaaggaaccccacaggtcgcttacaccttcgatgctgggccaaacgctgttctaatcgcccaaaaccgtaaaactgcagcacatttcctccagaagctcctatactatttccctccacaggataatgatttgagcagctatctggttggcgataaatcaattctaggtgacgccggattgcattccatgaaagacgtcgaggctcttccagcacctccagatacgaagataccggatcagaaattcaagggcgatgttagctacttcatctgcagcaggcttggggcaggtccaaaggttgttgttgacgaaggtcaagcactgatcgattcagtcaccggacttccaaaaggcgtgtagttctagatttaggttggaataatggtttaagctggggattaaagacaatggtatcatacaagcaacctgggccggccaataaagatagaacacgttctcgccttttgtttttctccctcgcctagtatgtggctgaaatatttgtttcgctattttattgagcacttcagctgagacgcaagcggagaataata

SEQ ID NO: 95984 - DNA, 796 bp, Zea Mays
agctcactggtatccttcaaaaagaaactaatcttcacatctttcaaagcatttgctagggccccttcggtgagcaatagaatacgacttgcgctaccaaagcgtccatagctgaatgcaaaccattgagatggtccaggttgaggacctccatgacacctatgttggtgtgggttgtgccgccccatcgtgaccgtcatcgattgggcctccgagtccaggagaagacctccgatgaagaaagagacatgctgcacatgcacgagggtacttgcagatagatgtcggctctatggacgaacactcgaccaagtcagatgaggagtatgagggcctagccatgcgagacatgatggctaccggtccaacaatgagcagcaagctgtgagttaaagatgaactcacctgtcctggagagcaacatccataggagtgaggcaaaatggcgggtaccaccacaacatggacccgttcctgaagatgtccaaggaggtggtagccgacaccataatgtcttgcgcgtcattgtgtcaccggccggcaacacgctgcgctggtaccggcgggtgttatgtttcttaggcgtatgtttctgtgctttgagctgtgctatagactggttgtgccaactactgattttaaaagaaaaaggtgagctgaaaatcattgttgaaaacaaacatgtaacggttcgttctcatcagttgtgccaactaccaatcatttcattgatcagaatctgtcgttgctcatgagaaccaaaagtaagacacttcttaataacattggatgcaaa

SEQ ID NO: 95985 - DNA, 2168 bp, Zea Mays
gacatgcagttgtagcttggctcgaggcgggcatcagcgacgacaaacatcctgctcaatttgttgtatgataaatactgcgaaacaatgctggtgtttcataagatgaccgtgcagctcatgaaaatccagagggtggagtcgagcgagacgacgtggccggcgcggcgccaggtcgtggcgtgcgccgctgtttgctggtcgtggcgtgaggtcaccaaggaggtggtgaagacgctcaaggagtgcggcaggatcaccttccccatgtcccttaagcaggttggcactctctgccttttctctactttgatgatcaatcacatgtcttcacctttgcagaggcttatgattttgaagatctagaatctatggttgaagaaatagccaaagcattcaagacaaagataatgtttatatatgttgacactgctgaagaaaaccttgcaaaaaccattcctcactctttatggcattgaatcagaaaaggcctactggtccagttcttgaaagggtgggaatgtgtccaagaagacaaaggcatcgacccgccaattcttcgctacaaattaaaacagcactagggtgagatcagtgggcttgagagtagcatcatccttcaaacatgatgatgggtttctagctgatggtgtctctatagctcactggtatccttcaaaaagaaagtatggtgttgttttataagctctcatgtttatgactaaggttgagatttgtgaagattcagaaataattagctacatgcccttgcgtagcttacaatgcacaattagctagcttcattgttttaacttctctgcaatatgaacatgcaaattttaaccacctcatttgtttttaataagctgaaacaaattgttggttattattcccccttgtttggtcgccctcatttaagttgtggcttagatattcctactcagagagttggtacatgttttttatgcttatctttttcatttatcaaccatatgtgtgtttgatgttttttctatgcttagacctaaacaaaacattcttggtagccacatctaaaacattcatttcaagttctacattaattcatttatattccatcaacttttaaaatacaacacttagtttgtttgaaaagaaatagtttttgtgaaatcttcaaacaaggcttgacaatgatttattcatcgacaatgcatctgagccctctttgcattgtaagctcctacaatgaagttatacaaaagtcttatctattcattttggtttaagctggttgagcactttttacaatatctggtcaacacatctaggatgactcttcacatctgtcaattcaaattctcttcaaaacagctaatattgctccatattgtcttttgaagcttcctggaaaaaatgtcttttgaagctaatcttgctccatacagctaatcttcacatctttcaaagcatttgctagggccccttcggtgagcaatagaatacgacttgcgctaccaaagcgtccataggttgaggacctccatgacacctatgttggtgtgggttgtgccgccccatcgtgaccgtcatcgattgggcctccgagtccaggagaagacctccgatgaagaaagagacatgctgcacatgcacgagggtacttgcagatagatgtcggctctatggacgaacactcgaccaagtcagatgaggagtatgagggcctagccatgcgagacatgatggctaccggtccaacaatgagcagcaagctgtgagttaaagatgaactcacctgtcctggagagcaacatccataggagtgaggcaaaatggcgggtaccaccacaacatggacccgttcctgaagatgtccaaggaggtggtagccgacaccataatgtcttgcgcgtcattgtgtcaccggccggcaacacgctgcgctggtaccggcgggtgttatgtttcttaggcgtatgtttctgtgctttgagctgtgctatagactggttgtgccaactactgattttaaaagaaaaaggtgagctgaaaatcattgttgaaaacaaacatgtaacggttcgttctcatcagttgtgccaactaccaatcatttcattgatcagaatctgtcgttgctcatgagaaccaaaagtaagacacttcttaataacattggatgcaaa

SEQ ID NO: 95986 - DNA, 2196 bp, Zea Mays
gacatgcagttgtagcttggctcgaggcgggcatcagcgacgacaaacatcctgctcaatttgttgtatgataaatactgcgaaacaatgctggtgtttcataagatgaccgtgcagctcatgaaaatccagagggtggagtcgagcgagacgacgtggccggcgcggcgccaggtcgtggcgtgcgccgctgtttgctggtcgtggcgtgaggtcaccaaggaggtggtgaagacgctcaaggagtgcggcaggatcaccttccccatgtcccttaagcaggttggcactctctgccttttctctactttgatgatcaatcacatgtcttcacctttgcagaggcttatgattttgaagatctagaatctatggttgaagaaatagccaaagcattcaagacaaagataatgtttatatatgttgacactgctgaagaaaaccttgcaaaaaccattcctcactctttatggcattgaatcagaaaaggcctactggtccagttcttgaaagggtgggaatgtgtccaagaagacaaaggcatcgacccgccaattcttcgctacaaattaaaacagcactagggtgagatcagtgggcttgagagtagcatcatccttcaaacatgatgatgggtttctagctgatggtgtctctatagctcactggtatccttcaaaaagaaagtatggtgttgttttataagctctcatgtttatgactaaggttgagatttgtgaagattcagaaataattagctacatgcccttgcgtagcttacaatgcacaattagctagcttcattgttttaacttctctgcaatatgaacatgcaaattttaaccacctcatttgtttttaataagctgaaacaaattgttggttattattcccccttgtttggtcgccctcatttaagttgtggcttagatattcctactcagagagttggtacatgttttttatgcttatctttttcatttatcaaccatatgtgtgtttgatgttttttctatgcttagacctaaacaaaacattcttggtagccacatctaaaacattcatttcaagttctacattaattcatttatattccatcaacttttaaaatacaacacttagtttgtttgaaaagaaatagtttttgtgaaatcttcaaacaaggcttgacaatgatttattcatcgacaatgcatctgagccctctttgcattgtaagctcctacaatgaagttatacaaaagtcttatctattcattttggtttaagctggttgagcactttttacaatatctggtcaacacatctaggatgactcttcacatctgtcaattcaaattctcttcaaaacagctaatattgctccatattgtcttttgaagcttcctggaaaaaatgtcttttgaagctaatcttgctccatacagctaatcttcacatctttcaaagcatttgctagggccccttcggtgagcaatagaatacgacttgcgctaccaaagcgtccatagctgaatgcaaaccattgagatggtccaggttgaggacctccatgacacctatgttggtgtgggttgtgccgccccatcgtgaccgtcatcgattgggcctccgagtccaggagaagacctccgatgaagaaagagacatgctgcacatgcacgagggtacttgcagatagatgtcggctctatggacgaacactcgaccaagtcagatgaggagtatgagggcctagccatgcgagacatgatggctaccggtccaacaatgagcagcaagctgtgagttaaagatgaactcacctgtcctggagagcaacatccataggagtgaggcaaaatggcgggtaccaccacaacatggacccgttcctgaagatgtccaaggaggtggtagccgacaccataatgtcttgcgcgtcattgtgtcaccggccggcaacacgctgcgctggtaccggcgggtgttatgtttcttaggcgtatgtttctgtgctttgagctgtgctatagactggttgtgccaactactgattttaaaagaaaaaggtgagctgaaaatcattgttgaaaacaaacatgtaacggttcgttctcatcagttgtgccaactaccaatcatttcattgatcagaatctgtcgttgctcatgagaaccaaaagtaagacacttcttaataacattggatgcaaa

SEQ ID NO: 95987 - DNA, 458 bp, Zea Mays
ggatggttttagggtagatggagcatcccctacatgtgtcttccatgggatggcccaactgcagatctgttcctgggatactacacaatgactacattgcatactcggagctgctcgacaggagcgtcgtcggcggtgctgtaaacatctcctagagtcctcgggcacaagaaggtcaggcggtgatgccaatgcagatcatccaatcagatccagaatgcctgccactgtatacttggagctgctcgacaggagcgccgttggcggcattgcaaacatctcctatagtcctcgggcacaacaaggtcagccaatgacgccaacgcagatcatcccatcggatccggtattcttgacgaaaatccctgaagatgggaaacccacgctgctggtgcaaacaccgccggtgatgccagtgtaggccccattgcccttggacgggatgtcactgactacaa

SEQ ID NO: 95988 - DNA, 101 bp, Zea Mays
tgatgtggtggttgttagcttcatgtcgtttaccctgttggtgttaggtattgcagtactgtgtgtgctatctgatgcgtttggtagtagttagttgtagg

SEQ ID NO: 95989 - DNA, 835 bp, Zea Mays
tttgaaaaaggaacggcccatgttcagggagaaggctccgactgggctaggaggcgctaggctatcgccgcggccgccgttctctcacctgctgcatcgctgcttccgcctccgccctacaaggctacaccagatgcccagattttcgtccggttcttctccggcaacgagcagccaccaggtgtcttggtatttgcaaacagtgacaaaaggttctgcttcgctgtagagtcatgtctgcaaagatacgcgtagtgatgaagtcttttatgagccaaagcaaccaggtctcagggcttatgccattcacaaagaagattggactacctgaatcacgagccctgtacaccgtgttgcggtcacctcatatcgataagaagtccagggaacaattctcgatgcatgtcaagaaacagtttgtggaacagacagccaaaccacacgaacttcacaggaagttcttctggttaaaacgcctgcggatacctggggctcagtatgaaatccaaatttctttcaagacacgtctcgatatggcgagcctaaggtcccaagctccttgctgactctcagatcttccttaccgtcctgaatgtttgaagtgacttgtatccatcgacatttcatatgttatgaagacatgcttattttgatggcttttgaaaaaaaatgtacctgctaagtcttcattaccttgacagatcactagtcaagaaaatgcagcatgatatgacttgattcacaaaactttatggttgtactgtttccgatgcagtttaagcagtcatcatgctgaatcccttttaaattcatataatgatgttttgttttgatc

SEQ ID NO: 95990 - DNA, 285 bp, Zea Mays
atgagaacttcagaaaacttggatgcttggagttgtggtggttgaggggtatttatagccctcaaccaccaaagaagctgttggggaggctactggcgatgggcgcaccggacagtccggtacgccaccggacaggtcatgttcactgtccggtgtgctgccacgtcatccaaccgttagggtttggagctcgatcgaccgttggagctttgtcctcttgcggcactggacagtccggtgccacactggacagtccggtaccactttgactttctgctctgactt

SEQ ID NO: 95991 - DNA, 308 bp, Zea Mays
actagtcagttgcccgtgcgttgcgacggcttacaacaatacccacgtaaactatccatcaaaaaaattcaagattttttattgattgtctccgctctctgtataatatattttttgatttggctaactgatgttattgtttactccatgcaaatatgttttgttacaacacgaccaatgaagtgagcgattagaaaagagttcataacgattgactgaatgaacagagattataaaatgacataattccatcatacatagaccaaataagagaaagtttgtgagatcaagtttctaaaataagtccc

SEQ ID NO: 95992 - DNA, 768 bp, Zea Mays
cttacagtttatgctcatgaagcgttagagcatatgatgatttgttttctcgttgatagtctaagctcatgagcgatgtaacatatgaacttttgtttttgttttttttgttttttacacttgcagtttagactcgtgaagcgttggagtatatggtgattttttaacagtttaagctcgtgagtgatggagtatatggttatttatttattttttatatattttttcgctaagaatttaagctcacgagagatggagcacataatggatttatttttattatttatttctcgctagcagtttaagctcatgagtgatggagcatatagtgatttatttttgtttttggcgcttgcagtttaggctcttaaagcatggaagcatatgaaggttttattttatttattttctcgctgacagtttaagctcatgagcgatggagcatatagtgatttatttttgtttttggcgcttgcagtttaggcgcttaaagcattggaacatatgattgttttattttattttattttattttattttctcgttgacagtttaagctcatgagcgaaagagcacatgatggatttatttttattatttatttctcgctaacagtttaggatcatgagcgatggagcatatgatggatttatttttattatttatttctcactaacagtttaagctcatgagcgatggagcatgttaataataatattttttaagcatagtagcgttttaagaattttccatttattggcggagggc

SEQ ID NO: 95993 - DNA, 1869 bp, Zea Mays
ataaaacaggcgcagcgcaggagtaccctgccttcagcggctcagccccttctcctctcccaccccgcgcctcgcctcgccggagctcggccgccgcctccgccgccgctgtccggttccgcagcagcagacaccgacgcgtccgcacatccgtggaatgccctcagatacgccgccccgcgctgcgtcttcctgagggctgaggccgagaggctccgacgccgccgaaggccgaacccgtgcgtcccacgggtccggaggagggagagggaggagcggctgctcggcggccgccgaggaggagactagggggatgggggccgcgagagggttggcccgcgtgcggcgggaggcgctcgccgcgtgcatgacgtgcccgctttgccggggacttctcagggaggccaccgccataaccgtgtgcctccacacattttgtcgggagtgcattttggagaaaataaatgatgaggaaattgactgttgcccagtatgcaacattgatcttggctgcgatcctgaagagaaactcaggcctgaccacaaccttcaagatatcagaaataaggtatttccaattaaaaagataaatgttgattctccaaaggctctaacaacattgccagcaaagagaaaacagaggtctatttcttccttggtggttgacactccaagcgtagtaaagcagactggtttgactggaaagagaaccaaagctaaaagaagggcagcagcttctcttgcaacttctcccgttaataatggaactatgaaattaccaagtaaatctgaaaatggggatcagaagactgataaaagctgtccatcacaatctaccaaggcggcaacaagtgcaaacaaaactgaaaatcaagaccaaaagaagaccaagaaaatttcggcaaaacagtcgaccagagcagcaacaccagcaaagaaaaaacagcgaaatacagatgcacaagtttcaagtaagccatcttccgaaaaaagaaagaacagcaagacagctgacaaagatgggctccgtaaatcttcaaaagtacctaggtcaactcccaaaatccatgccgtcaatgaagagcaaataaaagagaaagagggtgaaccccctacaaggaaaggagaagcagacaacaaagtggttattcctgggacaagtgtgagagaacattcaaataactcaaatcttaaagagaaaaatgatggcacttctccagaaccttcgccattaaaagataaaacagcaacagaagattcataccgaggatcgctgggtagtgcaaaaggtttgcatggtccagtaactactccggtgtggttctcattaatttctttgcctaaccagaaagaagatccacaactgcctcagttaccaaagacttacatgagaatcaaagacggcagtttgcagatttcctcgatacagaggtacatcatgaagaaactggatctagctaatgaaaatgaggtggagatcatctgccatggcgaaccgatctgcccctcgagcacgctgcgtgggctgatggagctgtggcatcgtagacagccgacggagcccgtggaggcgtcggtgggtgcgccagccgaggagttcgtcatggtgctgggctaccgctgccaccgccggcacccttatttggcgcccggcaccaccgtcgccgtgcctccagagctgccctcctgatcaggtcggcaaggttgactgcaccgccgtggagcctcaactgcactgcactgctccgctcgctgtcgtccaatccccagtcagtctagccgtttaggatggaacagaggaaagaaattactcctacagttttttttacacatttcttagactttcttttggatcgtactcgtttctta

SEQ ID NO: 95994 - DNA, 1759 bp, Zea Mays
aacagactgattgctcctgctcgtattcgtagatccacccacccatcgctcgaacacacagaaccctacagtacagcaagagatcgagcagccacgcccacgcttctctcctctcctctgaaactatcctactatcgtactttcctttttttgttcccttctctttctctctctcccgtcgtcgccatttatcactccttcctcgtcgaaaatcttctgtcgtaataaaggggtcatccgtccaccgtccacgtgggcggcggttgcggctacggcggcggcggcggcggcgtcagcgggcgccggagatgtgagagcctccgtgccgttggagatggctgcggcgggggcagggaccgggagcgaggggaagaagcggggcgcgtcgcggagctggatcctgctcgacgcggccggggaggagcagctgctggacgccgataagtacgccatcatgcgccgcgtcgacatcaacgcgcgcgacctccgcatcctcgacccgctgctatcctacccctccacaatcctcgggcgcgagcgtgccatcgtcctcaatctcgagcatataaaggcgatcatcacttccaacgaggttctgcttagggatccttctgatgagaatgtaatccctgtagtagaggagctccataggcggttagcaccatcgagtgctactcagcatgatggaaaagagaacttaagtggccagcatgatgtagaaggggcagaagaagatgaatctccttttgagttccgtgcattggaggttactctggaagcaatctgcagtttccttgatgcacgcactactgagcttgagaccgatgcttacccagctttggatgagttgacatccaagatcagcagccgcaacttggatagggtacgtaagttaaaaagcgggatgacaagattgaccgcaagggttcagaaggtgagagatgagcttgaacaattattggatgacgacgatgacatggctgatctttatttgtctagaaagttggctggggcatcttcccctgtcagtggttctggtggaccaaattggttccctgcctccccaactattggttcaaaaatatcaagagcaagcagagccagtgcagctactgtgcatggaaatgagaatgatgttgaagagctagagatgttgctggaggcatatttcatgcaagttgatggcacattaaacaaattgacaacgttgagagagtacatcgatgacacggaagattacatcaatatccagcttgataaccaccgtaatcagttgattcagctagagttattcttgagttctggtaccgtctgtctgtcgctgtactcattagttgctggagtctttggtatgaatattccgtatacctggaatgacggccacggatacatcttcaaatgggtggttcttgtatcagggcttttttgtgcctttatatttgtctccattgttgcttacgcacgacacaaggggctcgtcggatcctgaatagctgaaataaccgcgtacttgcttccctcaactgtaaatttgagccagtgagcatcgactttgcggggtgattcatctgttgtaccaaattcggtagtatcaaattggggatgttgaataggaactgtaataggaaaaagttaatgcaaaagaaatatgttatgattgcccccggttttataaagtttgcaccgaaagattcaaacaaatatgttattaaccaggtgcctctttctgaaatgattttcatagctatgcacaagtcca

SEQ ID NO: 95995 - DNA, 1730 bp, Zea Mays
aacagactgattgctcctgctcgtattcgtagatccacccacccatcgctcgaacacacagaaccctacagtacagcaagagatcgagcagccacgcccacgcttctctcctctcctctgaaactatcctactatcgtactttcctttttttgttcccttctctttctctctctcccgtcgtcgccatttatcactccttcctcgtcgaaaatcttctgtcgtaataaaggggtcatccgtccaccgtccacgtgggcggcggttgcggctacggcggcggcggcggcggcgtcagcgggcgccggagatgtgagagcctccgtgccgttggagatggctgcggcgggggcagggaccgggagcgaggggaagaagcggggcgcgtcgcggagctggatcctgctcgacgcggccggggaggagcagctgctggacgccgataagtacgccatcatgcgccgcgtcgacatcaacgcgcgcgacctccgcatcctcgacccgctgctatcctacccctccacaatcctcgggcgcgagcgtgccatcgtcctcaatctcgagcatataaaggcgatcatcacttccaacgaggttctgcttagggatccttctgatgagaatgtaatccctgtagtagaggagctccataggcggttagcaccatcgagtgctactcagcatgatggaaaagagaacttaagtggccagcatgatgtagaaggggcagaagaagatgaatctccttttgagttccgtgcattggaggttactctggaagcaatctgcagtttccttgatgcacgcactactgagcttgagaccgatgcttacccagctttggatgagttgacatccaagatcagcagccgcaacttggatagggtacgtaagttaaaaagcgggatgacaagattgaccgcaagggttcagaaggtgagagatgagcttgaacaattattggatgacgacgatgacatggctgatctttatttgtctagaaagttggctggggcatcttcccctgtcagtggttctggtggaccaaattggttccctgcctccccaactattggttcaaaaatatcaagagcaagcagagccagtgcagctactgtgcatggaaatgagaatgatgttgaagagctagagatgttgctggaggcatatttcatgcaagttgatggcacattaaacaaattgacaacgttgagagagtacatcgatgacacggaagattacatcaatatccagcttgataaccaccgtaatcagttgattcagctagagttattcttgagttctggtaccgtctgtctgtcgctgtactcattagttgctggagtctttggtatgaatattccgtatacctggaatgacggccacggatacatcttcaaatggggcttttttgtgcctttatatttgtctccattgttgcttacgcacgacacaaggggctcgtcggatcctgaatagctgaaataaccgcgtacttgcttccctcaactgtaaatttgagccagtgagcatcgactttgcggggtgattcatctgttgtaccaaattcggtagtatcaaattggggatgttgaataggaactgtaataggaaaaagttaatgcaaaagaaatatgttatgattgcccccggttttataaagtttgcaccgaaagattcaaacaaatatgttattaaccaggtgcctctttctgaaatgattttcatagct

SEQ ID NO: 95996 - DNA, 1503 bp, Zea Mays
tctaactaactgctatcgtaagttgcaaccccagttccatctccctccctctctctctctcctcctgccatcaccctagaatacgagtatttacctccactttctctctccctcccatctcctcctactcctccctctatataaatatacgcatctccaccctgttcctgggtcctctcttcttccaccaccacctcctactccgctgcaaccccaaatctctccttcctcgcatacgcgcgcagcagaggagctgagaccaacgaagaagaagaacaaccgagcaagcacaagcttagctagcgtggaggtgcccaaggcgacgacggccgccgcgccaggctagccaaccagctgctcatcgctcctagctgcggagccgatggctggagccgacgtcgacgtcgggacggagctccgcctcggcctgccaggaggaggcgccgatgcggccaaggctgccaagaggggcttcgaggacaccatcgacctcaagctgaagctgcccaccgccggcatggaggaagctgccgctgccgccgccgccaagccggagccggccgccgagaaggccaagaggcccgccgaggcgccggccgctgatgccgagaagccacccgcacccaaggcacaagctgtgggttggccaccagtccggtcataccgcaggaacgtcatgaccgtccagtctgtgaagagcaagaaggaagaggagcctgagaagcagcagtccgctgccaacgccggcggcaacggctccgccttcgtgaaggtcagcatggacggcgcgccctacctgcgcaaggtggacctgaagatgtacaacagctacacggagctctccgttgctctgaagaagatgttcagcaccttcaccacatccgggaacaacatgaatgagggaaaactagttgatccggtcagcggtgctgatgtggtcactacttacgaagacaaggatggcgactggatgctcgttggcgacgtcccgtgggagatgtttgtcgagtcatgcaggcgtctgaggatcatgaagagctctgaagccataggtcttgcaccaagaacgaaggacaagtgcaagaacaggagctgaagaagatacagcgttaaagacgctgcccgttgtgtcaaaagaatggtgcccttgcagtgtgctgcggtttttctagaaatataatgcgttttaattactagttggagggagacctgtcttgttcaatttgttcatggaccagaagcaataatctatctgtgtgtagctggattggtgttatgcgatgtcccctaccgtgtgtcccagaatctacttggtgattttatcccagtgttgttaatcaagcttgtgtgattgttaagtaaagggcatcaatgagactattattattatggtaccttgtaagttaacctgtttgttaattgtcattataatatttggcaacctgtatgtggtcaagcggggggaacaggccatgtgccgggtgatggggaatccattagtat

SEQ ID NO: 95997 - DNA, 1340 bp, Zea Mays
atgcccgcccgcgcatcccctgtgatgcccatggacgagaggagggagatggatccggtggcggacgcccaccgcgtcgcgtggctccaacacggcctcctcgtgctcctccatatccaccctatccgcctccacctccacggggacgtcgccgtccatcgtcctaccacggaggacaactgctactacctcggttgccacctcaccaacatcaaggccatgcggaacctgggtcgggggaggggtccgatgccaccgagctgttgtggacgacgccgatgtggtccagggccaagtccaagtagtaagaggcagaggcagtcatcatcttttcttttctttttccccctcgggattctgagaccttgtgcgggcaaagaggggcatgcggcggcccgggcactgggcgaggtctggcgctggggctccggtcaacagtgtgaagccaggagaaatatcgggcgggtgagcagcccaacaacagctctccaccttcctcaccctttcctcctgatatttcctcctttctccatcccttcccctggcttcacggctctccatggtgaagagggcgtccaccgcgatggctacgacgacggcggtggagcggcttggcgctcccaacagtttgtagacgcattcactctgaagaaatatgtagctaaaggtgttgatgtcatggttgtcagagagcttaatggaggtgttgacgatgaacgggctcgccaaggacgtgccgacggtgaacgggatgcacaaggagcccacgaccgcacatcccagattgctcatgttgcctactgcgcatctgaaaagaaggttcacatgagcatctgagcaggcctttcgaatcataatctgcatggttcagttcaaaaataattatgtatgttgtttacaaggaacaactttggctgaagcaagctgtgaccaacactctcatggctagattggaggtccaaagatttagttccctaggtctgacaccagcaggagtttccggtcactactatcatcaccgttgggaggcttctgtatgatcttgatgtcatttgtgcttcgttgctcgatcatgtgcttcactttattgtccagatccaaaaacagtgctagatttggttcctagagcattctttacattcttcatgggccatctgcgctacagcagttgttgtagtgtatggctagcttacagtttaatgtttaggtaactgtttgcttattttattgttttaatacctcactaataaagtacttatgttataactaaacgtcaatggtgtctgatgttataaaagtcttgtgctaataaaaggagggaagattacatcttttgtata

SEQ ID NO: 95998 - DNA, 267 bp, Zea Mays
atggcgagagaagacggtaggagagatagagataccgtcgccgttcttgtcgaagagcgagaaggcctcctggaacgcgagcctctgctcgtccgtcagcccgtccatgcaactgacagcaaggcactatacgggaccaatgccagttgccaggtgaagggggtgctggaatactgtaatttgatttcaaaagacgtgatatatatggcgcagcatcgctccttggttacagtagctgtaacaccataccagaccaccctggagtaa

SEQ ID NO: 95999 - DNA, 1870 bp, Zea Mays
ccgtgaggtggacgaggcgcgccacctgctaagccgaatcgagcagcagtagccaccttgccatggcgatgcaggctgctttcctcgcggggttctcgcagctcgccgcgcagccgagccgcgactgcgccgtggcagtggcgccgacgcgggtggccgttgctgcggtgggtagcgccaaggtgggcgcgcgggtaggcttgaaggcggggatcgccgcgcccgcgcccgcggcgggccgcggggtgcggtgccgcgcaagcctgatcgagcccgacggcgggcagctggtggacctagtggcgcccgaggagggcgggcggcgcgcggcgctccggcgggaggcggcggaactgccgcaccggctgcgcctcggccgcgtcgacaaggaatgggtccacgtcctcagcgaagggtgggcgagtccgctgcaagggttcatgcgcgagcatgagttcctccaaacacttcattttaatgccatccgcggccaggatggcaggatggtcaacatgtccgtccccatcgtgctctccgtaggggacgcacagcgaagggccatccaggccgacggcgccacgcgcgtcgcgctcgtcgacgaacgcgaccgccccatcgccgtcctcagcgacattgagatctataagcataataaggaagaaagaatagcacggacatgggggacaactgcacctggattaccttatgttgaggaggcaattaccaatgctggtgactggttgattggtggggacttggagattatagaaccaatcaagtacaatgatggtctagatcagtatcgcctgtctccagcacagctgcgtgaagagtttgccaggcgcaatgctgatgcagtatttgcctttcagcttcgcaatccagtacacaatgggcatgctctacttatgaccgacacacgcaaacgcctccttgagatgggttataaaaaccctgttcttctgctccatccactgggaggattcacaaaagcagatgatgtgcctcttagttggagaatgaagcaacatgagaaggttcttgaggaaggtgtcctcaacccagaatcaactgttgttgcgatcttcccctctcctatgcattatgctgggccaactgaggttcaatggcatgctaaggctcgtattaatgctggtgcaaacttctatatcgttggaagggatcctgctggtatgagccaccccacagagaaaagggacctctatgatgctgatcacggaaagaaggttttgagcatggctcctggccttgagaggctcaacatccttcctttcaaggtggctgcgtatgacacaaagcaaaagaaaatggatttctttgatccatcaaggaaagatgatttcctgttcatctctggcacaaagatgcgcactcttgccaagaaccgagagagtcccccagatggttttatgtgcccgggtggctggaaggtactcgttgaatactatgacagcttggtgccatctgagggcagcagcaagctgcgtgaaccaattgcagcctaaaatctggaaaatccttcatataaggaatgctactatatcttagcaagcggttctttgcgacatagaaccgatgctatatgattgtatactggctgtaagactgtaaaacactaggcttgattcggatgttaatgtgtgctttgtacccggtgtaccttctctgctggcagtgttgcacatgcactggagcacatcaaacgtttggtgttaataaggacaggctatgtatcctctgccagattgtacatatatacattgtggtgatatataattataaagctgacctctgccgtccgggctcgtagtgatgaacagttttatcactagttctctttaagcatcaa

SEQ ID NO: 96000 - DNA, 77 bp, Zea Mays
gaaggtccggtggtggccctggccgccaatttacaaaaccaaacaaaacgcacccgcaatataaagaggagaccaag

SEQ ID NO: 96001 - DNA, 4336 bp, Zea Mays
ccctttgtctagcccgtacgaaaccctaggctccgccgcccaaaacctcgccgccgcgccgccgtacggcggcgccccatggccccggccttctccgtccctgacgcagaagacctcccagcccgcagatccgacgcctccgacgtcgcaggcaacgtctgggacctcgccaccctccccacgccccccgccggcggcggccgcgaaatatacatctaccgcaacacgtttaacctcgtcccgcgctccatcggcggcagagcccgcggtctcaggtcgcttaagttcttcggcaacgatgtggaggtgctacccgcggattccggggacgagctggacgggctcgaaagcctccaggtcaaggtgtccgcgcccagggtctcaggggcgccgctccgtcggatgcaggctctcaaggagctcgagctctcaatggtgccgcccaggccatcctcgtgctccatactggcggaggttgcccggctcaagtgcctcaccaagctcaccatttgccacttctcgattaggtacctccctcctgagattggttccctcaagaagctccaagaacttgacctctctttcaacaaattgaaaaactttcctaactgtataattgagttgagtgcattgaagtttctcaaagtgaccaataataagttggtggatgtaccctcgggaatctcctctttgagatgtcttgaaagccttgacttatcaaacaacagattgacttctcttggttcagttaaacttatttctatgcttacgctgcagtatttaaaccttcagtttaataggctctcccattcctatgtaattccttcatggatatgctgtgacatgaggggaaatgttgaaaatactatgaagggttgcaagttaaagtacacaggtgtagcaaccatgaacagtttagcagaacctagtacatcgagtcatgcttgtgacagcgcccttttatgcgtgcaatcagaatcttcgccaaatttgaaacaccatgctccacataaaattaagaagggctggaggagacgggattgcttgcaacaacgagctcgtcaggaacgtctggagtcgagcaggagcaagctgaatgaaaaatacatagatgaaatggctgtgaacatggctgaagatgaatgcccttctagtttgcatgatatggaaaataagctaggcatcagaacaattgatgaagaaacttcagtacaggattcgttgaaagaaacaagttctatatctgaagatctattttcaatagttgacgatgacttggatgggcttacgaaggattgtggcacgatggtacaggatcactatgatgaggagaaacctggattcaatatgagaggttacaatgatgacaattcttgtatcagtggggagcctgcttgtttcagcagaagcagggtttgcagtgttgaaaaggaactagatgatactgcttcatccgtccatgatgttggtgagattgctcgagacaattcttcagtgacacccaagtttgctttaaaatctaaaaggcaccctgatatggacagcaatcctaaaccaagcaaatgccctcgaccaattgatgaacgctcaaaactttcatataaatacagtgtggaatcattttgcagcatagatgaccatctaccagatggtttttatgatgcaggccgagatatgccattcatgtcattagaggagtatgaaaggagtcttgggctgtatgcacgggaggttattctcttggacagagaacaagatgaagaattggatacaattgcttcttcagcacaattactgctatctagtttgacaaggccaagctcttgtgaaatggaggaagatgcaggccatgatttactgagggcatcagtgctcgctttgtttgtttctgactgctttggtggttgtgaccgaagcgcttctcttgggagaacacgtagagctattgttagcttgaggaaggagcagccttttgtttgtacttgttctgctgggaacttgggcgacaacaatgaagctaagcagaccaatattctttctgggcactttgattttgctggtttgtgtaatagatcaatacatctcatcaaggaaagaagaaattcgggtattgtacctataggttcactgcaattaggtgtttgtaggcaccgagctgtcctaatgaagtatttgtgtgaccgggcggatcctccaattccttgtgagcttgtgaggggccatcttgactatacacctcatgcttggaacattgttcctgttaaaaagaggaatggctgggtaaggatgattgttgatgcttgttaccccaccaacataaaggaagagacagatccagagtacttttgcaggtatataccactcagtcgacttcaaattgtgctcgatgatgagggctatactcctcggtgctctttcccatctgtgtcatcatgcaaagaaattgaagttacaccttctagttctgtctatcactgtaaaattggtgctgttgatgctgctgcaaagatacgatatctggatactcgtagggtctcaaatgatgaagttaaactttttgaatacaagcttctgggggaagtaaggatgctgggtgcgctaaggaagcacagatccatagtggacatatatggacaccaactttcatctaaatgggttcaagtcgatggtgataaagaatataggatattgcagtctataattttaatggaatatgtaaatggaggttctcttaagggatatttgacaaagctactgaaggagggcaagaagtgtgtccccattgatctgtcagtttacattgctcgggaagttgcttgtgcattgttggagatgcacaagaagctagttattcacagggacataaaaagtgagaatgttttgattgatttggaccccaagaggaatgctggtgcacccattgtcaaactatctgattttgacagatccgttcctttgtattctttgtcccatacatgctgtatatctcagcttggtacacacccacctgatgtttgtgttggaacaccttgttggatggctccagaggttgttaaggccatgcatgaaaaacaccactatggactggaaatagatatctggtcatttggatgttttttattggagatgcttacgcttcagatgccttaccagggactttctgacactgaaatatatgatctgatactgaggaagaaacagaggccaaggctaactcaggaactagaagcattctggacaatggatgagccagctacgagactcaagttagggatcacatctgatgctcatgcagataaattgagacacctgatagatctcttctaccagtgtaccagaggacatgcatccaggcggcccaaagctgtgcaaatttacaactcactgtgctccttgcccacatgttacgacatgaggtgaacgttctgatactgtatgaacgcgaaacttgatgcagaagtgcaggggaaggtcaaggcaggacatctagccagcctcagagggtttggtgctctaacccgaacatttcaccgtgagttggccttcaggtgctgccaggcagaacatgagaagtgggaccaaggctagcggctgtggtcgccagagctcctcctgagttggtcagttttgtagcggcacggcatctgcgtccacttgtagtcatcatcagttggtcagttttgtagtggcacggcatctgcgtccacctgtagtcatcatcatgtatgtgttatcacatccattgtttccccttttcatggttgctgccatcacaatggggtttaagttatcaaattaggtcattggtgccccaggggcatttgtctgctagaccgctgcatttacttctctatgtgtattgtattgtttatatctgtttagaaaaaaatgactgttgtccatgtaacaattgatgacatctgctatgtgttattgcgaggttatttgtttatgctgattttaccagccattttcgggcatgagctcttgggaaacctgtatcgtgtacagtctcgacagacaagaatatactgatgaatcttgatttatgtgtcagtcttttcaccatttattatatatatgctcgcctacatttaaaacttagtttgttactttcttttttattaaggtcgacacaaattgattaaattcgttaagatgcgcttgaatacatataacttccggcatacgaatagtataagacgttatttgagacagagcttattagtaagactcttggtcatatataacttcttttttttccacaattttaccgcagactttatattcattacttcacgcaaaacatcaaaagataaacggatctgtaatgtgg

SEQ ID NO: 96002 - DNA, 2820 bp, Zea Mays
ccctttgtctagcccgtacgaaaccctaggctccgccgcccaaaacctcgccgccgcgccgccgtacggcggcgccccatggccccggccttctccgtccctgacgcagaagacctcccagcccgcagatccgacgcctccgacgtcgcaggcaacgtctgggacctcgccaccctccccacgccccccgccggcggcggccgcgaaatatacatctaccgcaacacgtttaacctcgtcccgcgctccatcggcggcagagcccgcggtctcaggtcgcttaagttcttcggcaacgatgtggaggtgctacccgcggattccggggacgagctggacgggctcgaaagcctccaggtcaaggtgtccgcgcccagggtctcaggggcgccgctccgtcggatgcaggctctcaaggagctcgagctctcaatggtgccgcccaggccatcctcgtgctccatactggcggaggttgcccggctcaagtgcctcaccaagctcaccatttgccacttctcgattaggtacctccctcctgagattggttccctcaagaagctccaagaacttgacctctctttcaacaaattgaaaaactttcctaactgtataattgagttgagtgcattgaagtttctcaaagtgaccaataataagttggtggatgtaccctcgggaatctcctctttgagatgtcttgaaagccttgacttatcaaacaacagattgacttctcttggttcagttaaacttatttctatgcttacgctgcagtatttaaaccttcagtttaataggctctcccattcctatgtaattccttcatggatatgctgtgacatgaggggaaatgttgaaaatactatgaagggttgcaagttaaagtacacaggtgtagcaaccatgaacagtttagcagaacctagtacatcgagtcatgcttgtgacagcgcccttttatgcgtgcaatcagaatcttcgccaaatttgaaacaccatgctccacataaaattaagaagggctggaggagacgggattgcttgcaacaacgagctcgtcaggaacgtctggagtcgagcaggagcaagctgaatgaaaaatacatagatgaaatggctgtgaacatggctgaagatgaatgcccttctagtttgcatgatatggaaaataagctaggcatcagaacaattgatgaagaaacttcagtacaggattcgttgaaagaaacaagttctatatctgaagatctattttcaatagttgacgatgacttggatgggcttacgaaggattgtggcacgatggtacaggatcactatgatgaggagaaacctggattcaatatgagaggttacaatgatgacaattcttgtatcagtggggagcctgcttgtttcagcagaagcagggtttgcagtgttgaaaaggaactagatgatactgcttcatccgtccatgatgttggtgagattgctcgagacaattcttcagtgacacccaagtttgctttaaaatctaaaaggcaccctgatatggacagcaatcctaaaccaagcaaatgccctcgaccaattgatgaacgctcaaaactttcatataaatacagtgtggaatcattttgcagcatagatgaccatctaccagatggtttttatgatgcaggccgagatatgccattcatgtcattagaggagtatgaaaggagtcttgggctgtatgcacgggaggttattctcttggacagagaacaagatgaagaattggatacaattgcttcttcagcacaattactgctatctagtttgacaaggccaagctcttgtgaaatggaggaagatgcaggccatgatttactgagggcatcagtgctcgctttgtttgtttctgactgctttggtggttgtgaccgaagcgcttctcttgggagaacacgtagagctattgttagcttgaggaaggagcagccttttgtttgtacttgttctgctgggaacttgggcgacaacaatgaagctaagcagaccaatattctttctgggcactttgattttgctggtttgtgtaatagatcaatacatctcatcaaggaaagaagaaattcgggtattgtacctataggttcactgcaattaggtgtttgtaggcaccgagctgtcctaatgaagtatttgtgtgaccgggcggatcctccaattccttgtgagcttgtgaggggccatcttgactatacacctcatgcttggaacattgttcctgttaaaaagaggaatggctgggtaaggatgattgttgatgcttgttaccccaccaacataaaggaagagacagatccagagtacttttgcaggtatataccactcagtcgacttcaaattgtgctcgatgatgagggctatactcctcggtgctctttcccatctgtgtcatcatgcaaagaaattgaagttacaccttctagttctgtctatcactgtaaaattggtgctgttgatgctgctgcaaagatacgatatctggatactcgtagggtctcaaatgatgaagttaaactttttgaatacaagcttctgggggaagtaaggatgctgggtgcgctaaggaagcacagatccatagtggacatatatggacaccaactttcatctaaatgggttcaagtcgatggtgataaagaatataggatattgcagtctataattttaatggaatatgtaaatggaggttctcttaaggtaaaaatcatttatcatgtttatggcttcctcctgcattgtctcaacatcaattaagatgttcatttttggtactgtacctgt

SEQ ID NO: 96003 - DNA, 406 bp, Zea Mays
attaccgtggattggagaagaagtgcccctggccatgcgagcagtgaagccgcaacgatggtcttcctccagtgaaaactccccgcccttggtcgcttgtcctgcgcagcgaggttgccacattctcacttgcgaactggcagcgcttctcgacttgataacaaggtcacgacaatggtggacacacaagggctatggcacagctcacacggtcgtgtattccctcacggctatcacgccagcgcaacatggatgagggctcggctaaatagatccgcgcagaggagcagtcggtcccagcaagccgcccaggttgttacgggtttggggaaatctcaacaacctgctccgagcgtggcggcatcggaatcggcattcggtatgaggagaggagaaaagggatgac

SEQ ID NO: 96004 - DNA, 1287 bp, Zea Mays
aaaaaaatgtttgttaaaagatcctacggaccgaccaaagggcaaaatgggaaacgaaaaagagtctatatagttgacttgtgggggcttgtggcattcagagtttccgtgccgtagcaacagacaagggagagtgggagactagcgcaacaggacagcgcacggaaagcgaggggaggggagacggagagggcgcatcggacggcggcgagatgctggcggtgttcgatcccacggtggccaagtgcccggagggtctccgcagccccccggtcgccggggcggccgctggagcaggcggggccggcgcgggcgcgctgatgaagggcttctccgactcgcacgacggcgccgtcaccgtcagcctgggcccctccggcgcgctggcctactcggcggccaaccagagccccctcgtgccaaggttgtttggtgctgtgaatgacatcttctgcttgttccaagggcatattgagaacattgccaacctgaagcagcattatggcctgagcaagactgcaaatgaggtgactatcctcatagaggcctacaggaccctgagggacaggggccctgtcccagccagccaggttgtgagagaccttagtgggaagttcgcgttcatcctgtatgacaccctgtcgaagtctacctttgttgctgctgacgctgatggtagcatccctttcttctggggcgttgactacgaaaaccaccttgtgttctctgacgatgttgggatcctcaagacaggctgcggcaactcgtacgctccatttcctaaaggttgcttctacaccacctccggtgggctgcagagcttcgagcacccgttgcacgaggtcaaggcggtgccacgcgtggacagccaaggccagatgtgcggctccatcttcaaggtcgacagcgagagcaagaagaagcaggacgctagcatcccccgcgtcggcagtgctgccgactggtccaaccagttctgaccatcttcttgccatccattgtcccggctagtacgaggtgcagagctgtgtatctgatgaatccatgagacgatttctgctacgtttcttgcacgcttgtcgaacactgtgagactcacatcgcgctcatctacgctacgtgtaactgatactaatgatacggagtgttccaggtggtggtagatgtactgcagaatctatctcccatgtttcaataaacctgaataaggtgctcggtttggatctatgcatttatgattctagtacttctgaatcgaattttatcgcatcctttcctttttcttct

SEQ ID NO: 96005 - DNA, 8354 bp, Zea Mays
atgaaatggtccacattactcagtaaggtcgtcttcgccggcggccagcagcagcagccgccacctccgccgtcgccgccgccggagtctccgttccacggccagcaggcggtccaggacctcgccaccccgaggctcagctccgcctccaccggcggggacgagggcggcttcgacgcggcggccgggagctcgccctctgccgctgcgtcctctgccagggggagaaatgaattggagtcggactttaggagattatgggaagaatttcgctcttccagctctgaaaaggagaaagaaagggccttaaatttggctgtagatgtcttctgtaggctagtgaagcagtattctagtgtagctcaattagttacaaagttagtagaaggacatattttttcttttgttattggaagagcttttgttactgatgtggagaaactaagaatccacagcaaaggaagaccgctgcgtgtggctgatgttattggcttcttttcggataccacagagcttggtatatgtccaggatcaaatttgttgtacgcagtcgaagtgcttgtgactgagacaaatgataggcaacctctgttggactctggtattttgtgctgccttatatatatcctcaattctctattgagccccaatgagaactccacagataccttgcctgttcaccaagaaggatccagaaatgagaaaaacaaaaatttggatcctatgcaatcacgacggcttgagttcagggatggtattgttccccttcacacaattcagctccatcgccatgcaatgcaggtccttggtcttcttcttgcaaatgacaatgggacttctgcaaaatacatcaggaagcaccagctgattaaagtacttcttatggctgtgaaagatttcaatcctcaaagcggtgatgctgcttacactatgggcattgtggatttattactggaatgtgttgagctgtcttacaggcctgagtctggggccataaggctcagggaagacatacataatgctcatggttaccagttccttgttcagtttgctcttacactttgtagcttacacaaaaatcagactctccaatcctcatccaagttagcatccgaagcggatgcatctgttccttctcacagattagaacaagatatattctcatgtgacctttcacctcagttgtctaggttgcttgatgttcttgtaaatttgtcacaaattggcccctcagaaaatggtggtgttagtagccctaaggccttgaggggttatcatcttcttgcactttttcttcataggagaatgtcactatttgatatgcaatctcttgatatcttctttcgtattgctgcctgtgaggcttcctttcctgagccacagaaatcaaagataaatcgaacagcaggctatgcgtctggaatgtccccagaggccagccttgatgatctcaccttacccaggtttgccgatgatatgtcttctgggggatcacatggggatctagatgacttttcagctcaaaaggattcatttagccacttgtctgagctggagaatgctgacttagctggtgagacttctgaattcatagtcttgtcaaatgctgatatggttgaacacattcttttggactggactatatgggttgctgctcctatatcagtgcaaataactcttcttgggtttcttgagaggatggtgtccatgcattggttcagaaatcacaaccttacaatgctgcggcgaattaatcttgttcaacatcttcttgttacgttacaacgtggtgatgttgaaattcccgtgttggagaagctagttgtgcttctaggtgtcatcctggaggatggttttctagcttctgagctggagcttgttgtaagattcataataatgacatttgatcctccagagcttacaccgaaccgccagattgtgcgggaggctatgggaaagcatgttattgtgaggaacatgttattggaaatgcttattgatctacaagtaaccataaatgctgaagagttgctggagcaatggcataaagttgtttcatccagattggtcacatatttccttgatgaagcggtacatccaactagtatgagatggatcacgactcttttaggagtttgccttacgtcatcaactacatttgcattgaagttccgtacaagtggaggttttcaaggattgaatcatgtgcttccaagctttcacgattctccagaaatatactatatattgttctgtttggtgtttgggaagcctgtttatcctcgagtgccagaggtccgcatgcttgatttccatgctctcatgcctagcgatggaaactatggagaattgaagtttgtggatctcttggatactataattgcaatggcaaaagctacatttgattccttgattatgaaatctatgcttgcacatgagaataacaatctttcacatcttaatggcaccttggtcgcggatcttgttgaggcgacatcggacatgggaggtgatcttcaaggagaagctctgatgcataagacatacgcagcaaggttaatgggtggtgaagcagcagcacctgctgttgctacttcaatattgaggttcatggttgatctggcaaagatgtgcccaccattctctgccgtttgcaggcggcatgatttcctagagagctgcattgatctctatttctcttgtgtgagatccgattttgccctgaggatggcaaaagatcttacaactgttgcaactggcgagatgaatgaacatgatgatgataatggaagtttaaaggatgccctttcaagtttaccacatgatcaggatcaatctaccaaaacattgagtgccacaagttttcctcaggagcagaaaagttccagttcagaaagtactggcatgccaaacccttttgaaactgctgaagccaaagcagatgattcttcgaatcaggagttcagcaataaaattttaaatggagaagcaaatcaaatatttaataatgctcgtgatcaagggcggatcacagcttccggtgcaaatggcatttctgaattccaccatgtaactgattcacccaactcagttgctatgaataatgttggatctcctgttttatccgagaggtcaacccacagagcagctagtacccctactgcatctccaatggccccattcacatcttggcctggcagtgcaggatcgtatactgatggtagacacctgacagcttctccatccatggcttcatctatatctgggatagacctggactcgtcccctgatctgaggacaaatattcagggaccatctgccgcaaatacccttttcccaatcaattccaagcttttgcttgacatagatgatttaggttatgggggtggcccatgctctgcaggagctacagctgttctagattttgttgctcaaattcttgctgacactatctcagatcagcttaaagcagcactctttattgagaacattttggagtccgtgcctttgtttgttgatattgactctgctctagtttttcaaggcttgtgtctaagcagattgatgaacttccttgaaagaaagctcttgcttgatgatgaagaagatgggaagaaacttgacaagagccgctggtcggtcaatttggacccactttgctggatgattgttgatcgtgtgtacatgggctgctttccaaccccactcagggtactacaaacactagaattcttaatgtcaatgttacagcttgctagtaaagatggccgtgttgaagatgccgtgcctccagggaaaggtattttgtccattgctcgaggaagcaggcaacttgatccatacatccacgcgatattgaagaacacaaaccgaatgataatgtactgtttcctcccaatattccttaaaagtatgggggaagatgatctacttgcaaatcttgcattcctgacggaaactgggaggagtttagcttctaaacgttatcaggaagatttttctattgatatttgtacagttcttcagctactagttgccaacaagagattggtgctctgcccaagcaatgttgatacagatctaatgtgttgtttctgcataaatttaatgtcacttctccatgacaagagagtaactgctcaaaacttggcagttgatttacttaaatacttggtagtgcatcgtcgtcaatctcttgaggaccttctagtttgcaagcctaaccaaggacaacaactggacatcctgcatggaggacttgataaattggtcactggaagtacatcaacgttttttgaatggctgcaaagttctcagcaaacaataagtaaagtgttggaccagtgtgctttaataatgtgggttcaatatattaccggctcagcaaaatttcctggcgtgagaataaaaggaatggaggtcaggcgcaagaaagagatgggacggaaatttcgcgaatctgcaaaagtagatgccaggcactgggagcagataaatgagcggcggtataatcttgatttggttcgtgatgtgatgtctacagagctaagagcaattcgtcaagacaaatacggttggatattgcacggagaaagtgagtggcaaagccagctccaagaacttgtccatgagagaggtatttttcctatgcggcaaccatccacagaacctgagtggcagctgtgtggtgttgaaggaccatatagaatgaggaagaaacttgagcactccaaatttaagatagatactattcagaatgttctaaccagcaaccttggatcaaatggtggtaagattatcaataaagaggatggagaattgttgttgacatctgggtcagacacaatgtcaggcttgaatcttttgacctatgacactgagcagagggatcttgatgctgtcgagttttcgtcattcaaagatgatgatgacatattcaaaggaggaagcacaatttcaggtccaattggctggactgatgataaaagcagcgttaatgagcagagccttcattctgcgacggaatttggagcaaaatcaagttccctttcttttcacatgactgagagtcaccagggtaaatctgaacttagttcaccaaggagggcaccttcagtcaaaggtactgatgcaagaacctcagaggataaatcagaaaaggagttgcttgacaatggtgagtatcttatcaggccttatctggagccctatgagaaaataaggcataaatacaactgtgaacgggttgctggtcttgataagcacgatggaatatttttaattggagaactttgcttatacattattgagaacttctacattgatgattccaattgcatttgcgaaaagggcagtgaagatgagctctctgtcattgatcaagctttaggtgtgaacaaggatataatgggaggcagtgaatctcagttaaaatcacctaccacttggggtgggacagcaaaggtcttgcttggtggcagatcatgggcatataatggaggtgcttggggtaaggagaagctttgcaacagtagcaacctgcctcatccatggcatatgtggaagcttgatagtgtccatgagttgttgaaacgtgattaccagctccgccctgttgcaattgaaattttcagcatggatggttgcaatgagcttctagttttccacaaaaaggagagagaggaagttttcaaaaatttgattgccatgaatctcccacggaatagcatgttggacacaaccatatcagcatcctctaaacaggagagtggtgaggggagccgtctttttaaagtcatggcaaaatcattttctaaaagatggcaaagtggagaaattacgaacttccaatatctcatgcatctaaatacacttgctggtcgagggtatagtgatctcacacagtacccagtatttccatgggttctcgcagattatgagagcgatgttttagatctgaggaatccacagacatttcgcaggcttgataaacccatgggatgccaaacggaggaaggtgaagaggaattctgcaagagatatgatagctgggatgaccctgatgtaccaaagttccattatggctctcattattcaagtgctggaattgtccttttctatctcttaaggttgcctccttttagcacagaaaatcagaaattgcagggtggacaatttgaccatgcagaccggttattcaacagtgtgaaggatacatgggtaagtgctgcaggcaaaagtaacacatcagatgtgaaagaactaattcctgagttctattatttgcctgaatttttggagaaccgttttaatctggatctgggcgagaaacaatcaggagagaaggttggtgatgttgttttaccaccttgggctaaaggcagcgccagagagttcatcaggaagcatcgggaagcactggaatcggattatgtatctgagaatctgcatcattggattgatcttatttttggatataagcagagaggaaaggcagctgaagatgccgtcaatgtcttctatcactacacatatgaaggcaatgttgacatagacgcagtatcagatcctaccatgaaggcttcaatactagcacaaatcaaccattttggtcagacccccaaacagttattccagaaaccacatccacagaggcggactgacaggaaagtccctcctcatcctctacggtactgtgcctatctaacacagcaggagattcgcaagacagcatcttcggtgtcccagattgtctcctacaatgataagatcctaattgctgcagttaactgcttgctcaagccgctaacttataatgaatacatttcctggggattccctgaccgaagcttgagaatattaacatatgatcaggatagacttttgtctactcatgaaaaccttcatggtggtagtcaaattcagtgcactggagtgagccatgatggcaacattctcatcactggtggtgatgatggagttgttgcagtgtggagatttgtgaaggatggcatccgccgtctcctgagaatggagaaggctttgtgtgctcacacaggaaagataacttgcgtctctgtcagccaaccttactcattaattgtctcaggctctgatgactgttctgttatcttatgggacctgacaagcctagtctttgtgaagcagctaccaaggttcccggcatcagtatccgcgctacatgtgaacagcctcactggtgagattctgactggtgctggtgttctttttgctgtttggagcatcaatggggactgccttgctgtggtgaacacctcccagcttccttctgacctcatcttgtctgtgacaagcgcgacacactcagactggcaggacacaaactggtacgtgacaggccatcaaagcggcgcggttaaggtatggaagatgttgcactgctcgtctgatgaagcagtaaatagcaagagcaaatcacctgcggtatcgtctggtgggcttagcctgaacggccaagcaccagagtataggctacttctgcagaaggtgctcaagtcacacaaacaccctgtcactgccctttgtataccaccggacttgaagcagcttctgagtggggatggcagcggtcacttgctctcatggtcattgaaagacgacagtttcaagggttcatagctcagagaaatatagggattcagctgcacatatagagaaacactggttaaatcttaccactgatttcttcctcgtccagaactgagcattggcgtgcattgacaaaagagctcggatcagcaagcttctacatggtatatgaaatgttcccttgatgtcccatgcctgggccatacagcagtccgggcaggagagagaatacaacagacacaattggaaggatgaagtggacgtggatgcgctgctgcgctgacatcataatcttatactgtgaattatgagatggttgtaccttctcttgtttttttgaggagaaaaggattcatgtgggctgtaggtgccattgtttgtaaagtctatacagggtaattttggtggtgccggttgaggtggctgatggtgtagtgtctcgatgttttgttcggggttgtgggagcaaggaaagaggtattagtttcattttctccccccacctctggaggctagtttgggagccacaaaaccgaaagtgattggatggactaaaagcttctacatattcaaaattgaataagaacgagattttaatcacttcaatcctcttcgattttgtggcttccaaactagccccagaagtgttgattctttgactgggtgtaatttgagcacccttgtgttcagtaagtctatttgcgtatacatgcaagagttttgct

SEQ ID NO: 96006 - DNA, 1171 bp, Zea Mays
ggcacggaaggagcatgacccccgtttcgcaccgcacccccgcgattacgcgattcgcagggtccttcatcattgcaaaaacacgcataacttacattgtcatcttcgctcccgtgacctacatcgtcgtgtctcggcttggcttggcttcctcctccccgacgaccaccccgcgcttctcctctccccccgtcccaccttccgagaggctcgagccctgatcccacgctgagggcggcggtgttaggagtttagcgatggcgaggtggcggccggcggcgctgctggtagtggcgctgacagcggttctgtcggcggcgcggcgggcggatgcgctctcagtgacggtgaccgacaccgagtgtatccacgagttcgttccgtacgagggtgacaccgtgtccgggaacttcgtcgttgtcgaccacgacatcttctggagctccgatcacccaggcatcgacctcacggtaacgtcaccaggtggtaacactgtgcacacattgaagggaaaatctggtgacaaatttgagtttaaagctccgaagggtggcatgtacaagttctgcttccataacccatatggagcacctgaaactgtttctttctacattcatgttgggcacatacccaatgagcacaatctggcgaaagatgagcacttggaccctatcaacgttaaaatcgcggagctgaaggaagtattagaatccgtcaccgccgagcagaagtacctaaaagcacgcgaagctcgtcatagacacactaatgagagcaccagaaagcgtgtcatgttctacacaatggcggagtacatagctttcgtggctgctagcacgttgcaagtcctctacatccgccgcatgttcagtaagaatgtgggatacaacagagtgtaggatacagctctacttcaaaggcgacagtggaagaagcaccacatggtcggaacgggaaacattctctgccaatttgacaaattgtagctctgcaccctctttctttttgttagtttacaagaaacacttttacatttatcatgtacttttagcaacacttgcgatatgttacgtgcatttgatgctgaacatagttccagaattaattttcagagaatttgtagtattgttctgcttccgatttttttgattgttaatcatgtggtgtcttt

SEQ ID NO: 96007 - DNA, 1954 bp, Zea Mays
ctactggtaaaggtcccgacgacgcggtatcgccgtatacccgcctcaagtacaaagggaaagctgcgactcgctcggaagtgggaaccttcagttgaggttctctaatcgggcccgctaaagtcgagagacaggttttcgcgaacatttgcatctagccatctctactcaactgaattcttgtgctcttgtggcattcacaaagtccattttcagactgagctagttcagctgtcatttttttttcagccaaaggtcgcgttcttttggacctgctcttgattcgttcgttcgttcgtttggattgattgattgattgattcctttcgacttcccttcaccacccccctgctccgtcaagcgtgcctctgttcttctgccattgctggatcgcgtttgtctgtttgttgggttgctggcgctgcggccatggatcccttccacggcattgtgaaggaggagttcgacttggacttcgacttcacctgcgcgtctgcggcggcggcggcggcggcctcgtgggccgtcgccttgccggagatgccccggccgatggaaggactcggcgaggtgggacccactccgttcctgaccaagacatacgacgtcgtggacgaccccaacaccgacaccatcgtctcttgggggttcgccggaaccagcttcgtcgtctgggacgccaacgccttcgccttggtgatcctcccacgctacttcaagcacagcaacttctccagcttcgtccgccagctcaacacctacgactcgttcgttgcaggggttcaggaaggttgacccggacaggtgggagttcgcgaacgaggggttccagcgtggccagagggagctcctcaggacgatcaagcgccggcgcccgccgtcgagcccgtcggcgcagcaggggcaggcgccgtcggcctgcctggaggtggggcagttcgggctcgacggcgaggtgcaccggctgcagcgcgacagggggatcctgctcgcggaggtggtgaagctgcggcaggagcagcaggcgacgcgcgcgcagatgcaggccatggagaagcgcatcaccacggcggagcagaagcagcagcagatgacggtgttcctcgcgcgtgccatgaagaacccgagcttcatccggatgctggtcgaccgggagggccttggcggctgccgcagggagctcgaggacgcgctctccagaaagcgccgccgccccatcgagtacctcccgcgcgacggcgagagaagcggcactgccacggagtcggcggtgagcgactacatttccggacttccggtcggcgtcaacggcgtggcggaggcggacgacgacgagagacggtgggagagaaggggcggcggcggcggcggcgaggacacggagagcttctgggcgaagttgctcaacctcggcctggaggagaagcacagggagggcagatgcgatggcgaggaggggaacggagctgacgtggacaacgacgtggacgacgacgtggatgtgctggtgcagagcatctaccacttgaacccgaacccgggtagccccggtggcaagtgaaagttccagaacgttccacattccagaacccactatggtctatggaagtggaagctcccagtgggcatcgcaattagtcgtaggcgatagttttttatccggcgcctgacttcttgtcgcggggctatgcaagttgcaaaagtgcttgcgtttggccggttgccaaggaatgttcgggatgctcgtcgaactacgaagcttctagaagatggagcagcgaggctgcagcctactcgtatattactatcagggagcaggcgagcagcaaggctgcagcctactcgtatatttactatcaatggcgcgggcttcttcgctgcggtttagtccgactacggggtttacagctacggctacaatcaggatgaaacaaaggcacttctcaaatgtgta

SEQ ID NO: 96008 - DNA, 378 bp, Zea Mays
cttgcctactggtaaaggtcccgacgacgcggtatcgccgtatacccgcctcaagtacaaagggaaagctgcgactcgctcggaagtggggtactgtacttcccgctcgctcgctctctgctctggtccttcacgctctgtacgttcatgcagtgttgctctcactcgctttcttcttcctcccctcgtctgcccctcctctgctctgtgccaagttctgcttctcgccggggcagtttcagtactcatttctttccttttctttccaatttgcagaaccttcagttgaggttctctaatcgggcccgctaaagtcgagagacaggttttcgcgaacatttgcatctagccatctctactcaactgaattcttgtgct

SEQ ID NO: 96009 - DNA, 1685 bp, Zea Mays
agcctttccgcccgtgtcgtgctcgcgcttcagagcgtcctgcagtctccatggccgccgcagtcgacaccgcggccgtggcgggcgcgaccgggaggctcagggtgttcttcctgccctccttcatccggggacacctcatcccgcagaccgacatggcgtgccgcgtcgccgcggcaaggcccgcggaggtggaggcgaccgtggtcgtgacgccggccaacgcggccctcatcgcgccgaccgtggcgcgcgccgcggccgccggccacgccgtgcgcgtgctctgctacccgttcccggacgtcggcctcggggagggcgtggagtgcctcgccaccgccaccgcgcgcgacgcgtggcgcgtctaccgcgccatggaggtggtgcagccgtcccacgagtcgctgctccgggaccaccgccccgacgccatcgtcgccgacgtgccgttctggtggaccaccggtgtcgccgccgagctcggggtgccgcgcctcacgttccaccctgtcggaatcttcgctctgctcgccatgaacagcctgttcaccatacggcccgacatcatcggccgggccagctccgacgccgctgggacggtgctgtccgtgccgggcttgcccgggaaggagatcacgatcccggtgtccgagctcccgaccttcttggtccaggacgaccacctctccaaggcgtggcagcggatgagggcgtgccagctcactggcttcggcgtcatcgtcaacaccttcgccgacctggagcagccctactgcgaggaattcagccgcgtggaggcgcgccgcgcctacttcgtcgggcccctgggaaagccatcgcgctccaccatgcaccgcggcggcagcggcaacgcggactgcctgagctggttgtccaccaaaccgagccggtcggtagtgttcgtctgcttcgggagctgggccgagttctcagcgactcagacaagagagctcgccctggggctcgaggcgtcgaaccagccattcctgtgggttgtccgctccaatgactccagcgatgaccagtgggcaccggagggctgggagcagcgcgtcgccaaccgtggcctggtcgtccacggatgggccccgcagctggccgttctggcccacccgtcggtgggcgcgttcgtgacgcactgcggttggaactcggtcctcgaagccgcgtccgccggcgtgccggtgctcacgtggccgttagtgttcgagcagttcatcaacgagcggctggccaccgaggtggccgccttcggcgtgcgcctgtgggacggcggcaggcgcagcgagagggccgaggatgcggagatcgtgccggcggaggcgatcgcgcgggccgtggccggtttcatggaaggcggagagcagcgcgacaagttgaacgccagggccggggaactagcggagcgcgcgcgcgccgctgtcagtgaggacgggtcgtcgtggcgtgacataaaccgcctgatcgatgatctcctgcaggcgagagcgtcagggctgccacaaatgaattccgtccagcttgagtgatttaaattattctacacagacattgtacgcaaatgcaaggctagaaaataaagagtgaagttaaggtggtgtttggttcatctaaatgtaacgtaaatagtttacatgggtaatggataccgctaattttgt

SEQ ID NO: 96010 - DNA, 1385 bp, Zea Mays
ggaccttaattaaaattttccatggtgaccatgtgtatggatgcagctgacagagttcaccgacaagtcgtacgcgctggggctgagctgcatccacatccacaacgaccccaccgctgccgctctcttcttccacgcctgggcagccgcccaccgccggaccaccagcacgtacccgcccttccttcacccgccggcgttggcggtctccccgacctcgccgccccctgcaccgcctctgctcgccgagaaagccagcgccgcctcccccaccagcacagatgccgccgccgccatgtcttccgccacgttccacttcccggcctccgcggtgcgcgcgctgctctcctccctggagccgggcaccaccccgttcgcggcgctcgccgcgctcttctggctccggatcaccggcgccgccgacggggagcgagagctcacactggcgctggacttccgcaagcggatgtacgcgccgctgccgtgggggtactacggcagctccgtccacttcacgcgcgcgcgcgccgacctcgcgtccggcctgcccgccgtggccgcggcgctggaccgccacgttgccggcgtgccggaggaggagctgtggcgcgccctggagtggctccacacgcggcagcagcaggaaaacgcgccgttccagatgtatgggccggagctgacgtgcgcggcgctggaccacgtgcccatgtacggcgcggagttcgaggccggggcttctccggcgcgcgtgtcgtgccgcgtgggcggggccaccggcgaggggctggtgctcgtcctgcccgcgcccgagggcggcgaggcgcgggacgtggtggtgacgctgcccgcgggggcgacggccagggtctgccgcgacgccgaggtgctccggcacggtgccgaagttgtgttcggggcgaaggccgaaaaggaggagtaggcccagtgccacgagtcacgacggagcaacaagaatcgttgtgctgctggcctgctgatgctggtccctgcggaacttgatcctgatccacgcaatttacttttgtatactctgtgggctgtggcccttcgtttgatttcgatgtaatcagtcgccatgtttgatggaggaaagcattgccgcattgctgttcgcaaccatacctctccaatcagcccatgtggagagtacgggtaggttcatctgtttggaaatcttgtccccacgacgcatcctgattatgcgcgtgagacgctaactctttccacgcaatccaccattgtttacaagcgaaagatattacgaatttagaaaatttatttttaattgaatctaaacattgtatagcaaatatgtaacgatatataggtgtgtacacgtgtatgtgttgagcagcatttgtggc

SEQ ID NO: 96011 - DNA, 1917 bp, Zea Mays
aatccatccggcaaagagctcgaggcctcgagcaatagtaagatctgactgatctcgtgagctgcctctccagtgtgctctgtagcccgcgcagatcagtgatgccttcggcggcgatgacggtagcggcgggtctggcgaccgggccgggcagccgtgtgactcggttcgccaagtcgacggcggcgtcggtgacgcccgtgaggccgggcaagacgcacgcgctgtcgcccctggacaacgccatggagcggcacacggtgcacgtggtggtctacctccgcgccgcgccgggcctggacagggagcagctcaaggagtcgctctccgaggtgctgtcgctctacccggccatgaccggccggctcacgcgcggcgaaggcagcgcggacgccgaacctgcgcaccggggttgggtcgtgaagtgcaacgacgccggcgtgcgcatggtggatgccagggcggccgtcacgctcgacgagtggctcgccacggcgaccggcgacgaggagatggacctcctctattacgagcccatgggggccgagccttacatctggtctccgttctacgtccagctgacagagttcaccgacaagtcgtacgcgctggggctgagctgcatccacatccacaacgaccccaccgctgccgctctcttcttccacgcctgggcagccgcccaccgccggaccaccagcacgtacccgcccttccttcacccgccggcgttggcggtctccccgacctcgccgccccctgcaccgcctctgctcgccgagaaagccagcgccgcctcccccaccagcacagatgccgccgccgccatgtcttccgccacgttccacttcccggcctccgcggtgcgcgcgctgctctcctccctggagccgggcaccaccccgttcgcggcgctcgccgcgctcttctggctccggatcaccggcgccgccgacggggagcgagagctcacactggcgctggacttccgcaagcggatgtacgcgccgctgccgtgggggtactacggcagctccgtccacttcacgcgcgcgcgcgccgacctcgcgtccggcctgcccgccgtggccgcggcgctggaccgccacgttgccggcgtgccggaggaggagctgtggcgcgccctggagtggctccacacgcggcagcagcaggaaaacgcgccgttccagatgtatgggccggagctgacgtgcgcggcgctggaccacgtgcccatgtacggcgcggagttcgaggccggggcttctccggcgcgcgtgtcgtgccgcgtgggcggggccaccggcgaggggctggtgctcgtcctgcccgcgcccgagggcggcgaggcgcgggacgtggtggtgacgctgcccgcgggggcgacggccagggtctgccgcgacgccgaggtgctccggcacggtgccgaagttgtgttcggggcgaaggccgaaaaggaggagtaggcccagtgccacgagtcacgacggagcaacaagaatcgttgtgctgctggcctgctgatgctggtccctgcggaacttgatcctgatccacgcaatttacttttgtatactctgtgggctgtggcccttcgtttgatttcgatgtaatcagtcgccatgtttgatggaggaaagcattgccgcattgctgttcgcaaccatacctctccaatcagcccatgtggagagtacgggtaggttcatctgtttggaaatcttgtccccacgacgcatcctgattatgcgcgtgagacgctaactctttccacgcaatccaccattgtttacaagcgaaagatattacgaatttagaaaatttatttttaattgaatctaaacattgtatagcaaatatgtaacgatatataggtgtgtacacgtgtatgtgttgagcagcatttgtggc

SEQ ID NO: 96012 - DNA, 803 bp, Zea Mays
aatccatccggcaaagagctcgaggcctcgagcaatagtaagatctgactgatctcgtgagctgcctctccagtgtgctctgtagcccgcgcagatcagtgatgccttcggcggcgatgacggtagcggcgggtctggcgaccgggccgggcagccgtgtgactcggttcgccaagtcgacggcggcgtcggtgacgcccgtgaggccgggcaagacgcacgcgctgtcgcccctggacaacgccatggagcggcacacggtgcacgtggtggtctacctccgcgccgcgccgggcctggacagggagcagctcaaggagtcgctctccgaggtgctgtcgctctacccggccatgaccggccggctcacgcgcggcgaaggcagcgcggacgccgaacctgcgcaccggggttgggtcgtgaagtgcaacgacgccggcgtgcgcatggtggatgccagggcggccgtcacgctcgacgagtggctcgccacggcgaccggcgacgaggagatggacctcctctattacgagcccatgggggccgagccttacatctggtctccgttctacgtccaggtacacccttgaccgactcattcaatctcagcttagctctgcttggtgaagttaggtgagctaattcatggcaggagcatcctgttgtctgcctctctggattagtttgattgctcggcagttgagcactagagtttggtgacatttacttactaattctaattcggtaggaacagcttcagaattaaatgtcttgtgctcttgtactgccgcgtcacatggctg

SEQ ID NO: 96013 - DNA, 189 bp, Zea Mays
atgcacgaccaaactggaaagcctctcaagcgcgttgcctcattggatgtatccacggctgggcctgcgtgctttcgggccggtggacatggctacccctgcatgctttgttcggcgaccagcaacagcatcgacctgcaacaaaatgtctggcctggcggcgccaaaaagccagacctgaaggagtaa

SEQ ID NO: 96014 - DNA, 2497 bp, Zea Mays
tctccgcttcctccgctgcctcgctttccggcgaaagtatcggccgctgcgtcctccacacctaccccacaggcgcattgttcggctgtttccgtctccccgaacggccgaaccctgtcgtttgcccgggcgcctcgctgtcgtcgagtctgaaccgtgctgcgtcgcggagggaagtgagtgacatagagataggggaaaaggaagatcagatataatggcggttgccgtcctgttgcggcagagggcgctctcgtcgccccacgcggtctcatgccgaaatgctgtatatactagtggccttttttccaattccgatctacactcaaaggtgaattctactagtttgagattttggaggacctaccataattctgggaagtttgatttgactgatctgacgcatcctcatatgtggtacccgaaagctcgagaaaagaagcgtaatgtgtttttacatgttggccctacaaatagtgggaaaacttatagtgctctcaagaggctagaagcaagctcttcaggtgtgtactgtggacctctgagattgttagcaagagaggtagcccaaaggttaaacaaagttaacgtcccttgtaacctgattactggacaagaaaggaatgaaattgaaggtgcaaaacatagctcagtgacagttgagatggctgatatgacaactaactatcaatgtgctgttattgatgaaattcagatggttggctgtaaatcaaggggttattcgttcacacgtgcacttctgggactttgttcagatgaacttcatgtctgcggtgacccagctgctgttccccttatccagcgaattcttgaagctactggtgatgtagttacggttcaatattatgagagactatctcctttggttcctctgaaatctccacttgggtctttctctaacatcaaggcaggagattgtttagtatcattctcaagacgtggaatttataaactcaagaaaagaattgaaagggagggaaaacatctttgctctgtggtctatggttcattgccaccagaaactcgaacaaagcaggcgacaatgttcaatgatgataccagtgaccttaatgtgctagtagctagtgatgctattggaatgggtcttaacctgaacatttccagaattattttctctactatgatgaagtttgatggtttctgcaacagggaactaactgtggccgaaatcaaacagattgctggtagggctggaagatatggatctaagttccctgttggagaagtgacctgtctaaatcctcaagatctcccattgctgcactcgtctctgaaatcagcttcctccattatagagcgtgctggactttttcccacatttgatttattatctttgtattcacgattacatggaactgacttttttcaccctatactggaacgtttcttggagaaggctaaactatcaccagactatttcattactgattgtgaagatatgttgaaggttgctgctattgttgatgatttacctcttgggttgtatgataaatacctcttctgtatgagtccggtggacgtaagtgatgatatatctgcccaaggactagttcagtttgcagaaaattatgcaaggaaaggaattgttcgacttaaagaaatattcacacctggaacattacaggttcctaaaacagacaatcaactcaaggagcttgaatctgttcacaaggtcctagagttatatgtgtggttaagcttcagaatggatgattcctttccagaccgtgaagtagctgcctctcaaaagtcaatctgtagcatgttgatcgaagaatatctggagaggtttggatggcagccacaagaccgaagaaaggttttgggtggagcacaaaagctgctccaagaatacgatgtatcacaaatgaacaaatattttcaagaagtcaacccaggaccgaagtagaaggactatacaggaaatgagcctcaccacttccagtccagatttgaggaaccaataccatccagagcatttgcgttctgcctcactggttatggatcaccggcacaaagtggaactacacttcggacgaccgaagatatacgtggacgcatctcaaaccgtgatcatctagattgatttggcagcacgcatttccatcagccagatcgtgatcgactagtaggacttttttccccaaaaatgaaactacactccagtcttaagtcataatgaatacagagccatgagcccatgatagggccgcttctgagacggagattgtgtattaacgggtacacagacggtacttgcattctagtctgagttcgatgagttgcagcaatagcggctgtaatcctgtatataaagagggaaaataatgttgcttgtgctgttatttattgcaagatctgaatgtttgtgtccaatgacaatttagtagacattttacatgcactaactaatagctaatggcccgtgtgtacctttgtatatatcctttcagat

SEQ ID NO: 96015 - DNA, 1391 bp, Zea Mays
attgcccccctcacacacacacacactcactctctctctctctctctctctctctctctctctctccattgtgtcactgtaactagcaattgagctcttaaaattttggttgaggtgcagtagcaaggcacactactacgatctacaaacaagatgatcagttgatgcccggtgtcttcaggatcttttcagctctccgccccgtccacggcgttgcatctctcatggcactcggtgtctcctgatagctgctgcttcgatctactccacctaaccgaaagagcgtcgtgtagggtcttggattcttggtccggtgctgtaggcgtgttcttgagatcgaagatccaggagatgatcctgcggcggagatcgaggtcgatgaacagcagcgccggcgcgcagaggagccacgtccccggtcagtccgcgagatcgtcgaccagtccatgcgacggtgacagtggcggggccggggacggggccgccgccgccagcagcaagagtgcgaccgcgcgtgccctgttcgcctccccgaggctgctgcactcttcttccctgcccgccggcaccgtcgccttcgccaagagccccgcgccggacgccgagccccagacggccttctccatgagcccaacctccgtgctcgacgcggcggcggccttcgtgccgggcacggacggcgccggcaagcgccgcccgccgtggcgggcgcgggacaacaacggtctcgcggacgcgctggactgcagcgaccaccaccaccagcagcagcagcaggagcggatcgtcctcgcggcgacgccgtcgtcgtgctcgctggccagatcgtgctccctggaccgccgcgtcgagttcggcgtcaagaacaggagctcgtggctgcccctccgcggccgcgaggccacggcgccggcgccggccgacccgtgggagatagagccgtcgtcggaggactacacgtgcgtcatctcccgcgggcctaacccgaggacggtgcacatcttcggcgaccgcgtcgtggagggcggcgccggcgccggcgccgacgccgcggcggagagggaggacagctcgccgcggcagatcaatctgccggcgcgcggcgaccggggcttcttcagcctgtgaatgatcccatccacatccatccacgagcgtgcgcgtagactgatgcctagtaggtaaagaaaccgagtttgctgagtgctagtattaagttcagccttcatgttgcggtattgtatcggttgctccgtttccatctgatcagatgatcatagttgtttccttgatcagatgatgtgtactagatgttttgttcaggttgagctgaagctgtgatataaaatttcattacgttgttattactactagacaaaaaagctgcaaat

SEQ ID NO: 96016 - DNA, 1957 bp, Zea Mays
atgttgacgggcgatctagccagttgcatgatctacctgcgtttgagggttgctctgtgctcctgcaagaaaaatacggacccggccgttcaacgaactcaatcattggatcatctgttgagcttgagcaggagaggacaagattttgctgctgggcctgccaagcactggtcgacagcaaatctacgcgccagcggacccggaatttaccgctgccgtgcatgggctccaacgccagagcatgagccgcggacggtaaggtaacacacaacgcaaggagctcaagatcgagctgcgttgcgagggcagagaaagagatgggcagtgcagtgatgatgaagataaggacctgcctgccctttgaaaacgcgcgcacacacaaaccaacactgacatcaccggtgggggctggggaggagagggagagccttctttaagatcagtagatcaccacaccctcacccctcctcattgcccccctcacacacacacacactcactctctctctctctctctctctctctctctctctctccattgtgtcactgtaactagcaattgagctcttaaaattttggttgaggtgcagtagcaaggcacactactacgatctacaaacaagatgatcagttgatgcccggtgtcttcaggatcttttcaggttcgcgaggtcccattttgcttctccccccgggcttgcagttgcgtttgagtgcacctctgaggctttggttggctctcgcgctgcgtacttaagctctccgccccgtccacggcgttgcatctctcatggcactcggtgtctcctgatagctgctgcttcgatctactccacctaaccgaaagagcgtcgtgtagggtcttggattcttggtccggtgctgtaggcgtgttcttgagatcgaagatccaggagatgatcctgcggcggagatcgaggtcgatgaacagcagcgccggcgcgcagaggagccacgtccccggtcagtccgcgagatcgtcgaccagtccatgcgacggtgacagtggcggggccggggacggggccgccgccgccagcagcaagagtgcgaccgcgcgtgccctgttcgcctccccgaggctgctgcactcttcttccctgcccgccggcaccgtcgccttcgccaagagccccgcgccggacgccgagccccagacggccttctccatgagcccaacctccgtgctcgacgcggcggcggccttcgtgccgggcacggacggcgccggcaagcgccgcccgccgtggcgggcgcgggacaacaacggtctcgcggacgcgctggactgcagcgaccaccaccaccagcagcagcagcaggagcggatcgtcctcgcggcgacgccgtcgtcgtgctcgctggccagatcgtgctccctggaccgccgcgtcgagttcggcgtcaagaacaggagctcgtggctgcccctccgcggccgcgaggccacggcgccggcgccggccgacccgtgggagatagagccgtcgtcggaggactacacgtgcgtcatctcccgcgggcctaacccgaggacggtgcacatcttcggcgaccgcgtcgtggagggcggcgccggcgccggcgccgacgccgcggcggagagggaggacagctcgccgcggcagatcaatctgccggcgcgcggcgaccggggcttcttcagcctgtgaatgatcccatccacatccatccacgagcgtgcgcgtagactgatgcctagtaggtaaagaaaccgagtttgctgagtgctagtattaagttcagccttcatgttgcggtattgtatcggttgctccgtttccatctgatcagatgatcatagttgtttccttgatcagatgatgtgtactagatgttttgttcaggttgagctgaagctgtgatataaaatttcattacgttgttattactactagacaaaaaagctgcaaat

SEQ ID NO: 96017 - DNA, 255 bp, Zea Mays
atgcaaaagaacacagaagtcatgatgaatctcacacgaaatgagatgaatctactactactagagctagatataagccatcctagagagcattttgttcttcggcaagagagcaatttgacctccggcgagcccgattcaggttggattcgcctgtgcaccaccgaaaagtcgccgcctaccctgcatcctgcgccgcgctcgccgcgccatcgtcgagcacctggacgcgatcagctccgcggcggccggtag

SEQ ID NO: 96018 - DNA, 2664 bp, Zea Mays
gacgttttaccgtgtaacatcgccgtcccttttccaccatctactatagaaccaaacgacaactgacgccacttcgagtcgcgcccggcgtccccaactccaccgacgccgagcacaaccgttgtttccggctggtcctccactggccgctcctcagtcagtcccggattctcccttgggtctggagtggaatggaggttaatccgatcatggggtgatttcctcttttaactggatcagcgcagccggagctcaaaggtgcctgtggagtttattacatcaagaattttgggttcgacataatccccatgtcccccaataagtccggccatgcttcaggccgtgacgcggttttctggtccgatagaatgaacgaatatcttattgattcgctgcttcaccagcaagccattgggaacaggagtgagtccaaattctcatcggtggcatatgatagcatcatcaccggtgtgggtgagaggtttggcgtggtgatcgaccggaacaatataaaaaatcgcctaaagcatatcaaggaatcgttcaatgaatgtaggaacctccttggtgaagataatcggtttaggtggtgcccagagagcagaagattcaatgccgacccaaatgtttggagggagttgatcgagagaaaaccagaagcaaagaaatggatgatgaagacgattgaccattatgatagcttaatggatctatttggtaagaatagggagaaacgtcaagacgttgagaactcaaaaggtacctcgaagaaaaaggcgcgaacagaaccgccaaaggagatacttcaacgtactccattaaatcggaaggggtcagctcttgccgaaagttcagataagacggtggacaaatgtgagatccatgatgagataaaaacaaatgtggaacttgatttgtcagaatcgtgcagaactgataatggcattgttgccatacctgttcgtgcctattcatacggtaaaggtttgccctatgctcctgaaaattggccacgtcatggagacatatggcactggaaagttggaagcagggcttctggagcaggccattgggctgacaggtatattatgccgccatcccgttttcgtggcgctgctcctaagaagttaggatttgcaagtagaggatttgcaagtaggttacaagttgaggaattcgttaagagagaatttccggatgttgatcctagcacattcttttctatgtttatctggaagatccctgctgaaggatacaggatccaaaaaggcacccgacaagtgaggatccatgaacctgaacctgtggtggctgatccgggtggtctctgcaaggctaggaatagcttgtgcaatcttcaaagggaaggttttgttgaatcatcaccagcacgggtttgtaatatctgctgcaaagagcctggtttctgtcgtgagtgctgctgccttctctgtaacaggaccgttgattattctcttggaagttacagctgcataaaatgtgaggcagttgtggaagagaacttaatatgtgggcattttgcacaccttgaatgtgctcttcgatgttacatggctggaactgttggaggaagttttggcttggatgtccaatatttatgcaggctctgtgataacaaaaccaacttaatgacacatgtggagaaactcatggaaacatgccaatctcttgaatctagggaccaaatcaaacctatgctgaatttgggattatgcctcttgcgtggatcaaaacaaatgagagcaagaaacttggagaaccatatgagatcagcaatggaaaagctggaatgtggatttgattttgttgaagtctggaaattggaaggtgacgagggcaggacaacactcaatgcaggagagaattccccaaccaccaatggtgtgactgtgcttggggctcggcaagttcctgaagcgggtgcacttacagggcatcctgatctgatagatccactggttgataatgacttcgagacggttatagaaaaccttccagtgttcattactggagatcagaatgccgcgtctgctaaatttgaggatgagatagatcttgctcttcaagaactgaaaaaatctcaggaagcggaatatagcgtggcggagcagaagctttacgcccagaaagaccacatcctctgtctgtacaggcagcttgacgctgaaagggctgaacttgcagatcccatgcccttgtctgatgcttcaaattatggtgcgatgctcgctaatgttctaagccgcgtggaccaagtcaagcgtgaggaggagaaatttaggtctatgctgaaagttgctggcggatttgcgaaagcaccacaaagcgtcaccagggagatgttcggattacctgctgataagtagttgtaatagcagacttgcttggaacttaactatctgtagtttaccatagaaccaaacttggctgtgttgttatagctgtatgagctgtacatcctaccgacgggttaccccataaagactggtttggatgaaaccagcaagtgctgcggatgcgcaggttctctatggacctgcttgtactaactactaagattcgttaaatgtgacattctaaatggaccgaacctggacctccacattttccttaccaggcgataattatgttacactcgtctaa

SEQ ID NO: 96019 - DNA, 1545 bp, Zea Mays
caaaccctagccgccaatcctttccgcctctgcttacgaccaactcttgctgccgatgacacccttctacctagtaccgcgctccagagtgaagcggcagtatctccttccccagcagcgccggctgcagcacaggagatcgtactttggctgcacccgacaagtgaggatccatgaacctgaacctgtggtggctgatccgggtggtctctgcaaggctaggaatagcttgtgcaatcttcaaagggaaggttttgttgaatcatcaccagcacgggtttgtaatatctgctgcaaagagcctggtttctgtcgtgagtgctgctgccttctctgtaacaggaccgttgattattctcttggaagttacagctgcataaaatgtgaggcagttgtggaagagaacttaatatgtgggcattttgcacaccttgaatgtgctcttcgatgttacatggctggaactgttggaggaagttttggcttggatgtccaatatttatgcaggctctgtgataacaaaaccaacttaatgacacatgtggagaaactcatggaaacatgccaatctcttgaatctagggaccaaatcaaacctatgctgaatttgggattatgcctcttgcgtggatcaaaacaaatgagagcaagaaacttggagaaccatatgagatcagcaatggaaaagctggaatgtggatttgattttgttgaagtctggaaattggaaggtgacgagggcaggacaacactcaatgcaggagagaattccccaaccaccaatggtgtgactgtgcttggggctcggcaagttcctgaagcgggtgcacttacagggcatcctgatctgatagatccactggttgataatgacttcgagacggttatagaaaaccttccagtgttcattactggagatcagaatgccgcgtctgctaaatttgaggatgagatagatcttgctcttcaagaactgaaaaaatctcaggaagcggaatatagcgtggcggagcagaagctttacgcccagaaagaccacatcctctgtctgtacaggcagcttgacgctgaaagggctgaacttgcagatcccatgcccttgtctgatgcttcaaattatggtgcgatgctcgctaatgttctaagccgcgtggaccaagtcaagcgtgaggaggagaaatttaggtctatgctgaaagttgctggcggatttgcgaaagcaccacaaagcgtcaccagggagatgttcggattacctgctgataagtagttgtaatagcagacttgcttggaacttaactatctgtagtttaccatagaaccaaacttggctgtgttgttatagctgtatgagctgtacatcctaccgacgggttaccccataaagactggtttggatgaaaccagcaagtgctgcggatgcgcaggttctctatggacctgcttgtactaactactaagattcgttaaatgtgacattctaaatggaccgaacctggacctccacattttccttaccaggcgataattatgttacactcgtct

SEQ ID NO: 96020 - DNA, 2638 bp, Zea Mays
gacgttttaccgtgtaacatcgccgtcccttttccaccatctactatagaaccaaacgacaactgacgccacttcgagtcgcgcccggcgtccccaactccaccgacgccgagcacaaccgttgtttccggctggtcctccactggccgctcctcagtcagtcccggattctcccttgggtctggagtggaatggaggttaatccgatcatggggtgatttcctcttttaactggattttcttcctcgtgtaggatcagcgcagccggagctcaaaggtgcctgtggagtttattacatcaagaattttgggttcgacataatccccatgtcccccaataagtccggccatgcttcaggccgtgacgcggttttctggtccgatagaatgaacgaatatcttattgattcgctgcttcaccagcaagccattgggaacaggagtgagtccaaattctcatcggtggcatatgatagcatcatcaccggtgtgggtgagaggtttggcgtggtgatcgaccggaacaatataaaaaatcgcctaaagcatatcaaggaatcgttcaatgaatgtaggaacctccttggtgaagataatcggtttaggtggtgcccagagagcagaagattcaatgccgacccaaatgtttggagggagttgatcgagagaaaaccagaagcaaagaaatggatgatgaagacgattgaccattatgatagcttaatggatctatttggtaagaatagggagaaacgtcaagacgttgagaactcaaaaggtacctcgaagaaaaaggcgcgaacagaaccgccaaaggagatacttcaacgtactccattaaatcggaaggggtcagctcttgccgaaagttcagataagacggtggacaaatgtgagatccatgatgagataaaaacaaatgtggaacttgatttgtcagaatcgtgcagaactgataatggcattgttgccatacctgttcgtgcctattcatacggtaaaggtttgccctatgctcctgaaaattggccacgtcatggagacatatggcactggaaagttggaagcagggcttctggagcaggccattgggctgacaggtatattatgccgccatcccgttttcgtggcgctgctcctaagaagttaggatttgcaagtagaggatttgcaagtaggttacaagttgaggaattcgttaagagagaatttccggatgttgatcctagcacattcttttctatgtttatctggaagatccctgctgaaggatacaggatccaaaaaggcacccgacaagtgaggatccatgaacctgaacctgtggtggctgatccgggtggtctctgcaaggctaggaatagcttgtgcaatcttcaaagggaaggttttgttgaatcatcaccagcacgggtttgtaatatctgctgcaaagagcctggtttctgtcgtgagtgctgctgccttctctgtaacaggaccgttgattattctcttggaagttacagctgcataaaatgtgaggcagttgtggaagagaacttaatatgtgggcattttgcacaccttgaatgtgctcttcgatgttacatggctggaactgttggaggaagttttggcttggatgtccaatatttatgcaggctctgtgataacaaaaccaacttaatgacacatgtggagaaactcatggaaacatgccaatctcttgaatctagggaccaaatcaaacctatgctgaatttgggattatgcctcttgcgtggatcaaaacaaatgagagcaagaaacttggagaaccatatgagatcagcaatggaaaagctggaatgtggatttgattttgttgaagtctggaaattggaaggtgacgagggcaggacaacactcaatgcaggagagaattccccaaccaccaatggtgtgactgtgcttggggctcggcaagttcctgaagcgggtgcacttacagggcatcctgatctgatagatccactggttgataatgacttcgagacggttatagaaaaccttccagtgttcattactggagatcagaatgccgcgtctgctaaatttgaggatgagatagatcttgctcttcaagaactgaaaaaatctcaggaagcggaatatagcgtggcggagcagaagctttacgcccagaaagaccacatcctctgtctgtacaggcagcttgacgctgaaagggctgaacttgcagatcccatgcccttgtctgatgcttcaaattatggtgcgatgctcgctaatgttctaagccgcgtggaccaagtcaagcgtgaggaggagaaatttaggtctatgctgaaagttgctggcggatttgcgaaagcaccacaaagcgtcaccagggagatgttcggattacctgctgataagtagttgtaatagcagacttgcttggaacttaactatctgtagtttaccatagaaccaaacttggctgtgttgttatagctgtatgagctgtacatcctaccgacgggttaccccataaagactggtttggatgaaaccagcaagtgctgcggatgcgcaggttctctatggacctgcttgtactaactactaagattcgttaaatgtgacattctaaatggaccgaacctggacc

SEQ ID NO: 96021 - DNA, 1122 bp, Zea Mays
atgcgcgcaggcggttctcacagcacggaggcactcatcagtcatcactagtacttcactagttagctagcaatattcctactcgctaagtagtggagaactggagatcgacatgagccaggggcagccgaggaggcggcagggcgaagagggcatgcacgcgcaggacaagcccgtcaagttcggcgacgtgctcgacgtctcaggcgagctggccgaccagcccgtggctcccagggacgccgcgcggctgcaggccgcggagcagtccgtgctcggcgggacgcagaagggcgggcccgccgccgtcctgcagtccgccgcgacggtcaacgcgcgagcgggccacgtaggcagggctcagaccgcgtgccccgtcgccgacgcgggcgccaccgtcaccgagaccgagctcgcgggccgccgcgtcgtcaccgagtccgtcggcgggcaggtggtggggaagatggtgagcccggcgccggtggcgatgacggacccgccgggcgcgctggagaaggacgccgtcacgatcggccgcgcgctggaggctgtgggcgcgatggtcggtgacaggccggtcgagcagagcgacgcggcggccgtccaggtcgcggagctgtgcgccacggggtccgactccaccgtccccggaggcctggccgcggcggcgcagtcggcggccgaccagaacgcccgcgccacgcgcgacgaggacaaggtcaagctccggaacgtcctctcgaacgcgagggagaagctgccggcggacaagggggcgacgcgggaggacgccgagagggtggtgtccgccgagatacggaacaagctggacatggcgaccacgccgggcggcgtggcggacgcggtgactacagcggcccggctcaaccaggagcgcccgaggccataggtcgtcgtggcctttatatcccatgtggaacagtggaagcgtgcgatcagaagcctgcgcgcggatgagcgtgcttaatagcacagtagcgcgtgccgttttttttttggacttactaagaaaactacgtacgcttgtaaaaatgcgcgaacgacaccgtgtccgcagtgtatatagcaataaaatcgttgcgcgtgaagttccgtaaa

SEQ ID NO: 96022 - DNA, 785 bp, Zea Mays
atagtagcggtggcacagacctcacacacagcccacctccgacgacacggcgaaatcgaaatcgaaatcatccggggtcttccagcgatggaagcccgacccagcaggatagagtgctcagaacccaacgagcagcccgagccgaaggaccccggccgggtgttccacgccgagcgcgtcgccccgagggacgccacggagtcggtaaccgagaagctggcgcacggcggttgcggccacgacggcgtgatcgacgagacgtacgacacgaggatcaagatcgcggaggcactggaggcgtcggccagggccatcggggacaagcacgtggagccgtccgacgccgcggcgatacgcgtcgcggaggcgagcgccgcggggcgtggggcgatcccaggcggcgtctccgagcgcgcgcaggccgcggtggcggccaacgcccgcgccgcgcgcgacgaggacaaggtcaccatggccgacgtgctgacgtgggaggcgacggtgaagctgccgacgggcaaggccgtgactggcgaggtcgctgcggccgcggcagaggccgaggccgaggccgcgaatgatccccgagcgaagacgaacccccgcggggtgagcgcggcgctgggcatggccgcgaagcacaactgtggacacgagagcgcgcgcacgggcacggcctttccggatgaagctaagcaggattaagcttgatcgtatgtagtccagactctgtccatggactcccttgacggccggttgagtcgagttattagtgaatgaattat

SEQ ID NO: 96023 - DNA, 1538 bp, Zea Mays
gaccttgtagataaggctacactcactgatcacacgttcctgcaggaactggcacgccatggcgggcttctgcactcctgctgccactgcagctgcccatgccgccctaacccctctgacgagctcaaggaagcacatcgccatgtgcctgtcccccaggccaagcggcggcggcggcatcggcggcggccagagggcgcggcttgcgagtacaggcgcagctcctcaggttcgcgcgctggcgccgacgaccgcggcagaagaagcagcgggtccctcccccgcccctctcaacgtggagtacctggccgctgagttcgccggccacggcgtcagcttcgagcccgtgggcgtcagctgcgccgtcaagatgtcgctgcgcaacggcagcgtggcgcacgtgctgctccccagcgggctcgtcacgtcttacaagcccgccatgtggcacggcacggtcacggaggttctccacacgaacgtcgccgaggtcccaggcgggcgggccgtcatccgcggcggcgtgttcgtggacctccgttgcgatggctgcgacggcgtatggtcgccgagcgcgagcggggcgtggtcgctccgcgacgtccggggaagcccagccacctccatagaggtcgagctcgcgtcagcggcgccggggaacgcggccgcggcgaggtgcgtggtgacgctgcacccggaagcgctggccacggagctcacggtgacgaacaatgcgtcggcggcctcgtcgccgccgatggctctgacgtgctccgtgcccagtcacctgcgcgtgagcaccccggacgccacctacgctctggggctccagggctccgactaccgcagcgtggagcccgcgctgtcggagttcagcatcatccctcctggctacggggccgcgcggcaggccgcagcagggacgacagcccgaaaccagtgggcaaacaaaggcttggacatgatcctgtcgggcgggcagcaggaccgtggcgccgcggacgagcccgacggcgaggaggacgacgactacaagcacatgacggacgcgatgtgccgtgtgtacagcaacgcgcccagggaattcaccatcatcgacaggggcaggaggaactccgtttgcttgcacaggaaggggttcgaggagctgtacgtcttcagccccggatcccagtaccagtggtacggcaagtatgcctacgtggtcgtagggcctgccatgctggagcctgtgatgctggagcccggagacacgtggcggggggctcagtacctgcgcaaccccaatctttaggcatgctagcagctgggagaattgatgaccctggacacatcaaatgttcccgtacgtgtatccagatcatcagatgaggtcaggcgagatgcaaaattggcaaccacaatggtctacagatgttggaaatgctgtccatatatagcgaattgctgatgacaaggttcaatattagaatgatgagatttactatatctcaaatatcttaaatatacttctgttcagatgatagttactaggcatc

SEQ ID NO: 96024 - DNA, 366 bp, Zea Mays
aagtttccttcttgcctcaggccctagccttggctcattgcttatgtgtggtgatccttgagtttgcaagcctatgtaaccttctccccaaccatcagttgacactgttcagaacttgtgcgccaactcactaggaatgccatggtgaccatgctcaccctcaccatggccaagattcctcggaggttgtctcggtcgtgtggtgcccgttccctactcctcgcagaactcccagcacgaggactgaagattcaagctgaagtggtgactgaagaggaatctactccagtggctgctgatcaagtggaggagccatctaactgggtagcttgtagagggatctagacctcttcactgcaacaaagg

SEQ ID NO: 96025 - DNA, 432 bp, Zea Mays
atgtcatttgtgaactgcttgtatgtccaacatgcattcccaaagtccaccagcttgcattttagatcagcctccattgccatcttcttggcccctttgctaccccgtctatctcgtgttgcccgcttcatagttccagaactaccctcatttgttgtacccatatctccttggtcatctgacccatctgtgtcagcagatgccacagcactagttccatctgaagttgcagcagctgcacgtttggctttcctccggatcttcttcttctgattcttggtgaggccaccatttcctgattgtgcaggcacctttggaggtggctcgtctgtgctctctgaaggcagaagcaggggtactcctgatctccgagggtccttcaaggggtcaatggtagacacaagcaatatattctctggcttgaggtcagtg

SEQ ID NO: 96026 - DNA, 464 bp, Zea Mays
gtgtgtcagatatcaatatcggatcctttcagtaaccctatcgcgaaaaaactatatgacgaatggctggggcaacctggttcagagaatgcaaagaagtatttgcacacagaatatcacccagtggtgaagagtgtggcctcacagttacagaactggtgatagaggtttcttgttgcactgggaactcctatgttcctcaagagccaagaggaacctgcaaaccgagcaaacatggcgacctgtccatgctaagcaaatatggatcacacaagaattaaacttactcaagtttttttggcattatggcgaagaagttttgttaacatataggttttcagctgctttctagttaaatgttgtgccagggaaacaacagctaaatcgcaatgtgtaaaatgaacgaagtaatgtgtaaaataaacaacagctaaacatggcgaccttttcattgtctggtacac

SEQ ID NO: 96027 - DNA, 1653 bp, Zea Mays
gggcagattataatcgtgtcagtgtcacaccatgtggcctgtttgtgtttgaccaaccagctccaaagaccgaagcattcgaagtccccctgaaaccaatccaccgccgctcttcaccgccacgccggagctaccccccgccgaagtgcccgcttcccgctctcctcattcaccaccttcgtctcgcggcacgcgcttatctgaggcaacagcggccgcctcctgccccgccgcggagctatacgtggaggccggcatccccgtcgctgcccgcccgttcccaggctacccagggcagattgatctctgtaatctctgaggcggagaagaccaccccgaggcccaaacagtccgggaaccgattggggcgccgctcggccgacgatgtcgtcgagcaggttctcgccggtgctgcaggcgtccgacctcaacgacttcatcgccccgtcgcaggactgcatcatctccctcaataagaacacctcctcctcccgccgcctccagaaaaatcagaaagaaactacagtgagctcaaaacctccagaggaagcagtcaagatttcactaaaagactgtctagcatgcagtggctgtataacatcagcagagacggttatgctggagaaacaaagcttgagtgacttcattgatcacataaactctgataaagctgttattgtatctgtgtctccccagtcaagagcatcactagctgcattcttcggtctttctcagtcacaggttctcagaaagctgactgctttgttcaagtcgattggtgtaaaggctgtctttgacacaagctcgagtcgagatctatctcttattgaagcatgcaatgaatttgtttcacgttatcagaaaaaccattcatgtagtggccaagaagctggagccaatcttccaatgatttcatctgcatgcccgggttggatatgctatgctgaaaagactcttggttcatacatcctaccttacatctcatctgtgaagagcccgcaacaggcaattggtgcagccattaagcaccatgtggttgataaacttggtctaaagccgtatgatgtttatcatgtcactgtgatgccctgctatgacaagaagctagaggctgtccgggatgatttcactttctcagtagacggtaaagaggtcaaagaggtggattcagtactgacaactggtgaagtgttagacttgatacagtccaaatctatcgatttcaagacagtagaggaatcttcattggacagattgttaacaaatgttgatgaggaaggccatctatatggggtttctggaggttctgggggctatgcagaaacagtctttcgctatggagcaaatgtaatttacaaaagagaaatagagggtcctcttgacttcagaatcttgagaaattcagattttcgtgaaattacattggaggtggagggcaaacctgttttgaagtttgcactttgttatggattcaggaacctgcagaatattgttaggaagattaagatgggaaaatgtgaatatcactttattgaagttatggcgtgcccttcaggttgtcttaatgggggaggtcaattgaagcctgttcaaggccaatctgctaaggaacttatccagcaattagagagtgtgtacacacaagatgtaagc

SEQ ID NO: 96028 - DNA, 2734 bp, Zea Mays
gtagatttcctgttgattgtactaaaagagctgttatcacgtcgccgtgatttgaggctgatattgatgagcgctactctaaacgcggaactcttctcaagttattttggaggagcgccaactatccatattcctgggttcacacatccagtaagggcacattttttggaagacatattagagaggtcaggctacaagttgacctcaagcaatcaacttgatgattacgggcaagataaagtctggaaaactcagagacagctattgcctagaaaaaggaaaaatcaaattactacacttgtcgaggaagcccttaaaaattcaagcttcgagatctatggctccaggacacgtgattctctagtgaattggaatcctgattgcataggtttcaacctcatagaggctgttctgtgccacatatgtcgcaaagagcgacctggtgctgttttagttttcatgactggatgggacgatattagttgcttgaaggatcaactgaaagcacatccattgttaggtgatccgaatagggtttttctgcttgcatgccatggttctatggctacttctgagcagaggctaatttttgagaagccacctcctaatgttcggaaggtagtccttgccacaaatatggcagaagcaagtattacaataaatgatatcgtttttgttgttgattgtggtaaagcaaaggaaaccacatatgatgctctaaacaatactccatgcttactcccctcatggatttcgaaagcttctgcccgtcagaggaggggtagagctggccgtgtgcaacctggagaatgctaccatctgtaccctagatataaaaagtttgcaagttggaagcattggggagttcctatcagctgctctacagcctccagaaccacgagctgtcgagaatgcagtggaattcttgaagatgattggagcattagatggaaatgagaaccttactgatcttggacgatacctttccatgcttccagttgatccaaaattgggaaagatgctcataatgggtgcagtttttcgatgcatagatcctatacttactgtagttgctgggcttagtgttcgggatcctttcctgttaccacaggaaaagaaggatgtaagccttttaatttctgctattagtgtatatatatattagtgtctgagtattggttgcgaatcaaaatttccttttgaaaaaagttatatttatgaaacagtaagggatactttagtactgaaaaaaatgcatgtggtgctttttatttagcaagaagcttattttgcatgaaggtaagaaggcttaattttcatattatactttatatattagttggcaggaacagcaaaagctagattctcagcaattatttagcaagaagcttattttgcatgaaggtaagaaggcttgtttttcatattattactttatatattagttggcaggaacagcaaaagctagattctcagcaaaggattatagtgatcatatggcccttgttcgggcttatgaaggatggaaggatgcagagagagaagggtctgcttatgaatactgctggagaaatttcctttcttctcaaacactacaagccattcactctctccggaagcaattcagctatattttaaaggattccggtttgatagactctgatgggaatacaaacaacagtttgagccataatcaatcattggtccgcggtattatatgttctgggctttttcctgggatagcatctgttgtgcatcgagaaagctccatgtcctttaagaccatggatgacgggcaagttcttctttatgcttgaatgcaaaatatcagaccatcccatatccatggctggtctttggtgagaaggtgaaggtgaatgctgtcttcatccgtgattcaaccggagtatcagactccatattgattttgtttggcggtgctgtagcaaaaggaggcatggccgggcacttgaagatgctcgatggctacattgatttcttcatggaccccagcctgtctgaatgctacctgcaacttaaagaagaactcgataaacttatacagcagaagcttgaagacccaaacttcgacatccacaaggaaggcaagtacatcctattcgccgtacaagagctcgccgccggcgacctgtgcgaagggaggttcgtgttcggccgcgagacgagccgggcccggctccggagccccgaggacgacggcaagagcaacctcataaaggacgggatgaaccccaagagcctgctgcagacgctgctgatgcgggccggccacaccccgcccaggtacaagacgaagcacctcaagacgaacgagttcagggccgtggtggagttcaaggggatgcagttcgtggggaagccgaagcggaacaagcagctcgcggagcgggacgccgccatcgaggcgctggggtggctgacgcagacctccggcgtgaaggctccggacgagaacgacgacgactcgccgctggacctgactgacagcatgctcaagctcctcaccaggccgaggcggcactcgaagaatagctctaggaaacggtgattttttgggcgaggatttgctgtagattgatcgcgcacacgcacaaaaggcatagagagagagagagagataggaaacgtcagctttggttacacgaatgcctcatggtctcgatgtgttgctttgtacattttttatttttatttttccacgctatgtcatcag

SEQ ID NO: 96029 - DNA, 183 bp, Zea Mays
atgtgtgcggcgtacacgactcgccgcccgtcacccccaaccaattcgaaagccaaagagcctcacgcccgcccacgaatacacagctcactcacaggccacatcccatcagagcgcctcacactcactcacttcgtgcccttggtggtgagtccgaagccgaacgggaagagcgggtcgtag

SEQ ID NO: 96030 - DNA, 573 bp, Zea Mays
aactgctcaggctgtggaaaattggggcacagaaaaaatagctccaaatgcccactaaatgggacaaagaagaggaaaagagcgccaaggaataatacaactaaaggttggtttcctaaagaagtgcctacatcatcacaggcagcacccaatattactcctccaagtgatgatgtgcctgcatcttcagaaattatgcttacaatacctccgccaggagaggatgtgcttgcatcttcacagatagtgcaaccaatgtctcctccaagagaggttgtgcctacagaattaatctctcctccgaaagacgcgtgaagaaggttgttcgttaaattacacctaggatgagctatacatatatgtattcttagggtgcatgttagttaggacagttatctgcaaaactgctaatgttagattaatgtatgtcattttatttgattgtcagtttggacagttatctgcaaaaatggtaatgtcatcagctattgggtgcattatctgaaatatatagttgatgccttgatggcgtgcaatatagtttgagagaaaggagtgctatttcttctgtta

SEQ ID NO: 96031 - DNA, 498 bp, Zea Mays
atgctgtcgcccttggtctccgtgtacgggtgctcgcccacggccacgatcgcgtacgagaagccgccgctcctgacgaactcggcgtcggggctctccgcgaacaccacctccgtcgacgggtccacggccgccttcacggcgtccaggaccgtggtgccgacggtggtgcgccccgtgtcgccctgccactcgatcgtccacccgccgcactggtaccccaggttgtcggcgtggctccctgcgaccaggatcctggcggccttcttgggcaggggcagcagcggcgcgtcgcccggcttgccgttcttgaggagcaccagcgacttgcgcaccgcctcccgcgccaggtccctgtgctcctgcttccccagctggtccgcgaggctggggtccggcatggggttctcgaacaggcccatggtgaacttgacgcgcagaatccgagtcacggcgtcgtcgatcctgctcatcgggatcaggccgctgttgacgtga

SEQ ID NO: 96032 - DNA, 2043 bp, Zea Mays
tgattcatataaaattgaaatgaatgcataaactgatgcttcatagatttggtaatggtttacctattggtcagactaagataggttgtcaatgggggaaaaagtcagggtttgtatcctatcctctgtctcaacaataccagacaaattgacaaaataaataaataaaactcatggactgcatgctctaatgtacgaactgttaggaattttctatttttggtacttctgttttgagccacaattggtgtagtggccactgccaacactcttaagtacactgatatgttttctctcgctgaaaacaaaaaaaacttccaatactcactagcttaatgtacacacattccattttacatgtatttgggccagtcctgtgaagcttttcttttatgtgttgtagtctttaatgatggttttccttcctaatctagaaccctatcagaaaaccatgggctctgatggaataatgttctcttcattgctgttgttttaatcaggcaaggatcttgatgcagtccttaaagctacaccaattcttccagaaaaagaaggaaggatcataattgttcaaatatttcagggcctggtttatctaaacaagaggggccaaaagatcattcactatgatctaaagccgggcaatgttctctttgatgaggttggtgttgcaaaagttaccgactttggcctcagcaagatagtggagaatgatgttgggtctcaggggatggagctcacttctcagggagctggaacctattggtatcttcctccagaatgctttgacctgagcaaaacaccatttatttcatctaaggtggatgtttggtcagctggtgtaatgttttaccagatgctcttcggaaagcgtccttttggtcatgaccagacccaggagagaatacttcgggaagatacgattatcaatgcacggagagtggagttcccttcaaagccagctgtatcaaatgaggcaaaggatctgatacgccggtgcttgacatacaaccaatcagagagaccagatgtactaaccatagctcaagatccttatctctcatacgcaaagagatagccgctatgccggagaacactaaggcaagggtagctgatcatttatgagattatttatgtatggggatggataatcttgcgaaggagcaaagtgttccacaagctcaagaagaccacaaagggtgtaactgtatatgttgtaaattttagtctttcccatcgcagcaatgacctgaaatccagaagccatcagttcaacggacagcttctttgtagcgtagagaaagcaggcattggtttgaacggggcatgcgtaacgtgatggtttcttggctggtgggctgtgggcagtggtcctgttgatggttggtttttgtttgctcatactgtcggtaaggtctgccaaatcagaaaccaccggtgacaggcgagagctcacatgctcacctccgaaaaaaatctcggccttgcactggcaggatggactggattttgcgtattgccaaaacagatttaaggtagcatgcatcaatacaggttactttggataacctatagactcaccacagccacaagcacagaagctcttcgtacaatttcagagagtaccgatgtgccagatttctgctggtgccaatttgtttgtgatcgctgtcacccttgtacaacactgggatcgctcattgagcatacacaagttatgcaatttgcttttttattatagtcatctttagggcgtcgttttgttcggaacggattctttggaactttaatgttagttttatttgtgttaaaactgaacgtggaatagttccaggttatataatcccagctaacctaacttgcacttaggagatgtttggtttgagaaatcactctatctaaaataagttagtgtatcatgagttcattttctaaatttggtgggatgatctcattccatatactaagtaactaggaagaatgaggtgatgatatattaactcattttattttacaaaccaaaaaaaaatgaggagtaagaag

SEQ ID NO: 96033 - DNA, 3652 bp, Zea Mays
taataggcaatctctggtagggtagaaacagtaccagatagggagggtcggcaacgatgactcggtaggcgtgcttcatcgccgccggcagctcctccggtcggttgtagtcgtagaaggtgaagtcgccgccgtactgcccgaaccgctcgtcgtactccagcagctgcgcgggcactccggggtccgtcttcttcaggtaggcgtagagcgtcgggcatgcgatgcaggccacggcaccggcggcggagcctgatccagaaggggagacaaggcggacgacctcctccacgagctcccgcgcggtacgctcatcataccagaactggctcaaccgccagtcctccgggaccagctctaccccgtcttcccctcctccagcttcattctgctcctccggacgatgctgttccgccagaaactcccggagcgcctccatcgccgcagcgctgagttgaggcacgttgtcgtcgtcgtcttcctgctccctgacctccccgctcactctctcatcctccataccgctcgcggccatcacatccaccgctggtctgctactctgctgcgggggcggcggcgcggggcaattgggcaaacactccgctggtccactccttcgatacgacgaaccaatggttttagcgaaatgagcatttgtggagttaccacatgggcctcgttggcccaaaggcccagtgagcctgacggaaagagcaataataaagcggagtggcaatggaatcgctcgcaggggaggggaacgagtgggaagggactgaagaagagcgagagaggtgggtgaccgccgcgcctccgtccagacttccagttccaggcgtggcgaactaggcaagcggcacgctccgccttcgcataccctccgcgagtgagctccagttgcctccaccgccgtactcagcagcggagaccggcgagtcaacaggggaggacatagtgcagcacctatcgtccaattccaacccgtcttcgtcgaagctcgccaagctcgaggcacggatggccggcaaggctgtctccgcgccatcgtcaccgccgcaccatcccatgtctgcccccgtcatatcgttcatggaccaggaggagctgcctgagacttcctcttccgatgacgataactgtgaggagttcttgatacaaaagaataccctgaagcgtccgagatctccagatggtgacaacatgcttgctcttggaaattttgagggttcggtaaatgaggcagcaaagattttaggcgtcacagatacaaaaccttccttggacaattcaagtaggaaaaaacaaggccgtggaaggggtcgtgctggtacaggccgagggcgtggctcaagggctgctgatcaaacacgattgacttcaacttcctcagcagctgtaacaaatggccaactagataaattaaccaacaaggaaccccgatcgagtgttcaactgggccatgacgacagagctgctttacaggacgaattgtcaacattacgtggcaaagttgcatttttggaggaagacctttctaaatcgcatcaagaagcaacaaattaccatgaacttagtgataggttagcaaaggaattgaaggatctcaaagatcatgaccaacaaatgagattaaagcaaatgaaaatcctgtccgatctgctgatagctgtgtcaaaagcagagaggcaagaagcgagaatgagaataaggcaggaatctttcagacttggaaatgttgctgttatgagagctgggactatcatatctgaaacttgggaagacggtcaggcaataaaagatcttaatgctcacctgaaatctttgctggaaactaaggagactattgaaaggcatcgtaaatcacttaagaaaagacaatctgacaagggtgatggcagtgatgctgagactggcatgtctgaggaggacatcctcttacaagatgaaatatgtaaatctcggttaatgagtataaaacgggaggaagaacagtatatgagagagagagatcggtatgagttggaaaaggggaggcttatacgagagatgaagcgtctcagagatgaagatggctcacgctttaacaacttccaaattcttcaccatcgttatgctctcttaaatcttcttggaaagggagggtttagtgaggtttacagggcttttgatttggtggagtacaaatatgtggcatgcaagcttcatggattgaatgctcaatggagtgaggagaaaaaacagagctacatacggcatgcgattcgtgaatataacattcacaaaactttggttcatccaaacattgtcaggctatgggatatatttgagattgatcacaatacattctgcactgtcctagaatattgcagtggcaaggatcttgatgcagtccttaaagctacaccaattcttccagaaaaagaaggaaggatcataattgttcaaatatttcagggcctggtttatctaaacaagaggggccaaaagatcattcactatgatctaaagccgggcaatgttctctttgatgaggttggtgttgcaaaagttaccgactttggcctcagcaagatagtggagaatgatgttgggtctcaggggatggagctcacttctcagggagctggaacctattggtatcttcctccagaatgctttgacctgagcaaaacaccatttatttcatctaaggtggatgtttggtcagctggtgtaatgttttaccagatgctcttcggaaagcgtccttttggtcatgaccagacccaggagagaatacttcgggaagatacgattatcaatgcacggagagtggagttcccttcaaagccagctgtatcaaatgaggcaaaggatctgatacgccggtgcttgacatacaaccaatcagagagaccagatgtactaaccatagctcaagatccttatctctcatacgcaaagagatagccgctatgccggagaacactaaggcaagggtagctgatcatttatgagattatttatgtatggggatggataatcttgcgaaggagcaaagtgttccacaagctcaagaagaccacaaagggtgtaactgtatatgttgtaaattttagtctttcccatcgcagcaatgacctgaaatccagaagccatcagttcaacggacagcttctttgtagcgtagagaaagcaggcattggtttgaacggggcatgcgtaacgtgatggtttcttggctggtgggctgtgggcagtggtcctgttgatggttggtttttgtttgctcatactgtcggtaaggtctgccaaatcagaaaccaccggtgacaggcgagagctcacatgctcacctccgaaaaaaatctcggccttgcactggcaggatggactggattttgcgtattgccaaaacagatttaaggtagcatgcatcaatacaggttactttggataacctatagactcaccacagccacaagcacagaagctcttcgtacaatttcagagagtaccgatgtgccagatttctgctggtgccaatttgtttgtgatcgctgtcacccttgtacaacactgggatcgctcattgagcatacacaagttatgcaatttgcttttttattatagtcatctttagggcgtcgttttgttcggaacggattctttg

SEQ ID NO: 96034 - DNA, 1288 bp, Zea Mays
ttttttttgcagtagttcacagaaactttcatggtacctgctattatggaatcctttagctagttgtgtttttttgctatatacctggtgcaataatacttgctacttctattagaattgcagcattctcctattgcattgctaacgcctaacggatatgaagcactttcctatattgccttgaacaagtggctgttttatacatttagtttctatttatggcaggacatcattgttttccatttcatgatcattgttcctttagaatggcaggcactgcctcactacaattctttcccattctcttttcaggtatcttcctccagaatgctttgacctgagcaaaacaccatttatttcatctaaggtggatgtttggtcagctggtgtaatgttttaccagatgctcttcggaaagcgtccttttggtcatgaccagacccaggagagaatacttcgggaagatacgattatcaatgcacggagagtggagttcccttcaaagccagctgtatcaaatgaggcaaaggatctgatacgccggtgcttgacatacaaccaatcagagagaccagatgtactaaccatagctcaagatccttatctctcatacgcaaagagatagccgctatgccggagaacactaaggcaagggtagctgatcatttatgagattatttatgtatggggatggataatcttgcgaaggagcaaagtgttccacaagctcaagaagaccacaaagggtgtaactgtatatgttgtaaattttagtctttcccatcgcagcaatgacctgaaatccagaagccatcagttcaacggacagcttctttgtagcgtagagaaagcaggcattggtttgaacggggcatgcgtaacgtgatggtttcttggctggtgggctgtgggcagtggtcctgttgatggttggtttttgtttgctcatactgtcggtaaggtctgccaaatcagaaaccaccggtgacaggcgagagctcacatgctcacctccgaaaaaaatctcggccttgcactggcaggatggactggattttgcgtattgccaaaacagatttaaggtagcatgcatcaatacaggttactttggataacctatagactcaccacagccacaagcacagaagctcttcgtacaatttcagagagtaccgatgtgccagatttctgctggtgccaatttgtttgtgatcgctgtcacccttgtacaacactgggatcgctcattgagcatacacaagttatgcaatttgcttttttattatag

SEQ ID NO: 96035 - DNA, 1686 bp, Zea Mays
tgattcatataaaattgaaatgaatgcataaactgatgcttcatagatttggtaatggtttacctattggtcagactaagataggttgtcaatgggggaaaaagtcagggtttgtatcctatcctctgtctcaacaataccagacaaattgacaaaataaataaataaaactcatggactgcatgctctaatgtacgaactgttaggaattttctatttttggtacttctgttttgagccacaattggtgtagtggccactgccaacactcttaagtacactgatatgttttctctcgctgaaaacaaaaaaaacttccaatactcactagcttaatgtacacacattccattttacatgtatttgggccagtcctgtgaagcttttcttttatgtgttgtagtctttaatgatggttttccttcctaatctagaaccctatcagaaaaccatgggctctgatggaataatgttctcttcattgctgttgttttaatcaggcaaggatcttgatgcagtccttaaagctacaccaattcttccagaaaaagaaggaaggatcataattgttcaaatatttcagggcctggtttatctaaacaagaggggccaaaagatcattcactatgatctaaagccgggcaatgttctctttgatgaggttggtgttgcaaaagttaccgactttggcctcagcaagatagtggagaatgatgttgggtctcaggggatggagctcacttctcagggagctggaacctattggtggatgtttggtcagctggtgtaatgttttaccagatgctcttcggaaagcgtccttttggtcatgaccagacccaggagagaatacttcgggaagatacgattatcaatgcacggagagtggagttcccttcaaagccagctgtatcaaatgaggcaaaggatctgatacgccggtgcttgacatacaaccaatcagagagaccagatgtactaaccatagctcaagatccttatctctcatacgcaaagagatagccgctatgccggagaacactaaggcaagggtagctgatcatttatgagattatttatgtatggggatggataatcttgcgaaggagcaaagtgttccacaagctcaagaagaccacaaagggtgtaactgtatatgttgtaaattttagtctttcccatcgcagcaatgacctgaaatccagaagccatcagttcaacggacagcttctttgtagcgtagagaaagcaggcattggtttgaacggggcatgcgtaacgtgatggtttcttggctggtgggctgtgggcagtggtcctgttgatggttggtttttgtttgctcatactgtcggtaaggtctgccaaatcagaaaccaccggtgacaggcgagagctcacatgctcacctccgaaaaaaatctcggccttgcactggcaggatggactggattttgcgtattgccaaaacagatttaaggtagcatgcatcaatacaggttactttggataacctatagactcaccacagccacaagcacagaagctcttcgtacaatttcagagagtaccgatgtgccagatttctgctggtgccaatttgtttgtgatcgctgtcacccttgtacaacactgggatcgctcattgagcatacacaagttatgcaatttgcttttttattatag

SEQ ID NO: 96036 - DNA, 1970 bp, Zea Mays
atttctatttcctgcataagcattcgtcctagtccttttcacatgtctgcattgtataaatgatatccatatttttataggcttgcctgtttgcggtctacaccatcttactttttggtaatgatgtattatcatatttctgtgatgcttatgtatgccaaatctttctgtagaaatctttgctggaaactaaggagactattgaaaggcatcgtaaatcacttaagaaaagacaatctgacaagggtgatggcagtgatgctgagactggcatgtctgaggaggacatcctcttacaagatgaaatatgtaaatctcggttaatgagtataaaacgggaggaagaacagtatatgagagagagagatcggtatgagttggaaaaggggaggcttatacgagagatgaagcgtctcagagatgaagatggctcacgctttaacaacttccaaattcttcaccatcgttatgctctcttaaatcttcttggaaagggagggtttagtgaggtttacagggcttttgatttggtggagtacaaatatgtggcatgcaagcttcatggattgaatgctcaatggagtgaggagaaaaaacagagctacatacggcatgcgattcgtgaatataacattcacaaaactttggttcatccaaacattgtcaggctatgggatatatttgagattgatcacaatacattctgcactgtcctagaatattgcagtggcaaggatcttgatgcagtccttaaagctacaccaattcttccagaaaaagaaggaaggatcataattgttcaaatatttcagggcctggtttatctaaacaagaggggccaaaagatcattcactatgatctaaagccgggcaatgttctctttgatgaggttggtgttgcaaaagttaccgactttggcctcagcaagatagtggagaatgatgttgggtctcaggggatggagctcacttctcagggagctggaacctattggtatcttcctccagaatgctttgacctgagcaaaacaccatttatttcatctaaggtggatgtttggtcagctggtgtaatgttttaccagatgctcttcggaaagcgtccttttggtcatgaccagacccaggagagaatacttcgggaagatacgattatcaatgcacggagagtggagttcccttcaaagccagctgtatcaaatgaggcaaaggatctgatacgccggtgcttgacatacaaccaatcagagagaccagatgtactaaccatagctcaagatccttatctctcatacgcaaagagatagccgctatgccggagaacactaaggcaagggtagctgatcatttatgagattatttatgtatggggatggataatcttgcgaaggagcaaagtgttccacaagctcaagaagaccacaaagggtgtaactgtatatgttgtaaattttagtctttcccatcgcagcaatgacctgaaatccagaagccatcagttcaacggacagcttctttgtagcgtagagaaagcaggcattggtttgaacggggcatgcgtaacgtgatggtttcttggctggtgggctgtgggcagtggtcctgttgatggttggtttttgtttgctcatactgtcggtaaggtctgccaaatcagaaaccaccggtgacaggcgagagctcacatgctcacctccgaaaaaaatctcggccttgcactggcaggatggactggattttgcgtattgccaaaacagatttaaggtagcatgcatcaatacaggttactttggataacctatagactcaccacagccacaagcacagaagctcttcgtacaatttcagagagtaccgatgtgccagatttctgctggtgccaatttgtttgtgatcgctgtcacccttgtacaacactgggatcgctcattgagcatacacaagttatgcaatttgcttttttattatag

SEQ ID NO: 96037 - DNA, 1778 bp, Zea Mays
taataggcaatctctggtagggtagaaacagtaccagatagggagggtcggcaacgatgactcggtaggcgtgcttcatcgccgccggcagctcctccggtcggttgtagtcgtagaaggtgaagtcgccgccgtactgcccgaaccgctcgtcgtactccagcagctgcgcgggcactccggggtccgtcttcttcaggtaggcgtagagcgtcgggcatgcgatgcaggccacggcaccggcggcggagcctgatccagaaggggagacaaggcggacgacctcctccacgagctcccgcgcggtacgctcatcataccagaactggctcaaccgccagtcctccgggaccagctctaccccgtcttcccctcctccagcttcattctgctcctccggacgatgctgttccgccagaaactcccggagcgcctccatcgccgcagcgctgagttgaggcacgttgtcgtcgtcgtcttcctgctccctgacctccccgctcactctctcatcctccataccgctcgcggccatcacatccaccgctggtctgctactctgctgcgggggcggcggcgcggggcaattgggcaaacactccgctggtccactccttcgatacgacgaaccaatggttttagcgaaatgagcatttgtggagttaccacatgggcctcgttggcccaaaggcccagtgagcctgacggaaagagcaataataaagcggagtggcaatggaatcgctcgcaggggaggggaacgagtgggaagggactgaagaagagcgagagaggtgggtgaccgccgcgcctccgtccagacttccagttccaggcgtggcgaactaggcaagcggcacgctccgccttcgcataccctccgcgagtgagctccagttgcctccaccgccgtactcagcagcggagaccggcgagtcaacaggtagcagagggggaggaggggagcagttcctattcgcccgggcaccgaccgcccggagcattcccgttcccgctgctgcgtccgctagtttgccgtcgccctgttgcacgtacggctagggtttggagatagatccgcccgccgccccgccggctcgtgtagatgcacgccgtgctgcagggaggagtagaggaagtgcctggctcgcgtggttttggttccttgttctgaaggcttcgtagcgcgcgatccggttcggttgcaatcggtagtaatgtcgggctcgtcggccgcaggggaggacatagtgcagcacctatcgtccaattccaacccgtcttcgtcgaagctcgccaagctcgaggcacggatggccggcaaggctgtctccgcgccatcgtcaccgccgcaccatcccatgtctgcccccgtcatatcgttcatggaccaggaggagctgcctgagacttcctcttccgatgacgataactgtgaggagttcttgatacaaaagaataccctgaagcgtccgagatctccagatggtgacaacatgcttgctcttggaaattttgagggttcggtaaatgaggcagcaaagattttaggcgtcacagatacaaaaccttccttggacaattcaagtaggaaaaaacaaggccgtggaaggggtcgtgctggtacaggccgagggcgtggctcaagggctgctgatcaaacacgattgacttcaacttcctcagcagctgtaacaaatggccaactagataaattaaccaacaaggaaccccgatcgagtgttcaactgggccatgacgacagagctgctttacag

SEQ ID NO: 96038 - DNA, 917 bp, Zea Mays
ctcccgcccccgtcttcttccttcccccgcccgcgcccgaccccagcaggcaggcaggcaggcgtcagccatgagggagatcctccacatccagggcgggcagtgcgggaaccagatcggggccaagttctgggaggtgatctgcgacgagcacgggatcgacgccacgggccgctacgcgggggactcggacctccagctcgagcgcgtcaacgtctactacaatgaggccagcggcggccgcttcgtcccgcgcgccgtcctcatggacctcgagcccgggaccatggactccctgcgctccggacccttcggccagatcttccgccccgacaacttcgtcttcggccagtccggcgccggaaacaactgggccaaggggcactacaccgagggcgccgagctcatcgactccgtcctcgacgtcgtccgcaaggaggcagagaactgcgactgcctccagggtattttttgtcatttatttgctccgcccaaccccatctctcgcgttgttgaattcgttgttcagttaaccatgattgtcttatgcgctgttgaattcgccaagtggcacgtgttattgttaagcattggtttctagacaggttgttatggtggtacgtatattgaaattattgcttgtcgctgtggatttagcttttttttgtacctagcatgatggaggagcagcgatgggtaatttccgttactggttaagcaatcgtacagtctgcgtcggatcacttaaacataaaaatatcatatctgttgtaattatcgtgtttggtctgtttgcggtcgtattggcgctttcatgatgaaactctgtagtggtttgctggtcaatggaggaactctgtggatgttttctagtcaatcagtctgtcttcaactcttcatgtatattgtactctcta

SEQ ID NO: 96039 - DNA, 2055 bp, Zea Mays
ttcccttgctgggaggccttagtctcccttctctttctctcccagccgccagccgccgccgcactctcccagccgccagccgccgccgcggccgccgcaaaaaaccctaacccccaatccaccaatggcgtcgagcagccccgaccttgccgacgacggcttcgcggcgccgcgcctcttctcgcagggtgtctcctacacatacgacgacgtcatctttctcccgggctacatcggcttccccgccgacgccgtcgacctctccacccgcctctcccgccgcgtcccgctatccatcccctgcgtcgcgtccccgatggacactgtctccgaggccgctatggccgcggccatggcatcactcggcgccgccgccgtcgtgcactgcaacaccgagccccactcccaggccgccatcgtacgcgctgccaagtcccgccgcctccccttcgtttcctccgtgcccttcttctccccgtcctcctccccgacgctcaacgatttcgctggcagcgagtacgccctcgtcaccgagcgcggagattcgctctccaggctcgtcggcatcgctgtcgcggccgatgctgcctcccgcgaggttcccatctctgtctcggagtacatgcgaccgacgccgcgctcagcctcctctgccttcgacttcgaggaagcagcaaccttccttgccgatgagggtctggattacgctcctctcgtatccgatgatggtgaggttgtcgatctcatcaccgccaaggacgtggagcgcatccggagttatcccaagctgggcaagccgtctctcggagccaacgggaagtttgtagttgcggcttccattgggactcgtgaggatgacaagggaagactggagcaactagttaaggccggggcaaatgctatcgtgattgatagttcacaggggaactccatataccagctcgatatgataaagtttgcgaagaagatgtatccggaggtggatttgatcggtggtaatgtggtgacaattgcacaggcccagaatttgattcaagctggtgtggatggattgcgtgttggaatgggatcgggctcaatttgtaccacccaagaggtttgtgctgttggaagaggacaggcaacagcagtatataaggtttcatcttatgccaaggatcacaatgtaccggttattgctgatggtggaatttcaaactctgggcatattgtgaaagctctgtcgctgggggcatccactgttatgatgggcagctttttagctggtagtcatgaagctcctggtacttatgagtataaggacggccgccgagtcaaaaaatacagaggcatgggctctcttgaagccatgacaaaagggagtgatgcaaggtatcttggtgatacactcaagctcaaagtcgcgcagggcgttgttggagcagtagctgacaaaggttctgtactgaggttcattccttacacaatgcaagcagttaagcaaggattacaagatcttggcgcagattctgtccagtcagctcatgatcttttgcgatcagagacactcagattagaggtgagaactggtgctgcccaggctgaaggaggtatccatggactggtttcatacgtgaagaaggcattctagttccataatcaaacaaagaagtattggaacgatagtggttagctgcatgatatggaggggggggggggggtgcgatgctcatttatcctacctggcaaaagctcagcagcttgtcagcaaagattgtcgagttgggcagcaagtgtaccatctacttggcgtcataataatattaataaacctctggcatcgtaactgttgtataagctcacagcttgtcatctaaacttttttgcccaattttgttaaaagagtaaaacctcaatgttgtaccttgtattattatgtgttcgaagaatggttgataatagtggtttgtctctaaagttgacatcctggctagtgtgttactgacaattgaaaggctttcgtaaagtgggttgcttgaacaaatttgttgagccaatttttctaagttgcagctg

SEQ ID NO: 96040 - DNA, 1669 bp, Zea Mays
ctcccttccctccatcggtccatccatcctaacagaaacaggacccgcacgagacgaaaccgccgccacccatggccgactccggcgccctcgtcgtgacggaggcgcggcagcagcacccgctgagccagatcgcggccagcgggacgcaccggctgctgctcaagcagtgggtcaaggaggaggacctgctggcgcgccgcgtggcgctgcgggaggcccgcctcgacggcgcccgcaaggagatcgccttcctctactgcgccttcttcgccttccacgccgcttccgtgctgctcctcttcctctcctcctcctcctccgtcgccgcctcggcggccgcgacaacagcgtgcagacggtcgtggatcccctgcctcgtctcgctgctctcctcgctcgccatgctctgggcgctgcggtacaagtccgacacggaggccgtcctggagcgcgtcctcgcgcgggagcgcgaggacgcgctgctcctggccagggccaagaacctccgcgccgaggccaagggcgcagcagacaggcccaggaggtggcaggccagggacctggccgtcttcgcgctcttcgccgccgcctgcggggtgctcgtgctcaccaggttcctgctctgcaattagccaggtcgggtggggagcgatcagcacgtgctgcttgccttgccttcttggcctcttctcctccttgttcgttctgggcagaactgtttgttctgcgaattttggtgctggttttgtctgtttgtaaaataataaggaaatgatctgatgtgtcaggtttagtttcttctgattgtaacatagaataaatgctctcggtattatgaaattgcatttgtaagtaagggctcgttcggtggtttttgcgtttcttctgagagaaactgctgctggaaacacgattgtggtttccaagccatccagaactttttttgacacgattgcgtttcttcagacgtttccccaacttcagacgacatctgacagcacaacatccacacacacacacacatcatctttagacacaagcacaatttcagaaattttttgcttgattacagaagatataaagtgtgattgcaatcgtatcacaacatccacacacaccatctttagacacaagcacagatttgactctcaatctacactctcaagacagccagggcgaaattaaagaagaaagaactaagaatataaatccaacatcaccaccaagacatatatgtagtagtagtagaatggatggatggagagacgtctgaatctcagtcacacagcctcggaccattgtttcttgctgtggaacggctcaggcggcggcgaggaggctccgacgacgccgggcggcggcagcggcgtgccgtagatctgcacgccgatgccggtccgcatctcctcccggcccctgtgcttgccgaggaagtagcagccgaagccgaggaggatggagaagaagatgaagggcagagagaccaccagcacgaaccccattgcacgtctgtgcctcctgtcctgcctcaagtcgcagaggaggggggtggagcgagaggaccagatatggtgactaatgattgcttttttgggtcgctcgtcgttgccgctcgctaaaatcctagcagagatgctttgaagctttgctttgctttggggcatga

SEQ ID NO: 96041 - DNA, 845 bp, Zea Mays
acaggaagcactgcctgctcattttcttcctgtgcgcgtacagagatactactagcgagcacgccatggagcaaaccgaggcggcggtgagcggcgcgcttggagcgggagtggaaggtggcgacaagacggcgaggaaggcgctgaaggtggtggcggccgtggacgcgagcgaggagagcctgcacgcgctgtcgtgggcgctggacaacgtcgtgcggtgccacccggacgcgacgctcgtcgtcgttcacgcccagcacgccgccgaccacttcgcctaccccgtcgccgcgcacggtatcggtaccggcatcgtgtacgccccgtcctcggcggtggagtccgtgcgggcggcgcaggaggagagctcccgcagggtcgtggcgcgcgcgctggacatctgcaaggagaggcaggtggacgccacgggggccgtcgtggagggcgacgccaaggaggccatccgccaggccgtggagcgtatgcaggccgggcttctcgtcctcggcagccggggcctcggcgcgatcaaaagggcgttcctgggcagcgtgagcgactacctcatccatcacgcctgctgcccggtgctggtcgtcaggcccaggccgaccaagtgaactcgcctatcgttctcgagcagtactccagtcatgtacgcagtgccctgtgccgctgcgcggtcagtaataccagtatatgtatgctcatagaaaaaaaatgtagaaaactgaataaagaacctatgcatggttgtatctgcacaaattatcaacgcgcctccttgcctgcacttccgaactttgccgttatcaccaaagaattaagacaggactgcaata

SEQ ID NO: 96042 - DNA, 900 bp, Zea Mays
aaacacaagctgagatacggcggaaggcaacaagaacggccgccttcgcctccgttcatctctatcccgtgctgcccgtcccccagccacacagggacacatgacaaaacaggaagcactgcctgctcattttcttcctgtgcgcgtacagagatactactagcgagcacgccatggagcaaaccgaggcggcggtgagcggcgcgcttggagcgggagtggaaggtggcgacaagacggcgaggaaggcgctgaaggtggtggcggccgtggacgcgagcgaggagagcctgcacgcgctgtcgtgggcgctggacaacgtcgtgcggtgccacccggacgcgacgctcgtcgtcgttcacgcccagcacgccgccgaccacttcgcctaccccgtcgccgcgcacggcatcgtgtacgccccgtcctcggcggtggagtccgtgcgggcggcgcaggaggagagctcccgcagggtcgtggcgcgcgcgctggacatctgcaaggagaggcaggtggacgccacgggggccgtcgtggagggcgacgccaaggaggccatccgccaggccgtggagcgtatgcaggccgggcttctcgtcctcggcagccggggcctcggcgcgatcaaaagggcgttcctgggcagcgtgagcgactacctcatccatcacgcctgctgcccggtgctggtcgtcaggcccaggccgaccaagtgaactcgcctatcgttctcgagcagtactccagtcatgtacgcagtgccctgtgccgctgcgcggtcagtaataccagtatatgtatgctcatagaaaaaaaatgtagaaaactgaataaagaacctatgcatggttgtatctgcacaaattatcaacgcgcctccttgcctgcacttccgaa

SEQ ID NO: 96043 - DNA, 544 bp, Zea Mays
gtggcgtgcgaaccaaaaccaggtgtcaccttgggtgcgtgcatggaagacaagagggcaaacacaagctgagatacggcggaaggcaacaagaacggccgccttcgcctccgttcatctctatcccagatactactagcgagcacgccatggagcaaaccgaggcggcggtgagcggcgcgcttggagcgggagtggaaggtggcgacaagacggcgaggaaggcgctgaaggtggtggcggccgtggacgcgagcgaggagagcctgcacgcgctgtcgtgggcgctggacaacgtcgtgcggtgccacccggacgcgacgctcgtcgtcgttcacgcccagcacgccgccgaccacttcgcctaccccgtcgccgcgcacggtatcggtaccggtaccaccggaccccgaccacccttcttgctcctagcagcctatcggtccgagatctgacacctgaacggttcgtgccacgtacgctgatgatccaagaaggcatcgtgtacgccccgtcctcggcggtggagtccgtgcgggcggcg

SEQ ID NO: 96044 - DNA, 1594 bp, Zea Mays
aggagtcgtgaatccgtgacaaccggcggcggcgagggaagaatcgaagatcgccgcagccgcaaggaaggaaaccgagaacaactcaatccgctggctatggcgttgctgatggagcccggcgctgagcccctgactgagagcgagcaggccgacctggccggcatcgccgccatcaaggagtcggcggcgcgcgaatacaaggagcaggggaaccagttcgtccggatgggccggaggcactacgccgcggcggtctcctgctacacgaaggccatcgctcagatggagcccctctcctccctcgacgcatcagccgctgctgacgcctccgttctcttcgccaaccgagcacatgtcaacatcctcctcggtaaccaccgacgggccctcgacgacgccgagcaggccatccgcctctctccctccagcgtcaaggcgtactaccgagcagtgaaggcggcgcttgcgctggacttgttaacggacgcggcgtccttctgcaggaaggggctcgaacaggacccccctaacgaggaattcaagaaactgttgtcggaagtggattcaaaactgagagagcaagatcgtcagagagcgaaggttgcacaagcaatcgccaaagccaaggatcttgctgctgctatgggaaagagaggggtgaaacttgggaaggcagcctatcaagagctgacaggggtaaagaagccagtgctggatgagcagggcgtgctccactggcctgttcttctgctctacccagaggtcatgtcgagtgacttcattgaggattttccagatacagatactttctcgccccaccttgatgtcatgttctcagaaacttctccaccattgccatgggatgataaccatgtttacacaagggactcaatcgaattatattatcagggtggttttggcaaacctttgtcccgaagtgaggtattaagatatcttctagaaggcaatgtagattcgaaggcgcttccagatagccttcttgacggggaagacgaagaacatgacagtaccaaatgtaccactgttacatcaactgatagctccagtaagtggatcaaggtaaaagaaggaaaaacacttcaggaggtgctgcaggataaaggctatattgttcctgcaattcctgtgttcttcgttgtttcaaggaagtccacattctataaagacttcaaggctggaaactggtctttgccatgaaacagaaccggacactaaggttcagcttaaatcgatctctgagacgggcagcggatatggcaagaaagcagaagatgccctcttgtgatcatggtcatttggtttaaaaggagtgtgcttttttcagtgtctgcagactgacagccttttgttaccgagatagacagaaaagacgaggcaatgtaatatgaatttttatgtgaaccgattcagcgtttagcatggtcgtagtatgttaagtctcggttgaaacgttggtgtttctaacggatggtcttgacagtagtgtctgagcagtgcgacttgggtgactcttctccgatcgagcaacaaacttggaatatatgcttgccgctgggagccggtggcctgt

SEQ ID NO: 96045 - DNA, 1553 bp, Zea Mays
aggagtcgtgaatccgtgacaaccggcggcggcgagggaagaatcgaagatcgccgcagccgcaaggaaggaaaccgagaacaactcaatccgctggctatggcgttgctgatggagcccggcgctgagcccctgactgagagcgagcaggccgacctggccggcatcgccgccatcaaggagtcggcggcgcgcgaatacaaggagcaggggaaccagttcgtccggatgggccggaggcactacgccgcggcggtctcctgctacacgaaggccatcgctcagatggagcccctctcctccctcgacgcatcagccgctgctgacgcctccgttctcttcgccaaccgagcacatgtcaacatcctcctcggtaaccaccgacgggccctcgacgacgccgagcaggccatccgcctctctccctccagcgtcaagctaggcgtactaccgagcagtgaaggcggcgcttgcgctggacttgttaacggacgcggcgtccttctgcaggaaggggctcgaacaggacccccctaacgaggaattcaagaaactgttgtcggaagtggattcaaaactgagagagcaagatcgtcagagagcgaaggttgcacaagcaatcgccaaagccaaggatcttgctgctgctatgggaaagagaggggtgaaacttgggaaggcagcctatcaagagctgacaggggtaaagaagccagtgctggatgagcagggcgtgctccactggcctgttcttctgctctacccagaggtcatgtcgagtgacttcattgaggattttccagatacagatactttctcgccccaccttgatgtcatgttctcagaaacttctccaccattgccatgggatgataaccatgtttacacaagggactcaatcgaattatattatcagggtggttttggcaaacctttgtcccgaagtgaggtattaagatatcttctagaaggcaatgtagattcgaaggcgcttccagatagccttcttgacggggaagacgaagaacatgacagtaccaaatgtaccactgttacatcaactgatagctccagtaagtggatcaaggtaaaagaaggaaaaacacttcaggaggtgctgcaggataaaggctatattgttcctgcaattcctgtgttcttcgttgtttcaaggaagtccacattctataaagacttcaaggctggaaactggtctttgccatgaaacagaaccggacactaaggttcagcttaaatcgatctctgagacgggcagcggatatggcaagaaagcagaagatgccctcttgtgatcatggtcatttggtttaaaaggagtgtgcttttttcagtgtctgcagactgacagccttttgttaccgagatagacagaaaagacgaggcaatgtaatatgaatttttatgtgaaccgattcagcgtttagcatggtcgtagtatgttaagtctcggttgaaacgttggtgtttctaacggatggtcttgacagtagtgtctgagcagtgcgacttgggtgactcttctccgatcgagc

SEQ ID NO: 96046 - DNA, 1586 bp, Zea Mays
aggagtcgtgaatccgtgacaaccggcggcggcgagggaagaatcgaagatcgccgcagccgcaaggaaggaaaccgagaacaactcaatccgctggctatggcgttgctgatggagcccggcgctgagcccctgactgagagcgagcaggccgacctggccggcatcgccgccatcaaggagtcggcggcgcgcgaatacaaggagcaggggaaccagttcgtccggatgggccggaggcactacgccgcggcggtctcctgctacacgaaggccatcgctcagatggagcccctctcctccctcgacgcatcagccgctgctgacgcctccgttctcttcgccaaccgagcacatgtcaacatcctcctcggtaaccaccgacgggccctcgacgacgccgagcaggccatccgcctctctccctccagcgtcaaggaaggggctcgaacaggacccccctaacgaggaattcaagaaactgttgtcggaagtggattcaaaactgagagagcaagatcgtcagagagcgaaggttgcacaagcaatcgccaaagccaaggatcttgctgctgctatgggaaagagaggggtgaaacttgggaaggcagcctatcaagagctgacaggggtaaagaagccagtgctggatgagcagggcgtgctccactggcctgttcttctgctctacccagaggtcatgtcgagtgacttcattgaggattttccagatacagatactttctcgccccaccttgatgtcatatcctcctgaattacatgatgcttccttttggttgagttaaaatgtgtagatgtataagtagctttactgaatttattgcaatggtatccttaactatcaaacatgttctcagaaacttctccaccattgccatgggatgataaccatgtttacacaagggactcaatcgaattatattatcagggtggttttggcaaacctttgtcccgaagtgaggtattaagatatcttctagaaggcaatgtagattcgaaggcgcttccagatagccttcttgacggggaagacgaagaacatgacagtaccaaatgtaccactgttacatcaactgatagctccagtaagtggatcaaggtaaaagaaggaaaaacacttcaggaggtgctgcaggataaaggctatattgttcctgcaattcctgtgttcttcgttgtttcaaggaagtccacattctataaagacttcaaggctggaaactggtctttgccatgaaacagaaccggacactaaggttcagcttaaatcgatctctgagacgggcagcggatatggcaagaaagcagaagatgccctcttgtgatcatggtcatttggtttaaaaggagtgtgcttttttcagtgtctgcagactgacagccttttgttaccgagatagacagaaaagacgaggcaatgtaatatgaatttttatgtgaaccgattcagcgtttagcatggtcgtagtatgttaagtctcggttgaaacgttggtgtttctaacggatggtcttgacagtagtgtctgagcagtgcgacttgggtgactcttctccgatcgagc

SEQ ID NO: 96047 - DNA, 1749 bp, Zea Mays
gacacacttcaaaagtttgtagatcggcagtctgagttagtccgagtttaaggatagaaaatgtattttgtcctctttgggttagaaccagcaagaggagtcgtgaatccgtgacaaccggcggcggcgagggaagaatcgaagatcgccgcagccgcaaggaaggaaaccgagaacaactcaatccgctggctatggcgttgctgatggagcccggcgctgagcccctgactgagagcgagcaggccgacctggccggcatcgccgccatcaaggagtcggcggcgcgcgaatacaaggagcaggggaaccagttcgtccggatgggccggaggcactacgccgcggcggtctcctgctacacgaaggccatcgctcagatggagcccctctcctccctcgacgcatcagccgctgctgacgcctccgttctcttcgccaaccgagcacatgtcaacatcctcctcggtaaccaccgacgggccctcgacgacgccgagcaggccatccgcctctctccctccagcgtcaaggcgtactaccgagcagtgaaggcggcgcttgcgctggacttgttaacggacgcggcgtccttctgcaggaaggggctcgaacaggacccccctaacgaggaattcaagaaactgttgtcggaagtggattcaaaactgagagagcaagatcgtcagagagcgaaggttgcacaagcaatcgccaaagccaaggatcttgctgctgctatgggaaagagaggggtgaaacttgggaaggcagcctatcaagagctgacaggggtaaagaagccagtgctggatgagcagggcgtgctccactggcctgttcttctgctctacccagaggtcatgtcgagtgacttcattgaggattttccagatacagatactttctcgccccaccttgatgtcatatcctcctgaattacatgatgcttccttttggttgagttaaaatgtgtagatgtataagtagctttactgaatttattgcaatggtatccttaactatcaaacatgttctcagaaacttctccaccattgccatgggatgataaccatgtttacacaagggactcaatcgaattatattatcagggtggttttggcaaacctttgtcccgaagtgaggtattaagatatcttctagaaggcaatgtagattcgaaggcgcttccagatagccttcttgacggggaagacgaagaacatgacagtaccaaatgtaccactgttacatcaactgatagctccagtaagtggatcaaggtaaaagaaggaaaaacacttcaggaggtgctgcaggataaaggctatattgttcctgcaattcctgtgttcttcgttgtttcaaggaagtccacattctataaagacttcaaggctggaaactggtctttgccatgaaacagaaccggacactaaggttcagcttaaatcgatctctgagacgggcagcggatatggcaagaaagcagaagatgccctcttgtgatcatggtcatttggtttaaaaggagtgtgcttttttcagtgtctgcagactgacagccttttgttaccgagatagacagaaaagacgaggcaatgtaatatgaatttttatgtgaaccgattcagcgtttagcatggtcgtagtatgttaagtctcggttgaaacgttggtgtttctaacggatggtcttgacagtagtgtctgagcagtgcgacttgggtgactcttctccgatcgagc

SEQ ID NO: 96048 - DNA, 1133 bp, Zea Mays
ctgagttagtccgagtttaaggatagaaaatgtattttgtcctctttgggttagaaccagcaagaggagtcgtgaatccgtgacaaccggcggcggcgagggaagaatcgaagatcgccgcagccgcaaggaaggaaaccgagaacaactcaatccgctggctatggcgttgctgatggagcccggcgctgagcccctgactgagagcgagcaggccgacctggccggcatcgccgccatcaaggagtcggcggcgcgcgaatacaaggagcaggggaaccagttcgtccggatgggccggaggcactacgccgcggcggtctcctgctacacgaaggccatcgctcagatggagcccctctcctccctcgacgcatcagccgctgctgacgcctccgttctcttcgccaaccgagcacatgtcaacatcctcctcggtaaccaccgacgggccctcgacgacgccgagcaggccatccgcctctctccctccagcgtcaaggaaggggctcgaacaggacccccctaacgaggaattcaagaaactgttgtcggaagtggattcaaaactgagagagcaagatcgtcagagagcgaaggttgcacaagcaatcgccaaagccaaggatcttgctgctgctatgggaaagagaggggtgaaacttgggaaggcagcctatcaagagctgacaggggtaaagaagccagtgctggatgagcagggcgtgctccactggcctgttcttctgctctacccagaggtcatgtcgagtgacttcattgaggattttccagatacagatactttctcgccccaccttgatgtcatatcctcctgaattacatgatgcttccttttggttgagttaaaatgtgtagatgtataagtagctttactgaatttattgcaatggtatccttaactatcaaacatgttctcagaaacttctccaccattgccatgggatgataaccatgtttacacaagggactcaatcgaattatattatcaggtttgtttggatgaatttaattttgctcgagtaaacccctactttctgctaagcattatgattacagttttttttttcagaaagcaaagcattatgtgatgtagcctcttcattgaacat

SEQ ID NO: 96049 - DNA, 1119 bp, Zea Mays
cttgatatttctgagaccggaacgcgcagaggcctgtcttctaccttcgtcgctatcctctgcgccgctcatcggagattttttctgctcgcgctggccaggatatttcctgaagtcacgaccttatcttccccagccaagcttctttctcctctcactgccgcgcagcttctcctgcgccgctcggccctgccatctccatggctgcgtcctattcggtcgccctgtttgcagctcgccggcgcccaagccctctgctcgctctccatcgcgaccttcccagcctcctctgccgagcccagctgaagctccctacgcgcggtcttctccaatcgagctgcgtcccgtccgctcggtcctgctcttctccaaccgcgcccctgatctggagtctagccgagctctccactgcccagctccatctcacggcgctctgtcctgctcgctcatggccgaagccacctggtcccaggtccggtcggccggctcagtttttcccagtgccgcgcgtcgcgcttccccttccagccgaccgaagctcccagctccaggcatggcgcgtccgctccctagagcttgctgcagcagcttctctctctcctggagtttctctgcgttcagcccagccgcgcccctgtccatctcgtcgcggctgctgttttagtgtttttcctgcgtgccgtgctctcttccatggatgccgcggctgctgctctggagttctccctgcacgcgctcagcttcaattcagttgccgtgcccaccgtcggtttgtgtgtgctcgcgctgaacacggtaaaacgttgcgtgagcttgtgtccgagcccgcccgaccgtgaccttgctttgcttctcgcgtcgctactcgccaagtccttctccaatccgcgccataaaattcactcggacacgatctcgtcgtcgttccgcgcgtcagcataaaatcctaagaatcgaatgaagacgaagctagcagcgcgatattccctaagcgctcgacaaattgcctgtatcgaaaatcgctaccgatctcgcggattcgagttagctgttgaaacggtaagctgatgaatagtttagaataattcgaaagttaaataaattaatgtgttagtggga

SEQ ID NO: 96050 - DNA, 1894 bp, Zea Mays
gttgacatgtgcggagcgcacaggaggcagcgagcgaccttgttggccgtgcacagcgcacccaggccagtttccgccgcgaaatatacaaaagccccgggccccggcagccgcggcgcgtcgaagtgatgacccctcgttccatccgtcctcactgagcggcagcaaagcacgccgtgccattcccatcactaagcgcttgcgcgcggcggagaaacccaagcgaagccccgcaagagcgaggcgagggagagtggggcgagtgggtgagccgctggctagcgggatggcgtcgccgggggtggtggccgcggcgctgctggtggcggtcctggcggcattctgtggcacggatccgctgcggatgggcagcatggcgggcttcccggggttcgaggcgcacttcgtcgacctccccgatcccgccgagatgccgccgcacgcggacgagcgggagcggctccgcggggccgaggtgcggttccgcggcgatgtgcagggtcccgagagtgtcgccttcgaccctcagggtcgcggcccgtacacgggcgtcgccgacggccgggtcgtcttctgggacggcgagcggtgggtccccttcgcgactgcctccccgcgctggacgcaggagctctgcggcgggcctaaagcctcgccggtggagtacctccccaacgagcacatctgcggccgcccgctcgggctccgcttcgataagaagaccggggacctgtacatcgccgacgcctacttcggattgcttaaggtcggtcccgaaggcgggctggccacgccgctcgcaacggaggccgagggcgtgcgcctcaacttcaccaacgacctcgatctcgacgacgagggcaatgtgtacttcacggactccagcatccactaccagagacggaatttcatgcagttagttttctcgggggatccctctgggagacttctgaaatataacccacagacaaaggaaacgacagtactgcatcgcaacctccaatttcccaacggtgtgtccatgagcaaggatggctcattctttgttttctgcgaaggatcgcgtggcaggttgagcagatactggttgaaaggcgagaaggcaggcactgtggatcttttcgctatcttgcctggcttcccagacaatgtgagaacgaatgagaagggcgagttctgggtggcaatccactgccgccgaagtctgtacgcccggcttatgagccgccatgtcaagctgaggaagtttttgctcagcctcccgatccccgccaagtaccactacctgatgcagatcggtggcaggctccacgcggtcatcatcaagtacagcccagagggccaggtgcttgacatcttggaggacaccaagggcgaggtggtgagagccgtcagcgaagtggaggagaaagacgggaagctctggatagggtctgtcctgatgccgttcatcgctgtctttgacctcgcgaaggcgtcttagccgcctcaagtttgattggaaacattgttgctttaagacatggagtccatggttaccgctgcacgcttctctgagaggatcagtgatcccaataatttggttctggtgcaacctggagctgtatataatgctccagcttcttttagtagcaaatgtaagttgctgacatgttctttagattgtcactagaactagaactatgaacgaacagctcgtgcttccgagtccagatttaccagatgtgcttcttgagtttgatccgtttttatttttatttgggcaacaaatgaaagttttcaatttttatttcgccaacaaaagaaggtttcgatttttatttggccaacaaacgaagtttttacagagcgagagtgtaggccacgttctaagggttagctgaaaatagttcga

SEQ ID NO: 96051 - DNA, 1045 bp, Zea Mays
gagagaacgcgaggggacgtccctttcccagctgccccgcaaccaaacgcgtccttaatgtctcctcaatttgcaaacaagtttgctggatccaagacaccttggatcttccatgaccttatcagtaatcattcattttcaggaatttcatgcagttagttttctcgggggatccctctgggagacttctgaaatataacccacagacaaaggaaacgacagtactgcatcgcaacctccaatttcccaacggtgtgtccatgagcaaggatggctcattctttgttttctgcgaaggatcgcgtggcaggttgagcagatactggttgaaaggcgagaaggcaggcactgtggatcttttcgctatcttgcctggcttcccagacaatgtgagaacgaatgagaagggcgagttctgggtggcaatccactgccgccgaagtctgtacgcccggcttatgagccgccatgtcaagctgaggaagtttttgctcagcctcccgatccccgccaagtaccactacctgatgcagatcggtggcaggctccacgcggtcatcatcaagtacagcccagagggccaggtgcttgacatcttggaggacaccaagggcgaggtggtgagagccgtcagcgaagtggaggagaaagacgggaagctctggatagggtctgtcctgatgccgttcatcgctgtctttgacctcgcgaaggcgtcttagccgcctcaagtttgattggaaacattgttgctttaagacatggagtccatggttaccgctgcacgcttctctgagaggatcagtgatcccaataatttggttctggtgcaacctggagctgtatataatgctccagcttcttttagtagcaaatgtaagttgctgacatgttctttagattgtcactagaactagaactatgaacgaacagctcgtgcttccgagtccagatttaccagatgtgcttcttgagtttgatccgtttttatttttatttgggcaacaaatgaaagttttcaatttttatttcgccaacaaaagaa

SEQ ID NO: 96052 - DNA, 1516 bp, Zea Mays
atatgcccctaggattcaatgaggctttttaccagctgcttatcttgcatagggtggaagatgcacttggagaaggtctagcaggtcgatcaccttcgcacatagctgttggtgcaaataaaaaagcttcaaatgtgggacatattaaagatgggtctaatgtatcaaaagttgaagatggtcatgtcgatagaagtgttggtgtgaagaagcccagatattctgcagatgaaggcccttcgttgactgaactgagtggatacaatgcaaagagacacgagtttgacccagagtatgataatgatgccgaacaagcgcttgctgagatggaatttaaagaaactgattcagaaactgatcgtgaactgaaactccgtgtgctgcgtatttatctgtccaggcttgatgaaagaaaaaggagaaaagagttcatattggaaaggaatttattgtttcctaatcccttggagaaggatcttacaaatgaagacagggaagtttaccatcggtataaggtcttcatgcgttttctttccaaggaggaacatgaagcccttgttaggagtgtcattgaagagcgaaaaattcggaggagaattcaagaactccaggaatgtcgttctgctggatgccgcacacttgctgaagcaaagatacacatagagcaaaagaggaaaaaagaatacgagctgaatgcccaaaaagctaaggaaagtaaccaccttattgcaaatactaaattggtgcagaagatgaatcgacctatgaagattgagtctgatgggaatttggatccaaagaaaggtggtgttggcttagattctcctaaaactacaggacttacaagtgttaagcagtgggatgactgggatatagttggtcttcctggggcggagctattaagtgctagcgaaaagcttctatgttgccagaacagactgctacccagtcattacctgagaatgcaggaggtgctgatgcaggagatattcaagggtagtgtcctaaagaaggaagacgcacacgtcttgtttaaggttgatcctaccaaagtagatagtgtttatgatatggtaacaaaaaagctgggcaaccatgtggagttgcctacggtctagcttatgcctttgggcttgcctgctgtgacatgccgaagaaaacaagtcttggtttcgccccttgcagcgtgtctgaaccatagctgaaggtggaactgtactagatcaaatcggccatagttaactgaaattcgtatcagttgtcagaagcacaataaggcattccagccaagttgtaaaattattgcccttagcagaatgtgtagcgtgagttgtcatttcctttctgccattgttgtgcactgtttcagctgtggtagtgccttgtagtaggtataggtgcctgagtttatatgtatcatcgtgtatgtaccattgggagctcaattatatgccattgtaccaaccccagacattgattattacaattcatctagcagccagattcttgtctctaa

SEQ ID NO: 96053 - DNA, 2364 bp, Zea Mays
cacatctgacctccgcctgctcgccctctctctctcgatggtcgtcttctccacgagaccacgaccgatcaaccccaatcgtagggaactgggaacccggacccagatctcccctagatcctcaatcccaatctgccctccgccgtatcgatcatacctcccgatgcgaccccaagtctggtcgatgcgagtagcggcggcgatttagcgaactgcgcgttcgctagggttagggtttcgagggtttgcgctagggtttgggcgcacgatggggcggtcgcgaggggtgcagaattccggcgacgacgacaccgtacacaggtcgaagcggaggagggtcgcatcgggcggggatgcgacggactccgtttccgctggcatcgggggagctggagaaggagggggcaagaaagcgctctaccactgcaattactgcaacaaggacatctctgggaagatacggatcaaatgctccaagtgccctgacttcgacctttgcgtggagtgcttctctgttggcgctgaagtcaccccacatcgcagcaaccatccttacaaagtcatggacaacctgtctttcccacttatttgcccagattggaatgcagacgaagaaattctcctccttgagggaattgaaatgtatggtctgggaaactggcttgaagttgcagagcatgttggtaccaagtctaagttacagtgtattgatcattacacaacagcatacatgaactcaccttgttatcccctaccggatatgtctcatgttaatggcaagaacaggaaggagcttctagctatggctaaagtgcagggtgaaagtaaaaaagggacttcactgttgcctggagagctgactcctaaggctgaatctccattttctccctccagggtcaaggtggaagatgcacttggagaaggtctagcaggtcgatcaccttcgcacatagctgttggtgcaaataaaaaagcttcaaatgtgggacatattaaagatgggtctaatgtatcaaaagttgaagatggtcatgtcgatagaagtgttggtgtgaagaagcccagatattctgcagatgaaggcccttcgttgactgaactgagtggatacaatgcaaagagacacgagtttgacccagagtatgataatgatgccgaacaagcgcttgctgagatggaatttaaagaaactgattcagaaactgatcgtgaactgaaactccgtgtgctgcgtatttatctgtccaggcttgatgaaagaaaaaggagaaaagagttcatattggaaaggaatttattgtttcctaatcccttggagaaggatcttacaaatgaagacagggaagtttaccatcggtataaggtcttcatgcgttttctttccaaggaggaacatgaagcccttgttaggagtgtcattgaagagcgaaaaattcggaggagaattcaagaactccaggaatgtcgttctgctggatgccgcacacttgctgaagcaaagatacacatagagcaaaagaggaaaaaagaatacgagctgaatgcccaaaaagctaaggaaagtaaccaccttattgcaaatactaaattggtgcagaagatgaatcgacctatgaagattgagtctgatgggaatttggatccaaagaaaggtggtgttggcttagattctcctaaaactacaggacttacaagtgttaagcagtgggatgactgggatatagttggtcttcctggggcggagctattaagtgctagcgaaaagcttctatgttgccagaacagactgctacccagtcattacctgagaatgcaggaggtgctgatgcaggagatattcaagggtagtgtcctaaagaaggaagacgcacacgtcttgtttaaggttgatcctaccaaagtagatagtgtttatgatatggtaacaaaaaagctgggcaaccatgtggagttgcctacggtctagcttatgcctttgggcttgcctgctgtgacatgccgaagaaaacaagtcttggtttcgccccttgcagcgtgtctgaaccatagctgaaggtggaactgtactagatcaaatcggccatagttaactgaaattcgtatcagttgtcagaagcacaataaggcattccagccaagttgtaaaattattgcccttagcagaatgtgtagcgtgagttgtcatttcctttctgccattgttgtgcactgtttcagctgtggtagtgccttgtagtaggtataggtgcctgagtttatatgtatcatcgtgtatgtaccattgggagctcaattatatgccattgtaccaaccccagacattgattattacaattcatctagcagccagattcttgtctctaa

SEQ ID NO: 96054 - DNA, 685 bp, Zea Mays
cacatctgacctccgcctgctcgccctctctctctcgatggtcgtcttctccacgagaccacgaccgatcaaccccaatcgtagggaactgggaacccggacccagatctcccctagatcctcaatcccaatctgccctccgccgtatcgatcatacctcccgatgcgaccccaagtctggtcgatgcgagtagcggcggcgatttagcgaactgcgcgttcgctagggttagggtttcgagggtttgcgctagggtttgggcgcacgatggggcggtcgcgaggggtgcagaattccggcgacgacgacaccgtacacaggtcgaagcggaggagggtcgcatcgggcggggatgcgacggactccgtttccgctggcatcgggggagctggagaaggagggggcaagaaagcgctctaccactgcaattactgcaacaaggacatctctgggaagatacggatcaaatgctccaagtgccctgacttcgacctttgcgtggagtgcttctctgttggcgctgaagtcaccccacatcgcagcaaccatccttacaaagtcatggttagtgcacatgattgtctgttgtctttgcttgacttgatgctttgagcagcactgctctaacttcagtagttgtattattatttgatctacaagtgtaccaagtaagttgtaattcat

SEQ ID NO: 96055 - DNA, 1572 bp, Zea Mays
attcctcccccgactctcccctcttctgcctagtcctcctgtcctcccctccccctccgacctccacggtttcgcaggcaaagatgaagaaggcgtctgcggcgtcgcgctacgcggcctacgactccccgtccccgtctccttcgtcgcgccgtgcggcgccttccgcggccgccgcgaccccgggaggagcgcacggcagcagccgcgcattggtggtcgcggggagatctggccgcgatctactgggcgccaagccgcagccgcaagcccacggcaacctgggttccgtactacggcggctcatctccatggacaagaagccgcccaagaaccagctcccggtccctcctgccgccgccagcgcagcgaagaacaacggcggcgggaagctgccggggctgtcgcggaaactattccagaaagcctcgtccacagcggcggcggcgccaaggaagacgaaggccctgacagaagtcaagaacagcggcaacaacgccaacacgcggacgctcgccatggtgctgcgcaccgagcgggagctcctggcgcagaccaaggcgcaggaggacgagatcgccgcgcttcgcctgcagctcgagaacaaggacagggaggtggagcgtctcaaggacctgtgcctgcggcagcgagaggagatcaggacgctcaaagacgccgtcctgttcccggacgcggagccggagcccgaccgccgcctccgggacgagatttccacgctcaccgatcagatccagtgcctcgcgcaggagctcactcaggttaaggctgagaagcactcgacaagatcgtgctttgacgaggatggatactgctcttcccctcggacgccggggtttaacgaggagaccgctttctctctggagtgcagcattggggaagcagagacgccgaactatggtagcccagatgaaatgttcagcaaggatcttaatccttgtctgaccccatgcattgccaagagcaaatctgacgtatccgcacaattccagtcttcctcccagttcacaaaggaatctagcagttcttatcgcagcagcggcaaggcaagggcagaccgctcttacagttcttttggcaggccaatgtcaaagagctctgatcatcacaaacctgcctcaggaaccagcaacaagcgacgagtatacaaatccaaccaagacaaaatcaaccagaacctgttttgagctcaccatcatcgtgaacttgccaccgaaggcagcctccagcttctgctatgtgaaatatttagaagaatgtggacttttatggtctatggataccgcgtgagaaataacaatgctcatggtctatcagtgaatgcaatctttggtttgtgcttttttttgtgttgttctagcttgcccagctgtttggaataccagtttggctctgccatgccatgattagatgaatgtgcagaatcttttttattttcaaaactggttacgaagatatttgggtcacggcctatgtcttattagctgcatatggaccatatggcaatgtgatatatcatactatgcatgctatagcatgtggttttgtgaa

SEQ ID NO: 96056 - DNA, 3394 bp, Zea Mays
gagaatctctaaaaggcgccgctcccgtccacggcgcggcgggcagcagcgaagcgtcggtttcagaggccggcgggccggtcgagtcggtggagggagggtgggtagatagatagctagctactagcgggtagcggagagggtccagtcagtgggcgggaggagcgaggggccgggaccgggacgatggcgtcgcggaagtcgccggtggcggcggaggagcgggcggggacggggacgggggaggggaagggggagcggtgcgcggtggaggaggtggcgctggtggtgccggagacggacgacccgtcgatgcccgtgatgacattccgggcgtgggcgctggggctcggctcctgcgtcgtcctcatcttcctcaacaccttcttcacgtaccgcacccagccgctcaccatctcggggatcctggcgcagatcctcgtgctccccgccggccgcttcctggccgccgtgctgcccgaccgcgaggtcaggatcctcggcggcaggctcggcagcttcaacctcaacccggggcccttcaacgtcaaggagcacgtcatcatcaccatcttcgccaactgcggcgtctcctacggcggcggcgacgcttactccatcggcgccatcaccgtcatgaaggcctactacaagcagacgctcagcttcgcatgcgccctcctcatcgtcctcaccacacagatactggggtacggctgggctgggttgctgaggaggtacctggtcgaccctgccgagatgtggtggccttctaaccttgcccaggtctcactcttcagggcgctgcacgagaaagaagaggagggcggcaagtcccgtggcccgtcgcggatgcgcttcttcctcatcgtcttcttcgcgagcttcgcgtactacgcgctgccggggtacctgctgccgatcctgaccttcttctcgtgggcgtgctgggcgtggccgcacagcatcacggcgcagcaggtcgggtccgggtaccacggcctcggcgtcggcgcattcacgctcgactgggcgggcatctcggcgtaccacggcagcccgctggtggcgccgtgggcgtccatcgccaacacggccgtgggattcgtcatgttcatctacgtcatcgtgccgctctgctactggcagttcaacacgttcgacgcccgcaggttccccatcttctccaaccagctcttcacggcgtcgggccagaagtacgacaccaccaaggtgctcaccaaggacttcgacctcaacgtcgccgcctacgacagctacgggaagctctacctcagcccgctcttcgccatctccatcggctccggcttcctgcggttcacggccaccattgtccacgtcctgctcttccatggcagcgacatgtggaagcagagcaagtcggccatgaacgcggtgaagctggacgtgcacgccaagctgatgcagaggtacaggcaggtgccgcagtggtggttcctcatgctgctgctgggcagcgtggtggtgtccctgctcatgtccttcgtctggaaggaggagatgcagctgccgtggtgggggatgctcttcgccttcgcgctcgccttcgtcgtcaccctccccatcggcgtcatccaggccaccactaaccagcaaccggggtacgacatcatcgcgcagttcatgatcggctacgcgctgcccggcaagcccatcgccaacctgctcttcaagatctacggccggatcagcaccgtgcacgcgctatcgttcctcgcagacctcaagctcggccactacatgaagatccccccacggtgcatgtacacggcccagctggtcgggacggtggtcgccggcgtggtgaacctggcggtggcgtggtggatgctggacaacatcgagaacatctgcgacgtggaggcgctgcacccggacagcccgtggacgtgccccaagtaccgcgtcacgttcgacgcgtcggtgatctggggcctgatcggcccggggcggctcttcggccagcacgggctgtaccgcaacctggtgtggctgttcctggtcggcgcggtgctccccgtgccggtgtggctgctgagcagggcgttcccggagaagaagtggatcgcactcatcaacgtgcccgtcatctcgtacgggttcgccgggatgccgccggccacgcccaccaacatcgccacctggctggtgacgggcaccatcttcaactacttcgtcttcaggtaccgcaaggggtggtggcagaagtacaactacgtgctatcggcggcgctcgacgccggcaccgccttcatgggtgtgctcatcttcttcgccctccagaacgcgcaccacgagctcaagtggtggggcacggaggtggatcactgcccactcgcctcctgccccaccgcgccgggcatcgccgtcaagggctgcccggtgttctgaatcttccgacgtgagcgtagtaagcagtgtgtgtaacagtgtaaggaaatgtttgctacgggagccatggattcaaccaagcatcgattaaccgatgcagtgctttgtcactcgtgaatgtaacgccatagcgccagtggtggattcagatttcagagggagaaaaaaacacaggcccagtgtctttggaacgcccgaatttggagtcatctggaaccgacggctcaggtttactgcaaccaacaacttagcacttgcgatctagcgtgtgtaataaaagtctgcacaattcgaagctcggcgtgtcaagaacaagaagcatatgtgcggagaataccggagcggcgaaaactgcatggtttttatttagaacaagaagcatatgacgatacagtttttactccatgtcatagcttcaagaatccacaaaacacaaaggaatatacagactgatatttgataaaagcgagagtatgatcaagcgatctcatgtggtgaaagttggctaataaaagttgctctacgaatacctggttctggagtgccgtcgtccatcctcctcatcctcacagattgtacacttatcacctgaaagcagaaagtccttggctacttgcatgtcttctttgaactctggacgccgggcctctggatgctcaaagtggcagctcgaagatttcctcttcccttgctgcgatgtgtttcctgcagatccatgcaatgtggccgtcatctctgtatcgaacacgccacaggccaaatctctgtgctatgtccatccccgtcagaaccccttgccctttcaagaaatccacaagccattgcctggctgctgtcatatcctctcccatgtcgctcgtgctaccattccttgacttgccatacagtgctgccgcgcccagagcccccacggacatggcagatgcagttgtgccgtacaaggccgaggagtccagcaggc

SEQ ID NO: 96057 - DNA, 389 bp, Zea Mays
tgcagtgaatcacttcatttatcattatcatccatacaaactccacatgccaacaacaactggtaccgataaatacaaccgaatcacgaatgaagcaatgatgattgtctcggccaaggatccagcttttccctcctagtttttttccccctaggtgggaggaagctacccttttaatggctagtttgggaaactcatttttcccaatggattttcatttttccaagggaaattagtttcctcccttggaaaaatggagtaaccctaaaccttaaaacaaatgccgctatggccccattccagttcttcacatagctgttttggggttcagaaataaccgccggaaccggcagatcttacacacgctggccaacgatttctctggattg

SEQ ID NO: 96058 - DNA, 948 bp, Zea Mays
atgatattgataataaacgaatcacatgatggcgcaggcgtaggaggggtcctcctcgcagacgatccggtagccgccgccgcaggggttgcaggggtacggctggggcatgtactgcgggaagtactgcggcgggggtggggccggggcgggggccggggccggctcgggggccttgccgcaggagcagcagtggcacccgccgtggccgtggtggcagcagcagtcggacggccacgcagggtacgggtacgggtacggccacgggtaggggacctccaccaccttgggcggcggcggggcgggcttctcctccttgggcggtgccggggcgggcttctcctccttgggcgggggtggcttctccttgggcggctcctccttgggtggcgggggcttctccttgggtggctcctccttgggcggctccaccttcgccggcgggggcggggcggcctcctccttcttctccggcggcggcggggcttgctcctccttcttcggctcctccttgggcttgggcggcggcgggggcgggggctcgacgatctcgatctgcttgatgatcttgcacgccttgcagcacagcttgtcggcgagcttgtccgggtcgaagggccccgtgaccttcaccttgttgttcttctcgtcgaagtcgatgtcatcgatgcagaactcgcccttctctgcaagccgaggcgtccgtccgtcgtcccaggaaacttatcagttgcgatcaacgcgaaccgtctcgagacctacctgtacaagcggaaagggaagagcgaacaacagagaggagtagcaagcaagcgcgaacagaccttggatcctgttgagcaccctctggatcttggcgcggcagcggctgcattccaggtccaccgagacgatgatggtcggcatcgtctgtgtgattgcaactggctcgatcgtgctgtgaagtga

SEQ ID NO: 96059 - DNA, 4151 bp, Zea Mays
attttcgccgctccaattcgctcatccgtccgcgcgcccctcgccgaccggccggcgcggcgccggccgacgtcctctctccggggtagtcagtcgcgcactgcgcatcgctgttgttccttccggttcctttcgcgtccccccttcggagcagggcaacgtccaagagatattatcgctgccgctgccccgcgcgggccgctcgctgtcccactcgtgcgccacgcctcggactcggaggtgtattccctcttctccccccgtgcttatccgcgacggaatccaatcccttcgctcaagtccttctcctaagcaaagccccctcgcttttggcgtatgcccccgctggcgcgcccatgattcccgccgattcctccgcccgttcagtccagcaacccttgctgctgcagtgctgcggctagttcggtggcggggaaggaggaggaggcgagatcttggagtggggcgaagcggagatgtcgttgccgtcgaacaaccggaggacgtgctcccggagcagctctgcgcggtccaagcacagcgcgcgggtggtggcacagacgcccgtggacgcgcagctgcacgccgagttcgagggctcccagcgccacttcgactactcctcgtcggtgggcgccgccaaccgcccgtcggcaagcaccagcaccgtctccacctacctccagaacatgcagcggggccgctacatccagcccttcggctgcctgctcgccgtccacccggacaccttcgcgctgctcgcctacagcgagaacgcgcccgagatgctcgacctcacgccacacgccgtccccaccatcgaccagcgggatgcgctcggcatcggcgtcgatgtgcgcacgctcttccgctcgcagagctccgtcgcgcttcacaaggccgccgccttcggggaggtcaacctactcaaccccatcctcgtgcacgccaggacgtcggggaagcccttctacgccatattgcaccggatcgacgtcggccttgtcatcgaccttgagccggtcaatccagccgacgtgccagtcaccgccgcgggcgcgctcaagtcgtacaagctcgctgccaaggccatctccaggctgcagtcgctgcccagcgggaacctgtcgttgctgtgcgatgtgcttgtccgtgaggtgagcgaactcacgggctatgaccgggtcatggcctacaagttctatgaggatgagcatggcgaggtcatttccgaatgcaggaggtccgatctggagccgtatcttggactgcactacccagccaccgacatcccgcaggcgtccaggttcctgtttatgaagaacaaagtgcggatgatatgtgattgctgtgccactccagtgaaggtcattcaggatgatagcctagcacaacctctcagcctctgtggttccacactcagggcttcccatggttgccatgcacagtacatggcaaacatgggttctgttgcatcacttgcgatgtcagtcactataaacgaggatgaggaggaagatggggataccgggagtgaccaacaaccgaaaggcaggaagctgtgggggcttgtcgtctgccatcatacaagcccgaggttcgtccctttcccactaaggtatgcttgtgagtttctcttgcaagtatttggcatacagctcaacaaggaggtggaattggctgctcaggcaaaggagaggcacatcctcagaacgcaaacccttctttgtgatatgctcctgcgggatgctcctgttgggatatttactcggtcacctaatgtgatggatctagtaaagtgcgatggagctgcattgtattaccagaaccagcttttggtgcttggatcaacaccctctgagtcagagataaagagcattgcaacatggctgcaggataatcatgatggttcaactgggctgagtactgacagcttagtggaagcgggttatcctggtgctgttgcacttcgtgaagttgtgtgtggcatggcggccataaagatctcttccaaagattttatcttctggttccgatcgcacacaacaaaggagatcaagtggggtggggctaagcatgaaccggttgatgcagatgacgatggcaggaggatgcatccacgatcttcattcaaggccttcttggaggtggttaaatggagaagtgttccctgggaagatgttgaaatggatgctatccattctttgcagttaatattacgtggctccctgccagatgaagatgccaacagaaacaatgtaaggtccattgtaaaagctccatctgatgatatgaagaagatacaggggctacttgaactgagaacagttacaaatgagatggtccgcttaattgagacagcaactgcccctgtcttggctgtcgacattgccggtaacataaatggatggaacaataaagctgcagaactaacaggtttacctgtaatggaagccatagggaggcccctgatagatcttgttgttactgattctatagaagtggttaagcagattttggactcagctttacaaggaattgaagagcaaaatatggaaatcaagcttaaaacattccatgaacatgaatgcaatggtccagtaatcttgaaggttaactcctgctgtagtcgggacctttcagagaaagtcattggagtttgctttgtagcacaagatttgaccaggcagaagatgattatggataagtatactaggatacaaggagactatgttgccatagtaaagaaccccactgagctcatccctcccatatttatgatcaatgatcttggttcctgcttagagtggaataaagctatgcagaagattaccggtataaagagggaagatgcgataaacaaattgttaattggggaggtcttcacgcttcatgattatggctgtagggtgaaagatcatgcaactctaacgaaacttagcatactgatgaatgcagtgatttctggtcaggatcctgagaagctcttttttggtttcttcgacacagatgggaagtatattgaatccttgctgacagtgaacaagaggacagatgctgagggtaagatcactggtgctctttgctttctgcatgtggccagtccagagcttcagcatgctctccaggtgcagaaaatgtcggaacaagctgcgacaaacagctttaaggaattaacttacattcgtcaagaattaaggaacccactcaatggtatgcaatttacttgtaacttattgaagccttctgaattgacagaggaacagcggcaacttctttcatctaatgttctctgtcaggaccagctgaaaaagattttacatgacactgatcttgaaagcattgaacagtgctatatggagatgaacacagtagagttcaaccttgagcaagctctgaatacggttctgatgcaaggcattcctttgggcaaggaaaaacagatttcaattgaacgtaattggcctgtggaagtatcatgcatgtacctttatggggacaatttaaggcttcagcagatcctagcagactatctagcatgcgcccttcaattcacacaaactgctgaaggacctatcgtgctccaggtcatgtctaagaaggaaaacattggatctggcatgcagattgctcatttggagttcaggattgtccatccagctccaggcgttccagaggccctgatacaggagatgttccagcacaacccaggggtgtccagggagggcctcggcctgtacataagccagaagctggtgaaaacgatgagcggcacggtacagtaccttcgagaagccgacacctcgtcgttcatcatcctgatggagttcccggtcgcccagctcagcagcaagcggtccaagccttcgacgagtaaattctgaccctcatgctgctggaactgcagcgagtgttctgccgtgtcgaagtctcggttgtagctagccaagtggctgctactgaaacatcggttggtcggttctggtatctagcacggcctgtgtagtgcggatagatttggttgtttggctttggagagataagctagctggctaggtgtaacgtaacgtcgaccgataactgtatgtgaatgatgatgagctgtgaggacgaataaaggcttcacttgtgttctctattgctcttcttag

SEQ ID NO: 96060 - DNA, 1443 bp, Zea Mays
ttctcggcccacctcgagttgacaagctcacaaaaggccacgcggacacaggagaggggagagcccgagagcttcccttgccggcgagatccagtccggctcacgcgatctgactttcccggaggtccttgaatgtgatcgcatcattgcagcagatccaggttaagcagatggctgacaacagcattgagcaagcattgatagagaatcctcctaatgtgctgaaatggaagccatcagaaagagctaaacggtttcgacgatgcaggtcaactccctcagatcccaccgatcaaaaacctgcagaaaacggatctgtgcttaaagccaaagagttattcaaggagaaaaggccgagcttcatgcttgtaggcctcctccttttcgcctacctactagtgggtgtcatcatcttttacctattcatggatcaattatctgggaagacaactaatagagtgcttgacgccttgtacttcgttattgtcacaatgacctcggttggctatggggatcttttcccaaacagtgacacaacaaagctgcttgcttgcgcttttgtattcacaggaatggcgatcattgctctcttcatcagtaaagcggcagattaccttgttgagaaacaggaggtgttgttcttcaaagcactgcacatgaatatgaagggcagcgaggccaaaatgctaggagcaatggaaacaaataggataaagtacaaattctacactgtcgctctgcttcttgcaatggttattgttgctgggactgtatttctgtggaaggttgagaagctcagccttgttgattccttctactgtgtctgtgccacgatcactaccctgggttatggggataaaagcttctcgtccaaactggggcgtgtttttgcagtgttttggataaccacaagtactctcatcatggctcagttcttcatgtaccttgctgagctctacactgagcgccggcagaaaatcctgaccaaatgggtgatcaacaggaggataaccaccatggatcttgaggcagctgatatagatgacgaccgacaagttggtgctgctgaatttgtactttacaagctaaaagagctcggcaagatcagccaagaggagatatcttgttttctcgaggagtttgacaagcttgatgttgaccagtctggcacactctcaacttacgaccttactctaggacaaacaattcaatgactgatgatgcatatgtgattttgctgactgaatgattttgtttgatgtcgttagcatttctgttgtccatatgtaacgctgtaatgttgtaaagatgtaaattgagatgattgagaaattgtgccccgccttttctccaaagcaacttgaatcaaggctgtaaagaacaaatacttgctggagacagacgacatacctgcaaatttatgattggcttagctctgcccct

SEQ ID NO: 96061 - DNA, 1989 bp, Zea Mays
attctcggcccacctcgagttgacaagctcacaaaaggccacgcggacacaggagaggggagagcccgagagcttcccttgccggcgagatccagtccggctcacgcgatctgactttcccggaggtaaagaagctcgggatttgccgtagtctcttgatgccaaatcaaatctcgtttgcaagtagtacaagtgctgcttcggtctatgcatgtccatatctatgattatagcgagaactagttttttccttttctggattggacagggaattagctggtctggagtgaatactgaaccgaaatgcctctgctcccgtctgttctttaatcttacgttcttcaacagttgaaatccatcccaccccaatgtttccatgttcattccagaagcaattcttgcttgattcgtggacttctttcctaagctacagcttctttccaagtagagtaccagaaccagatacccgatctcaagggatgaagatagtgactgggccatgggaattagaccgagaaagaaagggccaggttgagatatcgggggcaggttgcccttccggtgcctgaagggcaaacaaaatgtcataccaagtcaggctgctgcgcttttcctatgaattggccttctcgcaatcccttctgttttgcctcgcctcaatctgttgatggtccttgaatgtgatcgcatcattgcagcagatccaggttaagcagatggctgacaacagcattgagcaagcattgatagagaatcctcctaatgtgctgaaatggaagccatcagaaagagctaaacggtttcgacgatgcaggtcaactccctcagatcccaccgatcaaaaacctgcagaaaacggatctgtgcttaaagccaaagagttattcaaggagaaaaggccgagcttcatgcttgtaggcctcctccttttcgcctacctactagtgggtgtcatcatcttttacctattcatggatcaattatctgggaagacaactaatagagtgcttgacgccttgtacttcgttattgtcacaatgacctcggttggctatggggatcttttcccaaacagtgacacaacaaagctgcttgcttgcgcttttgtattcacaggaatggcgatcattgctctcttcatcagtaaagcggcagattaccttgttgagaaacaggaggtgttgttcttcaaagcactgcacatgaatatgaagggcagcgaggccaaaatgctaggagcaatggaaacaaataggataaagtacaaattctacactgtcgctctgcttcttgcaatggttattgttgctgggactgtatttctgtggaaggttgagaagctcagccttgttgattccttctactgtgtctgtgccacgatcactaccctgggttatggggataaaagcttctcgtccaaactggggcgtgtttttgcagtgttttggataaccacaagtactctcatcatggctcagttcttcatgtaccttgctgagctctacactgagcgccggcagaaaatcctgaccaaatgggtgatcaacaggaggataaccaccatggatcttgaggcagctgatatagatgacgaccgacaagttggtgctgctgaatttgtactttacaagctaaaagagctcggcaagatcagccaagaggagatatcttgttttctcgaggagtttgacaagcttgatgttgaccagtctggcacactctcaacttacgaccttactctaggacaaacaattcaatgactgatgatgcatatgtgattttgctgactgaatgattttgtttgatgtcgttagcatttctgttgtccatatgtaacgctgtaatgttgtaaagatgtaaattgagatgattgagaaattgtgccccgccttttctccaaagcaacttgaatcaaggctgtaaagaacaaatacttgctggagacagacgacatacctgcaaatttatgattggcttagctctgcccct

SEQ ID NO: 96062 - DNA, 1416 bp, Zea Mays
attctcggcccacctcgagttgacaagctcacaaaaggccacgcggacacaggagaggggagagcccgagagcttcccttgccggcgagatccagtccggctcacgcgatctgactttcccggagcagatccaggttaagcagatggctgacaacagcattgagcaagcattgatagagaatcctcctaatgtgctgaaatggaagccatcagaaagagctaaacggtttcgacgatgcaggtcaactccctcagatcccaccgatcaaaaacctgcagaaaacggatctgtgcttaaagccaaagagttattcaaggagaaaaggccgagcttcatgcttgtaggcctcctccttttcgcctacctactagtgggtgtcatcatcttttacctattcatggatcaattatctgggaagacaactaatagagtgcttgacgccttgtacttcgttattgtcacaatgacctcggttggctatggggatcttttcccaaacagtgacacaacaaagctgcttgcttgcgcttttgtattcacaggaatggcgatcattgctctcttcatcagtaaagcggcagattaccttgttgagaaacaggaggtgttgttcttcaaagcactgcacatgaatatgaagggcagcgaggccaaaatgctaggagcaatggaaacaaataggataaagtacaaattctacactgtcgctctgcttcttgcaatggttattgttgctgggactgtatttctgtggaaggttgagaagctcagccttgttgattccttctactgtgtctgtgccacgatcactaccctgggttatggggataaaagcttctcgtccaaactggggcgtgtttttgcagtgttttggataaccacaagtactctcatcatggctcagttcttcatgtaccttgctgagctctacactgagcgccggcagaaaatcctgaccaaatgggtgatcaacaggaggataaccaccatggatcttgaggcagctgatatagatgacgaccgacaagttggtgctgctgaatttgtactttacaagctaaaagagctcggcaagatcagccaagaggagatatcttgttttctcgaggagtttgacaagcttgatgttgaccagtctggcacactctcaacttacgaccttactctaggacaaacaattcaatgactgatgatgcatatgtgattttgctgactgaatgattttgtttgatgtcgttagcatttctgttgtccatatgtaacgctgtaatgttgtaaagatgtaaattgagatgattgagaaattgtgccccgccttttctccaaagcaacttgaatcaaggctgtaaagaacaaatacttgctggagacagacgacatacctgcaaatttatgattggcttagctctgcccct

SEQ ID NO: 96063 - DNA, 2156 bp, Zea Mays
ggcacgcgtaccgcacgtcggcgtctatattctcggcccacctcgagttgacaagctcacaaaaggccacgcggacacaggagaggggagagcccgagagcttcccttgccggcgagatccagtccggctcacgcgatctgactttcccggaggtaaagaagctcgggatttgccgtagtctcttgatgccaaatcaaatctcgtttgcaagtagtacaagtgctgcttcggtctatgcatgtccatatctatgattatagcgagaactagttttttccttttctggattggacagggaattagctggtctggagtgaatactgaaccgaaatgcctctgctcccgtctgttctttaatcttacgttcttcaacagttgaaatccatcccaccccaatgtttccatgttcattccagaagcaattcttgcttgattcgtggacttctttcctaagctacagcttctttccaagtagagtaccagaaccagatacccgatctcaagggatgaagatagtgactgggccatgggaattagaccgagaaagaaagggccaggttgagatatcgggggcaggttgcccttccggtgcctgaagggcaaacaaaatgtcataccaagtcaggctgctgcgcttttcctatgaattggccttctcgcaatcccttctgttttgcctcgcctcaatctgttgatggtaggtggacaacgctataatagttcatcatgcttcattgctgctgttcaatttgggttcatggtatctcaatttcaattaggcttggtcatctgtacaacctgtttatatgtatgaggggaaaacctgtttatatgtagaatatgtcttgctgatgatctggatatcctcatatatatattctacctgtcattttatatgtcagtacacattcagttctctgaaatttcaggtccttgaatgtgatcgcatcattgcagcagatccaggttaagcagatggctgacaacagcattgagcaagcattgatagagaatcctcctaatgtgctgaaatggaagccatcagaaagagctaaacggtttcgacgatgcaggtcaactccctcagatcccaccgatcaaaaacctgcagaaaacggatctgtgcttaaagccaaagagttattcaaggagaaaaggccgagcttcatgcttgtaggcctcctccttttcgcctacctactagtgggtgtcatcatcttttacctattcatggatcaattatctgggaagacaactaatagagtgcttgacgccttgtacttcgttattgtcacaatgacctcggttggctatggggatcttttcccaaacagtgacacaacaaagctgcttgcttgcgcttttgtattcacaggaatggcgatcattgctctcttcatcagtaaagcggcagattaccttgttgagaaacaggaggtgttgttcttcaaagcactgcacatgaatatgaagggcagcgaggccaaaatgctaggagcaatggaaacaaataggataaagtacaaattctacactgtcgctctgcttcttgcaatggttattgttgctgggactgtatttctgtggaaggttgagaagctcagccttgttgattccttctactgtgtctgtgccacgatcactaccctgggttatggggataaaagcttctcgtccaaactggggcgtgtttttgcagtgttttggataaccacaagtactctcatcatggctcagttcttcatgtaccttgctgagctctacactgagcgccggcagaaaatcctgaccaaatgggtgatcaacaggaggataaccaccatggatcttgaggcagctgatatagatgacgaccgacaagttggtgctgctgaatttgtactttacaagctaaaagagctcggcaagatcagccaagaggagatatcttgttttctcgaggagtttgacaagcttgatgttgaccagtctggcacactctcaacttacgaccttactctaggacaaacaattcaatgactgatgatgcatatgtgattttgctgactgaatgattttgtttgatgtcgttagcatttctgttgtccatatgtaacgctgtaatgttgtaaagatgtaaattgagatgattgagaaattgtgccccgccttttct

SEQ ID NO: 96064 - DNA, 498 bp, Zea Mays
atgaagagcgataactttttgtttggcaaagtgttctgggcccagaatcggatggctctgtcgaatgaacaaatcgaagccatgaggcacagggaaaacagaggcacgatcattaattatatatacgagaaatatggaatgcatataacagtaacagaattaaaaatgacacccttatgcatatttgtccagcttgttgagcgatgtcgccttctgctccagtcggacgacctcggcatgttccccgaggagaggcaagcctgggtacatgctctgggtggaggaatggatggtcgtgcagaagcggtgctggatctaccacctcgcctcgctgccaccgttactgctcgtcttggcggaccacatccgggtggtggaccactggtggaaccagcatgggctcggcggcgacaacgtcgagggccgctgtcgggtctccaagtcacggtcattagcagtgatgaaggggacgaaggcagtctatatattttcagataa

SEQ ID NO: 96065 - DNA, 584 bp, Zea Mays
gcgccgactagcaaggagccaagcagggcataatactgaagcaggctgcggctgcagtaacaagtcaaggaggttgaaggcgaactagagagaagaggaagatgttggcggcgagggatccgatgctgtggcacaaggggttgccgctttggggctcggcacctacggcgcgcacatgttccgccccaagaaccccgcgtacaaagaggtttggcacacggcgtccatgtaccatctcgtccacaccgcggcgctgctcgaggcgcccatcaccaagcgtcccaacgttttcggagggctcctcactgctggaatcgtgctcttctctggaacgtgctacaccgtggcttatcttgaaggtaggaagttttcttcaccggcaccattggggggctttgcgtttattgctgcttgggccagcctcctcttctgattaaattgtgcttttccaagaaaacaaaaaaaatcacaaacctctctatctggtgttttatcaggttgtgaaaaatatacttgtaaagtgtatacagtggacagtatgcgcctctagttaataattcaatctgtgattcctgtgtttctat

SEQ ID NO: 96066 - DNA, 594 bp, Zea Mays
cgccagccgccaatgccccaatcccgtaatcgcagcctcgccccgctcgcatcttcctctccctctcagcgctggtgctcaatctacaggtcgtcccgctccctacacacccgccctccggtgtgaacctccatgacgtccacaaccactctccgatctgctgtcgtgacctcatccagccgtgctgtggcagtggatcggagttcgctccagctctgattggaattccactactatatgtgccacttgaagttgttatgttcaaataatatggtgaaaacgagcgtctattgggatctattttttatcttgcaaatgatcttcctgaaggaggtaatatattcttagatgaggtatatatcgtaatacttatagcataaacactcaagccactacaaactgccttcgtccccttcatcactgctgatgaccgtgacttggagacccgacagcgaccctcgacgttgtcgccgccgagcccatgctggttccaccagtggtccaccgcccggatgtggcccgccaagacgagcaggaacggtggcagcgaggcgaggtggtagatccagcaccgcctctgcacgaccatccatt

SEQ ID NO: 96067 - DNA, 1357 bp, Zea Mays
caccgctttaaatccgcctcctcccagcgtctccctcctcccggcctgtcccctcacctccctccccctatctctccaccgccgcagctagctgcgacgtcatgcactcgccggcgccaccgccaccgcatactatctacaattagccagccgtaggcttacctatcctgtgtcaagcaagcctctcgcaagcaacaaggaaggaagctagctagttttatagctgctgtcggcggcggcggctgaagcgacgtgcctgagctaggatttaggttgagatcaggagagggagaaggcggcggcgatggggcgcgggaaggtgcagctgaagcggatcgagaacaagatcaaccgccaggtgacattctccaagcgccgctcggggctactcaagaaggcgcacgagatctccgtgctctgcgacgccgaggtcgcgctcatcatcttctccaccaagggcaagctctacgagtactctaccgattcatgatacatggaatcgtcaactgccacaagcaactatgctagcttgtctttactctttgctgatgactgacgatgctgagtctgaaccctgtatggacaaaattcttgaacggtatgagcgctactcctatgcagaaaaggttctcatttccgcagaatatgaaactcagggcaattggtgccatgaatatagaaaactaaaggcgaaggtcgagacaatacagaaatgtcaaaagcacctcatgggagaggatcttgaaactttgaatctcaaagagcttcagcaactagagcagcagctggagagttcactgaaacatatcagaacaaggaagagccagcttatggtcgagtcaatttcagcgctccaacggaaggaggagaacaaggttctgcagaaggagctcgcggagaagcagaaagaccagcggcagcaagtgcaacgggaccaaactcaacagcagaccagttcgtcttccacgtccttcatgttaagggaagctgccccaacaacaaatgtcagcatcttccctgtggcagcaggcgggagggtggtggaaggggcagcagcgcagccgcaggctcgcgttggactgccaccatggatgcttagccatctgagctgctgaaggtttgccctcaccgtcgcgatgtgatagcccaaaatccagcaagtcttccccggaccccggactgtccccgcttctccgcctggtgcagtatcgtcgtgatcgcgagaagcagcagcagcggtttgccgtattttttaccactgtgtataagtagcatatctgcaatgtgtatattttgttcaccgttcctgctggggcggccgcacggtactttacgcatgtaatatatgtgcttcatc

SEQ ID NO: 96068 - DNA, 1306 bp, Zea Mays
caccgctttaaatccgcctcctcccagcgtctccctcctcccggcctgtcccctcacctccctccccctatctctccaccgccgcagctagctgcgacgtcatgcactcgccggcgccaccgccaccgcatactatctacaattagccagccgtaggcttacctatcctgtgtcaagcaagcctctcgcaagcaacaaggaaggaagctagctagttttatagctgctgtcggcggcggcggctgaagcgacgtgcctgagctaggatttaggttgagatcaggagagggagaaggcggcggcgatggggcgcgggaaggtgcagctgaagcggatcgagaacaagatcaaccgccaggtgacattctccaagcgccgctcggggctactcaagaaggcgcacgagatctccgtgctctgcgacgccgaggtcgcgctcatcatcttctccaccaagggcaagctctacgagtactctaccgattcatgtatggacaaaattcttgaacggtatgagcgctactcctatgcagaaaaggttctcatttccgcagaatatgaaactcagggcaattggtgccatgaatatagaaaactaaaggcgaaggtcgagacaatacagaaatgtcaaaagcacctcatgggagaggatcttgaaactttgaatctcaaagagcttcagcaactagagcagcagctggagagttcactgaaacatatcagaacaaggaagagccagcttatggtcgagtcaatttcagcgctccaacggaaggagaagtcactgcaggaggagaacaaggttctgcagaaggagaaagcgttactcctgcatgcagctcgcggagaagcagaaagaccagcggcagcaagtgcaacgggaccaaactcaacagcagaccagttcgtcttccacgtccttcatgttaagggaagctgccccaacaacaaatgtcagcatcttccctgtggcagcaggcgggagggtggtggaaggggcagcagcgcagccgcaggctcgcgttggactgccaccatggatgcttagccatctgagctgctgaaggtttgccctcaccgtcgcgatgtgatagcccaaaatccagcaagtcttccccggaccccggactgtccccgcttctccgcctggtgcagtatcgtcgtgatcgcgagaagcagcagcagcggtttgccgtattttttaccactgtgtataagtagcatatctgcaatgtgtatattttgttcaccgttcctgctggggcggccgcacggtactttacgcatgtaatatatgtgcttcatc

SEQ ID NO: 96069 - DNA, 1288 bp, Zea Mays
caccgctttaaatccgcctcctcccagcgtctccctcctcccggcctgtcccctcacctccctccccctatctctccaccgccgcagctagctgcgacgtcatgcactcgccggcgccaccgccaccgcatactatctacaattagccagccgtaggcttacctatcctgtgtcaagcaagcctctcgcaagcaacaaggaaggaagctagctagttttatagctgctgtcggcggcggcggctgaagcgacgtgcctgagctaggatttaggttgagatcaggagagggagaaggcggcggcgatggggcgcgggaaggtgcagctgaagcggatcgagaacaagatcaaccgccaggtgacattctccaagcgccgctcggggctactcaagaaggcgcacgagatctccgtgctctgcgacgccgaggtcgcgctcatcatcttctccaccaagggcaagctctacgagtactctaccgattcatgtatggacaaaattcttgaacggtatgagcgctactcctatgcagaaaaggttctcatttccgcagaatatgaaactcagggcaattggtgccatgaatatagaaaactaaaggcgaaggtcgagacaatacagaaatgtcaaaagcacctcatgggagaggatcttgaaactttgaatctcaaagagcttcagcaactagagcagcagctggagagttcactgaaacatatcagaacaaggaagagccagcttatggtcgagtcaatttcagcgctccaacggaaggagaagtcactgcaggaggagaacaaggttctgcagaaggaggcagctcgcggagaagcagaaagaccagcggcagcaagtgcaacgggaccaaactcaacagcagaccagttcgtcttccacgtccttcatgttaagggaagctgccccaacaacaaatgtcagcatcttccctgtggcagcaggcgggagggtggtggaaggggcagcagcgcagccgcaggctcgcgttggactgccaccatggatgcttagccatctgagctgctgaaggtttgccctcaccgtcgcgatgtgatagcccaaaatccagcaagtcttccccggaccccggactgtccccgcttctccgcctggtgcagtatcgtcgtgatcgcgagaagcagcagcagcggtttgccgtattttttaccactgtgtataagtagcatatctgcaatgtgtatattttgttcaccgttcctgctggggcggccgcacggtactttacgcatgtaatatatgtgcttcatc

SEQ ID NO: 96070 - DNA, 1284 bp, Zea Mays
caccgctttaaatccgcctcctcccagcgtctccctcctcccggcctgtcccctcacctccctccccctatctctccaccgccgcagctagctgcgacgtcatgcactcgccggcgccaccgccaccgcatactatctacaattagccagccgtaggcttacctatcctgtgtcaagcaagcctctcgcaagcaacaaggaaggaagctagctagttttatagctgctgtcggcggcggcggctgaagcgacgtgcctgagctaggatttaggttgagatcaggagagggagaaggcggcggcgatggggcgcgggaaggtgcagctgaagcggatcgagaacaagatcaaccgccaggtgacattctccaagcgccgctcggggctactcaagaaggcgcacgagatctccgtgctctgcgacgccgaggtcgcgctcatcatcttctccaccaagggcaagctctacgagtactctaccgattcatgtatggacaaaattcttgaacggtatgagcgctactcctatgcagaaaaggttctcatttccgcagaatatgaaactcagggcaattggtgccatgaatatagaaaactaaaggcgaaggtcgagacaatacagaaatgtcaaaagcacctcatgggagaggatcttgaaactttgaatctcaaagagcttcagcaactagagcagcagctggagagttcactgaaacatatcagaacaaggaagagccagcttatggtcgagtcaatttcagcgctccaacggaaggagaagtcactgcaggaggagaacaaggttctgcagaaggagctcgcggagaagcagaaagaccagcggcagcaagtgcaacgggaccaaactcaacagcagaccagttcgtcttccacgtccttcatgttaagggaagctgccccaacaacaaatgtcagcatcttccctgtggcagcaggcgggagggtggtggaaggggcagcagcgcagccgcaggctcgcgttggactgccaccatggatgcttagccatctgagctgctgaaggtttgccctcaccgtcgcgatgtgatagcccaaaatccagcaagtcttccccggaccccggactgtccccgcttctccgcctggtgcagtatcgtcgtgatcgcgagaagcagcagcagcggtttgccgtattttttaccactgtgtataagtagcatatctgcaatgtgtatattttgttcaccgttcctgctggggcggccgcacggtactttacgcatgtaatatatgtgcttcatc

SEQ ID NO: 96071 - DNA, 1542 bp, Zea Mays
caccgctttaaatccgcctcctcccagcgtctccctcctcccggcctgtcccctcacctccctccccctatctctccaccgccgcagctagctgcgacgtcatgcactcgccggcgccaccgccaccgcatactatctacaattagccagccgtaggcttacctatcctgtgtcaagcaagcctctcgcaagcaacaaggaaggaagctagctagttttatagctgctgtcggcggcggcggctgaagcgacgtgcctgagctaggatttaggttgagatcaggagagggagaaggcggcggcgatggggcgcgggaaggtgcagctgaagcggatcgagaacaagatcaaccgccaggtgacattctccaagcgccgctcggggctactcaagaaggcgcacgagatctccgtgctctgcgacgccgaggtcgcgctcatcatcttctccaccaagggcaagctctacgagtactctaccgattcatgactagtatatatgtggggaacttccacataccagaactgattgaaagagctagatacaatataatgcagtcagaaagtatggacaaaattcttgaacggtatgagcgctactcctatgcagaaaaggttctcatttccgcagaatatgaaactcagggcaattggtgccatgaatatagaaaactaaaggcgaaggtcgagacaatacagaaatgtcaaaagcacctcatgggagaggatcttgaaactttgaatctcaaagagcttcagcaactagagcagcagctggagagttcactgaaacatatcagaacaaggaagagccagcttatggtcgagtcaatttcagcgctccaacggaaggtaaattgttgagcttgctaaagttggctgttcgaacttcctcttttaagaattgtatgatttctttagctggccattagatgggcatggtttattgcaagtgttaactactttggttgccttgttacatccacaaaatatctctgctcttgcgctgtgctgcgatgcattgttaccgcaggagaagtcactgcaggaggagaacaaggttctgcagaaggagctcgcggagaagcagaaagaccagcggcagcaagtgcaacgggaccaaactcaacagcagaccagttcgtcttccacgtccttcatgttaagggaagctgccccaacaacaaatgtcagcatcttccctgtggcagcaggcgggagggtggtggaaggggcagcagcgcagccgcaggctcgcgttggactgccaccatggatgcttagccatctgagctgctgaaggtttgccctcaccgtcgcgatgtgatagcccaaaatccagcaagtcttccccggaccccggactgtccccgcttctccgcctggtgcagtatcgtcgtgatcgcgagaagcagcagcagcggtttgccgtattttttaccactgtgtataagtagcatatctgcaatgtgtatattttgttcaccgttcctgctggggcggccgcacggtactttacgcatgtaatatatgtgcttcatc

SEQ ID NO: 96072 - DNA, 900 bp, Zea Mays
aaatatagtagatgagacatgttaaataacatgaatgttttgaatatcacatttagatagtttagctgcagaccgtatggagacttttgggattttctccatccagtgtctaatatctgaaagtgcagaataactatcaagaatatgtgaagctgaaggcacgagttgaggttttacagcactcacaaaggaatcttcttggtgaagatctggccctacttagcccaagtgaacttgaccagcttgagaatcaagtagacaagaccttgaagcaaataagatcaagaaagactcaagtgttacttgatgaactttgtgacttaaagagaaaggaacaaatgctgcaagatgcaaacagggttctgaaaaggaagctgggcgagtttgaggcagaggcggcttctcccccgcagttagcgtggcaaggcgaaggcggcatgttgtcccatgaccctccacagccagaacacttcttccaggctctggagagcaacccatgtctgcaacctacataccatacgatggacatgaaccagcagccagtgccagcgccgggcggctgctatcctgcatggatgtcttagccagtgcttcattccattgccttgagaagtgtcctgaccttcacagatccctacgagctttattactgcttttgcctgcccctttgctgcttgcggtgcttactgaactgtccaaatgaccacatggtcatatataggttattgctgtctttatcttatgttgatcacggcctgctcagctgctttagcgccatgcaaaatggcttgggcgatgcacgcttgaatgggtcgaactgcttatgttttgggagtataaatcacttagcaataagcattggcatgtcctctgtctcaaatacaagtacactttactgtt

SEQ ID NO: 96073 - DNA, 1559 bp, Zea Mays
tgtcgacctaacctatcgtcagtgccctgcggccggtggaaacgaaacctaggaggagcctagtggccacctagggtgaggaaaactgaggacgcgaggcgagagcgagatccaatctgcacccccccaccaaagaaagattcttccccgccggcctcgctctctcaacatccgtctcgctccttccaccctcgctgcgcctcaggcagcgagcgagcatatagcagcccaccacccacatgccgcagggccctcacccgtcgagccaattgagtggcagccagaaaaacccagagcgcgagcagcgagcgagcgcgggctcctgtgtgcagtgtgtctgcgctagagggcgaagggcacggaccgccttcgtcaataattgcggtacgaacggggcaaatccgtcgtttaaagaggtcgctgatagcgcctgctggtggcgagagagagaaagcagcagaatcgctgagggatcgtcgatccggagaggcaaaaaagccgagagatcaggcagggcaccatggggcgcgggaaggtggtgctgcagcggatcgagaacaagatcagccggcaggtgaccttcgccaagcgccggaacggcctgctcaagaaggcgtacgagctctccatcctctgcgacgccgaggtcgcgctcgtcctcttctcccacgccggccgcctctaccagttctcatcctcctccaatctgcttaagactctagagcggtaccagaggtacatctatgcttcagccgatgctgcagtgccatctagcgatcagatgcagaataactatcaagaatatgtgaagctgaaggcacgagttgaggttttacagcactcacaaaggaatcttcttggtgaagatctggccctacttagcccaagtgaacttgaccagcttgagaatcaagtagacaagaccttgaagcaaataagatcaagaaagactcaagtgttacttgatgaactttgtgacttaaagagaaaggaacaaatgctgcaagatgcaaacagggttctgaaaaggaagctgggcgagtttgaggcagaggcggcttctcccccgcagttagcgtggcaaggcgaaggcggcatgttgtcccatgaccctccacagccagaacacttcttccaggctctggagagcaacccatgtctgcaacctacataccatacgatggacatgaaccagcagccagtgccagcgccgggcggctgctatcctgcatggatgtcttagccagtgcttcattccattgccttgagaagtgtcctgaccttcacagatccctacgagctttattactgcttttgcctgcccctttgctgcttgcggtgcttactgaactgtccaaatgaccacatggtcatatataggttattgctgtctttatcttatgttgatcacggcctgctcagctgctttagcgccatgcaaaatggcttgggcgatgcacgcttgaatgggtcgaactgcttatgttttgggagtataaatcacttagcaataagcattggcatgtcctctgtctcaaatacaagtacactttactgtt

SEQ ID NO: 96074 - DNA, 104 bp, Zea Mays
ggttccaagagtataaatccatcaattgattgtcatatcgataaaatagtgtcattaatcaggcaaatgtttgcctaagtgtgtctaagaatcgaacatcatag

SEQ ID NO: 96075 - DNA, 2080 bp, Zea Mays
gctgcggaagagtgtctcgtgctgctgcttccgctgcagtaaaatacggggaagaggaggggagggagacgcggccgctgcctgccgcacatgctttaagtcccactccccacctccccagatctccgccctcctccccaccgcccccattcctcccctcggccgcaaccgtagccgccgcactacggagcaagatcgtcgggtagacggacgggcgggcgggcgggcgcggctctgtatctatctgtcggtgggagaccgcgtgtgtcggttaggcggcgggtggcaaggaagaatggcggcgagcggcagatccgtcgcgtgctgtgccgccgcgctgctcgcggccgcgttgctcctctccgcaccgactgcaacagaggcttatgattcgctggatccaaatggcaacatcaccataaaatgggatatcatgcagtggactcctgatggatatgtcgctgttgtcacaatgtttaattatcaacaatttcggcatatcggcgcacctggttggcagcttgggtggacatgggcaaagaaggaggttatatggtcaatggttggggctcagaccactgaacagggcgactgctcaaagttcaagagcagcccaccccattgctgcaagaaagatccaacaattgtcgatttacttccaggcactccatacaacatgcaaattgccaattgctgcaaggcaggagttgtaaatacctttaaccaggacccagcaaatgctgcttcctccttccagatcagtgttggtcttgctggaactaccaataaaactgttaaggtgcccaggaacttcactcttaagactccaggccctgggtacacatgtgggcgtgccattgttggcaggcctacgaagtttttcaccgcggacgggcgcagggcaacccaagctctaatgacatggaatgtgacctgcacatattcccaatttcttgctcagaagactccatcctgctgtgtatctctatcatcgttttataatgacacaattgtgaactgcccaacatgctcatgtggctgccagaacccaagtgggtcaaactgtgtgaatgaggattcacctaatctacaagctgcaattgatggccctggcaaatggactggtcagccccttgtacaatgcacttcccacatgtgcccgataagaatccactggcatgtgaagctcaactacaaggattactggagagtgaaaatcactatcacaaacttcaacttccgcatgaattacacgcagtggaacttagtagcccagcatccaaactttgataatatcactcagttgttcagcttcaactacaaaccacttactccatatggtggtggcataaatgatacggcaatgttctggggtgtaaaattctacaatgatctgctgatgcaagccggcaaacttgggaatgtgcaatcagagctgcttctccgcaaggactcccggactttcactttcgaaaagggatgggccttcccacgccgagtttacttcaatggtgataattgtgtcatgccatctcctgaaaattatccatggctgccgaatgcaagccctctaacaaaaccattggcactcccattcttggtattctgggttgccttggctgctctgttggcttatgcatgattagtgggatcaagaggtttagcaagtttcaagttgatgtcagattccatgaggtgcactgcaacaagtcatttgttcattcaattccatggttgcacagaaaagatgaggcgatgccaagaaaaagtcgatatgtctatgtgtttaagttaaagggccaaaatgtatttcttgtttggtatataacagccctacaacactttggtgaacttagttactgcagattaggtaattacagttgcaccttttgtattttatagcaaacccagaatttttcattggattctacgactgcccctcttgtagtaaatgcaaggcttccctgatactcctgtttaaagatttgtggattgggtgagacaatggtgattgagataactaagttctggggtcttgatccattttgctgtaaagattattgatctaaattgctaataa

SEQ ID NO: 96076 - DNA, 1489 bp, Zea Mays
gctgcggaagagtgtctcgtgctgctgcttccgctgcagtaaaatacggggaagaggaggggagggagacgcggccgctgcctgccgcacatgctttaagtcccactccccacctccccagatctccgccctcctccccaccgcccccattcctcccctcggccgcaaccgtagccgccgcactacggagcaagatcgtcgggtagacggacgggcgggcgggcgggcgcggctctgtatctatctgtcggtgggagaccgcgtgtgtcggttaggcggcgggtggcaaggaagaatggcggcgagcggcagatccgtcgcgtgctgtgccgccgcgctgctcgcggccgcgttgctcctctccgcaccgactgcaacagaggcttatgattcgctggatccaaatggcaacatcaccataaaatgggatatcatgcagtggactcctgatggatatgtcgctgttgtcacaatgtttaattatcaacaatttcggcatatcggcgcacctggttggcagcttgggtggacatgggcaaagaaggaggttatatggtcaatggttggggctcagaccactgaacagggcgactgctcaaagttcaagagcagcccaccccattgctgcaagaaagatccaacaattgtcgatttacttccaggcactccatacaacatgcaaattgccaattgctgcaaggcaggagttgtaaatacctttaaccaggacccagcaaatgctgcttcctccttccagatcagtgttggtcttgctggaactaccaataaaactgttaaggtgcccaggaacttcactcttaagactccaggccctgggtacacatgtgggcgtgccattgttggcaggcctacgaagtttttcaccgcggacgggcgcagggcaacccaagctctaatgacatggaatgtgacctgcacatattcccaatttcttgctcagaagactccatcctgctgtgtatctctattatccatggctgccgaatgcaagccctctaacaaaaccattggcactcccattcttggtattctgggttgccttggctgctctgttggcttatgcatgattagtgggatcaagaggtttagcaagtttcaagttgatgtcagattccatgaggtgcactgcaacaagtcatttgttcattcaattccatggttgcacagaaaagatgaggcgatgccaagaaaaagtcgatatgtctatgtgtttaagttaaagggccaaaatgtatttcttgtttggtatataacagccctacaacactttggtgaacttagttactgcagattaggtaattacagttgcaccttttgtattttatagcaaacccagaatttttcattggattctacgactgcccctcttgtagtaaatgcaaggcttccctgatactcctgtttaaagatttgtggattgggtgagacaatggtgattgagataactaagttctggggtcttgatcca

SEQ ID NO: 96077 - DNA, 519 bp, Zea Mays
atgggggcgggtacctataatcctgacctccagcttttccttcccccaatttctattttctgctacaagatttgggccctcatcggtggtctgggggttgcccaggtgacctgccagccaccgcttgccatgagctatggctggcatggggtagacgaaacgaggggaggaataacgctgtcgtggtcctggatcctctgcgtgccgcctttgctgcgtgccgactgcgatgatgcggccgccatggcgcgtccgcgcctccgtctccgcctgctattccgcggacagcccatgagcaccgcttccagctttttagttggtggtcggggacgtttgtggcatcactggggagctcccatggccgcgtcgagggaaatctgctatctgggcaaatccaattgctcgccgaaattgagtttttgtgccgggactgccatatgccgtggccgagccttcagtcgcctccaccgctggtatgatcgggtcccagctatttgcctcttcctccacatcgcgtag

SEQ ID NO: 96078 - DNA, 342 bp, Zea Mays
caagtaaattaatactaataaacatttaatagaagataatctcaagttcccacataaaaatggtaaagtaaagtattgattatgttgaaacttggatacttagagtgatttcacgtgtaactcacgcaataagtggaaataaaatagaagaaacattgacatcctgtgtattttatggtcccattattttttatgactatatgtggccatatgttgtaccttcatataatttcatagattttttaggctatttatacattattaatttctttctacataaaatcatcaaaatataattaaatttcataaatacactagttttgatccaaaattgcaaaaagc

SEQ ID NO: 96079 - DNA, 163 bp, Zea Mays
ttggaaatggggtacttgactattctacaaggattatagtggatttggaacaaactatgttggagttttatcaacaattttattctaaaaaaagggttgggagtcgaatttatactgcagagtatcaaaattatactactgcctgcccaacaaaaaataaaaa

SEQ ID NO: 96080 - DNA, 655 bp, Zea Mays
gcaagtcgccttcttcccattcctctcctccccatcaagcaaaagacactgtgaaccgaaaggcagcaacgaccggtccgacgatccaccaataatcgccatgggattcttccagggcaagacctccaagcagaccgcgagggtcaagaagcttctcgggctcgccctgtcgcgcctcgccattgcacgtcgtccccgccttgctcgcaggtccatctaccgtagcgatgtcggccagctcctctccctcggctacctccaccgtgctctcctccgcgcagagcgggtcatagaggaggataacatgctgcaggcgttcgacatcattgagctctgctgcaagcgactcgtcgagcatgcagcgcatttagacaaaccgcgggagtgcggcgaagagataagggaggcggcagccgggatcatgtttgcagccaggtggtgcggcgacctgccggagctgcaggtcgcgcgcaccatcctagaagacaagttcggcagcgacatggctgtgatcgcgaaggaggggaccagcattgtcgatcccatgttggtgtggaagctatccggcgataagacaaacatggagctgaagaagaaagtgaccaaggaaatcgccgtcgagaacagttttatggtcgacttctccgagctccag

SEQ ID NO: 96081 - DNA, 285 bp, Zea Mays
atggaggtagccgagggagaggagctggccgacatcgttacggcagatggacctgcgagcaaggcggggacggcgtgcaatggcgaggcgcgacagggcgagtccgagaagcttcttgaccctcgtggtctgcttggaggtcttgccttggaagaatcccatggtgattgttggggtttagctttcctgtcagtcttttgcttgatggagagggatgggaagaaggcgacttgctggttgattgatctgaggactgcatgctatggcaggacaaagattttatag

SEQ ID NO: 96082 - DNA, 1226 bp, Zea Mays
ggcaggcactggccatgcgtttttttgaccgttcatgaaaagccacactgccttctggcactggcgctggtccgctggacagggtgcgcagcggctgcgttggaacggagtgcactgcgtccctcccgtcccgatgctacgggacacgccacccacagaactgggcgctgtccaagctgctgcatttaaatcctcctcctcgtcacttgagttcaaggcttcaagggaagcgagactgcgagagagagagagagagttgtacaaggctcgtcgccggccgcactgtaggggtaccttgagcctgttcaccgccgtcgcctgccgcctcacatccacagcatccatggccgacacagctcgcctcttcatgctggtggcggtggccacggcggcgctcgccggccgctcagacggcgcgtggtgcgtgtgccggtcggacctggcggacagcgcgctgcagaagacgctggactacgcgtgcggcggcggcgccgactgcaagcccatcctgcagagcggcgcctgcttcgccccggacaccgtcaaggcccactgctcctacgccgccaacagcttctaccagcgcaacggccagaacccgcaggcctgcgtcttctccggcaccgccgcgctcagcaacgtcgacccgagcgccaatggctgcacgtaccctgcgaccccaagtgctgctgcgacgacgagcagcagcagcggttcggccggcgtgtacagccctccagcgatgggtccgtcggccctcaacgacaacagcgctgccgccggcgtcgtcctcccgatggctggcgctgggcggctgctgatcctggcctgctgctcgctcgtcgctctctactacctcggcgcgtgatgatcgtgtgaggacgagacgccgctccccgctgccgcttgctgttgttggggtgtcttgttccttagcccttttcttttctcctctagtggcagtggcaggcaggagagaaccttgtgacgatgggcgcactgcactgccttccaccggtggaggagagcttggcagtgtgaggcccctgtaaatcttaggttctagggagggagggatgctgtgttgacttcttggacatgtgtgctcattgtttcatcggtctttgtttagggttgatgcgctaagcttcgcactgcctgacttgtggctgatgttgctcatgagccgtgttgtttcccttgccctgatggagagtggttcatct

SEQ ID NO: 96083 - DNA, 810 bp, Zea Mays
ggcaggcactggccatgcgtttttttgaccgttcatgaaaagccacactgccttctggcactggcgctggtccgctggacagggtgcgcagcggctgcgttggaacggagtgcactgcgtccctcccgtcccgatgctacgggacacgccacccacagaactgggcgctgtccaagctgctgcatttaaatcctcctcctcgtcacttgagttcaaggcttcaagggaagcgagactgcgagagagagagagagagttgtacaaggctcgtcgccggccgcactgtaggggtaccttgagcctgttcaccgccgtcgcctgccgcctcacatccacagcatccatggccgacacagctcgcctcttcatgctggtggcggtggccacggcggcgctcgccggccgctcagacggcgcgtggtgcgtgtgccggtcggacctggcggacagcgcgctgcagaagacgctggactacgcgtgcggcggcggcgccgactgcaagcccatcctgcagagcggcgcctgcttcgccccggacaccgtcaaggcccactgctcctacgccgccaacagcttctaccagcgcaacggccagaacccgcaggcctgcgtcttctccggcaccgccgcgctcagcaacgtcgacccgagcgccaatggctgcacgtaccctgcgaccccaaggtaatccttgcacggcattgccacttctcgcactcctttctcgattttgttgacagacagatataattagtagtagagaactagagatatatagagggcatgacatgctgtcgtttgttgctagcg

SEQ ID NO: 96084 - DNA, 1380 bp, Zea Mays
aaaagttagatctcccttgatccaaacagccccatacgttgccttgggcaatcgagctaatcaatctccgtgcaattccacctcccgaagacccgaactgagtccctccaccgacccaaaccctagcgcgcacccacctccctccccctttcccggcgtgcggtccggcgttggagatgcgggcgctgctcgcggacggcgggatggcgctggcgatggcgccggaggttaacgagtcgtcgggcggtgctgcgttgtcgcaggggctgttatggtgggcgtcggagtgccacggggtgttgtacagccttgcggtgatgctgccgtcgctggccttcgtgggattcctagcatggcaggcgcggcggagcttccgtaggatcagctacggccgctctcacgtcgtcgtcgtcgcgtactacgcgctcctctgggtcgtcgccgtactcaacctcctctggtgcttcctgcaggcatggcaatgtatgcctgacagggcattttcttggaatgtattgtcactgttcacaaaatcaggaatgttattcttggaagtcagtttgatagcctttctacttcaaggaaatgatgccagtggttttgaatctttggcacgaacctttgttatctctggagctgtagttgcagctgacgcattgctcaagactatatatgtttttggcttcggtgttcctttgttcattgatgctgatcaaggaactggtgggaaatggggcctatggattctccacaaacttgtgcttactggagtttatgggttgattgttttcatgcatcattcaagatggagaaacaggctgcctgcaaaaccagcatactacaactatgtatgtgcgatgttgctattgaatggtgtatcactgtttggatgtttccttgttgcaagtggagctggatttggtttatggttatataatctcacaatcgtatgctatcattcgctttaccttcccctcctatatgtgactttcttagcggactttttccaggaggaagacatgctcctagagagcgtttactattctgaaatgaaggatgctgggttctttgatgctgactgggattaatcggtggctactgcgctctatgaccactccaatgtgaattacgatgtgtttctatctgtgtactctcaacgtagaacagaaaatgtatgtagctaaccgtggtaatgaatggaaatatgtaaatattactggcgcatacttcagatttcaagtgatttcaacactgagattgccaccccaacggttggtgataagttcacgtcagaaagtgctatagcgtgtttggtttgagggtattcccttctcactcctcattttcttatttggtttatagaatgaaatgaattttctt

SEQ ID NO: 96085 - DNA, 1198 bp, Zea Mays
attagtggcaaaaagttagatctcccttgatccaaacagccccatacgttgccttgggcaatcgagctaatcaatctccgtgcaattccacctcccgaagacccgaactgagtccctccaccgacccaaaccctagcgcgcacccacctccctccccctttcccggcgtgcggtccggcgttggagatgcgggcgctgctcgcggacggcgggatggcgctggcgatggcgccggaggttaacgagtcgtcgggcggtgctgcgttgtcgcaggggctgttatggtgggcgtcggagtgccacggggtgttgtacagccttgcggtgatgctgccgtcgctggccttcgtgggattcctagcatggcaggcgcggcggagcttccgtaggatcagctacggccgctctcacgtcgtcgtcgtcgcgtactacgcgctcctctgggtcgtcgccgtactcaacctcctctggtgcttcctgcagactatatatgtttttggcttcggtgttcctttgttcattgatgctgatcaaggaactggtgggaaatggggcctatggattctccacaaacttgtgcttactggagtttatgggttgattgttttcatgcatcattcaagatggagaaacaggctgcctgcaaaaccagcatactacaactatgtatgtgcgatgttgctattgaatggtgtatcactgtttggatgtttccttgttgcaagtggagctggatttggtttatggttatataatctcacaatcgtatgctatcattcgctttaccttcccctcctatatgtgactttcttagcggactttttccaggaggaagacatgctcctagagagcgtttactattctgaaatgaaggatgctgggttctttgatgctgactgggattaatcggtggctactgcgctctatgaccactccaatgtgaattacgatgtgtttctatctgtgtactctcaacgtagaacagaaaatgtatgtagctaaccgtggtaatgaatggaaatatgtaaatattactggcgcatacttcagatttcaagtgatttcaacactgagattgccaccccaacggttggtgataagttcacgtcagaaagtgctatagcgtgtttggtttgagggtattcccttctcactcctcattttcttatttggtttatagaatgaaatgaattttctt

SEQ ID NO: 96086 - DNA, 1454 bp, Zea Mays
atggagggggcgcagctgacgctcgagtggagggccgtcagagcacagcagcggcaggagaggagggtggcagcgatggagaaggaaggataccatttactaatttcatgtccacatataaccaggaatgggggtgagacaagacaagaaaagttggcaatagaatcaggacaaacgggaatacaaaccgggctgctaggcactggtttgctctggctggctgtgtgttgcggcacaagccacaagcagcaggccagcggtcagcgcacagccaaagccacaggggcacaggctgaggcagacaagaagcagacaacaacacagaagatcgggtgcctgcggcacgaatattatgcttcccaaccccaacgttggtggcaacaaccatccagagattaaaggggatccagacagacagcaacaagtgaggtggggcactgggcgctgtgcaagggcctcatggcaccaggtaacacccgtctgtccacacaggcacacaaggcagtcacattgcttagctgggctggtgggctgaccagtgtgtgtggtccggtatggggaactgctcctgttgcttgctgggtttatccctaattgacgaatatggggcacttccgactataaatacgggtcccacaaaatcgggtgagatggaccctctccccattctagtccctgtcccaggtacttccgtcctggctcccatcctgtttctggttttttccccttcagaatccagaaatatgaaaacaggctggtcaaatgtggagaacaggatgagatatatcctgccagtttttaaccctacatggcattttatatgcacattgaacattatgtttggcaatgcagttaggtcctggaaatatggatgtcattctgtagatgaccagtcaggaatctccatctgaaaacaggtttctgctgatatagaatatattgaaagacgaactgcagaaccctaacagtatttgaaagcttaattttaactacaggagaaaaagtcatgcaaatgaagtgtactgctatgtaggtccttatctaaaccttagttatgtgttgcatgtaattcctttttgtctctaaataccaccgaagtatatagcaatccttatctttaatttctctatgtatcaatcaatttgaattgttaccaagttagcaatataagccatgttattacaacattaacgaaaaggaaatccaaaagtataactgtcagctcccgaggaaggccatattccggtagccgtcaagacacattcaaagatcccggcttgagagactaacgtaaaggcccaccataacgagaccactgctcacagggccccgagaccgaggaacctcccctgtccttggccaagggtggggcccaacactagatattatagaagtattcgaatgggatgactccttaggtgctagaggggttgatagccttctgggccacctag

SEQ ID NO: 96087 - DNA, 399 bp, Zea Mays
atggagggggcgcagctgacgctcgagtggagggccgtcagagcacagcagcggcaggagaggagggtggcagcgatggagaaggaaggataccatttactaatttcatgtccacatataaccaggaatgggggtgagacaagacaagaaaagttggcaatagaatcaggacaaacgggaatacaaaccgggctgctaggcactggtttgctctggctggctgtgtgttgcggcacaagccacaagcagcaggccagcggtcagcgcacagccaaagccacaggggcacaggctgaggcagacaagaagcagacaacaacacagaagatcgggtgcctgcggcacgaatattatgcttcccaaccccaacgttggtggcaacaaccatccagagattaa

SEQ ID NO: 96088 - DNA, 1890 bp, Zea Mays
gcggacaactatatttatcttaaattttattgttccttcagcaggtttacaagcttgagcagatcctgatgcgaggaccctccatctgtgatactctcgcacgctgctctcttcaaagaaagtgccctcgctctgatcgtatcatcagcgagcagctggttgactttgtccctgatctcctccttggtgaagacgccccgctcgttggcacggatcctcaagcccgtgccccacacgtcgcagatgtacttctggttcaagaactggtcggcaaagtatggccaacacaggaacgggacgccgtgacgcaccccttccatggtcgagttccatccacagtgcgagatgaagcatgccaccgcagggtgcgagagcacgcgctgctggggagcccagccgacgacgagccccgtgtctccgacgcggcacctgaacttgtccagccagccttggtcgacgccgttggcaaagttcggccggaccacccacagaaacgggcgtcccgtgagcgccagcccgtcggcgagctcctggagccttgcggtgtcgaagactgtgaagctcccgaaggccacgtagacaactgatccggggggctgggcgtcgagccagacgaggcaggccctgtcttcgggccagagctggctggccgaggtcgaccttggcgcctcaagggggccgacggccagcgcggccgtggggaggagggccagcacctcggactcgatagcatggaacgtgttgcagacaatggtgtcagcgcgcgccaacgttgggttgctcttgacgatgccctttaccatgattcttcgtatctcggggcttccatcaaacttactccatgggaggtcggcggcgtcgatgactggcatgttggggctcagcttgatcttctcattcctcctcacatccgctgcgcacggaaacagcgtgtccaacatgaattctgatctgcaggtctggagacgacacgggtgtttatggtgttcggttcgctcttaccactttcatcaatgatgccatcctcaatcatcttgggaataagcgtcctcagcgcgaagacggtggccgagtaggtcgagaacaaggcgacgcgcacgcccaccgtgccggccaggtccagcacccagttcatggagacatcagccacgacccaccgagtcctctgagctctggccagctcctcaaggcggccgagcatcgccgccggcaagccctgggccagcctaacgatgtccgcgcggtcgccatcggggcccatgccgtccgggaaagagaccaagtggatcccggcgtgggcagctgccctggtctctcctcctcctgccgccaaggccgtgacgatgcgggcgtggttgaagtccgtgttcacgaagtcgacctcgaagccatggtcgacgaggcggtgcgacagctccatgagcggcatgacatggccctgggcagggaagggcagcaccatgacacgaggccggggaggagccgcggccatggatcggaggctggtagcagctagcgtgtgtgcgctggaccgctggtgctggtgtggtatacggcggcaccgcacctgggttgcagcactgtcagatctcagaggttgctgttggctgcctgctgctgctcctgtgggtatcgataagtaagagagagatagagtcgccccgcccggtgttctcaggtacaagagcgaccgcatcgatgcagtcgcgtcaggtctcacatcaaaagaatccgtctcgtgctcgtctgactgcatcagcaggtctcacatcagccagcaacgaacgattggcgctcgtctgcttgcctatcggtttctctgattttgtcaatcgttcatatcgatgaatttccagccacgtcgattgtcgacaaaaaaaaaaaaaaaaa

SEQ ID NO: 96089 - DNA, 1526 bp, Zea Mays
gtttgatttacaatatcgtgtgtataaatatttcatgttttttactttatttgatttgcgataccacacatataacgatttcatatgtttcccgtggcaacgcacgggcatagacctagtctaacaataaagcccaacctggcccaaacttacttcctttaccctagaccgagttgaaccgatatcataaaaaaaagacaccctgcgtcatttaccgaccaccgtccatccatggatgcagccgagggccgaggggcagagtgggccgaggggcgtggcaggcggtgagcacgccggtggtcgggacggtacggatctcgtgatccatggccttcgcgggatggcgctgctccctgcttatgacacctcccgttcaccggcagcgaatcggggcttggcatttcccatcaagcattaagcagtgaagcaccccccctcgtttccaccggcagtccggcagcgagcagacagtactccatctcttgaggagaaaggtcacgctgatttgcatactccgctgaaatagtaacagaatcaggcggtgtcttggaaataacttcagtgccatggcctggtctcatggaacatctccattatttccacaggtttacaagcttgagcagatcctgatgcgaggaccctccatctgtgatactctcgcacgctgctctcttcaaagaaagtgccctcgctctgatcgtatcatcagcgagcagctggttgactttgtccctgatctcctccttggtgaagacgccccgctcgttggcacggatcctcaagcccgtgccccacacgtcgcagatgtacttctggttcaagaactggtcggcaaagtatggccaacacaggaacgggacgccgtgacgcaccccttccatggtcgagttccatccacagtgcgagatgaagcatgccaccgcagggtgcgagagcacgcgctgctggggagcccagccgacgacgagccccgtgtctccgacgcggcacctgaacttgtccagccagccttggtcgacgccgttggcaaagttcggccggaccacccacagaaacgggcgtcccgtgagcgccagcccgtcggcgagctcctggagccttgcggtgtcgaagactgtgaagctcccgaaggccacgtagacaactgatccggggggctgggcgtcgagccagacgaggcaggccctgtcttcgggccagagctggctggccgaggtcgaccttggcgcctcaagggggccgacggccagcgcggccgtggggaggagggccagcacctcggactcgatagcatggaacgtgttgcagacaatggtgtcagcgcgcgccaacgttgggttgctcttgacgatgccctttaccatgattcttcgtatctcggggcttccatcaaacttactccatgggaggtcggcggcgtcgatgactggcatgttggggctcagcttgatcttctcattcctcctcacatccgctgcgcacggaaacagcgtgtccaacatgaattctgatctgcaggtctggag

SEQ ID NO: 96090 - DNA, 1471 bp, Zea Mays
gtttgatttacaatatcgtgtgtataaatatttcatgttttttactttatttgatttgcgataccacacatataacgatttcatatgtttcccgtggcaacgcacgggcatagacctagtctaacaataaagcccaacctggcccaaacttacttcctttaccctagaccgagttgaaccgatatcataaaaaaaagacaccctgcgtcatttaccgaccaccgtccatccatggatgcagccgagggccgaggggcagagtgggccgaggggcgtggcaggcggtgagcacgccggtggtcgggacggtacggatctcgtgatccatggccttcgcgggatggcgctgctccctgcttatgacacctcccgttcaccggcagcgaatcggggcttggcatttcccatcaagcattaagcagtgaagcaccccccctcgtttccaccggcagtccggcagcgagcagacagtaacagaatcaggcggtgtcttggaaataacttcagtgccatggcctggtctcatggaacatctccattatttccacaggtttacaagcttgagcagatcctgatgcgaggaccctccatctgtgatactctcgcacgctgctctcttcaaagaaagtgccctcgctctgatcgtatcatcagcgagcagctggttgactttgtccctgatctcctccttggtgaagacgccccgctcgttggcacggatcctcaagcccgtgccccacacgtcgcagatgtacttctggttcaagaactggtcggcaaagtatggccaacacaggaacgggacgccgtgacgcaccccttccatggtcgagttccatccacagtgcgagatgaagcatgccaccgcagggtgcgagagcacgcgctgctggggagcccagccgacgacgagccccgtgtctccgacgcggcacctgaacttgtccagccagccttggtcgacgccgttggcaaagttcggccggaccacccacagaaacgggcgtcccgtgagcgccagcccgtcggcgagctcctggagccttgcggtgtcgaagactgtgaagctcccgaaggccacgtagacaactgatccggggggctgggcgtcgagccagacgaggcaggccctgtcttcgggccagagctggctggccgaggtcgaccttggcgcctcaagggggccgacggccagcgcggccgtggggaggagggccagcacctcggactcgatagcatggaacgtgttgcagacaatggtgtcagcgcgcgccaacgttgggttgctcttgacgatgccctttaccatgattcttcgtatctcggggcttccatcaaacttactccatgggaggtcggcggcgtcgatgactggcatgttggggctcagcttgatcttctcattcctcctcacatccgctgcgcacggaaacagcgtgtccaacatgaattctgatctgcaggtctggag

SEQ ID NO: 96091 - DNA, 1465 bp, Zea Mays
gtttgatttacaatatcgtgtgtataaatatttcatgttttttactttatttgatttgcgataccacacatataacgatttcatatgtttcccgtggcaacgcacgggcatagacctagtctaacaataaagcccaacctggcccaaacttacttcctttaccctagaccgagttgaaccgatatcataaaaaaaagacaccctgcgtcatttaccgaccaccgtccatccatggatgcagccgagggccgaggggcagagtgggccgaggggcgtggcaggcggtgagcacgccggtggtcgggacggtacggatctcgtgatccatggccttcgcgggatggcgctgctccctgcttatgacacctcccgttcaccggcagcgaatcggggcttggcatttcccatcaagcattaagcagtgaagcaccccccctcgtttccaccggcagtccggcagcgagcagacagaatcaggcggtgtcttggaaataacttcagtgccatggcctggtctcatggaacatctccattatttccacaggtttacaagcttgagcagatcctgatgcgaggaccctccatctgtgatactctcgcacgctgctctcttcaaagaaagtgccctcgctctgatcgtatcatcagcgagcagctggttgactttgtccctgatctcctccttggtgaagacgccccgctcgttggcacggatcctcaagcccgtgccccacacgtcgcagatgtacttctggttcaagaactggtcggcaaagtatggccaacacaggaacgggacgccgtgacgcaccccttccatggtcgagttccatccacagtgcgagatgaagcatgccaccgcagggtgcgagagcacgcgctgctggggagcccagccgacgacgagccccgtgtctccgacgcggcacctgaacttgtccagccagccttggtcgacgccgttggcaaagttcggccggaccacccacagaaacgggcgtcccgtgagcgccagcccgtcggcgagctcctggagccttgcggtgtcgaagactgtgaagctcccgaaggccacgtagacaactgatccggggggctgggcgtcgagccagacgaggcaggccctgtcttcgggccagagctggctggccgaggtcgaccttggcgcctcaagggggccgacggccagcgcggccgtggggaggagggccagcacctcggactcgatagcatggaacgtgttgcagacaatggtgtcagcgcgcgccaacgttgggttgctcttgacgatgccctttaccatgattcttcgtatctcggggcttccatcaaacttactccatgggaggtcggcggcgtcgatgactggcatgttggggctcagcttgatcttctcattcctcctcacatccgctgcgcacggaaacagcgtgtccaacatgaattctgatctgcaggtctggag

SEQ ID NO: 96092 - DNA, 1523 bp, Zea Mays
gtttgatttacaatatcgtgtgtataaatatttcatgttttttactttatttgatttgcgataccacacatataacgatttcatatgtttcccgtggcaacgcacgggcatagacctagtctaacaataaagcccaacctggcccaaacttacttcctttaccctagaccgagttgaaccgatatcataaaaaaaagacaccctgcgtcatttaccgaccaccgtccatccatggatgcagccgagggccgaggggcagagtgggccgaggggcgtggcaggcggtgagcacgccggtggtcgggacggtacggatctcgtgatccatggccttcgcgggatggcgctgctccctgcttatgacacctcccgttcaccggcagcgaatcggggcttggcatttcccatcaagcattaagcagtgaagcaccccccctcgtttccaccggcagtccggcagcgagcagacagtactccatctcttgaggagaaaggtcacgctgatttgcatactccgctgaaatagtaacagaatcaggcggtgtcttggaaataacttcagtgccatggcctggtctcatggaacatctccattatttccagtttacaagcttgagcagatcctgatgcgaggaccctccatctgtgatactctcgcacgctgctctcttcaaagaaagtgccctcgctctgatcgtatcatcagcgagcagctggttgactttgtccctgatctcctccttggtgaagacgccccgctcgttggcacggatcctcaagcccgtgccccacacgtcgcagatgtacttctggttcaagaactggtcggcaaagtatggccaacacaggaacgggacgccgtgacgcaccccttccatggtcgagttccatccacagtgcgagatgaagcatgccaccgcagggtgcgagagcacgcgctgctggggagcccagccgacgacgagccccgtgtctccgacgcggcacctgaacttgtccagccagccttggtcgacgccgttggcaaagttcggccggaccacccacagaaacgggcgtcccgtgagcgccagcccgtcggcgagctcctggagccttgcggtgtcgaagactgtgaagctcccgaaggccacgtagacaactgatccggggggctgggcgtcgagccagacgaggcaggccctgtcttcgggccagagctggctggccgaggtcgaccttggcgcctcaagggggccgacggccagcgcggccgtggggaggagggccagcacctcggactcgatagcatggaacgtgttgcagacaatggtgtcagcgcgcgccaacgttgggttgctcttgacgatgccctttaccatgattcttcgtatctcggggcttccatcaaacttactccatgggaggtcggcggcgtcgatgactggcatgttggggctcagcttgatcttctcattcctcctcacatccgctgcgcacggaaacagcgtgtccaacatgaattctgatctgcaggtctggag

SEQ ID NO: 96093 - DNA, 1468 bp, Zea Mays
gtttgatttacaatatcgtgtgtataaatatttcatgttttttactttatttgatttgcgataccacacatataacgatttcatatgtttcccgtggcaacgcacgggcatagacctagtctaacaataaagcccaacctggcccaaacttacttcctttaccctagaccgagttgaaccgatatcataaaaaaaagacaccctgcgtcatttaccgaccaccgtccatccatggatgcagccgagggccgaggggcagagtgggccgaggggcgtggcaggcggtgagcacgccggtggtcgggacggtacggatctcgtgatccatggccttcgcgggatggcgctgctccctgcttatgacacctcccgttcaccggcagcgaatcggggcttggcatttcccatcaagcattaagcagtgaagcaccccccctcgtttccaccggcagtccggcagcgagcagacagtaacagaatcaggcggtgtcttggaaataacttcagtgccatggcctggtctcatggaacatctccattatttccagtttacaagcttgagcagatcctgatgcgaggaccctccatctgtgatactctcgcacgctgctctcttcaaagaaagtgccctcgctctgatcgtatcatcagcgagcagctggttgactttgtccctgatctcctccttggtgaagacgccccgctcgttggcacggatcctcaagcccgtgccccacacgtcgcagatgtacttctggttcaagaactggtcggcaaagtatggccaacacaggaacgggacgccgtgacgcaccccttccatggtcgagttccatccacagtgcgagatgaagcatgccaccgcagggtgcgagagcacgcgctgctggggagcccagccgacgacgagccccgtgtctccgacgcggcacctgaacttgtccagccagccttggtcgacgccgttggcaaagttcggccggaccacccacagaaacgggcgtcccgtgagcgccagcccgtcggcgagctcctggagccttgcggtgtcgaagactgtgaagctcccgaaggccacgtagacaactgatccggggggctgggcgtcgagccagacgaggcaggccctgtcttcgggccagagctggctggccgaggtcgaccttggcgcctcaagggggccgacggccagcgcggccgtggggaggagggccagcacctcggactcgatagcatggaacgtgttgcagacaatggtgtcagcgcgcgccaacgttgggttgctcttgacgatgccctttaccatgattcttcgtatctcggggcttccatcaaacttactccatgggaggtcggcggcgtcgatgactggcatgttggggctcagcttgatcttctcattcctcctcacatccgctgcgcacggaaacagcgtgtccaacatgaattctgatctgcaggtctggag

SEQ ID NO: 96094 - DNA, 1124 bp, Zea Mays
gtttgatttacaatatcgtgtgtataaatatttcatgttttttactttatttgatttgcgataccacacatataacgatttcatatgtttcccgtggcaacgcacgggcatagacctagtctaacaataaagcccaacctggcccaaacttacttcctttaccctagaccgagttgaaccgatatcataaaaaaaagacaccctgcgtcatttaccgaccaccgtccatccatggatgcagccgagggccgaggggcagagtgggccgaggggcgtggcaggcggtgagcacgccggtggtcgggacggtacggatctcgtgatccatggccttcgcgggatggcgctgctccctgcttatgacacctcccgttcaccggcagcgaatcggggcttggcatttcccatcaagcattaagcagtgaagcaccccccctcgtttccaccggcagtccggcagcgagcagacaggtaagctatggcatgcgctgctgcaccagtaatctcgagattcgtttgcttttcgaagctattggcgatttggcattggggaaatcgagagacgttgagatattccaagttgttttccactgtcactctcagtatctagtttgggcgaacttcgccgagcaaacctgtgtgctgcagtttttatttaggtcttttatagtcaggagaaggataaccctgcttaaagaaatcccatgaattggttatgtcactgagatatcccaacgcatgtcattgtgtccattctgtttgtttgtttatttttttttacaaattgttattaccatgttaattgaacatatcaacaactccaccatctgtggaattcctgcggaatagcattctcagagtgaatgcattttattggactggactgcccccccacccaaaaaaaattattgaaagaagccatatgtagatactgacaagggaaacgattaatcacagaaccaaactctgcaaaactgtatgtggcaattgcgtctaaaattctggaacgtcgtccttctcgtaccaaattcacaagtttgatcaagttcgcatgggaggacccttcctttcggatgcttgcacaggccatattcttccaaataactgccctcgccttgatatcc

SEQ ID NO: 96095 - DNA, 2205 bp, Zea Mays
tgtgtagtaacttttaggaatacaattgaagaatcaaccggctatagcaggtccagggtacaacggaaacttcctcaagccgaacacaaggggcctgaggaattgtacatctacagacgtcctccgatacgaaaacaccaaacagcagggaatactagcagcccgtccaacctttttttatgcctgacacaagagaaaatcggtagcgtagcctgcaaaaacaaactgtaataaagaacggtcaaccagcttctctcctcttccttcccggaatccaatccatgggtgaggggggtgggattaggcgaccgcgggcatgtccttgagccaggcgtcgagcggcttgccgatggagtagacgatgaagccgatctccctcagcttctcggagtcgacgatgttgcggccgtcgaagacgaaggcgggcttctgcatgttgtcgaagatcttctggtagtccagggtcttgaactcgtcccactcggtcaggatgcacagcccgtgggcgcccttggtggcctcgtacgcgtcccacacgcagctcacctgcttcacggccgtcgggctcgtcggctgcaggtgcatcgggtggtcccagtcgaacttgttcatggctaggtcccgctggatctggtcctccgtcacctgggggtcgtagatgctgatctgggccttgtcacccagcaggcccttgcagacatcgatggccggggtctccctggtgtcgccggtgtccttcttgaaggcgaagccgaggacggcgatcttcttgccggcaacggtgttgaacatggacgacacgacgcggttcacgaaccggctcttctggtagtcgttgatcttgatcacctgcttccagtagttggccacctcgggcaggccattgcactcgcagatgtacaccaggttcaggatgtccttctggaagcaagacccaccgaacccaacactggcgttcaggaacttggggccaatcctcgtgtccttgcccacggcgtaagccacctcagtcacattcgcgccggtggcctcgcagagggcggagatggcgttcacagaggagatcctctgtgccaggaacgcgttggcagcgagcttggagagctcagcagaccacaggttggtggtgaggatcctgtcctcgggaacccagtgagcgtacacatccttgagagcctggacggccttcctgccctcaggggtctcccggccaccgataagcactctgtcaggcttgaacaggtcctcaatggcagtgccctccgcaaggaactctgggttggaaaggatctggtagttgatgcccttgctgttgtgggtcaagatcttctcaatagcctcagcggtcttgacagggacagtggacttctcaacaacaatcttgtcagacttggagacatccgcaatcatgcgggcagcgctctcccagtaggtgaggtcggcagccttgccagctccaagcccacgggtcttggtgggggtgttcaccgagacaaagataatgtcagcctcagcgacgtgcttctcaacatcagtgctgaagaagaggttcctgcccctgcactgcttcacaacatcatcgagaccaggctcgtagattggcagggtgtcactgttccaggcctcaatgcggggcttggagatgtcaacgacgacgacctcaatgtctgggcacttgagggcaatgacggccatggttgggccaccgacatagccagcaccgatgcagcagatcttcaccattttgtcagatagatctgtgacctgtaatcgcaaaaggtgcttcattagtgacttgtaaagtagaacacataccctgagcatctgacagatgagacaagtcgaccaactttcccaaactaacaaaaacagtcagaattcacaagcaaaagcaccagatcttgaacactactagtgcacgactgaaacaacagaacatagccaaacatgttaacagaagcagtcagaattcactggcaaatgcaccagatcctgaacactactagtgcacgactgagacaacagagcatagccagacatgttctgtgaaggttacttaagtgatctgatctgaacaaataggagatcggataaattattaggtacagtaattggcaacgtctacctaccaagtcagatctcatatttattaaagaaggcacggcatatcgcaggctttctgctggtcaagattgggttggcccc

SEQ ID NO: 96096 - DNA, 1529 bp, Zea Mays
aacaaaacaacgcggcggcaccacactaaaaatccaccactcccgagcagcagcagcacgctgctacaaaaggcacgagcacaagcaaggcaaaccctctagcgagagcttgctagccacaccagtgacaaagagtatactcgcccgatcccgccgcgcgccgcagctagagcctagagctaggaggtcgatctgatcgcatcggccggggtctgccgccctgcccatggccggcgccgccggtgacaggtcggaggaggacgtcggcgccgactggccgttcggtggcgtcgacgccttcacggagtactcatcctttttcgcggagcccggctggccgggcggcctagccggggaactcatcccggtgctggatctgcccgaggcagcagcaccgctgcccgcccaactgtccacggagccatcggaggagcctgcgcccgccaggtcgggggacgccggcgcgtcgtcgagctcgagcggggacggcgccgcgccggggaacggcgacggcgacgacgatcggaaggcggcgccggccgccgaggcagcgggtaggaaaccggcggcgaagaaggggcagaagcgggcgcggcagccgcggttcgcgttcatgaccaagaccgagctcgatcacctcgacgacggctatagatggaggaagtatggccagaaagctgtcaagaacagccctttcccaaggagttactacaggtgcaccaacagcaaatgcacagtgaagaagcgcgtggagaggtcctccgacgacccctccgtggtcatcaccacctacgagggccagcactgccacagcatcggtccattccagcgcggcggcggcggaggcgcagccgcggcgcggtaccacagcgcggcggccgtcgcgctggcggagcaaatgtattcgtcgtcgacgacgtcgtcgttcatcccagcagcgcggcagcagctcttcagcttgccgccgttgcacccgcagagctccccgccgtcctcggagacgacgccgccgccggtcgttagctcggtgactactacatcttttcagcgtgctaacgacggcgacgagctgtggcggacaggcacaggctacggctccggggtgtccgtggcgcagtcgccgtcaacgccaccatcagtgcctccgccggtcgtttcggttcagaaggcggggctgctggacgacatggtgccccatggtgtaaggcatggcaccccatgatggtggcaaaatatgacatatatatacctgtcggccgtaccagcaagaggcggataaagtgatcaaccagctagcagctagggttttctcctgctggattcatcagtagtagttagatttatctattactctaccagacactgcatgcatatatatactcagcttatctgttcagatttgcttatattcagtgtcactctccaacaatctccattgcacctacatgtggatgtgtagcagtacttgtatttcttgtcaaaaaatcagagaggtatatctagaagcttcgcatgctcccttcctctat

SEQ ID NO: 96097 - DNA, 1294 bp, Zea Mays
gctagccacaccagtgacaaagagtatactcgcccgatcccgccgcgcgccgcagctagagcctagagctaggaggtcgatctgatcgcatcggccggggtctgccgccctgcccatggccggcgccgccggtgacaggtcggaggaggacgtcggcgccgactggccgttcggtggcgtcgacgccttcacggagtactcatcctttttcgcggagcccggctggccgggcggcctagccggggaactcatcccggtgctggatctgcccgaggcagcagcaccgctgcccgcccaactgtccacggagccatcggaggagcctgcgcccgccaggtcgggggacgccggcgcgtcgtcgagctcgagcggggacggcgccgcgccggggaacggcgacggcgacgacgatcggaaggcggcgccggccgccgaggcagcgggtaggaaaccggcggcgaagaaggggcagaagcgggcgcggcagccgcggttcgcgttcatgaccaagaccgagctcgatcacctcgacgacggctatagatggaggaagtatggccagaaagctgtcaagaacagccctttcccaaggagttactacaggtgcaccaacagcaaatgcacagtgaagaagcgcgtggagaggtcctccgacgacccctccgtggtcatcaccacctacgagggccagcactgccacagcatcggtccattccagcgcggcggcggcggaggcgcagccgcggcgcggtaccacagcgcggcggccgtcgcgctggcggagcaaatgtattcgtcgtcgacgacgtcgtcgttcatcccagcagcgcggcagcagctcttcagcttgccgccgttgcacccgcagagctccccgccgtcctcggagacgacgccgccgccggtcgttagctcggtgactactacatcttttcagcgtgctaacgacggcgacgagctgtggcggacaggcacaggctacggctccggggtgtccgtggcgcagtcgccgtcaacgccaccatcagtgcctccgccggtcgtttcggttcagaaggcggggctgctggacgacatggtgccccatggtgtaaggcatggcaccccatgatggtggcaaaatatggtaattaaagaaactgagctaaatatgatactgacttgctgctttctatttggtgtgtacgtagtacggagtatacgttgtaggaggaataataatggcacttcatgcatgctgccacacgtatacgtatatatatatgatcgtattcatgcctccgctggtacgtac

SEQ ID NO: 96098 - DNA, 3506 bp, Zea Mays
cggcaacagggaggagagaagagtgaggaactgaggatagagatattttaagcgcccctcgatttccttcgccttgtcaactagccctcgctcatcgcatcgcacgcatcgcacagacactccactgcacgcgcagcaatggcgacgaccacctcgccgccgctgcagctcgccagcgcctcccgcccgcacgcctccgcctccggtggtggcggcggaggtggggttctcctcgctggcggttccggaggtggggtcgcgccaggttggggtcgagggcgattgcagcggcgggtgtcagcgcgcagcgtggcgagcgatcgggacgtgcaaggccccgtctcgcccgcggaagggcttccaagtgtgctaaactccatcggctcatctgccattgcatcaaacatcaagcaccatgcagagttcgctcccttgttctctccagatcacttttctcccctgaaagcttaccatgcgactgctaaaagtgtccttgatgcgctgctgataaactggaatgcgacatatgattattacaacaaaatgaatgtaaaacaagcatattacctgtccatggagtttttacagggaagggctctcacaaatgctattggcaatctagagattaccggtgaatatgcagaagcattaaaacaacttggacaaaacctggaggatgtcgctagccaggaaccagatgctgccctgggcaatggtggtttaggccgcctggcttcttgttttttggattctttagcaacattaaattatccagcatggggatatggacttcgctatgaatatggcctctttaagcagatcataacaaaggatggtcaggaggagattgctgagaattggcttgagatgggatatccttgggaggttgtaagaaatgatgtctcttatcctgtgaaattctatggtaaagtggtggaaggcactgatggtaggaagcactggattggaggagaaaatatcaaggctgtggcacatgatgtccctattcctggctacaaaactagaactaccaataatctgcgtctttggtcaacaactgtaccagcacaagattttgacttggcagcttttaattctggagatcataccaaggcatatgaagctcatctaaacgctaaaaagatatgccacatattgtatcctggggatgaatcactagaggggaaagttctccgcttgaagcaacaatatacattgtgttcagcctcactacaggacatcattgctcgttttgagagtagagctggcgagtctctcaactgggaggacttcccctccaaagttgcagtgcagatgaatgacactcatccaacactatgcattcctgagttaatgagaatactgatggatgttaagggattaagctggagtgaggcatggagtattacagaaagaaccgtggcatacactaaccatacagtgcttcctgaagctctagagaagtggagcttggacataatgcagaaacttttacctcgacatgttgagataatagaaacaattgatgaagagctgataaacaacatagtctcaaagtatggaaccacagatactgaactgttgaaaaagaagctgaaagagatgaggattctggataatgttgaccttccagcttccatttcccaactatttgttaaacccaaagacaaaaaggaatctcctgctaaatcaaagcaaaagttacttgttaaatctttggagactattgttgatgttgaggagaaaactgagttggaagaggaggcggaggttctatcagagatagaggaggaaaaacttgaatctgaagaagtagaggcagaagaagagagttctgaggatgagttagatccatttgtaaagtctgatcctaagttaccaagagttgtccgaatggcaaacctctgtgttgttggtgggcattcagtaaatggtgtagctgaaattcacagtgaaattgtgaaacaggatgtgttcaacagcttctatgagatgtggccaactaaatttcagaataaaacaaatggagtgactcccaggcgttggatccggttttgtaatcctgcattaagtgcattaatttcaaagtggattggttctgatgactgggtgcttaatacagacaaactggcagaactgaagaagtttgctgataatgaagatctgcattcagagtggcgtgctgctaagaaggctaacaaaatgaaggttgtttctcttataagggagaagacaggatatattgtcagtccagatgcaatgtttgatgtgcaggtgaaaaggatacatgaatataagcggcagctgctaaatatccttggaattgtctaccgctacaagaagatgaaagaaatgagcacagaagaaagagcaaagagctttgttccaagggtatgcatattcggtgggaaagcatttgccacatatatacaggcaaaaaggatcgttaaatttattacagatgtggcagctaccgtgaaccatgattcagacattggagatttgttgaaggtcgtatttgttccagactataatgttagtgttgccgaggcgctaattcctgccagtgaattgtcacagcatatcagtactgctggaatggaagctagtgggaccagtaacatgaagtttgcaatgaacggttgcattcttattggaactttagatggtgcaaatgtggaaatcagagaggaggttggagaggaaaactttttcctttttggtgcagaggcacatgaaattgctggtttgcggaaagaaagagccgagggaaagtttgtgcctgacccaagatttgaggaggttaaggaatttgtccgcagtggtgtctttgggacttacagctatgatgaattgatgggttctttggaaggaaatgaaggttacggacgtgcagattatttccttgttggcaaggacttccccagctatattgaatgccaagaaaaagttgatgaggcgtaccgagatcagaagttatggacaaggatgtctatcctcaacacggctggctcatccaagttcagcagcgataggacgattcatgagtacgccaaggatatctgggatatcagccctgccatccttccctagaccaggtggatatcaggttctttcgcctatatttctgtgaaccctcaggatcaaggaacagttggtgacgacattaatttgcctcagccccttagcaggaagcgctggtcacctcagttttgtgtagacaaaatctaggcatcgataaatgatgggggactatgcatggtgttttggcagcactgttcagtaccttgccttctaaatctggtttttggtgtgtgtgtgtaagctaataaatgtcgaggcaggattgtaggaacaccattgatcatttggctcgctggtgacctggtgacgtatggtgtaattagtagttgtttgcctcctggagcttgctggcttctgtaatggtattttcgtaacgaaaatggcgggaaagtacgggggccgctagtgctattgtgacgtta

SEQ ID NO: 96099 - DNA, 1655 bp, Zea Mays
tctgcacgctacgaatattgatgattcatagagagaaacagctaatacatataggccagactccttccgtatcccaaccgtctcatggaaacagtgtccggtggaataggaaggatatcatctgattagtgccttccaagttccaactatagacatgcacgtgagcaagaatggtggcatgcaagcctaaacaaggaaagtaataatcaatctaaatatagaaatccaacactttctactcagaacagtttctcctatcaaactttccattcctcttgataggacatgaaagtttaggcttaaagcagagaactagatcaaccttcaagcatcgccatggctgcgtcgacaagtgcaggccttgggctgttcgatgctccgccaaggacagtgtagccttcctcttgtcctcagcatcagcatcagcaccatgtctaatcaacagaagagcaacctggaacacaattgtaggagcaaaactagtaataatctctatcggtccgcatttggaatccgtccgtattgtggagttgtcccggtgtacgagcttcgccgctgatggcgctcgcgcgtctcgctcacgctttggtttagggttattacgatttacgagcgcgtttatcgattctaatcgttttggagaggacgaacagacggtttctgaatctggtggtggagaacctgaacgccgacttgtgttctctgctccgcctgaatctggcctgcggtcctgccatctcttctgttcatcagcagctgcagcctgcagctgaggccgcaatggcgcggtcagaagcagcaatatcctgacgaacgcggagagacaggccaacagaagtatttcagagttcggattcttgtgggggaaaaggcaattgacaattcactaattcacttacgcaaaagatggcagcaatatactattacagtgcacactgtacagtcaccatgacgcggccggcacagctaggagcctaggatggtccctccctcctgctcatcagtgctcactctaggtggtcatgcggccgtagcgacatgaacatggccgcgtagtgtctgagccgccggtccccgtcgtcgggcccgcccaccaacggcggcgccgccaggtccgccgacgtccgggccctgtacctgcgccacgcgagctggatgttgacggcggcccacgtccgccagttggacgagtagtaccgcgccgtgcgcttgagcttctcgttggcgaagttgtaccggaagtgctcggtgatgaaccgcaggtccggcgcgccgaggcagaacgcctgcgccgcttccacgcactcgaacgtggccgacgacgcggggagccggtccacgaaggggcggcgcaggcaccacgacagcagctcgtcgcccaggaagctgcccgcgcccagcatgcacgtcgccaccacgcctttggtcagcggctgcgtgctccggagcttgccctgcaggatgaacaccatgcgctgcacggggtcgccctcccggatcaccttctccccgctggacaacaccagaggccgcagccggtcgcagatgttgtccaggatcaggtcgtccatgccatggaacagtggaacctggcaagttaatttttttttagcaatctcatggctcattcatcatgtaaaaaaacattgaacatt

SEQ ID NO: 96100 - DNA, 1115 bp, Zea Mays
ccgcgatgaaaccggcgcggtacaccgcctgggcgccccatgtgccccgcgcccccgcccccgcgcctttaattaggccgcacccggcgccccactgccggccccagatcactggcagtcgcaagtagcaacccgcatcacgagttcacccacgctccccgcacaggcacagctcactagcgaccagggagttcaaacaagaggcaacgagaacgaacgccaccaccgcgctccggtcgctttgcttggttcgggccactgcaccgccattgttgatctgttctccttctccttggaggagaaagaagaggggagaggaatgatggggcggacgagcgtggcggcggcggcggcggccctgctggtgctggcggcgtgcgcggctctgccggcgaggacggcggcgaacaagatcagcatcaactggaagcccaacgtgaactacaccgactggctgaagcagcacagccccttctacaaggacgactggctggtgttctactacacggcggggcaggcggacgtggtgcaggtggacgaggtgggctacaacaagtgcgactccaccaacgccatctacaactacagcaaggggcgcagcttcgccttccagctcaacgagaccaagacctactacttcatctgcagctacggctactgcttcggcgggatgcgcctcgccatcaaggccgagaagttgccgccgccgtcgccgccgccgtccgccagcgaccgctccgccgccgccatcgccgccttcgccaggtcccacgcgcccgtcatctacgccgccgtcgccgtgctcgccgcgctgctcaggatggtctagctgggaagaatctacccgccggcccctttgttggttcgaattgggactcctttttttttttgttcgttcatcctctccatcttttccgtagtgtgcttgggctctcgagaggagcagtagctggtgctggagtgctgcgttgggttcattaattaattagcggtgtggatttgccgaagcgattgattgagctgagattgatttttcaagtgtgaagaactctagctgccttgctgaattaaagtaactccagccttttcgtctacgagtaaaagtgattggagat

SEQ ID NO: 96101 - DNA, 125 bp, Zea Mays
agcaactgaaaatgggcggtccaccggacagagaaacatccggtgtgcgaaaccaggaactgcgatcaggagaaatttggtttcccaccaaaagggcccgactcccaaaggcagggaacgaagtc

SEQ ID NO: 96102 - DNA, 2470 bp, Zea Mays
gtcctcctcccgctgctatttctctaatcgcatgcacatcacgttctcgtgtggaggagggcgtgctgcctcgctcgcacttgttgccattgcggatcgccagtagctaggcggaggcagcagctgaggattaagcagccaggttgcttaattattctgcccgcttcagaattgccgcccgtgatgagtcgtccgtcatccgtgaccttcgataaaagcaggagactttcttcgtcttagcattatccgccgagaaatagaggttagagcgagagcgggagacagttggaggccggccatccattgctggatccatctgttgtccaaggctgctgattaattctgcgacgagggtgcaacttgctttccttggtggcagcagatccagctccaggtgcgtacgtgcgtagcgccgtagcctcgctactagccactagccagcgcgcgctaagcagccgggcatccatgggttcttgcgtgtcggtgtcgtcgacgaggcaccggcggcggcggtcgaggaagctgtcggtcgcggcgaggaagttccggcggaagctgtccacggcgatcgccgccgacgcgccgatcgtccgcggcgccggcagcgcggcgacctgcctcgcccggcacggggtcgtccacgtggaggcgccggactccaacgtcaccctgcgcctcaccaagctgcagtggcagcacagccagatggacgccgggagcgtggtttgcgaagaagcgtggtacgattctgtcagcatcctggagtcgccggactccgacgacgatctcgacaacgatttcgctagcgtcagcggagaccctctccctgatgtcaccggcggctcggacgcaccgcagtgcaaggaggcagcgtgcttcttggacaccatgcagctcctcaggagcatcgcaaacgcagaagcatacgaccaaagtgaacaacctgctgacaagagtgacgacgacgactcgaacgtcgctgccactgcaactaataatagcggtagctgcaataatgacgagggctgctgcagtagtacactgaaggagcttcaggctgcaatgtcgccgcggccgttcccggcgtcggttccgagcaacaaggtccagccgatgccggtcgttggtgtcagcccggtcccgcccccgcaccagcagcagcagcagcagaagaagaaaacggccgtggtcaggctctcgttcaggcgaaggtcatatgagggcgacgagatgaccgaaatgagtgagtcgcctagctccggcatttgcagtgccgttttttttcatgcagctgttcagcagccgaattactacttagctcacacagaattctgttctgcaatcccccaggtggttctgcgaattatctgtaccgcccaagggcaggtttcacggtgccgtgttcgaccggcgagaaactgccacaaggttgctggtcggttcttgagccatcgacgttcagagtccgaggggagagcttcttcaagtacgaagcgagacaagaggaagtacccagctccaggctgctccccttacacccccatcggagtggacatgttcgcctacacgaggaagattcaccacattgcgcagcacctctcgcttccgtctctgaagacacacgagacatttcctaccctgctcatcgtcaacattcagttgcccacctaccctgctacagtgtttggcgataacgacggcgatgggataagcctagttctgtatttcaagttatctgacagttttgacaaggagatttctcctcagttgcaggacagcataaagaggctcatgaacgaggaaacggaaaaggtgaaggggttcccagtagacagcattgtgccctacaccgagaggctgaaaatcctggctggtttggcgaaccctgaggacctgcaactgagcaccgcagagaggaagcttgtgcagacctacaatatgaagcctgtgctatctcgcccacaacacaaattctacaagggttcaaactactttgagatcgatctggatgtccatcggttcagcttcatatcacggaaagggctcgagaccttccaggagcggctcaagcatggcgttcttgatcttggtctaactatccaggcacagaaggctgaggagttgccagagcatgtcctgtgctgcatgaggctgaacaagatcgacttcgccaacaacgggcagataccgacgctgataactgcagctgatgagtaaatctgtcctgttactgtaaggcgctaactttctggaaaagcaaaagagactgttgcttttcgagatgctgttgtatagatcggcagatagttgtagggactaactcaagtttgtgagctaagaaacacctaatcactgaggagggaaaagaagatattgcagcaatctgcattctgaactctgaagacgatgtgtatacatgtctgtgttttctttttctttttttgaaacgaaatacatgtctgtatttcca

SEQ ID NO: 96103 - DNA, 184 bp, Zea Mays
atatagaaatagtgttgatctcggtttggaaagttattcttctgagcgcgtcctttttttgtttattttttctggctttccttttttaatcaaatgtatataaatagatggctaatacaatgaaaataagtcgccgttacataacaccaaaaaatttagagtattcatcgtgttattgagagtt

SEQ ID NO: 96104 - DNA, 549 bp, Zea Mays
ggacgctttaagattttttggggatagatgatgttggaaggcagttgagattaacgatttggcctctcgaacgaatccaccattttctatgcacatgttatgtattagtaatatataatgatagagagccgacagtctgtcttttccacacactagattttagggttttcctgcgagtctgtgaaaaaactctttatgtgaggaaaaaatatttcatgattaagcatgccatgttagctaaatcgagtggatattgtgaactttgagtctgtgaacttgtgatctttatgaacttgttatactgtgaacttgttatatgtgaacttgtgatctttgtaaactttttatattataaatttgtgatccttgtgaacttgttatattatgaacttgttatatcatgaattgtgaacttgtggtctttatgatcttttatcaattgtgttgtattgtgaagtttgatatatttaccgatcatattttagatttcgaccattaccggtgtattttccgcatcgaactttcgtttccgatgtttctgaaataccg

SEQ ID NO: 96105 - DNA, 101 bp, Zea Mays
gccgagtttttccatggtgccctagacaccagctcccactcttgctgtctcccatggctaagcacctccctggtggctgagcatggcccctgcactcgccc

SEQ ID NO: 96106 - DNA, 201 bp, Zea Mays
ctgcagttttcagcggaacaaataactataaccgtgttactgctagacacaaagccttctctgaacaaagcttgcacacatgttattagttcagctagcagcaatttcagtcagctatatagcgcgcctcattggttgactgaagtggtgaatggctatgctcaagacccaaattaaaggcgatgcaacttcttgctgcga

SEQ ID NO: 96107 - DNA, 791 bp, Zea Mays
gcgtccgctcccttccacaccgcctcctgcctacctctcacgctcgccatcgcattcgcctcagccgaccgtgccaccacctctcgatgctgcattcgcctcatcggacccccacgtgccaccacctctcgccgtagctcgcgtccattacccgcgacagggtcgccgctcactggaggaacggagcgccgcgtcaccgacatcgtcgtggccaggaagcactcctgctcggcgctcgacgttgccttccatgcgctcgaggcggaggccagggacgccaagatggaggcgcgtatccgcctcgtgagagaacagagggccgctccaccaccgacactgtcctcgaggagcagaggtgttctgcggcctccaaaccgctcgcaaggagagccgctccgtcggcgctagcgtcctcgaggatcaagtccaccagatcccgcttcgcttcttgaagtccccattcatttcttggcgttattgcgtttagtttgttactttgttgttcctggcctgaattctctcaccctacagcaacagttggatcaacgagctcaaatgtaaaagttcaggagccattcgttggatagactatgagagaaattcagagacaaagtacttaggaatacacgcaacgtggcgagatagcttgatctcatacgagccatgttcttttgtgacaaatttgaccactactttacctgaccagttgctgatttggggaccaatcatgtttgcaagtatcgtatttgctttccttttgcaagacagtacaagccattgttagtcatgta

SEQ ID NO: 96108 - DNA, 1878 bp, Zea Mays
gagaaagcccactcgttagtcgttactcccaacaccgggaatccatggagccggcctatgtcgtcaccctctccttcctcttcctcttcctcttcttactccaccatctcctcggccgccaccgccgcaggaccaataatggcaagaacaagagaacgcagctgccaccgagccctcccgccatcccggtcttgggtcacctccacctcctacggaagcctatccacgcggcgctcgctcgcctcgcggaacgctacgggccggtgttcttcctccggctcggctcgcggcaagccgtggtggtgtcgtccgcggcttgcgccacggagtgcttcaccgagaatgacgtctgcttcgcgaaccgcccgcggttccccacgctcctgctggtttccttcggcggcgccacgctcccaatgtgccgctacggcccgtactggcgcaacctccgccgcgtcgccacggtgcagctcctgtccgcgcaccgcgtcagctgcatgctccccgtcatatccgccgaggtgcgcgcaatggcgcggaggatgtaccaatccgccgccgccgcccccgccggcgccgcgagggtcgagctgaagcggaggctgttcgagctctcccacagcgccctgatggagaccatcgcgcgaaccaagacgtcccgtgccgtggcggacgacgacacggacatgtctccggaggcccaggaattcatgaaggcgctggacgtgttccttccgcttctcagcggggccaacgcgtgggactacctgccggtgctacggtggctcgacgtgttcggcgtgaggaacaagatcctgcgcgcggtgagcgcaagggacgcgttcctacggcggctcatcgacgcggagcggcggaggctggaggagggcggcgagaacaacgataagaagagcatgattggcgttctgctctcactgcagaagtcagaaccggaggtgtacacggataccatgatcatggctctgtgctcgagcatgttcgctgggggttctgaaacaacggcgacgacggcggaatgggcgatgtcgctgctgctaagccaccccgatgttctgaagaaagcgcaggcggagattgacgcgtccgtggggcattcccggctgctcggcgccgacgacctgccgcgcctcggctacctccactgcatcgtcagcgagaccctgcggctgtacccggtcgtgccgacgctggtcccgcacgagtccaccgtcgactgcacggtcggcggccaccgtgtgccgagcgggacgatgctcctcgtcaacgtgtacgccatccacagggaccccgcgatatgggcggacccagccgcgttcaggccggagcggttcgaggacggccgtgccgacgggctgttcgtgatgccgttcgggatgggaaggcggaaatgccccggagaggccctcgcgctgcggacgctggggctggtcctggggacgttgatccagtgcttcgactgggacacggtcggcggcgccgaggtcgatatggccgaagggggcggaatcacgctcccgagggctgtccctctggaggccatctgcaagccgcgccatgctatgcttggcgtcctcaagggactgtgagcgccatgctatgccttgatacataagtaagctttttttctttagtaaagcagtcatcttgcgtctcaagcagttgcttgctttattgcttgaaactcactttcttcctggagtgtagccgccgcagtgtaagcgcgcggggttcaaatgttatttcattcacagccatcagccatgtatatgttgaactagcaatgtgaatgtgacccacgtaaaatcgcatgggtttactagttttttttttcagttatagcatttgtgtttttttata

SEQ ID NO: 96109 - DNA, 94 bp, Zea Mays
caggtactgactttgtctggggcacattctcaccacctaaagtaaagatcttcatctggactctgatccaagacaagatcaatcacaaaaaaaa

SEQ ID NO: 96110 - DNA, 2096 bp, Zea Mays
aacagcaaagcccaggctgcccagcacacgcgacgcgaaccagctggcgaggaaccctagcggagcactgtgcaggcgaccgcggcgcgctatcacttacggggggatacggcggcatcgtccccctcggcccctcctccatccctggtgcggcggcgccagcctgcaggtgttgaatgctgatttgttgtggctgattaatcgggttgatcgtcgattaatcgtgattagtcggctgatcgcccttctggcgatcagaaacgataaggcaatctgaaaacattggccgccaaacctccagagcgactcccgcgagccgtgaccaccatagctaaatcaacgcaccagaagctttcacggagctgtctcgtccacgagtgttccagctgactcctattccctgcgtcaatggcgagctctggcaatgaagggcgtgtggtggtggaccttggctccgcggcggagtcggtggctgctgacgaggaggcgcacgccacgcctctccacgagattgagtccctttgcatgcgctgcggcgagaacggcatcacgaggcttttgctgacgttgatcccgcacttccgggaggtggttctgatggccttcgagtgcccacattgtggtgagaggaacaacgagattcagtttgctggacaactccaacccaagggatgctgctacagcttggaggttccgttggggcagagtgagatgctgaatcgtcaggtcgtgaagtctgattcagcgactatcaagattccagagctcgactttgagatccctccagaagctcaacgtggaacactttctactgtggaagggattattatgcgagctgtggatgagctgcaggctcttcaagatgaacggaagaaagtggatcctcagaaggccgaagctatcgatcaatttttactgaagttgagatctcttgggtcaggagaggctgcattcacttttattcttgatgatcctgcaggaaacagctttattgagaatccgcatgctccgttattagatcctttactatctgtgagattctacgaaagaactcgtgaacaacaagcagcacttggctttcttgctgaaccaccaaaagaacaacctggagaggctgtattgcctgcttcagcagtggaatccaattctgatgggttgcaaagcgtgccccatggctcagttggagctgttgcaggtcgtcgtgctatagctcagggaaaccctgatgaagttgctgcagcattgtgtagatattcagcaccagaagaggttgatactttaccatcaacatgtggagcctgtggaacagaatgcgtcacacgtttctttgctacaaaaatcccatatttccgggaggtgattgttatggcaacaacatgtgacatgtgtggttatcgcaattcagagctgaagcctgggggtgaaattccagctaagggaaagaaaattacactgcgtgttcaaaatgcacaagaccttactcgtgatgtcataaagtcagattcagctagcgtaaaagtacctgaacttgagttggaactttcatgtggaacgttgggtggtatggtcacaactgttgaaggtttaattgtgaaaatatgtgaggctctggagagaatacatggatttcaattaggcgatagtacactggaatggaaaaagaagaaatgggatgacttcaaggagagactatccaagcttctgagtttacaagaagcctggactctaataattgatgatggattggcggcttcatttgtggccccggctactgattcgttagaagatgacagccaactaaccattgaagagtatcagaggagttgggagcagaacgaggaacttggtctgaatgacatggatacgtcctctgcagacgcggcttacaacacgaccaacacataatttttttagttttgttgtgccgaatgtatttgttacgctatcagtttactttgatgaactttcagtgtgtatactaatatcaacaacttatatttcctctgacgataaacatcgagcgaacgtgcgaggcgcaaacccgatttgctgtcacccgtgcaggtccatgaattgccaacgttggttcggaggca

SEQ ID NO: 96111 - DNA, 1896 bp, Zea Mays
ctcttccccccaccccgactgcagctcaccccacacgcgctttcgccgcaccaaagcgtcgtgagctgctacctaacctaaccccaccgccaaacaattcccccattcctgattccaaccagcccgccccgttcgagtacacactgagcgagggagacagagagagagacgagaacaaccagcgatctcgcgtatgtgtgtggagttggagatatacagtacagaggaaagatccgatattttttgctgtacggctgctgagcggaagagatgttgagggcggtggcgaggtgctgcggccactggccgccgggcgcggcggcggcggacgggatgctgtggcagacggagctgcggccgcacgcggcgggggagttctccatggccgcggcgcaggccaacctcaccatggaggaccaggcgcaggtgctggcctccccgtccgccacgctcgtcggcgtctacgacgggcacggcggggtcgacgcctcccggttcctgcggtccgggctcttcccccatgtccaacgcttcgcgagggagcaggggggcatcagcgcggaggcgatccggagcgcgttcggcgcggccgaggaggagttccacaggcaggtgaggcaggagtgggcgaggcgcccacgcctggctgccgtgggctcgtgctgcctgctcggggccatctccggggatacgctatacgtggccaacctcggggactcccgcgccgtgctcggccgtcgagtgggcggcggcggcggcggggcggccgtcgccgagcgtctgtccgccgagcacaacgcggcgtccgaggaggtgcggcgggagctcgcggcgctcaacccggacgacgcgcagatcgtggtacacgccaggggagcgtggagggtgaaggggataattcaggtatcaagatccattggtgatttttatctgaagaaaccggagtacagcttggaccccttgtttcggcaagttgggccccctattgcgttgaagaggccagctcttagtgctgaaccatcggttcaagtacgcaagctgaaaccaaacgacctgtttctgatatttgcttcagacggtctttgggagcacctcagcgatgacgcagcggtgcagattgtcttcaagaatccgagaactgggatcgccaacagactggtgaaggctgccttgaaggaggcagccaggaagagggaggtcaggtaccgtgacttgaggacgatcgacaagggagtgaggcggcatttccatgacgacatcagcgtcgtcgtggtcttccttgatcgccaccgtgagcgccgccacactagggtcgttgactcgagtagcaactgcatcagtgctcccgtcgacatatactcctccaacacacaccagtctgcggagcccttgcacggttaaaagagctgaactctggctagagtagaagactggggtttgccttgcgctctcctgctggtgaacggtggagttgtagagctgagggactgcagtgccatagccataggaagggaagaactcgagatgtacatagatagcgtgggtgtgtagcatcggaaaagatcatttggtctggaactacgtagcgtaattggtcagtcagatcattttcttgtttctttttgtctgattatgcttacccagtggtaaatccgtccattgtatcggatttaatttaagaaatctgtaatacagaggtgtcgtgaaatagttgatgacgcaactggaggttagtggtgactggtgaccaaagaacatatgctctgcttatgatctagaagttaggttgtgacatgagaatatatactatttatttgcaacggatgagatgctcttatttcatttagcattgctttttgtcaaaacttcgttgtatgtagttacaagattacctct

SEQ ID NO: 96112 - DNA, 664 bp, Zea Mays
aattccaaccatcgttttaaatgctcaaggaatgtggtgtcccttttcatagatcaagtgctcagggcagtacaagtttcaatatactggttggcagtttgacccttttcatgtagtagtattgtagtagtgacttgtgcctgaacaagttggcagtatggcacgaagtcctcaagttcagaacatggacacttgtgactacaccggtccttgaaggattcttgtgctgaagttcgagtcttaaaatacacatgtagttcattgctgaaatacgagtcttaaaataaatgctgaaactcttgatacatggaccatatgtagttcattgcttttggaggactcaagttcgagtcttaaaatacaaaaagtttcccggtgagataaaatatcagcagttcagcattttggccatcaggtgtttgacaattgatagtcgtaatggtcgagtgggacgacaaaaacacagccatggtttggttaggcatccattcatcctttagggtcgatttggcgacaaggggatcacggagggattagaggggattgagggggaaatgactaattttctcctcaatcccctccaatccttctatgatcctgggtcaccaaagcaatccttaactgggaacatttattcataaagcctaaatgataactgatattc

SEQ ID NO: 96113 - DNA, 2809 bp, Zea Mays
gtctatctctctctctctccacccggctcctcactcacgcagtcacgccttcccgtccgatcgatgccgctgaagcagcggtccatctgttcccctttgtcctgttgcaatcattcgaggccccgttctcgattctataaaaccactgccccgatctacctctctcacacgctcaattccactgccaagattcgccactccgtccgttaccttcactcgctcactcacaatgcggcgccatggcgaggtacgcgtgatcttagctatggccgccgccgccgccgccgcgctcttggcgtcggcggccgtggccggacgagacggccggcagacctacatcgtccacatgtcccattccgccatgccggacgagttcgcggagcatgaggaatggtacgccgcgtcgcttcaggcggtgtcggatgccgccaccgtgctgtacacctacagcaccctcctccacggctactcggcgcggctgacgcgcgcggaggccgcggcgctggagtcgcagccaggggtgatcgtcgtcaacccggaggtgcggtacgagctgcacaccacccggacgcccgagttcctggggctggacggcacggacgcgctgttcccgcagtcgggcaccgggaccgacgtcgtcgtcggggtgctcgacaccggcgtctggccggagaggccgagctacgacgacaccgggttcggccccgtgcctgcgggctggaagggcaagtgcgaggacggcaacgacttcaacgcctccgcgtgcaacaagaagctcatcggcgcgaggttcttcctgacgggctatgaggcggccaagggccccgtggacacgtccaaggaatcccggtcgccgagggacaacgacggccacgggacgcacacgtccagcaccgcggcgggcggcgccgtccagggcgccgacctgctcggctacgctgccggcacggccaagggcatggcgccccgcgcccgcgtcgccacgtacaaggtgtgctgggtcggcgggtgcttcagctccgacatcctcaaggccatggaggtcgccgtgacggacggcgtcgacgtgctctcgctctcccttggcggcggcacggcggagtactaccgcgacagcatcgcggtgggcgctttcagcgccatggagaaggggatcttcgtgtcctgctccgcgggcaatgccggcccgggcgccgcgacgctgtccaacggcgcgccgtggatcaccaccgtgggcgccgggaccatcgaccgcgacttccccgcctacgtcacgctcggcaacggcaagaactacacgggggtgtccctgtacagcggcaagccgttgcccaccacgccgatgcccttcatctacgcggggaacgcgtccaacagcagcatgggccagctctgcatgtccggcagcctgatcccggagaaggtggccggcaagatcgtcctttgcgaccgcggcaccaatgccagggtccagaagggcttcgtcgtcaaagacgccggcggcgccggcatggttctcgccaacaccgccgccaacggcgaggagctcgtcgccgacgcgcacgttctcccgggctccggcgtgggggagaaagccggcaacgccatgagggactacgccatgtcggatccgaaagcgacggccaccatcgtgttcgccgggacgaaggtcggcgtcaagccgtctcccgtcgtcgcggcattctcctcccggggccccaacactgtgacgtcgagcgtcctgaagccggacatcatcgcgcccggcgtgaacatcctggcggcgtggtcggggtccgtcggcccgtcggggctccccggcgacggccgccgcgtcggcttcaacatcatctccggcacgtccatgtcgtgcccgcacgtgagcgggctcgccgcgctgctccgcgcggcgcacccggagtggagcccggcagccatccggtcggcgctgatgacgacggcgtacaacgagtaccccggcggcggcaacggcatcctggacgtggccacggggcggccggccacgccgctggacgtgggcgccggccacgtcgaccccgcgaaggccgtcgacccggggctggtgtacgacatcgcggcggcggactacgtggacttcctctgcgccaacaactacgaggcggcgcagatcgcggcgctcaccaggcagcacgcgtccgaggggtgcagcgccaaccgcacctacgcggtgaccgcgctcaactacccgtccttctccgtggcgttcccggccgccggcggcacggcgaagcacacccgcacggtaaccaacgtcgggcagcccgggacgtacaaggtggccgcgagcgccgccgccggcggcaccccggtgacggtgaccgtggagccgtcgacgctgagcttcagcagggccggcgagaagcagagctacacggtgagcttcacggcgggcgggatgccgtcgggcaccaacgggttcgggcggctcgtctggtccagcgaccaccacgtggtcgccagcccgatcgcggcgacgtggacctaatggctagcggcggccgtaccgtagcaatagcgagataaaatcccgattgggggacggcaatggcgagcgcgcgccattctcgaatgcgagagagatggcggatatcgtcgaggatgtgctgttgtattgtgtgcatgagtccgctccggtgtgtaagctgccggtgtagtgtaatctatctgtagctgacccgattgtagcgatgcagcaattaaatctcaaaagggttgcagacttgagcacttcttcgaaaatgatccgaatttgaacatggataatgaa

SEQ ID NO: 96114 - DNA, 354 bp, Zea Mays
tttttaccgacggtggagcagtggataacttcccccatggcgagatgtggctccacagggaggcctactcgacggcgagcgcgcgcgccaccccacgaccatcccagagcttggcaaggcccagaatacgcgtggacctatcccgagggccagatgctggttagccggagtttggacgacggatccaactctctctatctcttttcttgccagcgattgatcctcagttctcgcctatatagccatggctatggaccagataacgacggggttggtggcagatcccgacacacgcggcgtggaatcagatttggttaggattctgtttgagttgcgctcgatgggaagaagaac

SEQ ID NO: 96115 - DNA, 100 bp, Zea Mays
tccttgagagttgcttcattatttgtgatgattgtcctattttttcatattttcatagctgattggtgggatcaatatggtggagactacccagaattac

SEQ ID NO: 96116 - DNA, 1711 bp, Zea Mays
ggtcatcccaggtcccagtccaccggtatcctcacgcagccacgctaaattcgtctccacctcctccctcgtgacatcgtctcgcacggtcgctcccacctttccgcccgccgaaaccctagcccgccccgcctcgccgacggcgatgggcgctgcatgatcggtgcgtccccttggaaccgcctgccttctggcatcgccaagcccgctgccgcggctgccgtcgtcgtagcggcgctcgcgtcctccttcctcgccctcccgcgtcctcgcgccgccccgcccccagcgggatccgggcccctcatgtcgaaggcaaaggtctacaccgacgtcaacgttctgcgtcccaaggagtactgggactacgaggcgctcaccgtccaatggggtgagcaggatgactatgaagttgtcagaaaagttggaagaggtaaatatagtgaggtctttgaaggcatcaatgttaacaattatgagaaatgcatcattaagatccttaagcctgtcaagaaaaagaagatcaaaagggagatcaaaatacttcagaatctctgtggaggtccaaacattgtgaagttgcttgatattgtcagagatcagcattcaaagactcccagtttgatatttgaattcgtcaacaacacagacttcaaagtcttgtaccccacattgacggattatgacatccgctactacatatatgagctactcaaggctctagattactgccattctcaaggcatcatgcatcgagatgtcaagccccataatgtcatgatagatcacgagcttcgcaaacttcggttgatagactggggcttagctgagttttaccatccaggcaaggaatataatgtccgcgttgcatcgaggtatttcaagggacctgaactccttgttgatttacaagactatgattattctttggacatgtggagtcttggttgcatgtttgctggaatgatatttcgcaaggaaccattcttttatggccatgacaaccatgaccaacttgtgaagattgcaaaggtccttggaacagatgggttgaatgcttatttgaacaagtatcacattgagctggaccctcaacttgaagctcttgttggaaggcatagtagaaaaccctggtcaaagttcatgaatgctgataaccaacatctagtatcacctgaggccatagattttctcgataagctcctgcgctatgatcaccaagataggctcactgcacgtgaagctatggcacatccctacttcctccaagtcagagctgtggagaacagtagaacgagaccacaataatcgttgtctacaccctcgaaatgaagttgttgctaatttctggaacatcataggctaaaaccgttcaataagcatctcgctccaggaatctgggccatgactccgtggcagtgaatcagatagtatgggtcgcatcatgtgggcaaccttggcagatgtttttattgttgtctttaatcttgggactactgtagctttaaacctacaggctgtgcttgaatgacatgatattcatatcatatcgtctcctgtggtgggatatgaaattgtatgttatctttaaacataaacatactggttgtattatggtgtgctattatgtatgtatgattcttatttattttgtgtgatattgtgatgaaatactcatggatctcatagatgacatgagtttccggataga

SEQ ID NO: 96117 - DNA, 1195 bp, Zea Mays
atacaatgatcagaaactgagagtggcaagcgccaaggagtagttagagctcagtagggatacagtttgtgagtcacttctctgacatcctccatcgggtaccagttacactagatcgaaaaagacagagtgagaagcactactctcacaatgcccatggagcgagcattcaggcactgcgataaagacacgctgaaggtggccatgctgaagcatgaagagactttcagacagcaagttcacgagctccatcgcttgtacaggattcagaagcttctgatgcgagacctcaaacgggggctcaagagccagaggaacctgtccacctcgccgaacggcagctgcaccgagtacaacagaggggccctcgccatgtgcgcctacgactacgagcaccgctacgctgctcgcggccgcggcggacacgtagcagcagcgacgccgacgccgcgccccgctctcagcctcgacgtcgcggcgccggtcgtcgagtacgtgcggagcgcggaggaggaagaggacgacgacgacgaggcggaggaaaccgacgacgacgcggagctggagctcacgctcgcggtgggtggagccggggccaagaagaggtacggcgagtacccgtccggtggggagagtctctcgtcgtcgtcgacggagtccgacgtgctcaccgtctccggccgtgactggcgccaggggcacggcacgccgtatcacaagaggaggccggcgaccgggctggaagtggtgcaggtggaggacggcgtcggggtgcagccgccgccgccgctgctgttccactggctcagcctcaagatggcatgacgcgatgagaggaagcaagagcacgcattgcatgtgttccttagttgctgcttgtagtgtcagggcgttgacttgttactgttcttcagttgaatgcttctctgcgtgttcaggtttagtcatggatcaagtctagaaatcaataattgactggtttgttcaagagaatatgtaggagagtcatccaaaacaggggatgtgggggcttttcagatgaagttgtgactgcctttctgctaacccaatctgctagtgttagcttctggcttctgctctcatcgacggccgtgatactgcaagagttcgataggaaaataataatgagcaattccaacattcttttatggatcaagtaaactacataaataaa

SEQ ID NO: 96118 - DNA, 1068 bp, Zea Mays
atacaatgatcagaaactgagagtggcaagcgccaaggagtagttagagctcagtagggatacagtttgtgagtcacttctctgacatcctccatcgggtaccagttacactagatcgaaaaagacagagtgagaagcactactctcacaatgcccatggagcgagcattcaggcactgcgataaagacacgctgaaggtggccatgctgaagcatgaagagactttcagacagcaagttcacgagctccatcgcttgtacaggattcagaagcttctgatgcgagacctcaaacgggggctcaagagccagaggaacctgtccacctcgccgaacggcagctgcaccgagtacaacagaggggccctcgccatgtgcgcctacgactacgagcaccgctacgctgctcgcggccgcggcggacacgtagcagcagcgacgccgacgccgcgccccgctctcagcctcgacgtcgcggcgccggtcgtcgagtacgtgcggagcgcggaggaggaagaggacgacgacgacgaggcggaggaaaccgacgacgacgcggagctggagctcacgctcgcggtgggtggagccggggccaagaagaggggcacggcacgccgtatcacaagaggaggccggcgaccgggctggaagtggtgcaggtggaggacggcgtcggggtgcagccgccgccgccgctgctgttccactggctcagcctcaagatggcatgacgcgatgagaggaagcaagagcacgcattgcatgtgttccttagttgctgcttgtagtgtcagggcgttgacttgttactgttcttcagttgaatgcttctctgcgtgttcaggtttagtcatggatcaagtctagaaatcaataattgactggtttgttcaagagaatatgtaggagagtcatccaaaacaggggatgtgggggcttttcagatgaagttgtgactgcctttctgctaacccaatctgctagtgttagcttctggcttctgctctcatcgacggccgtgatactgcaagagttcgataggaaaataataatgagcaattccaa

SEQ ID NO: 96119 - DNA, 501 bp, Zea Mays
atgtggccggagcttgcagcgagggagtggcacgccggagctgcagcggactgggagcttggacggggagcagtggacaccggagctgtagcagacgcaggagcagaacgtcggtcggccggggagcagtggagaaccgaagctggacacaggagcagaactccggagtctggacggggagcagtggagaaatggagtggaacaccggacgggagcagtggacgccggacgcaggagcgacgagcgagtagctctaggcggcggtcggacggggagcgtctagctctagggttgcctggtcgccggtcggagtggcggctgtggactcaaggagggaaggaagaagttgtaggtacatacattagagctgatgagttggcaatggtcattatctcagcggaagaggtaaacgcacttgtagtcgatgcagtccctggcgacaatggtgccatagacttggatggggaggtcgagatccgaggatgcaatcttgatagatag

SEQ ID NO: 96120 - DNA, 448 bp, Zea Mays
cttgaacatgccgctctataaggaaataaaatgcacaactaattagcatgcatgacaatggttaatcaattacaccaacttttcatatattactataaacggtgcatcacccccgtatatatatagatgaacaccagatttttaatgaagtgatacagctttattttctagcaaggagatgaggaacatatactgcaactgtacaacattctagtcaggcattgtccttcaccatgctaccatctccactatcatcttccataaaaatagtcgaggatggatcactctttgacattttctcatggccttctttaaaaccagggagcatatcagcaattcaggttaagcgaaaatacatgctttacaaacaaagcaatgaagaaccatttgttatgaactatgtcactgttcacacatgaccatgataaagacaaacacatatgtccca

SEQ ID NO: 96121 - DNA, 1469 bp, Zea Mays
atggcgtcgacgaaggcctgctcgaaggcggtggcgttctgcgcccacgccaccacggtgggctgcgaccgcgcgtcggagaagagcacctggtcggaggcgaagagcccccggccgtccaccaggttggcgaagtactggttgtcgaaggcctgcggcgtcacggggtccagctgcagcgcgatgttggggtccacccccgccgggcacgccgcctgcaggtcctccgcgtacgtcgcgttcatcgtcgggtccaccgactgcggctggatccggtccgagaacgtgctgcagtgcgcgaaccccaccgtgtgcgccgcagataaagcaatcatgtcggcctgcgacaggttgttgagggcgaaaatgctcgtcagctggtccaggttgaaggacggcggcggcagcttgccgtcgacgttggtggacatggacaccagcccgtccagcctccccagctccaccgcgtacgacggcccgccagcctgcgcgaaccgatcgaggatcagagagcctgtaccctgtagtgctgctgtcctactacgctacgctttactagtaggctccgcttccgcatcccaggggaatcctccaaagttcgggagctttgggggtccggaagaagaaaggtgggtgcgatctgtgccgggcattgattggaccgcgccgcgtgtgctaggagaggacgtgtggtatggtaccagctcaatgacgtcccgggtggccagcgccaggatgtcggcgcacgacacctggttggcgcacgccggcacggcgtccacggccgccttggcctggatgacggtgtcgaagccgtcgccggccagggagaggttgctcgggtggtccttctccgccgtgttgttccccgtggacaccaggatcaccgacgcgtcgcagccctgcatgcacgcgggaagttgaagcatcgccagtcgccccggtccgtcagaaacacaggcagtcgtcgaggaagaggaagaggaagcgcgcacctcgacgaagcagtcgtggaagaagaggcggatggtggcgcccacggcgacgggctgcgcctgcaccttcttggacaccgcggcgcgcacgatgctctccaggtccgggcacaccgccgcgtagtagtcctgccgcagctgcgccgtcacgccggcggtggctgccgcgagcgccgccaagagcgccgccaggaccctgatcccggcgcccatgctgctgcgcctagcctggtccacgcgctccctccctccctcctctgctgccttctccggttctccccacgcacgcagagctcggtcgcccctgctgctgttgagtcttgactcttgagtgagtagtagtgtctcctcgcgctcggcaacagcagcagcgtctcactccccactcttgcagtcccagcggccgggtactgccgcgagtgatggcggctggtgaggctgtcgagcgctgcgcttgtggctgcagctggtggc

SEQ ID NO: 96122 - DNA, 1713 bp, Zea Mays
tcgcgtcgcccacgactcgtcgtacacccggtcttccctccgtcgccgatttcgttccccttcccctacccctgtcccgatcgcgcagctacggcgaaaccctagcgacgaattccccgccgaatcgaggattccaagtaagttatgcccccccttgcactccattctgcctcaatttgttcggtgccttgatggttcggttagatctgagcaccccgggcttgcatcactagggttccgaccgcgccgagcgcggggaccgcattccgggaacgggtgatggtgacctgccgcaagatggcacgcgtcgacgtcgccgagctgaagcagcgcctggtgaagcggctgggccgggagcgggcggccaagtacttcgcacacctcaccaggctgctgaatctgaagctcaccaaggtagagttcgacaggctctgcttcgccaccatcggcaaggacaacatcgcgctgcacaacgcgctcattagggggatcataggcaatgctctgtcgggagtgcctccgcccagccggcaggcggtgacggggcagtcgggcaccaccaccgccccgagcgggcagtgcgtgggcgtcgcgctgcccgtggtggggaatgtgggggcagtggtcgattcgggtgatggtgagctggcgagggagcttggggcgccggttgggaaggtggtgtccgtggaagatggggaggaggtggagcagatcaggtctgttccgtgtgtccagagccggagcccgataacacagcccttggggatttcagtcgctgggggcagtggtacgagggtaaggaggaggctggatgatcctttggtgtcatgctacgattgtggacatttgctggatacgggctctctgtgcgaggatttgcatcggcgactgcacagtaccggcactggagtgacggtgcaagctgtcgatgctttgaaccgtggattagatgagttgttgcgaaggttgattaaaccgtgcatggatttgtcgagggtaagagccagcagtagaagaattagcaaagtcaatgaaaaggttgctggtagagtgaattcattgcaacaactaaatcagggtcagcgtacaacgatgcaagattttgcagttgctgtgcaatctgatccacatttgcttggtccaaattggcccacacaaatcgagaaggtacaggcaatgtcatttggaggagaatgatacatagtggcctgttatagctgatgaacatgaacttctctaaaggagatgctgtttgctggcattgaagtaaatgaaacggcagaccaacaccatgactacaaaatctgagtattgcgttgctcacaagcaggagataccaaggcccaccaggtgaacaaagggagatgcaatggacagtgtagcataatttcttccttgggaatctagcctgttgtcaataaatcgaagaatcgatagggttggctgatgttcaggccaagctaagaaactcgtcgacaaacataccctcagctcttggctcaaaaaacatgttctgatagtacttttagagatttgttgtgacgttgtaatagagcattttccccttattagatttaaatggaatcatttttctcagtgatcataaatgatgccttcaatggctcattgctcctgtacattgtattcagattatggcaatgatcacttgcaattaagataaaagtttaaccctgttggataaatatataa

SEQ ID NO: 96123 - DNA, 1607 bp, Zea Mays
tcgcgtcgcccacgactcgtcgtacacccggtcttccctccgtcgccgatttcgttccccttcccctacccctgtcccgatcgcgcagctacggcgaaaccctagcgacgaattccccgccgaatcgaggattccaaggttccgaccgcgccgagcgcggggaccgcattccgggaacgggtgatggtgacctgccgcaagatggcacgcgtcgacgtcgccgagctgaagcagcgcctggtgaagcggctgggccgggagcgggcggccaagtacttcgcacacctcaccaggctgctgaatctgaagctcaccaaggtagagttcgacaggctctgcttcgccaccatcggcaaggacaacatcgcgctgcacaacgcgctcattagggggatcataggcaatgctctgtcgggagtgcctccgcccagccggcaggcggtgacggggcagtcgggcaccaccaccgccccgagcgggcagtgcgtgggcgtcgcgctgcccgtggtggggaatgtgggggcagtggtcgattcgggtgatggtgagctggcgagggagcttggggcgccggttgggaaggtggtgtccgtggaagatggggaggaggtggagcagatcaggtctgttccgtgtgtccagagccggagcccgataacacagcccttggggatttcagtcgctgggggcagtggtacgagggtaaggaggaggctggatgatcctttggtgtcatgctacgattgtggacatttgctggatacgggctctctgtgcgaggatttgcatcggcgactgcacagtaccggcactggagtgacggtgcaagctgtcgatgctttgaaccgtggattagatgagttgttgcgaaggttgattaaaccgtgcatggatttgtcgagggtaagagccagcagtagaagaattagcaaagtcaatgaaaaggttgctggtagagtgaattcattgcaacaactaaatcagggtcagcgtacaacgatgcaagattttgcagttgctgtgcaatctgatccacatttgcttggtccaaattggcccacacaaatcgagaaggtacaggcaatgtcatttggaggagaatgatacatagtggcctgttatagctgatgaacatgaacttctctaaaggagatgctgtttgctggcattgaagtaaatgaaacggcagaccaacaccatgactacaaaatctgagtattgcgttgctcacaagcaggagataccaaggcccaccaggtgaacaaagggagatgcaatggacagtgtagcataatttcttccttgggaatctagcctgttgtcaataaatcgaagaatcgatagggttggctgatgttcaggccaagctaagaaactcgtcgacaaacataccctcagctcttggctcaaaaaacatgttctgatagtacttttagagatttgttgtgacgttgtaatagagcattttccccttattagatttaaatggaatcatttttctcagtgatcataaatgatgccttcaatggctcattgctcctgtacattgtattcagattatggcaatgatcacttgcaattaagataaaagtttaaccctgttggat

SEQ ID NO: 96124 - DNA, 475 bp, Zea Mays
cacgatcgacgctggcgccgcatcctcctccatgggcgtgtgatccacattcgacgccgcaacctccatgtgcgcgtgctgtggggaattgatgaagcctcggctgttgctggtgctgcggcggcgcgatgtgagcctgtggattgcttccagttccagggctcaaaacccctaaggtcgtgcccgcggtttaatagaggcggacagcgaacgcctggcgacacgtggcgccccgcccgtccccaacataacggtctcaccccgtgttcttgtagtcctctacgcttcctctacttggtcacttgtccttcttcgctccgtagattctaactgggaacaagagtggcatcgccagcgttggtgtagggcgctatctcagttcgcaccctatttttcggggcttgttttgagtctcgcatgttacctattttcatcagatggttattattgcctcccctccatgcgcccatatcat

SEQ ID NO: 96125 - DNA, 423 bp, Zea Mays
atggaggaggcggcatcgaaggtggatgatcacgcgcccaaggaggatgcgacgccggcgtcggtggtggaggtggatgcggtggagctggaggtggccggcattctgaccaacatgaaaaggctcatgcggtcgcgggaccggcgggaccggcgacaggagcgacgggaacgtcgggagaggcggcgcgagcgcaagcaagcaagcgccgcggccgaggccgcagccgccgtccctagagttgacaccccgctcgcatacccgcggagcggcggggacgacgcgccgacgaaggacgccgccgatcgcccacgggaccaggcgagcttgggccagcacccggcgaagatgatagtttggagactgaaattccctcccggatccaaagtgattaagggaaaacttagttcgtttatctcctag

SEQ ID NO: 96126 - DNA, 1979 bp, Zea Mays
ctactgatctaccagatcggcggccgcctccaacttaattgtgggcctcggaccctctctttgttcttccgtttccaccctctctctcgtggttctcccgtgctctgtgtccgtagcggcgacgactgggcgatcgccgccgccttaagccaggtgctcaggtctgccacttggcacttcgccggcgacgagcacctaacagagagatggctggtggttttcgagtactgcatcttgtgaggccatttctggctttcttgccagaagtacagagtgctgataggaaaataccattcagagagaaagtgatctacacggtcatttctctcttcatttttctggtctgcagccagctcccactctatggcattcattcaactactggcgctgaccctttctactggatgcgtgttattcttgcatcaaaccgtggtactgttatggaactgggtatcactccaattgtaacatctggaatggtgatgcaacttctagtgggatcaaagattattgaagttgacaacagtgtgagggaggatcgtgctctgctaaatggtgcgcagaagttgcttggtatccttattgccattggagaagccgtggcgtatgttctctctggaatgtatggcagtgtgagccaacttggaactgggaatgctatcctcattatacttcagcttttctttgctggtatcattgtcatctgtctagatgaactcctacagaaaggctatggtttgggatctggtatctctctgttcattgctacgaatatctgtgagaatatcatctggaaggcgtttagcccaacaaccatcaacagtgggcgtggtgctgaatttgaaggggcagtcattgcattgttccatctattgattactcgcacagataaagtccgtgctctacgcgaggctttctaccgtcagaatcttccaaatgtgaccaatttacttgctactgtattggtcttcctcatagttatctatttccaaggtttccgtgttgtacttccagtgaggtcaaagaatgcccgtggtcaacaaggctcatacccaatcaagttgttctatacttccaacatgcctatcattctgcactctgcactaattaccaacctctatttcatatcccagcttctctacaggaaatacagtggaaatttccttgttaaccttcttgggaaatggaaggaatctgagtactctggccattctgttccggttggtggtcttgcttactatgtgactgcgccatcaagcttggctgatgttctggcaaatccagtccatgcattgttctatgtggtctttatgctgtcagcctgtgctctcttctcaaagacatggattgaagtttctggttcatcagcgaaggacgttgctaagcagctgaaggagcaacaaatggtgatgccaggccatcgtgagtcaaacctgcaaagggaactgaacagatacatcccaactgctgcagcatttggaggagtgtgcattggcgcgctaactgtcctagctgatttcatgggcgcaattggctcaggaactggcattctgctcgctgtcactatcatataccagtactttgagacattcgagaaggaaagggcaaccgagcttggtttctttggtttctaatcttcgtcgctggggtaaaagactgaatcttcctgcaagtgacagtaaatgcttggccggctgtttatgtttgtaattggagagcttatagtcagtttaggttgcgggctaatttacactgggaaatttgtagcaggttctgcatgcgtttttggggccaggatgggcattaagttgtgctcaattataaccacggtcatcatctcttgggattttccgttctcctgtattgactatagaattttggatcaattttgccgtcttgaactgaatacttattcattactatccacgtgattggttgcccaaccaaatatgcgaggctccagacgcaccgcatgccat

SEQ ID NO: 96127 - DNA, 1457 bp, Zea Mays
ctactgatctaccagatcggcggccgcctccaacttaattgtgggcctcggaccctctctttgttcttccgtttccaccctctctctcgtggttctcccgtgctctgtgtccgtagcggcgacgactgggcgatcgccgccgccttaagccaggtgctcaggtctgccacttggcacttcgccggcgacgagcacctaacagaaatggtgcgcagaagttgcttggtatccttattgccattggagaagccgtggcgtatgttctctctggaatgtatggcagtgtgagccaacttggaactgggaatgctatcctcattatacttcagcttttctttgctggtatcattgtcatctgtctagatgaactcctacagaaaggctatggtttgggatctggtatctctctgttcattgctacgaatatctgtgagaatatcatctggaaggcgtttagcccaacaaccatcaacagtgggcgtggtgctgaatttgaaggggcagtcattgcattgttccatctattgattactcgcacagataaatgaggtcaaagaatgcccgtggtcaacaaggctcatacccaatcaagttgttctatacttccaacatgcctatcattctgcactctgcactaattaccaacctctatttcatatcccagcttctctacaggaaatacagtggaaatttccttgttaaccttcttgggaaatggaaggaatctgagtactctggccattctgttccggttggtggtcttgcttactatgtgactgcgccatcaagcttggctgatgttctggcaaatccagtccatgcattgttctatgtggtctttatgctgtcagcctgtgctctcttctcaaagacatggattgaagtttctggttcatcagcgaaggacgttgctaagcagctgaaggagcaacaaatggtgatgccaggccatcgtgagtcaaacctgcaaagggaactgaacagatacatcccaactgctgcagcatttggaggagtgtgcattggcgcgctaactgtcctagctgatttcatgggcgcaattggctcaggaactggcattctgctcgctgtcactatcatataccagtactttgagacattcgagaaggaaagggcaaccgagcttggtttctttggtttctaatcttcgtcgctggggtaaaagactgaatcttcctgcaagtgacagtaaatgcttggccggctgtttatgtttgtaattggagagcttatagtcagtttaggttgcgggctaatttacactgggaaatttgtagcaggttctgcatgcgtttttggggccaggatgggcattaagttgtgctcaattataaccacggtcatcatctcttgggattttccgttctcctgtattgactatagaattttggatcaattttgccgtcttgaactgaatacttattcattactatcca

SEQ ID NO: 96128 - DNA, 492 bp, Zea Mays
ctactgatctaccagatcggcggccgcctccaacttaattgtgggcctcggaccctctctttgttcttccgtttccaccctctctctcgtggttctcccgtgctctgtgtccgtagcggcgacgactgggcgatcgccgccgccttaagccaggtgctcaggtctgccacttggcacttcgccggcgacgagcacctaacagagagatggctggtggttttcgagtactgcatcttgtgaggccatttctggctttcttgccagaagtacagagtgctgataggaaaataccattcagagagaaagtgatctacacggtcatttctctcttcatttttctgtgggatcaaagattattgaagttgacaacagtgtgagggaggatcgtgctctgctgtaagtgttgttgggtagtatagacatcaaattctatatgtattggtggatgctttgattatccatccttttatcaattgactgacattgagaact

SEQ ID NO: 96129 - DNA, 1765 bp, Zea Mays
gtcgtcgttctcgttccaccgcaccgcaccgctcagctcagcggcaggcaagttgtgctgcccggcttcccctttgcatcctctccgtgtcttcgcctccacgttgaccacgacctcttccctgcagccctctcgccgcctccgtccaccacccatgcacccacccgaacgagactactcaactcaacgtctcaacccaacccgtctctagccgccactccaccggcttcccacccactgccgccgcgcccccacctgtgactgtgccgcgtgcgtgcccacgccgcgaccacctcactacccccacctacgacgcaacttcccacgccccatcacacacccgccaccgctttaaaaccctcactcccctcactcatcacactcgcacagtctcaccacagcgagcgagagcaaggcgcccaagcaaccaccgcgagaacaagtcgcagccaaacagccccgtctcccagcgaagcttgagcttgcattattctaccatgtcttccatggagctgctccacgccgtcgtcccggagaagcagagcgaggaggaggtcgcgcccgcagcgacgaccacgagcagcagcgccaccgccacgggcggggacgagggcgcccacgtgccccaggggtgggccaagaggaagcgctcgcgccgccagcgatcggaggaggagaacctcgcgctctgcctcctcatgctctcccgcggtggccaccaccgcgtccaggcgccgccaacgccggtcccgtccgcggcgccggccgccgcggagttcaggtgctccgtctgcggcaagtccttcagctcctaccaggcgctggggggccacaagaccagccaccgggtcaagctgccgacgcctcctcctcctcctactgccgccgctgtaactgtctcggcagcagtgcccgtcccggaggcccccgccccgatcaccgtcgtcgtcccgccgctgccgccagtcgaggtcggccgcgagccggccacgtcatccaccgccgcgtcctccgacggggcggcctcgagcagagtccacaggtgctccgtctgccacaaggagttcccgaccggccaggcgctcggcgggcacaagaggaagcactacgacgggggcgtcggcagcgccgccgcgtccaccgacgtcccggcggcgcccgccgagacgtccgccgaggtcgggagctccgccgcgcgtgcgttcgacctcaacctcccggccgtgccggagttcgtgttccggtgcggcaagcccggcaagatgtgggaggaggacgaggaggtgcagagccccctcgccttcaagaagccccgcctcctcatgaccgcgtgaaaccgctgcgcgcgcgggcggcggatctcatctcatcacccgtccaagattttggtccgcagctgccgagttcagcggtggaagtggaacacactattcgttcattcatttcgtatggtgccagtagcgctattgtttgatttttgtggctgctcctcttgtacagtaccgagtgcgagaaaagatgcatagtcatcgtatacataccaatacaataccgtacctataggtcttcctattcctgtggaagagtagaacttgtatccttattagctgtcagtacactacagttcatacacacttggttctcattatcagagatcattggtgaattagtggttttgtatcataagcttattgtaaatgatggattggagattagtatggaatcagatacccatttgttccatgcctggttcaagtctctgtag

SEQ ID NO: 96130 - DNA, 668 bp, Zea Mays
ttatattttaaaggaaaaaaaagagtatccaacatttctccatagcatctctctgttcttcggcaggtgcaaaactgagcggttgagacggaaatttgcgccaggcttcctcccaatcctgtgtattttctgctcgaacgctagttgcctcgtcgtctccgtcgcggcgctggccagatggtgtaggcgcagccgatgagggcgatggggccgaggacctagtccatctacagcggagtagccgagggcgcgagacgcgagcgcgaggttgcgcatgagcgagcaacgtcagggaccagggtggcggacggcggacgctgggcggcgtcgcagttggctacaggcgggcgctcggcgcctcggcgtgcagtgcagcagagcggtgatggcgtcgtgatgcactgctgctacaaactaggtggggtccttggggacatgggatttcaagctatcgttcttgaactgctggtgctgcagtgctgctaggattcacttgctgtttgattaggagctcaagctactgggaggagcgctttaggaaattaaatagagttgttggagtatagacttttttttattaggagtaacgtttttttaaggatgtcctagtacctacttattgggtcatattattttttagaagctgttagagatgctctaacatgtta

SEQ ID NO: 96131 - DNA, 696 bp, Zea Mays
ggtggatttggatagcgcggtgcagaaaaaatggcggcttcagctctccacctctgccgcctccccaagccacggcaggtgtgaagcttcagcagaggcagttgcgcccgatgagccatgcagggtggtctatctcaaagatttttgaaagttgtttcttattatggtctcacgactctgccatataaactggtctgtaagcttgttggtgccaatctcagaaggatgctctggaaccttacatgagaaagagaacagttgaacttcactagggtaagcaccatcaagattacgtggatggcttgaataagtagctggctaccagccctctgtatgtatatacaccctggacgatctgataaaagaagcccacaacaatggtctcgaatcatcactttttctgggaatcgatgcaaccagaaggtggtggcttacctgagggaggtgtgctatagcagattgaaaaggattttggcttgtttactaattttagggaagagtttattcgttcagccttacaactattggggtctggttgggtttggcttgcttgtaagtttctttctattttctttgaagtacagacaccaccggttcaaactaccgatttcctgattgctctttctaaagctaatattctgctggatatttgttgcagtgaagagaaataagagaaagctttcagtagttcataca

SEQ ID NO: 96132 - DNA, 3397 bp, Zea Mays
aagaaaattagacttttttacacgaagctattcacaatatatcgcacattttctatttatactatttttttattcttagaaaatttttgatgtttttttaaggatctcgactgaagcatctcacaccttttttaagcataaaagatttgtagattttttccttttccttttttctttcactataatctattctagtctattctcgtattattttactctcccttcttggattctttcgatgaagaattatcttcgatttttttattttgactcgattgaaattaagtggatgcagtgaaaacagaagttgatataagagccaacaaaaacaccaacaaaaacgaggctgaagggaaaagctgcatagagaccacgaaacaggaaggaaagcgtgtaggcgtgtacagtgcatgtacagtgcacactacgtgatgtgtgtgcatcggaggggcattgactcgctggactttctttcccccaaagccgcgtggccgccgaggcgccgatagccaccagacgggagctgatctcccagaaaacaaccaaccaaccccgacccccgagaccagtgagtaactaaaaaaaaaaaagccaaaatggcggggggaggtcgtcgtctcccctccctgcgatcccctccatccgcgacgccatctcggccacttcatgatcactagggtttcgctcttctacccataagccctcgtcccgatgcgctggtggaagcgctcctcctccccctcctgccccgcctcctcatcctcagcatcgacccccgcttcccccgcccgcgcctccaccccccgtctcatcggcggttggggtagcggccctagctcacgccgcgatggcagcggggccagcaacgatccgcagccgcggctgatcagagcgcggcggatgcgctacgtcgtcgatgacctcgaggtcggggtctccgcgctcggcgtggactctccggcgaggagggacgcggcggcggggtttgcgcttgagacagtgagctccgcgccgatctcgtggtctccgagcaacatggaggtggcgccggcgagatcctcgtcgacccccgtgctgctgccgcatccgctgccccttccaggcgagggggaatcgccgtgccgcgggccggggaggccgcttccgccaccggtgccaaggatgctcgacggggaggggaaagggcctgcagcggacgctcccggtgttttagagactgggagccaaaggatgacgccgttactcgcacggagagtggcggtccaaactctaccaaaggctcatgagcacaacgactttcggttaaatgggactacctgttgtcagcggagaaaggcttttaaagagaagttccaggataagaactgtgatgaaactttgaacttcagattgaacattcctgctaaaagtgctccaagcagtgggttttcaagccctgtacaaagtcctcgaagactgagtaatgtagatttctcatctgctgcaatctctatccaagataccaatgtatggtcagcacggtctctctggtcttctgatgcgatgggatcttcacctccttgtgattcacctgacaagtttgcaggtggtcaggagcgttctcctctctctagtccactgagaagtccagttttaaaatcaagaaacccaagtgcacctccatcaccaatgcatccaaagttgttcccggagaaccatgtttctcgccctgatggcaatggaagtgctagttttcacccattaccgctccctcctgcttctgtaagcccaaagcagacaaatgctagccaccagttagttccaaaagctgagatgccttcggtggctggtcaatggcagaaaggaaaactcttgggtagtggcacctttggatgcgtgtatgaggccaccaataggcacactggagctctttgtgccatgaaagaggtgaatataattccagatgatgctaaatcagtcgagtctctgaagcaattggaacaggaaattaagtttcttagtcaatttaagcatgaaaatattgtgcagtactatggcagtgaaactatcgaagatagattctacatatacctggagtatgttcatcctggttcaatccataagtatgttcatcaacactgtggatcgctgacagaagcagtcatccgtaacttcacacgtcatattctcaagggtcttgcttttttacatagccaaaagattatgcatagggatatcaaaggggcaaatttgttagttgatattaacggtgtagtgaaattggctgacttcggaatggcaaagcatttgagtactgcagctcctaatctttcattgaagggaacaccatactggatggctcctgaggttgttcgggctacactcgataaaagtgcaggttatgatcttgctgttgatatttggagccttggctgcacaatcattgagatgtttacaggaaagccaccttggagtggtcttgaagggccggctgcaatgtttaaggtgttgcgcacggacccaccaattccagataacctgtcccctgaagggaaggattttctgagatgctgcttcaagagaaaccctactgagcgaccaacagcaaacaagttgctcgaacacccatttatccaaactttgaaccactacagcccacatagcgttgtacattcattttcgggaattaaatctccagatactgtgcacagcagtgcaagagataaagtaccctggaaaagtgattcatatatgagagggaaacatgcaaatggtgaaacaagcagtgctcggtcgtcagagtcattggcttatcggttgatgacacccctacccaacttgggaaccaatagtttgtcacctccacctttgagttcggcctccagttctggctctgcagcacatacaccgaacagtatgcatttttcagtcccataccatcagcctagtcctttgccaaagcctaacgggaaggaagcaataaatttggtttcgcattgaataacagcatgccacctatcacaacatctgggcaaagtccacataaacagcgcaagtgtatccgtccctagcgtctgacccttgtactgccagtaatagctaacaattttctgggtcgtgtaaaaataatttccatgtaaagagatcaccgcgatatgatcacagggaaatgctgctaaatgagggagctttgtgaaatctgttgtatcgtttgatttctgggaaactgattggattgcccatgtaacatatttttattagggtgtagctgtaggtgaaactaatggtcaagattgtgccgacaaataggacattagggttgtagctgtagcgtgttgttgatgctgtgtaatgatcatacttgatgtaatcattattgatttttttggggaaggtaataatgcacgtcaattggcaa

SEQ ID NO: 96133 - DNA, 3512 bp, Zea Mays
aagaaaattagacttttttacacgaagctattcacaatatatcgcacattttctatttatactatttttttattcttagaaaatttttgatgtttttttaaggatctcgactgaagcatctcacaccttttttaagcataaaagatttgtagattttttccttttccttttttctttcactataatctattctagtctattctcgtattattttactctcccttcttggattctttcgatgaagaattatcttcgatttttttattttgactcgattgaaattaagtggatgcagtgaaaacagaagttgatataagagccaacaaaaacaccaacaaaaacgaggctgaagggaaaagctgcatagagaccacgaaacaggaaggaaagcgtgtaggcgtgtacagtgcatgtacagtgcacactacgtgatgtgtgtgcatcggaggggcattgactcgctggactttctttcccccaaagccgcgtggccgccgaggcgccgatagccaccagacgggagctgatctcccagaaaacaaccaaccaaccccgacccccgagaccagtgagtaactaaaaaaaaaaaagccaaaatggcggggggaggtcgtcgtctcccctccctgcgatcccctccatccgcgacgccatctcggccacttcatgatcactagggtttcgctcttctacccataagccctcgtcccgatgcgctggtggaagcgctcctcctccccctcctgccccgcctcctcatcctcagcatcgacccccgcttcccccgcccgcgcctccaccccccgtctcatcggcggttggggtagcggccctagctcacgccgcgatggcagcggggccagcaacgatccgcagccgcggctgatcagagcgcggcggatgcgctacgtcgtcgatgacctcgaggtcggggtctccgcgctcggcgtggactctccggcgaggagggacgcggcggcggggtttgcgcttgagacagtgagctccgcgccgatctcgtggtctccgagcaacatggaggtggcgccggcgagatcctcgtcgacccccgtgctgctgccgcatccgctgccccttccaggcgagggggaatcgccgtgccgcgggccggggaggccgcttccgccaccggtgccaaggatgctcgacggggaggggaaagggcctgcagcggacgctcccggtgttttagagactgggagccaaaggatgacgccgttactcgcacggagagtggcggtccaaactctaccaaaggctcatgagcacaacgactttcggttaaatgggactacctgttgtcagcggagaaaggcttttaaagagaagttccaggataagaactgtgatgaaactttgaacttcagattgaacattcctgctaaaagtgctccaagcagtgggttttcaagccctgtacaaagtcctcgaagactgagtaatgtagatttctcatctgctgcaatctctatccaagataccaatgtatggtcagcacggtctctctggtcttctgatgcgatgggatcttcacctccttgtgattcacctgacaagtttgcaggtggtcaggagcgttctcctctctctagtccactgagaagtccagttttaaaatcaagaaacccaagtgcacctccatcaccaatgcatccaaagttgttcccggagaaccatgtttctcgccctgatggcaatggaagtgctagttttcacccattaccgctccctcctgcttctgtaagcccaaagcagacaaatgctagccaccagttagttccaaaagctgagatgccttcggtggctggtcaatggcagaaaggaaaactcttgggtagtggcacctttggatgcgtgtatgaggccaccaataggcacactggagctctttgtgccatgaaagaggtgaatataattccagatgatgctaaatcagtcgagtctctgaagcaattggaacaggaaattaagtttcttagtcaatttaagcatgaaaatattgtgcagtactatggcagtgaaactatcgaagatagattctacatatacctggagtatgttcatcctggttcaatccataagtatgttcatcaacactgtggatcgctgacagaagcagtcatccgtaacttcacacgtcatattctcaagggtcttgcttttttacatagccaaaagattatgcatagggatatcaaaggggcaaatttgttagttgatattaacggtgtagtgaaattggctgacttcggaatggcaaagcatttgagtactgcagctcctaatctttcattgaagggaacaccatactggatggctcctgaggttgttcgggctacactcgataaaagtgcaggttatgatcttgctgttgatatttggagccttggctgcacaatcattgagatgtttacaggaaagccaccttggagtggtcttgaagggccggctgcaatgtttaaggtgttgcgcacggacccaccaattccagataacctgtcccctgaagggaaggattttctgagatgctgcttcaagagaaaccctactgagcgaccaacagcaaacaagttgctcgaacacccatttatccaaactttgaaccactacagcccacatagcgttgtacattcattttcgggaattaaatctccagatactgtgcacagcagtgcaagagataaagtaccctggaaaagtgattcatatatgagagggaaacatgcaaatgggtgagtacatctgttgcattggtctgtttttttgttgatttgtaaatctggtgacgaaaatgttcacgttatttgggactttttgagtattaaccctgctattcttcattctgatagtgaaacaagcagtgctcggtcgtcagagtcattggcttatcggttgatgacacccctacccaacttgggaaccaatagtttgtcacctccacctttgagttcggcctccagttctggctctgcagcacatacaccgaacagtatgcatttttcagtcccataccatcagcctagtcctttgccaaagcctaacgggaaggaagcaataaatttggtttcgcattgaataacagcatgccacctatcacaacatctgggcaaagtccacataaacagcgcaagtgtatccgtccctagcgtctgacccttgtactgccagtaatagctaacaattttctgggtcgtgtaaaaataatttccatgtaaagagatcaccgcgatatgatcacagggaaatgctgctaaatgagggagctttgtgaaatctgttgtatcgtttgatttctgggaaactgattggattgcccatgtaacatatttttattagggtgtagctgtaggtgaaactaatggtcaagattgtgccgacaaataggacattagggttgtagctgtagcgtgttgttgatgctgtgtaatgatcatacttgatgtaatcattattgatttttttggggaaggtaataatgcacgtcaattggc

SEQ ID NO: 96134 - DNA, 682 bp, Zea Mays
atgggagacgtgttgatcccggagctccagcgtgggaacacttctgtgaccatatgcgctcgtgtttctcgtttatgggatttctgtgatcctcaggatgaagcaaagttgctccattgtgatatggtgctgcttgacgaagagggaaacgatgccattggaattgtcacttccatctcggccgtggcgccgcaccgatccagagggcaatatacaaccagctctaagaggactatttccctgtgcaatgtcagtgcgagaaaagcgcatagtcccattaagtggaacgaggttctatcttcgaatcagcctatgcctcatgttcctgaggaacagaaaatcgcttatatcagagatctgcacccatttgagaataaggatagggaattcttggtgacagtcactgtaaaaaagattggtgataggtggtggtacaaactgcttctcactgcaggggatgagacgggtgacacagacttcatcctctttggtcggatggcgcaacacatcatcaagaagccgtgcgatatgctcattgccaacaatccgatcggctttattcctgatccaatcacagatctgctcgagaagacgtatatatggaatgtgagtttctctgaccacacaatcaatactggaaatatttgtttccaggtcaacgcagtcgtggcagagataggta

SEQ ID NO: 96135 - DNA, 686 bp, Zea Mays
ctgacaagggcatgtatttatttcattcaattcaacaacgctgcaaccattcgcgattcaagacaacaggcgggcaacgaatatggtatgtatgtatgttatctatataatatctcattctcagggcgaaaattttgggacctgcccagaaattaaaagtcaggaagccatcagctttccatgtacgtacatgacaaacaaacaatccaacccatgatcagttgagctcttgggcgcacgcactacaacctctctcaagactgatgaatctgttattgccacagacgggcaagcagaagccgcgacgctatctctacactctcatccgtcgaacgcggcctttacacgtatttccggctgtagccttcggacttgtcgtcctcgtcgctgctgctgctatcgccgccgacggtggccgctacaccggatccagagaactgaagcgggccctggggagacccggactgcgagctgctttgctcctgatgaggaggagcccagaggccgcccgccagcatgaccgactggctcaccggagccacgacgccgggggatcttctgttgtgcagccggtacttctgaaatacgaacacgacacgccgatcgaatcagtttccaaaacaagatgctatatcatcgccttcgtctgaaataggcaccggcgcggcgctactagaaggaaataa

SEQ ID NO: 96136 - DNA, 1655 bp, Zea Mays
caccccagcccccatcctctgattcataccacaaagctagaacctgaaagcagccagccacaccactccgctccactccacctttgccatctccaagaaagaacccagcctcttctgcttcaagaagccttttttgatcctgagttatcgccatccatcaccatgatccaagaactgctcggcggggccgccatggaccagctcaagagcgtgaatgagtccctgcccctgttgctgcactcggtcatctccaacccatcgcccacgtcgtcgtcgtcgacgtcgtcgcgctcgtctgcgcagcagcatcagcagcagcggtcgacgtcggcaacgtcgtcgccgcaagcagggcagcagcagcagcagcagggccaggggcaaggagcggagcagacgcctctgcggtgccccaggtgtaactcctccaacaccaagttctgctactacaacaactacaacctcacccagccgcgccacttctgcaagacgtgccgccggtactggaccaagggcggcgcgctccgcaacgtgcccatcggcggcggctgccgcaagccgcgccccatgcccacgcccgtcacgaagccggcggtctcatgcaaggccgtgggcggcgcgcagtcgctgggcctcggcgtcggcttgggcatgggcgccggccccggaccctgggcgtcctcgcagcaggcggccgccgcgcagctcatggcgctgctcaacagcgccaggagcgtgcagggaggcggcggcggcaacatgcacaggctcctcggcctcgacgccgtggcccacctgcccctccatgtcctgccgggcgcgggcaataatgccggtggcacggcgccgtcgttctggccgcaggccgcgccgcgtgtcatccccgcaccgccgcacatggactcccagctcggcatggggccgctgggccagcacgacgtgctgtcgagcctcgggctaaagctgcccccgccatcgccgtcgccggcggcaagctactacagcgaccagctgcacgcggtggtgagcagcgccgccggacgcggacacgagtacgaaacagccgcctgcgccacgtcactgccttgcaccacggcgctgacctccctcccgccggccgcgtcgagcgtgtccgctgcactggccagcgccgccacggtcgggctagacctcccgctggtctccctctccgcgcccgagatgcagtactgggccgggccggcggcgatgtccgtggcgtggccggacttgcccacccccaacggcgcgttcccgtgagagacaaacatggacctcatctgctgtacggatggcgcagctgtttacccacccacatgacacactagctagtacgtaatcagtagctcgatcacttcagccttcagtgtagctttatcttgccgttaatttgactgtgttatgagtgagaactccactctgggggaggttattaatcaatggtgtttctattactcttgtttttgttcactagtgggagcatgggagtaacttttcttactgttattaatcagagtttttattactcttgttggtaatatctttttctatttatcttctctatatctgcatgcttgtgagctgtatgtagtgtagtagcaatagtagaagtgatccataactttgtatctgttgtt

SEQ ID NO: 96137 - DNA, 2122 bp, Zea Mays
gcacagcacagcacagcaccccgcatctctccccttcctcaccaaccccgccgcctccgacgttcacctcggcggccgccaccggcgaggccgcacctcgccggtcacccacccccgctactcgatattatatcctactccgaggatccgcgtagccgcctccggctgcccacccgcggaactctagatctccgataccccgcgctccctcccgccgacggccacccgaccggaatgggccgctgtcttcagtaaggtctaaggacccaagggaaccctcctccgccttcgctcgtgcgcgaagcgcggccgcgatggcgatccgcattacggtgtcctactcgggctacgtggcgcagaacctggccgcgtccttcggcctccgctgcaccgtggctgcgggcgcaagcgcggcgctcggcccggggtgccgcttcctccaggacgcgctatcccaccccttctgcctcttcgcttcctcccgccgcgccgacccccaccatgacgccgaggatcacaaccacccgaagcccaggtccaaggctctagcccccgccgccgcagcaagaggaggcggccactcattgctgctgccgcggtcgtgttccgggaaggcggcgccgccggtggatgaccccccagcctcgttggccgtggggctgctgtcggtgttcgcgtctgggatgggatcgactggtggcattgctggtgcgtcctcccttgctgcgtcgccgtcaatatcagccgggttcaaccctgcggcgctcctcccgttcttgcaggcgagcaagtggctcccctgcagcgacatagtcactgttgcaacgacgtcgcgcagctcaggacgcccagcaggttcaactgcttcgcctgtaccgcggacaactgcaccatcgccccgtcctacacaacgcgcagccgctccatctccctgccctgtgccatcacctgctgttgctgctccttccaaggtcggcatacaagcattggttggtagtgctagcatcgcctcaggttcagctgagattggaaggggagccattgcctctggtgtggctggaatggtgaagaagagtggtgctagtattcctgctggtgcaggggtgagaaggaagactggttggctctcaaagtgggtgagctcatgctcagatgatgcaaagacagtcttcgccgccgtgaccgtgccactgctctataaatcatccctagctgagccgagatccatcccatccaggtcaatgttcccaacatttgatgttggtgaccggatccttgctgagaaggtttcgtacattttccgggagccagaaattttggacattgtgatatttcgtgcacctccagtccttcaggcattgggctacaactcaggtgatgtgttcatcaagagagttgtggctaagagcggggacaccgttgaagtacgtgatggtaacttgttggttaatggagtagttcaggaggaggaatttgtgctggaaccagccaactatgaaatggatccgctgactgtgcctgaaggctatgtctttgtcctgggggataacagaaacaacagctttgattcacataactggggtccacttccatttaagaacatccttgggagatctgtgctccgatactggccaccatcgaggataacagatacaatatatgagcatgacatagtgcagtacacagctgctgcatcctgatagtacattgtggcaataccacatgctgcaggtccatttttcctttccctgctgacaaagggttatgctgagcctttaggttctttatttactggctgtagccttgcctcaaatgtcgattgcgcagcttggcagacagattgatttttttttcactccctacgggcagatgcttgttcgaaagcaacaaattttctctgtagctaagaatgaatgtcatataaatgttgcagaagtagatgaacgagcatcaatgagtgataaggatgtcagttctcttgttttatgtgacgacatgttgttcaaaacttatgtaaaaaggaaatacaaagcataaaaggctgctcaacttgtgctatgtatctattcattattgcatctaggaccaaagattaaggcaaggtcagcctggtgcaaaggtt

SEQ ID NO: 96138 - DNA, 867 bp, Zea Mays
tctttcaaactcagttgtttgatttcttttattactaggtgagtgtccgtgcgttgcaacgggaacatataataccaccgtttgcatttgagtcgtctaatttagacatattgtaaaggtcttggtgttcaatagaggcgttgagtgcacaaccactggcttgataacctcatgcagagcttgtgcaacttctggtggcccacaataaaaaggaatataatcgtagcagtgcacaggcacaaaaacagtattgatagtatgaaggaagaatcagcactcggtaaagattgggagtcgtggctcctggcatcaccgtccctgcctctccagcaattgaacttgtggcatcttagtcctgttccataggctgagatatcatcactggagatgaaactggaactgagacctgaactgccgaactggcgatggaactgaagcgagcttccacaggcacaagaggaaataccacaatagctagagagaccacaggtgcaggcttgcaggtagggccgcaacaggttgtggatcgtccaaatgttgctgctccatttcttgtgaagatgaacataagagcgaaagttgatcaggcgactaaaaagaaaaacgcaagaaacttcttattagcaaagaaggggtcaagaaataaataaatgtttttatgataataaggagctccaacaaaaatggggtgctacattaataaggaactcaaaactctcatactttagcgtcactatatattactcccgtaccacagagaaggtaacatgtagtgaagaataaaaataatttaggtgtctgcgttgctacgaggttaacaaaaatcattacaaatcattcatcagagttaaatgaatgagttaaata

SEQ ID NO: 96139 - DNA, 1958 bp, Zea Mays
atcgaacgaagaatttagacctaatattgttgaagagatacaattttcaaaagaagttgcttgtggaggttaccatccttttgttgaacagatagctgcgatctgtatttttggggttcaaatgaaaatggctgccttggtctgggctgccatatacacaaaggagagccttttaaacaatgtcttggctgctattcctccaaatcttacaagtgaggagtggtcagctgcattgccaagggcaagggcattagttgctggtttcgtgaaaacagataaagacttccaaacaaaagctatagaggaaagcaatgctcttgccttggctattgttccaacagatggggcttccacaactggtaacactgcatttcaagataaggggtttgatcctacaggatgggaactcgcccttgttactgcacctagcaacacgacttcatctgcgtctgtcggtcaattgggtggtggattcgacaagctcattttggacagcttttatgatgacggggcctacaggcagaggcaacagcaacaggtgtatggttcagcaatgcctaatccattcatgacaaatgatcctttcgtgatgtcaaaccatgttgctcccccaccatcagttcaaatggctgccatgtctcagcagcatcagcagatccccacgatgatgcaaccaaatccttttggaccacctatgcagccacagatcgatttgctggagaacccggcgattgaggatgtcgtcctgctgtcagtgatgctggacgaggaagctaacaaacctccggacagttggtttgatctcaaagtaaacacacatgtctatgtaactggtttgcctaatgatgtcacggtggaggagattgtggaggtattttccaagtgcggaataataaaggaggacccagagactaaaaagccacgagtgaagatttatactgatagagaaaccggcaggaagaagggtgatgccttggtgacatatttcaaggagccttctgtagctttagcggttcaattgttggatgggacaccattccgtcctggtggtaagactcatatgtctgtaagtccagccaaatttgagcagaaaggtgggcatgacgataagaagctgatgattcctgctacagtaattttaaggcacatgttcactcctgctgagctgagagctgatgaagagcttctttctgagcttgaggctgatgttagagaggaatgcatcaagtttggtctggtggataatgtcaaggtttgtgaaaataatccacaaggtgtcatattggatgacccaaaatctagggtgctgctcgctttaagggctgtgataaagtgtatcgaagagtataagcttcagaaggagtattcacttggacctctccaaaagcgtgtttctgagctaaatcccaaggatgcagactacagggtcttcctgatgagcttaaaagctggaggagtcgcgctgaatctcactgtagcatctcatgtgttcctgatggacccttggtggaatccagcggtcgagaaccaagcgcaggaccgtatccaccgaattgggcagttcaagacaatcaagagcactaggtttgtgataaagggcacggttgaagagcgcatattgcaactgcaacagaagaagcagctggtgtttgaaggcaccgtgggggactcgccggatgccatgtcgaagcttacagaggcggacctcaagtttctgttctagatctaaatgctgacgtagttaagcatgagtagggagggcaggctatgctaggactaggagcactgacttgttggaagttggaaccctgacgctgccgctgccatatcaccagtacggacggggtcggcggtgcgtagatcgactgctgatgtgcttgttagaactgatgtaccaattcttttaataaaaaacagataaacttgtggcaagcgtcattgcgtcaggaagttgacct

SEQ ID NO: 96140 - DNA, 106 bp, Zea Mays
ccctacgggcagatgcttgttcgaaagcaacaaattttctctgtagctaagaatgaatgtcatataaatgttgcagaagtagatgaacaagcatcaatgagtgata

SEQ ID NO: 96141 - DNA, 740 bp, Zea Mays
acccggcagcgtgccttcttttctctgtttccgctttcgggaacgaaccgcctatgcctggcctcggcttggacctcaaccttccccccgagctgcaggacgtgtgcaggcgcctcagctacggtggcgccaactccccctcgtcctcgaggacgccgcctctcccgctgatctacgggagccccgaggaattgatgacaccgatatctccgcggacgaccagtgcgctatacccagcgccgggagagacgtcgacgccgacggtccgtgtgcccatggatactgcgcttgccctccgccctcccgcgcagccgcagtctcagcaagcgcaggaggcgggaacggcgaggaggatgtcggagcagcggcgtcataaagaagagcgggcgtcgtttgctgagtatagggctggacgaaatactcgtggctcgataactcgctcgactcggctcgttagtagctcggctcgactcggctcgttttaattttgtagcgagccaagctagcattctagctcggttctctaatgagccagctcgggttagctcgtgagctagctcgcgagccaaacgagctaagccacaacacaagtttgtctagtaattggtgttgtctcatctctcatagtcttgttttctcgttgttatgatctgtgatatggacatgtgtggatgtgtaatgtgcttagatatttgtattattgcatgactacatgtttgtagtgttaaacacttaaaata

SEQ ID NO: 96142 - DNA, 1031 bp, Zea Mays
aggtaggagtaggatctcagtgcagtaacttcgtgccctcgatcgctgggcatataagttatttgcaactagtacttaacaatacttcttcttgtcgggaacagattattgcatgaccgtcgaaggtgacgaatgttgcagctgttgggatgcttactttgaactgaataaacttgagcgagagctgcccaaagaggaaatctcaaggatggtgaaggactcagagggtgacgtgaggtacctgatcgagagcatccatcatcgctcagatttgcggaagaagatagcagagaaatctcgtaattcagtaccatcaggctcccaggggcaaactgcaaagccaaggccgttccccgtgcctgatgggataccgaaaacacaggaagagctcaccgaagaagaggaggcgttgatgccagagtctccatacacaaggttgctgagaaggatgggtagataccctgaatggtacaccccacgccctgatcatgagactgactgaatcaagtcatctaccatccaggtgtcccttttggaagttttgcagcatgataatctgaagctgaagctcgttttatggtatgtggtaatattttagtgttgcacctatgctgctatgcagattagacttgtccttttctacttattaatgaaaaccggtgtgtgcggtttatgctgtaaatacctggagtgttcagaatatgttttgttcgaggttctgtgtactgaagtacggagtactaatgaatttccttgtacataacatcgaataaaatcactgggttttactttggtttctggtcattatagttgtgtgtgttgggggaggggggggtttgcatttgacatcacacgttctgcgttctggtggcaattctgcttatacatctctcaactgtttgtttttttttcattaatttgatctgttgcaaaaccggtcgttgtccccgttcggctgcctaaagccttgttcgtttatgtcggattgcacccgaaatcgttcagctaatcaaaatttatataaattaaag

SEQ ID NO: 96143 - DNA, 1311 bp, Zea Mays
tacacaatgaaggaccaacgtgcaaaacacagttccatccttatccgttctactttgtcacttgccgacccctctgctttatataagctcgaaatttcgctgacgcgaaaaaaaatcaactgattcgctgaaaaacggagaatcgaaagcgaatgctgtctcccaccacactgcggccgctggttccggcggcggcgccagcgcaccttaccgcctgcttcttgcccgcgtcggggcggcgtgcgccggcggcggcggtgcgcgcggtgcggaactacgactccatcccgaagcgggagcccttcacctccaaccgcagcaccctcgacgagttcctccggctggacaagccgctcgtccagcgtaccaaggaccagatcacagattattgcatgaccgtcgaaggtgacgaatgttgcagctgttgggatgcttactttgaactgaataaacttgagcgagagctgcccaaagaggaaatctcaaggatggtgaaggactcagagggtgacgtgaggtacctgatcgagagcatccatcatcgctcagatttgcggaagaagatagcagagaaatctcgtaattcagtaccatcaggctcccaggggcaaactgcaaagccaaggccgttccccgtgcctgatgggataccgaaaacacaggaagagctcaccgaagaagaggaggcgttgatgccagagtctccatacacaaggttgctgagaaggatgggtagataccctgaatggtacaccccacgccctgatcatgagactgactgaatcaagtcatctaccatccaggtgtcccttttggaagttttgcagcatgataatctgaagctgaagctcgttttatggtatgtggtaatattttagtgttgcacctatgctgctatgcagattagacttgtccttttctacttattaatgaaaaccggtgtgtgcggtttatgctgtaaatacctggagtgttcagaatatgttttgttcgaggttctgtgtactgaagtacggagtactaatgaatttccttgtacataacatcgaataaaatcactgggttttactttggtttctggtcattatagttgtgtgtgttgggggaggggggggtttgcatttgacatcacacgttctgcgttctggtggcaattctgcttatacatctctcaactgtttgtttttttttcattaatttgatctgttgcaaaaccggtcgttgtccccgttcggctgcctaaagccttgttcgtttatgtcggattgcacccgaaatcgttcagctaatcaaaatttatataaattaaag

SEQ ID NO: 96144 - DNA, 492 bp, Zea Mays
atggatacataccaaagtaaattgattcgaaagcgtacatctggttatatatatatcacggtttctgaagcagactgcggcccggggcgacagccgacagtggcaggcccacgcaccctactcggactcctcgacggcggcctccacccggagcagcacgaacccgacggcgacgccgacgagcacgaggccgttcatggtggcggcgatcctgaagatctcggcggcgtcgttcatctgggcgccgaacgcgccgccgcgccgcttcctgcccgcggggctgagcgacgccacgaccttggcgaaggagtagtcggcggtcttgcgcaccccgagcatgttcaccttgttgagccccttgaggccgctgtaggcgttcatgccctccacgtacgtgacgccgccggaccgcttcttggccgccggggccgccagcgacgggaccgttgccacggcgaacgacgacgccatcccctgcgatgggtggactga

SEQ ID NO: 96145 - DNA, 1258 bp, Zea Mays
caggcccttagacttactggttactgtcagcggtatctgaaatctgacaagatcttattttgatagtttctctgcataaattagtggagaaatgtgagatttaggtcctttctcagtgtatgatgactccgttgttacttatcatcaaaagctggttgttttggggtttttcaggttgggcttttgctgattcagttttgcaccgactggcacctctctggattggggcaagagggcttgaatttacatgggagtacatatttcaaggacttgaagcgaatgctaatcttgtgatgaccctctcccttgctgcattggggtccttgatgtggcttaggaagaacaagcctaggactttggttccaataatttatgcatgtgctctgctcttggcaacaatgccatctatcaccagctacttgaggaggtcattggagtggcagacaccaaaggtggttggcttcgagctcttctcctcccttgttatggctttcatcagctggcagctgttctcggcttgtcagagaccgatgtaacaagacatccataccactgccaattttacgtgcaatttgaagctcctgagtacgtcagaagaattaggaagatcctttgaactttgagctacaactcttcttcttggcgttcggttacagaacattttacttagaacatctgttgtaacttgtgagctgtagagcagaaacacatgcctgaaatgagttattctataacagatgctcatgtaggcgtttgatctgaaacatttgtttattattattgcggtgtgcatttcagatgctctctttaaagtcgcatcatctagcgtatagatcatgtcccagagaccgttttttttttaaattgaccttttttgtcaaaaatattcatatataccctttgcatccttggatcataggtctcggtccgtatcctttgcgtggtgacggacatgacgttgacgtggcatattttggtgttaaccatgtaggcattgccaggcttagcgttgacctttagaattgtcgtgttgtagcgtgtaaaagttgcttgtagcctgtgtaaacgcatgtataatatatattaatgcatcatgagagcatgtccaagagactatttttgacattgtatttgactttatttacctcttaataaagattaaactctataaatagcatctcactctaactctaatagataagttagtttggttagtgagaaagttaatttaaaaagctagatagcttaacaaattgga

SEQ ID NO: 96146 - DNA, 1337 bp, Zea Mays
ctatgcttattatcatgataagttcagtgaaccaacggtagttcattgtcctctaatgttgctatatcatattggcagcttgtttgcttggcaacattgctcaaagtacctgagaatgatagctttgacccctatcaggagttaatgaaagtttttattggattcatagatgtagctggactgtattttgctttgacccagctgacccacagaaacatctctcagaatcataagttccaggctgttggtcttggttgggcttttgctgattcagttttgcaccgactggcacctctctggattggggcaagagggcttgaatttacatgggagtacatatttcaaggacttgaagcgaatgctaatcttgtgatgaccctctcccttgctgcattggggtccttgatgtggcttaggaagaacaagcctaggactttggttccaataatttatgcatgtgctctgctcttggcaacaatgccatctatcaccagctacttgaggaggtcattggagtggcagacaccaaaggtggttggcttcgagctcttctcctcccttgttatggctttcatcagctggcagctgttctcggcttgtcagagaccgatgtaacaagacatccataccactgccaattttacgtgcaatttgaagctcctgagtacgtcagaagaattaggaagatcctttgaactttgagctacaactcttcttcttggcgttcggttacagaacattttacttagaacatctgttgtaacttgtgagctgtagagcagaaacacatgcctgaaatgagttattctataacagatgctcatgtaggcgtttgatctgaaacatttgtttattattattgcggtgtgcatttcagatgctctctttaaagtcgcatcatctagcgtatagatcatgtcccagagaccgttttttttttaaattgaccttttttgtcaaaaatattcatatataccctttgcatccttggatcataggtctcggtccgtatcctttgcgtggtgacggacatgacgttgacgtggcatattttggtgttaaccatgtaggcattgccaggcttagcgttgacctttagaattgtcgtgttgtagcgtgtaaaagttgcttgtagcctgtgtaaacgcatgtataatatatattaatgcatcatgagagcatgtccaagagactatttttgacattgtatttgactttatttacctcttaataaagattaaactctataaatagcatctcactctaactctaatagataagttagtttggttagtgagaaagttaatttaaaaagctagatagcttaacaaattgga

SEQ ID NO: 96147 - DNA, 1588 bp, Zea Mays
gaaaaagcctagttcgcgttactcgacacacctaggaccgtgtccgactcgagcccaaaccgcgtcacccactcaccccctcccccaatcgtctcgctcgcaagtcgcatcgcacgtacggtctcaggcgcatcggcctcgccgctgcacaacgccggagacgatacgacggcggctacgggatgacggtcttccacttcctcaactgcgccttcctcaccttcgggcctcacgtcgtctactactccgccacgcccctgtcagagtatgatacaatcggcacttctataaaagcagctgctgtttatcttggaactgcgcttgtaaagcttgtttgcttggcaacattgctcaaagtacctgagaatgatagctttgacccctatcaggagttaatgaaagtttttattggattcatagatgtagctggactgtattttgctttgacccagctgacccacagaaacatctctcagaatcataagttccaggctgttggtcttggttgggcttttgctgattcagttttgcaccgactggcacctctctggattggggcaagagggcttgaatttacatgggagtacatatttcaaggacttgaagcgaatgctaatcttgtgatgaccctctcccttgctgcattggggtccttgatgtggcttaggaagaacaagcctaggactttggttccaataatttatgcatgtgctctgctcttggcaacaatgccatctatcaccagctacttgaggaggtcattggagtggcagacaccaaaggtggttggcttcgagctcttctcctcccttgttatggctttcatcagctggcagctgttctcggcttgtcagagaccgatgtaacaagacatccataccactgccaattttacgtgcaatttgaagctcctgagtacgtcagaagaattaggaagatcctttgaactttgagctacaactcttcttcttggcgttcggttacagaacattttacttagaacatctgttgtaacttgtgagctgtagagcagaaacacatgcctgaaatgagttattctataacagatgctcatgtaggcgtttgatctgaaacatttgtttattattattgcggtgtgcatttcagatgctctctttaaagtcgcatcatctagcgtatagatcatgtcccagagaccgttttttttttaaattgaccttttttgtcaaaaatattcatatataccctttgcatccttggatcataggtctcggtccgtatcctttgcgtggtgacggacatgacgttgacgtggcatattttggtgttaaccatgtaggcattgccaggcttagcgttgacctttagaattgtcgtgttgtagcgtgtaaaagttgcttgtagcctgtgtaaacgcatgtataatatatattaatgcatcatgagagcatgtccaagagactatttttgacattgtatttgactttatttacctcttaataaagattaaactctataaatagcatctcactctaactctaatagataagttagtttggttagtgagaaagttaatttaaaaagctagatagcttaacaaattgga

SEQ ID NO: 96148 - DNA, 1725 bp, Zea Mays
gaaaaagcctagttcgcgttactcgacacacctaggaccgtgtccgactcgagcccaaaccgcgtcacccactcaccccctcccccaatcgtctcgctcgcaagtcgcatcgcacgtacggtctcaggcgcatcggcctcgccgctgcacaacgccggagacgatacgacggcggctacgggatgacggtcttccacttcctcaactgcgccttcctcaccttcgggcctcacgtcgtctactactccgccacgcccctgtcagagtatgatacaatcggcacttctataaaagcagctgctgtttatcttggaactgcgcttgtaaagcttgtttgcttggcaacattgctcaaagtacctgagaatgatagctttgacccctatcaggagttaatgaaagtttttattggattcatagatgtagctggactgtattttgctttgacccagctgacccacagaaacatctctcagaatcataagttccaggctgttggtcttggttgggcttttgctgattcagttttgcaccgactggcacctctctggattggggcaagagggcttgaatttacatgggagtacatatttcaaggacttgaagcgaatgctaatcttgtatgcactcaatactatgcgaaaatataatgccagattcgttcatttgatgaaatcaacttctactgctgcaactcatgatgtttatttaacatatttgtcaacaagaagaatgctgatttatgatttctctacaggtgatgaccctctcccttgctgcattggggtccttgatgtggcttaggaagaacaagcctaggactttggttccaataatttatgcatgtgctctgctcttggcaacaatgccatctatcaccagctacttgaggaggtcattggagtggcagacaccaaaggtggttggcttcgagctcttctcctcccttgttatggctttcatcagctggcagctgttctcggcttgtcagagaccgatgtaacaagacatccataccactgccaattttacgtgcaatttgaagctcctgagtacgtcagaagaattaggaagatcctttgaactttgagctacaactcttcttcttggcgttcggttacagaacattttacttagaacatctgttgtaacttgtgagctgtagagcagaaacacatgcctgaaatgagttattctataacagatgctcatgtaggcgtttgatctgaaacatttgtttattattattgcggtgtgcatttcagatgctctctttaaagtcgcatcatctagcgtatagatcatgtcccagagaccgttttttttttaaattgaccttttttgtcaaaaatattcatatataccctttgcatccttggatcataggtctcggtccgtatcctttgcgtggtgacggacatgacgttgacgtggcatattttggtgttaaccatgtaggcattgccaggcttagcgttgacctttagaattgtcgtgttgtagcgtgtaaaagttgcttgtagcctgtgtaaacgcatgtataatatatattaatgcatcatgagagcatgtccaagagactatttttgacattgtatttgactttatttacctcttaataaagattaaactctataaatagcatctcactctaactctaatagataagttagtttggttagtgagaaagttaatttaaaaagctagatagcttaacaaattgga

SEQ ID NO: 96149 - DNA, 936 bp, Zea Mays
gaaaaagcctagttcgcgttactcgacacacctaggaccgtgtccgactcgagcccaaaccgcgtcacccactcaccccctcccccaatcgtctcgctcgcaagtcgcatcgcacgtacggtctcaggcgcatcggcctcgccgctgcacaacgccggagacgatacgacggcggctacgggatgacggtcttccacttcctcaactgcgccttcctcaccttcgggcctcacgtcgtctactactccgccacgcccctgtcagagtatgatacaatcggcacttctataaaagcagctgctgtttatcttggaactgcgcttgtaaaggtcagcaaacagtccaggattcttatgtactgtgaaatttacagacgtaaagggatacatctgctgcaaaatcaattaggtgcaagtttgggagaactaatatttttatgtgggcatcaaataacatgaaaaattccagaaggaaaaaggaaattagatgttgcctctcgattattgacttgttcaatatagattggtaaactccaaattttgtatgtacactagtattttgatgtggtatgcctaccttttggatttcttttggcattattttggtgcacacctgctttgtcattttccagtgagaagcatggatgtttagccaaataatctatcattaatcaatctcttacccattcatttttttttcttgtttgattgtgttctcaatagtcaataccttgttatgcctaccttttctgattaacacttcatgctcttttcagtagttttttctattttttaaccttaatatattctgcaacctatatacattacatccttttgatttttacagacacacttttgccttgtgcttaacatgacacaaaatgaacagatgtttctttgttttttttaaataagttattcagcctttccctgattt

SEQ ID NO: 96150 - DNA, 108 bp, Zea Mays
atggccttcttagacgactcaagtggtgctctggagttcgatgtcgcgcaccatggagttgcaaagcgccggagttcgacgctgcctattcgctgtatcgttttctaa

SEQ ID NO: 96151 - DNA, 1983 bp, Zea Mays
actaccttctgctcctccccacccgcttttaaaaacgcagtcgaggctcagtactgacacgctcgccttattcataaccacaccggcaaagcgccactgcacacgtcactcgctgtccgttctagcataccgcaccacacttcggcgccggtccgcgagcagatagatcaacagatggccacggcgacctacctcccctcctccttctccttctcctcgccgccgccgccgccgtcatcacgcgcccgcctgcggcggcagacgaccagggcgggcgcgtcggcggcgacggaccgcccgcgcgaggtgctgtccccgaagcgccggctcccgctgcgggaggtgccgggtgactacggcccgccggtgctgggcgcggtccgcgaccggttcgagtacttctacgggccgggcggccgcgacggcttcttcgcctcccgcgtgcgcgcgcacggctccaccgtggtgcggctcaacatgccgccgggccccttcgtggcgcgcgacccgcgcgtggtggcgctcctggacgccgcctccttcccggtgctcttcgacacctcgctcgtcgacaagacggacctgttcacgggcaccttcatgccctccaccgacctcaccggcggctaccgcgtgctctcgtacctcgaccccgccgagcccagccacggcccgctcaaggcgctcctcttctacctcctctcgcaccgccggcagcacgtgatccccaagttccgcgaggtgtacggcgacctcttcggggtcgtggagaacgagctcgcccgggtcggcaaggccgacttcggccaccacaacgacgccgccgccttctccttcctctgccaggcgctgctggggcgcgaccccgccgagtccgcgctccagggcgacgggcccaagctgatcaccaagtgggtgctgttccagctcagcccgctgctcagcctcggcctgcccaagcacctcgaggactccctgctccactcgttccgcctcccgccggcgctggtcaggaaggactacggccggctcgccgacttcttccgcgacgcggccaggagcgtggtcgacgagggcgagcgcctcggcattgcgcgggaggaggcggtgcacaacatcctcttcgccacgtgcttcaactccttcggcggcatgaaaatcctgttcccgtcgctcgtcaagtggctgggccgcgccggcgcgcgcgcgcacggccggctggccacggaggtgcgcgacgccgtgcgcgcccacgccggcgaggtcaccatgaaggcgctggcggagatgccgctggtggagtcggccgtgtacgaggcgctgcgcatcgagccccccgtggccatgcagtacggccgcgccaagcgggacatggtggtggagagccacgactacggcttcgaggtgcgcgagggcgagatgctcttcggctaccagcccatggccaccaaggacccgcgcgtcttcgcgcgcgccgaggagtacgtgcccgacaggttcctcggggaggacggcgcgcagctgctccgccacgtcgtctggtccaacgggcccgagacggcgtcgcccacgctgcaggacaagcagtgcgccggcaaggacttcgtcgtgctcatcgcgcgccttctcgtcgccgagctcttcctccgctacgactccttcgacgtccaggtcggcgcctccgcgctggggtcgtcggtcaccatcacctcgctcaagaaagccaccttctgagttatgagctctgatcgaccgtccgtcaaagttgctagaggcgggcacgtgcaccaccgaatccctctcagaactttttttttcttagtgctatgctactgtgcgatcgtcaggtataacaaaatgtatattcttaaggggtgtttggtttgcccctgctaaaatttagcccctatcacatcgaatgtttaaacctccgttcagggtattaaatgtagtcggattataaaactaattttctctcttttg

SEQ ID NO: 96152 - DNA, 1077 bp, Zea Mays
cccccccgccatccttcaccggagtccgatgctggtcccgtccgtcctcttcgctccacccccgcccccggtggggcctgcgccggccaaggaccctcgcctgcgtcgtgccgcccgactccgcggagccacagacgggtgagcaagatgcgaaagttgagtctgccgaagaagaggctcggactagtataccccaggatgctgagcttccagctctcccaaacaaggatctcaacagaagggtagcactactgtctactcttgggggctggggcggtagctctctttgcatcccagaggctcaatcttagcgagatatctcttaaagatgttgcagccaatgcggttccatatgaagagggaccgtgtcaatttcgtaatgctgaatgttgacagcacaaagtgggaacaggagctcgacgagatcggggtggaaggcattccccactttgcctttctggataaggaaggaaatgaggaaggcaatgttgttgggagacttccaaagcagtatttccttgacaacgtggttgcgctcgcttctggtaatcccagtgtacccgatgcacgagtggtcggtcagttctcgagcgctgagtctaggaaagttcaccaagttgctgatgccaggagtcatggctagcagttgtttatgtgggggcagcagtggttctagtttaactggcaagaccatgtgacaggagagatggaaggctatactatagtgtattcaatcttctcggtatcgagcatgcgggcgctggaaagagctgttagattccacagatcacagaagaaaagggcgtgatatgctgtgcatgtgcgtgtggattccgggtccactcccatcgtcggcgcgggttcgtcagcgacactggaacggttgcatgctgtacggcaaatgcagagatgctgtatgtttttttagacacagcagggtgtgggtggctcacgaaagaagcttttgcttgtattcgttgctcgtgtaacacatgttcacgctgcccttttcaagaattcaaggtgccgtttggttcacataattgtaacgtaatgggtaacggataacgttaaatc

SEQ ID NO: 96153 - DNA, 268 bp, Zea Mays
ctcgttgttgcggattgtccgtcgtccacctgactgccgccccgccccggccaacgggccaagccatcgctcgcggcttgtggtctcacatggacacgggagcaggcaagcagcctgcagcatagggcaacccttctccagttctcccccgcctccgggtctgactgactgccgcgagccgagcggaggcaaagctgcaaaatgtagagtgaaagaaatggcgagcgtggcctccccgagttgttccggccttctccccccccccccc

SEQ ID NO: 96154 - DNA, 2394 bp, Zea Mays
gagacttattttataaacttgatctcacaaactttctcttatttggtctctgtatgatggaattatgtcattttataatctctgttcattcagtcaatcgttgtgaactctcttctaatcgctcacttcattggctgtgttgtaccaagacatatttgcatggagtaaacaataacatcagttagccaaatcaaaaaatatattatacagagaggggagacaatcaataaaaaaatcttgaaatttttttgatggatagtttacgtgggtattgttgtaagccgtcacaacgcacgggcaaccgactagtattcacatcaaggacagctaatattttgaccaaaatctcaaggtacctgaacactgaagtagcatactattagcagtccggtgagtgaagctactgatactgaagacgcgggagaagaaaagacgcgtccagtcgtaggcgtcgtccgaacaagcgtgttcatgggccagagtgtgccaaatgagttctagctttaggcgagtcggccaaatgagtgtgggctccgtcccagggtagtataagtactatgagtctgtaataatcaggacaagaagaatttgggtaaaggaatacatctatcgccatcttcctgtcattctctcccacacgctactctcttctctgatcttctctccctcgaatcccagtagcatccagtagctaacatctgatatcagactagcgcaatccgggatcgtcatccgcgttcgattgctgtggtcggaatggaatccgcgatgcatcatattctggaagctttgggtcagatggaggagcgattgacggcaacgctggaaggcagatgcggcgcactcgagcaacgcaacacaacggccatggcgcatctgaggcgcggctgcgtcgggctgggcgatggcgcgtgcgcgtcagtggccacggccatggacaacttctccttcgactcgttcaagggccccaccactaccaccacctccgccgccgccgcgctacagtacgacaacgacgagctgaccggctcctgccccgagtgctcgcgatactgcctcctcctggaccacatggccctcggctacttcccctactctgagctcgccgccgtgcccaccaagtgttcaatgctggtcctcaaccgtggcaccgacgaagggggcaaccttcaattgcaacattccaccacctcacagctgcttaacagcgggtacctgttcgacatccggccggacctggtgaagggcgactctgtcgtgctgccactggaattcgcttccgccgtagagggtcgcgtgttgctgacgacgtggtggccacaggatgcggcgctccagcatgaggcggttggggtgtttctcactcactccaactggaactcctcccaagagagcctctgcgcgggggtgcccatgccgagcgttcgtgctccagcaggtgttgttcagtgctcgtcaacagggccacccgtgttcacgctcatcaacagggccaccggcctcgccatcaagcactcgctcggccagttccatcccatgctggtcccttacaacccggagtacctggataggaccctgacatcaagtttatcacacatgcttccatatgcaaagacattttcagctgctgatggacgtttgccccaatggcgcgcttctgagtatgatgttgaatcaagtttctctagtgatgccatcctaaaggtcagtgcggctgctgaaacagtcgagaaagtttaccaggggcaattggttggtccaaccacatttgcagcaaagttgcagccttatctttggagttttaatcaggtgaaagagaacatcctcttccagcacatcaacgttgcctgtggctactaccctgttggaaaggggtttgtgctggtagctgacaacttgggtgatggcctctttgctgtcagcaatgagtttcactcagtcatcgtcgtatcccagaatattgtggaccatatccggccaaggtttttcactgctaatctcaccaatgcaacctcaattgatgatgcgattgtttggttctgttctgcaaccaatgccacacatgctgtttcgaaactttaccaccgtgaggcgacgaaccagaggttgaaggtggcagaggcggccatgaggagccaggacaagaacgccatcatggcagacagctggtacctcccgcagaacgtcggggagctgtgggatccatggagctggaggaggaggtcgatcaccgcggcgctcgagcaggcggcggcgaacgagactatcgacagggcctgcgagatttcagatttgcacttgaactctttttttttaaaaattttgaattggcacgccgggacgcagaagaagactgtagagagatacgtacgcagtctcctaccacgacgatga

SEQ ID NO: 96155 - DNA, 2327 bp, Zea Mays
agtgggggtggatgcagagcagttggatcggggacacacacagagagagagagggctttgctttccgttttcctctccaaatggctcatttagctcttgaccggaagagtggagggtggtggtgcgggtagagatagagatagatggcactcgtcggtgtggacagtgctgggttccttggagcttagcgtgacttcatcagaagacgccgtttgcctgcctggctgcttggtcttgggtcgacgaccggagccccctccctcgtgctcgccttcttcctccctgtccctgtccctgctaccgagtttccgggcgctgaccactgggcaactacagctgatctctctctgccgcggcatggaggtggaggctctggagaagaaggggcacgcagcttttgccaaggcgatgaaatctttcggctcttccgagcggtacaagcgatccacgagtggcagatattttgaggatatgtatgctacagacgctttgcgttcttcagacaagacgattgttctacctatgccggaagtggtaaaagctaaggtcaaatgtgatatcactaaggaagctcaacccgggaggggagcacaaagcaccttgagaaaggagattcttcagctcgagaagcacctcaaggatcaacaggctgtgcgtggtgcgctggaaaaggctttagggcctaacgctggccctgtcagcttgtcgccagagaatccaatgccacaggcagctaatgaattgatacgggagattgctacattggagctggaggtcaagaacatggagcagtatctcctgacgctgtaccggaaagcatttgagcagcagcaagcgcctgcgttttccccccctgaccgccgggaagcttcgaagccgtcagtgagctcgcgttctgggcagctccgggaaacgcccatggcaacgaagtcttcttgcaagagtagaggggacgcagcactgcggtccagttacccgccagcgcataagaaactgaacgatccattggcggattgctgcacatctgctcgatttgatagagtggttgattcagacgtcctccgctgccagtctgcgttgtcataccgtggagtttgttcgtccaggatattgccttcggaggacgatagtcttgcaagggctcttcgctcgtgccactcgcagcctttctcattcgtagaggaaggagacaccggtgcatcagggatgataagcttagcagagtatctaggaactaatgtagctgaccacatccctgaaactccaaacaacctgtcagaggagatggtgagatgcatggcggggatatactgcagactcgcagatcctcccttggttcaccacggctcgtcctcttcaccgtcgtcgtcgttctcctcgactagcgcaatctctccgcagtatgtgggggacatgtggagtcccaaatacaggagagaggcgactctggactcccgtctgataaacccgttccatgtcgatggtctgaaggagttcagtggaccttacaacacaatggttgaggttcctatgattagccgggacagtcggaggctgaaagaagccgaggacctgctccagacttacaagttgattttgtatcggttggaagccgttgatctgaggagaatgacagatgaagaaaagatcgcattctgggtcaacatacacaatgctttgctgatgcatgcttatctgaagaatggcgtcccacagaacaatctaaagaaaacatccctacttgttaaggctgcctgcaaaatagccggacgcaacatcaacgccgccgtcatccagagcattgttcttgggtgcaacacacactgccccggacaggtgagggtgtacactccgaagcggctgttccaccagctggagtcggccaaggaggagttcatccgggcgacggccggcgtgtggaaggagcagaagctgctgctccccaagctggtggaggcgtacgccaaggacgtgaagctctcgccgcagggcctcgtggacatggtccagcgctacctcccggagagcatgaggatggccgtgcagcggtgccagcacggcggcaggtcgtcgggcaaggtcgtggagtgggtgtcctacaacccggccttccgctacctgctcgccagggacctcgcgttccctcacctcagctgaccgttcgttaatctttagtagtatatgcgtgtgtgccatagggttagaagtagagaagggatcatgtgcagtttttgtgtggtggttgtcaatggcttttgtagatgatgaacaggaaacaggggaagaaatgagagaaagcacgtttgacaatggactctgtttgtgac

SEQ ID NO: 96156 - DNA, 2483 bp, Zea Mays
agtgggggtggatgcagagcagttggatcggggacacacacagagagagagagggctttgctttccgttttcctctccaaatggctcatttagctcttgaccggaagagtggagggtggtggtgcgggtagagatagagatagatggcactcgtcggtgtggacagtgctgggttccttggagcttagcgtgacttcatcagaagacgccgtttgcctgcctggctgcttggtcttgggtcgacgaccggagccccctccctcgtgctcgccttcttcctccctgtccctgtccctgctaccgagtttccgggcgctgaccactgggcaactacagctgatctctttcttgattgactcttagctctgccgcggcatggaggtggaggctctggagaagaaggggcacgcagcttttgccaaggcgatgaaatctttcggctcttccgagcggtacaagcgatccacgagtggcagatattttgaggatatgtatgctacagacgctttgcgttcttcagacaagacgattgttctacctatgccggaagtggtaaaagctaaggtcaaatgtgatatcactaaggaagctcaacccgggaggggagcacaaagcaccttgagaaaggagattcttcagctcgagaagcacctcaaggatcaacaggctgtgcgtggtgcgctggaaaaggctttagggcctaacgctggccctgtcagcttgtcgccagagaatccaatgccacaggcagctaatgaattgatacgggagattgctacattggagctggaggtcaagaacatggagcagtatctcctgacgctgtaccggaaagcatttgagcagcagcaagcgcctgcgttttccccccctgaccgccgggaagcttcgaagccgtcagtgagctcgcgttctgggcagctccgggaaacgcccatggcaacgaagtcttcttgcaagagtagaggggacgcagcactgcggtccagttacccgccagcgcataagaaactgaacgatccattggcggattgctgcacatctgctcgatttgatagagtggttgattcagacgtcctccgctgccagtctgcgttgtcataccgtggagtttgttcgtccaggatattgccttcggaggacgatagtcttgcaagggctcttcgctcgtgccactcgcagcctttctcattcgtagaggaaggagacaccggtgcatcagggatgataagcttagcagagtatctaggaactaatgtagctgaccacatccctgaaactccaaacaacctgtcagaggagatggtgagatgcatggcggggatatactgcagactcgcagatcctcccttggttcaccacggctcgtcctcttcaccgtcgtcgtcgttctcctcgactagcgcaatctctccgcagtatgtgggggacatgtggagtcccaaatacaggagagaggcgactctggactcccgtctgataaacccgttccatgtcgatggtctgaaggagttcagtggaccttacaacacaatggttgaggttcctatgattagccgggacagtcggaggctgaaagaagccgaggacctgctccagacttacaagttgattttgtatcggttggaagccgttgatctgaggagaatgacagatgaagaaaagatcgcattctgggtcaacatacacaatgctttgctgatgcatgcttatctgaagaatggcgtcccacagaacaatctaaagaaaacatccctacttgttaaggctgcctgcaaaatagccggacgcaacatcaacgccgccgtcatccagagcattgttcttgggtgcaacacacactgccccggacagtggctacggacgctgctttaccccaggatcaaaagcaaggtgagcaaagcggggcatgagtggcgggcctttgccgttgcgcaaccggagcctcttttacgctttgcgctttgttccggcagccattctgatcccgcggtgagggtgtacactccgaagcggctgttccaccagctggagtcggccaaggaggagttcatccgggcgacggccggcgtgtggaaggagcagaagctgctgctccccaagctggtggaggcgtacgccaaggacgtgaagctctcgccgcagggcctcgtggacatggtccagcgctacctcccggagagcatgaggatggccgtgcagcggtgccagcacggcggcaggtcgtcgggcaaggtcgtggagtgggtgtcctacaacccggccttccgctacctgctcgccagggacctcgcgttccctcacctcagctgaccgttcgttaatctttagtagtatatgcgtgtgtgccatagggttagaagtagagaagggatcatgtgcagtttttgtgtggtggttgtcaatggcttttgtagatgatgaacaggaaacaggggaagaaatgagagaaagcacgtttgacaatggactctgtttgtgac
